United States Patent Application Publication US 2026/0022370 A1 - sequence listing, part 8

SEQ ID NO: 42683 - DNA, 525 bp, Mus musculus
  source 1..525: mol_type = other DNA
caaatgcaggttggtagacaatagcggggctatggcagttgggttgtgagctcgggtctccgccacacacacacacacacaccccagccgggctgcgcggtggcgaggcgacgaggcgaggcgacggctgggcggccctgtactgtgggccgccgcgccgccggccgcctcgcctcgtcgcgccgggaaccctcccgcgccaggcccggcaagatggcgggcccggccccatgcgcagccggcccctgccctgcccggcccgggcgctctcgccgacgcgccgcggcccgagacccccaccctgcgcccccggagtgcggcggcgcggccgcgcgggagggccttcgcgggcgggcgggcgggcggccgcgcggggcgggggacgcttaccgtgagcggagcggctcggccggagcgcgggctgtgtacgccgaggccgctccggctcccatcgcggagcggggctgctgggcgccgtgaggggggagggggctgtcgcgagccagggcgcagtgcctcatgggg

SEQ ID NO: 42684 - DNA, 486 bp, Mus musculus
  source 1..486: mol_type = other DNA
ataaaagatatttgatagaaggtagctcatagtagaggccagaagagggcatcagatcccctgaactgtagttgtgtgccaccatggggtgctgcgaaccaattttttttttttttaacaaaatctgacatcgttcaaacacacaaatgatgaagtattcttataaatacatcggcctattcatacaataactgctgagtgcctactctaggcctgaggcggccatgagcgccacggcctagctcagcccggtccccgcgtgtcctcgccggctgctagggcccggccggcccgggccttcgaggtccgcagcacggcgcatatggccgcgctcgcctcccgcgttggcgggaagactgggagcgcggacgcgcgaggccccatgaggcactgcgccctggctcgcgacagccccctcccccctcacggcgcccagcagccccgctccgcgatgggagccggagcggcctcggcgtacacagcccg

SEQ ID NO: 42685 - DNA, 502 bp, Mus musculus
  source 1..502: mol_type = other DNA
tatagtgttactaacacagcctgatctactcttgataatgtagattattaaaaagaaaaaaaaaaacccaaaacattgggtctaatgttacaataatgtagttggttagaagtacatcttcaagatcagcatgtcgaactaagacaaaaatggcttagcatgcttcatgcttatatatggatgctagtttcaccaggcacaagcctcatgttacactaaataataggctttttattgaatcatggagtttctctgtgtagccctggctgtcctggaactcactctgtagaccaggctggcctcgaaatctagtgcagattacctggggcagttataactggaacaagtcctgacatgaagctgatgtggcttcagcagcattgaaacctttaaattttatagagagattcaagttcattaaagttcacagctctcagaacagttttagcagttaacaacaacaaaaagaagctgtttgtctggcagagaaatgaaggttctt

SEQ ID NO: 42686 - DNA, 180 bp, Mus musculus
  source 1..180: mol_type = other DNA
ttgtagaccaggctggcctggaaggcatgcagttgcttatttttctgggggcatagcaaaaaaaaaaaaaaaaaacttaagcatgagatcatttacatctcatgtgagtgggattggcctactcccccttccatctcccgggaggctgcccgagacctgagaactctcgcgggccacggc

SEQ ID NO: 42687 - DNA, 412 bp, Mus musculus
  source 1..412: mol_type = other DNA
aatattttgatgtttactgatttaaatattatacaatgcaccaggtccatgatattccacaagacacaatttttggttttaatgtattagctaaaatttaaagttacacaaacctcctaagtccaagaatgctttgcattatatgcagacagagtttctctgtatagacctggctgtcctggctctgtagaccaggctggcctcgatctcagaaatctgcctattatcattattgttactaatgactagaccacagtgggtggtgccatccctgtagtagggggccctgctgcccgactgaggatggtagaggggcaccatccctcagtccactccagaccgcagagattaagggcaaagcgtccgaacttcgcgagcgtgccagccaatgggaggccgcgtccctcttggg

SEQ ID NO: 42688 - DNA, 605 bp, Mus musculus
  source 1..605: mol_type = other DNA
gccatcgctgctggaggggctcgagtgagtcgctttctccggccgcctgagggacatccccggggagaccgcgcggctcctcgcggctggccccgcgcgtcaccgcggcagaggcatggcggcgcccctcagccccccgtcagcggccggggctggggggcgtctgaagaacgaggtccgtggtcgggcgccccctcggccccaaaatccaacccgacgggtctctcggggggcctgcctccccggccgccctcccccgggggcctggcgcctccgagctcccccacgccgctcgctcgctcgctcccggccccgccgccgccgcggccactgctgccctgccagcccggagcagcccagcgcgcgcagccgcactgcggcccggcgcagacggcacaacacctaccgcgcggccggggggcgtggacgcgcgtgtgcgggcgcggcgcgggggccgcaggggggcgcggagcgcgcggggcggagcggagcggctacgggccgcgggcccaggaagccgcggcgggggccccgagggagcggtcgggtggctgcggcggcctcgcgtgacggcggcaggtggacctgtgccaccgtgcggcgga

SEQ ID NO: 42689 - DNA, 379 bp, Mus musculus
  source 1..379: mol_type = other DNA
ttctgctcttctaagaggaatgatttgttggaggcagggagtctcactctcagccagcaaagctgtggaggggccttggctgccagggaccctgacaagccgcgacttgaatttggctcgctgcgctagctcgtcgaaaagctctcacctgctccagctcagtccggtggtccgccgcacggtggcacaggtccacctgccgccgtcacgcgaggccgccgcagccacccgaccgctccctcggggcccccgccgcggcttcctgggcccgcggcccgtagccgctccgctccgccccgcgcgctccgcgcccccctgcggcccccgcgccgcgcccgcacacgcgcgtccacgccccccggccgcgcggtaggtgttg

SEQ ID NO: 42690 - DNA, 669 bp, Mus musculus
  source 1..669: mol_type = other DNA
tgttacatctgtcctaacacaaatgataaaatgtggattacatattaacagaagtctgacagctaatatgaatgaaatggattctgccaaaggcaattaaatatttcgtaaacaaccaattgctcacacctatcaacatttttcaaacggtgactagtttagagttcagaattagtttaattctcttggggaaaactaaaataagatctgtaaaaaattttatttatttatttatgtattaggtagaacaatttgctgaaagtctaatttctgcagtattttcccactatagaaaaacatgctatgcttttggcctgtaataggctagcctgtgagccccgaccagccatgtctcctcgctgccgcgctgtcggcggaggctcagctatgcaggtttggatggccgactccgccagcctagtggctggcgggtcctatggcgggcggcttccgatcggccaggattaggttgggggctagctaaaacgcctaatctgtaggcgacaggctcgcgtggcgggctcccagggagacctgttgttcgagcaaaaccgcaaggtagtggctttgcggaagagccacgtttctcggccaccccacccccgcctcctccgggggctgcggggcctccgccgccaacctcgcccgccctccccccacccccgcgcg

SEQ ID NO: 42691 - DNA, 440 bp, Mus musculus
  source 1..440: mol_type = other DNA
taattaaagttagctttgatttagatcgggattagcaaacgctaatccacgtgtaattaattttctgagtttagttctcacattaaaaacttaattagcttaactgctaattttagggctctctgatgcctccgggggccctgaacagggcctgggctggtgggagaagtctccgggcagaatcttcaactggcccgcaggagggagaagggccccggggggctggccgcggccaggaggattggcctttgtggcccggtggccggccgtggcgcgcaggccgaggggcgggggcttgacccccaggtgcattgtccagcggggccctccccctgtccccggggtcgcccaggcgatctcagcgtgtccctccgccagcagcgccgacctcgccgtgcggggcccaggggccagatgtagaaagtagtccccggccggcc

SEQ ID NO: 42692 - DNA, 617 bp, Mus musculus
  source 1..617: mol_type = other DNA
gaaaactaaaataagatctgtaaaaaattttatttatttatttatgtattaggtagaacaatttgctgaaagtctaatttctgcagtattttcccactatagaaaaacatgctatgcttttggcctgtaataggctagcctgtgagccccgaccagccatgtctcctcgctgccgcgctgtcggcggaggctcagctatgcaggtttggatggccgactccgccagcctagtggctggcgggtcctatggcgggcggcttccgatcggccaggattaggttgggggctagctaaaacgcctaatctgtaggcgacaggctcgcgtggcgggctcccagggagacctgttgttcgagcaaaaccgcaaggtagtggctttgcggaagagccacgtttctcggccaccccacccccgcctcctccgggggctgcggggcctccgccgccaacctcgcccgccctccccccacccccgcgcgcgcgctgccgcccccgccgcgggccccgcgacgcgcgctccggacgagcagcctcgcgcgcagccgcagagcgggtcccgccccttctcgccgcgcgcccctgcaccccagcgcgctcccggagtgggcctcctccgc

SEQ ID NO: 42693 - DNA, 388 bp, Mus musculus
  source 1..388: mol_type = other DNA
ttgtggtccatcattgaaggattttaggttttgcaggtacctggaggcagaagctactgtagagcccacttactggctcgtcattcattgcttgctcagcctgccttatgacaatagctgtgtcaagttcacatacagacattctgtcctggaactcgccgcctggcctgaaatgaatccagaatacctacccttttttgatttaaacgatttataatctgtaggttaagagtgcaacagtgtagtccacagcttgcacttgagaataagttacagaatttgtgccattttctgctgaatactttgttattcatcactttagaaagtataatatttttattattttgttgagaatttcacaacaatgtatttatttttttaaattatg

SEQ ID NO: 42694 - DNA, 619 bp, Mus musculus
  source 1..619: mol_type = other DNA
tgcctcggttgacactctcctcagattggggtgggagaatctccctacaagttgtccgtgtgaggtcacgcactgtgttgaacaactcactctgacaaagtttttctgaacgtggagcccggggtcctggggcctggagggcagagagcagcccagggctcagaggagcgcggagcaggacattgcgcccttgcgccctgcacaggttgcgcagagccagctagtcttgggcctcggagggcagcgggaagcgcggggcccgagctgcggggcgcgggcgggagacgcagggccgggggggccggcgcgaggtgagtgcagggcctggcgcacacggccccggagcgcagcggagccttccagcgaggccgcggccccgaaaccctgtgcgggtgcgggtgagggtgcggggctccgcgcgccctgggtccccgcccccgaagcccggccccgtgctgggctgtggagcacaggcagggcggggaggcctcggggccgcgccacgtcccccgagcggccgctgcaggccgggggcttttgtgtccgcggaggccgcgtctcccccgcgcgcgggcggagcgcagcgcagcgcggcccagggcgcgcgtctcctcccggc

SEQ ID NO: 42695 - DNA, 413 bp, Mus musculus
  source 1..413: mol_type = other DNA
cacggccttcaagtttccagctgaagttccagtttaaatccaatagatcctactatggaattgcagcaaagtttattgtgattgggtctcaaaaatccctgggtaagggaatgtacacaccatcctaggatttgagacaagctccaagctttttcctttccagagctgggaattagcaaaaagtcactttaaactatttgtatgtaattacggtgccctcggaagccagaagagggtatcttggagctcctggcgcttgagagacgccgagcacgggtgctgagcctcgaactcggatcctctgggaagcagtgcctgcgcacggcagtctcctgtttctctcagaggcagcggggacacagatactccagagggtcctactggacccctgacccggaaggaccctaagggcc

SEQ ID NO: 42696 - DNA, 548 bp, Mus musculus
  source 1..548: mol_type = other DNA
catttcaaacattatgtgaccttgctcaactggttgccctttctagggacatgatggttcacccttaaggaaaacaccccagctggttgcggtctagaactcgggcgctgcccctgagtatacttctggggtgcgcatacggatgcagctgcacctgaatcccggggcgcccagctccgagctcgcggggctgcagcctgcgagcccgcgcctaacacctgccaggtcgcgccctccgcccgaggtcgcccgaggaccaaggcatccaccaggagaaagcctcccggcgctgcgcccgaaggtacgagttgcagcccgcggccgcccccgaccgcgccagctgtcaccgtggcggcgtccgcgctccagacgccagtgacgctgctcgcaggcgtccgcagcggggaagcggtggcaggcgcggcgcagcaaggcatgctgggacttgaagttcctcctacgtctcctgccagctcgccgtacggcccgcacccctgaggctaccggaagctgggcggagcgactgcggatctccacaacatccgggc

SEQ ID NO: 42697 - DNA, 397 bp, Mus musculus
  source 1..397: mol_type = other DNA
ggcttgaggttcaatccctagttacagcaacacaaatatcagatctaaatgtgaactagcttttgcccactagacaggtaggggacagaggaacggtaacttccctggacaaaagatcatttgtagtgaggtatttaaacttgtaaatatacggcaaaagcaactctttcctgatagcgagaagtctggctccgtcttccagtgtggcagcccgtctccgtggcaaccggctgcaggcgtgggagcccggatgttgtggagatccgcagtcgctccgcccagcttccggtagcctcaggggtgcgggccgtacggcgagctggcaggagacgtaggaggaacttcaagtcccagcatgccttgctgcgccgcgcctgccaccgcttccccgctgcgg

SEQ ID NO: 42698 - DNA, 495 bp, Mus musculus
  source 1..495: mol_type = other DNA
tgtactgtaaggtaaatttctcaggcataatttaagctcgccgaggaaagaaaagcatgtcttctcctggattatacagttgaccacacaaaagacaatttatgtgtatgggtgttcgtctctgcaatagcacgcatgcctggtcaactttaaatgccttgatgtctggtctacaggccagccacggttatataagactgtggccctgtcataaaaaattgataataaaaattcattgagttataactttttcctattattgtaagaaaacttcccacgcgaggacgtggcgtgagggatgagcaccgcggtcacccgggagctggtcctcagcgatgcactgccctccgagcgcctcctcggcgggcgctgtgcgagaaagaatccagaatctttatttttctggtcagggaggtgctcctgacccacccggagactcatccgcttccggcagcacttcctgccgcggtagtgccggagcagcgaagggacggc

SEQ ID NO: 42699 - DNA, 368 bp, Mus musculus
  source 1..368: mol_type = other DNA
cagcactccactgagctagctgaggcactagctcagtttctattccctagcaatcttttgttaaccactggtgagttgctgactaggtacatgtgatgatgtgacatcaccacacagcagcgaagagactgtgttcagcgagcctgagctcattgccaccacgctgtgtagtcccaggtgccccgagctctgccgtgagcccggcactcaccacggcgcggagagcgtttctcccgagctgccgtggagattgcgggaggccgggttatagtcggcggcctgggactccatcctccccggctacctgcagcggcctaagattgggccccgcgagccgccgtcccttcgctgctccggcactaccgcgg

SEQ ID NO: 42700 - DNA, 224 bp, Mus musculus
  source 1..224: mol_type = other DNA
aagattctgtaccggtccagcagcagagggtcataggctgctccggaccctgccgggtcttagcatgttatgcagtaactgcctgccctaacagtgtcatgcccaagctgtctccagggaggatgcacagaaaagtctccagggcacgcctgtggttctcacacctttcagaagaggaggcggaggtggaggccgctcaggacccgcccccaccgcgctctcct

SEQ ID NO: 42701 - DNA, 237 bp, Mus musculus
  source 1..237: mol_type = other DNA
ataaagacatcctctgtaatttgtaatttgattgtcttatattacaacgaacgaacaaatactaaattgaaatatcctgttgtttacaaatgtgaccttccctctagaaagtaaaagaaattgaccaaaggcatgcaccattgctgcctgaacaggaaaaaaattgctttttaaagtatttggcttgaactcaactcagggataggatgtccccaggtgcagccagtgagtagagct

SEQ ID NO: 42702 - DNA, 367 bp, Mus musculus
  source 1..367: mol_type = other DNA
tcccttggaactggagttacagatggttgtgaactgtcatgtgagttctgggaatcaaatctgggtcctctggaagaacaaccagattttgttttattatatgtaagtacactgtagtttcattcactccagaagagggttgaacttcagaccttcagaagagcagttggggagccatctcaccagccccgggtgaagacaagcctggagtaaagcagactttggtacagcccgtggcaaagcacaagcaccgagatgcagtctatagcctctgcgtctgcgcgggacgctgctgctgctgctgctgctgctgctgctgctgctgctgctgctgctgctgcgcacacggtcagggactcgcttccgg

SEQ ID NO: 42703 - DNA, 439 bp, Mus musculus
  source 1..439: mol_type = other DNA
ttaaagcctacaaattattcccagacttgagcttctttaaggctctattttaagatgcaaaagtaggagtggttactccccccacctcctctacagagcaggagaaagaaaatcctttgagcattcatgtttcaatcctaattattgagggatcaaccttcattgcctccctctttaaaaaaaaagggttctgttgactagacagtggactttgtgtgattccaaacacagtcaatagcatgtgaaataataattattattaaataccatgattaatttaataattatctgttttactaatgcaagtagcaaaattggtcgtgatgaccacatcttagagtggctctatgcagctggcgcagcagagggagcctggactccaagggaggaggctaggagctcaggtctctgctgcaatcggaggatcccgggctgcagc

SEQ ID NO: 42704 - DNA, 411 bp, Mus musculus
  source 1..411: mol_type = other DNA
agatagaagccacgtgggcttggcaagtcccaggtggggtctctcgggagtccctggttttccagagatagatagatagatagatagatagatagatagatagatagatagatagatagatagatatcccaaatggaggcaccatctttaaaataaaagttactgggattctgcagcctgcattgtaggataaagcagactggcggaggcagacatgctgcccagccgccaccacggggcagcccagccgccatacctccctggagtgcccttggggactcccaggactgattttaaaacgcttttttttttaattactaggggaaaaatatacacataagcaaaaacccggcaggcgcgagcgggggcggcgaggctgacatcaacttccggggacaatttgcatagtgc

SEQ ID NO: 42705 - DNA, 388 bp, Mus musculus
  source 1..388: mol_type = other DNA
gcaactaagtcttgagttgttccacactcaggcccctgtgaaaactcacattgaagggagtctcagagaccaggcacatttggacttcctaactttgatgcatacttaggggtcagaactttcctagatctataacctaggactcggtcatcctgggcaggatcccatgtcctgagcacttgagaagccgggttctcctaatccagagacctcatggtttgtaggagcctggagcacagggctttagccaggttgctggcctccctttgctgggtgcagtgtccctggaaagatcggccctggtcagcgaggcagaccagagccagctgggtcagcgccggcctgggcggggcagacagaggccggtgggggcggatccgacctgagg

SEQ ID NO: 42706 - DNA, 474 bp, Mus musculus
  source 1..474: mol_type = other DNA
gcgtccctgcggtccaagccgctcggctcagccgcgtgcactctgccttttctagaaaggctgtggagtttatccaaagtgggagagctatctgatctgagtgctcctcactgagcacagattcctgagtgctcctcggccccgggctcgacctaggccttcagggtatatacacgtcccaagtccccgtaggacaactattagggaataaagcccaatgggcgagtgggctttgggccatccccgccggtaacctgtaccgggaactagcaactcagactcaggggctctggttctcaaacctccaggtcgcactctgcgcgcgtcccgtgcacgtgctcactgatcccgggccattcggcgccgctgagaaagctccgcgctgggaccgagggggcggggcctggaagcgcgcatgcgcgctacgcccggcgggcgtgagggcgggcagcggcagcggcggcggctacggaa

SEQ ID NO: 42707 - DNA, 540 bp, Mus musculus
  source 1..540: mol_type = other DNA
tctgtttgtgtttaaatgatgacacaacatcagaacacgccgtgtcatcgtgtcacattgttatagcacaacaagaaaatgctctagtgcttctgaagcttgggttcttaagtcctagagatgctggaaggtatgattccattgggaaattgcatgcatgagtagaaactataattatcttcccgtctggggtgacatctcccaggtgaccccaatgcacccggagcgcagttccttggctgcttaggcgcgcggtgcaggcagtccctgcgggtccctgggtcctctgagacccttatccgggaagaccggcgcggcggcgttgggcgcgcgcagcctccagcggggacggtggatgcgcgggcgcagcgtctcggcgtctcggcgtctcggcggccgcggggtagatgcgcgctgcgctcggggaggcgtggctcggagcacggagtgtgatgtgagcggccgggcggccccggagggcggcgagcgggcgggccatgggagccgttcccgggtgggttgagccacgcgtgggtcggc

SEQ ID NO: 42708 - DNA, 503 bp, Mus musculus
  source 1..503: mol_type = other DNA
atcttgtgctttacaaaaactgtgggttaaaagtccttcctgttgtgattctcatatgcaaaaagaaaaaaaaaaggttcttaaaaaagcatgtttttttcccaatgaaactgctaatagctgcaacccttgttgctttttttagctacagcaattcttgacatctgtttgtgtttaaatgatgacacaacatcagaacacgccgtgtcatcgtgtcacattgttatagcacaacaagaaaatgctctagtgcttctgaagcttgggttcttaagtcctagagatgctggaaggtatgattccattgggaaattgcatgcatgagtagaaactataattatcttcccgtctggggtgacatctcccaggtgaccccaatgcacccggagcgcagttccttggctgcttaggcgcgcggtgcaggcagtccctgcgggtccctgggtcctctgagacccttatccgggaagaccggcgcggcggcgttgggcgcgcgcagcctc

SEQ ID NO: 42709 - DNA, 292 bp, Mus musculus
  source 1..292: mol_type = other DNA
ctaaacagctttccaagctggagaggtgggtttagccaggtaactttaagataaaagtaaatgaatttaggttgtgtgtcttgtagaccttagggtagaaatttgtacctgccttagaggcactgggactcactgcctgcctgccggtcagtaccactcgggtgagaacctgattcacttgaaatgggaggtaatgagtgtttccccttacttcagagatcaattttatcttacacacttctggtcttttaagacagctggctgagcacagccccgcgtccaatcagctgag

SEQ ID NO: 42710 - DNA, 293 bp, Mus musculus
  source 1..293: mol_type = other DNA
tctctgtgtgtgtgtgtgtgagagagagagagagagagctgggattacagtcctatgccagagggctcattccatatccaatgaaactatataagtctgccttagccccagatttctaagggacatttccttgacttgacagttaagaaaatcattgctttgaaaatcaatgttttgagcgaatggaagctgaattgatttatcagtgatttattggtaaaatattgacttcggaatggtgacattactaaagtaatcacaattcctgtgtaatggtgagcactgtgcgccca

SEQ ID NO: 42711 - DNA, 372 bp, Mus musculus
  source 1..372: mol_type = other DNA
gctgggattacagtcctatgccagagggctcattccatatccaatgaaactatataagtctgccttagccccagatttctaagggacatttccttgacttgacagttaagaaaatcattgctttgaaaatcaatgttttgagcgaatggaagctgaattgatttatcagtgatttattggtaaaatattgacttcggaatggtgacattactaaagtaatcacaattcctgtgtaatggtgagcactgtgcgcccaggccggaggcgcgggtaagggcgcggcgcgggagcctggcgggcctgggctgcgggagctacggcgggcgggagcccggggcccgtgtcgtcacaaggcggcggtagccgccggcc

SEQ ID NO: 42712 - DNA, 544 bp, Mus musculus
  source 1..544: mol_type = other DNA
atatttatagatttaacatttctgctattttacttcataaataacctcagagactcaaaatgtgccaaagtgtgattttgcccattgttcttgttatgatatgataaattctttcctgtaaaatagcattttgaagaatatatactcaaacaagataggtgtttgagaaaatattttcaagggcccccaaaaaaacagcctccaaaacctaaaagtatgtggggtttttttgttttttgtttttttgacatgaacagaatttccccttttgttggtagaaacaggagggtgctgtaattacagggaaataccattatcgatatcaaggtcttctaaattgatttacttagggaaaaagagtctaaggagtttaaaatcatacgtgattttaaataaggaaatcacaacgaacttttagatttttgatagtattaggaaaattctctaaatatagacaaaactaattttgaatgtattatacatgactggaaattgagctgagggtgttatacatgcatcacagctataatagagctatcacatg

SEQ ID NO: 42713 - DNA, 419 bp, Mus musculus
  source 1..419: mol_type = other DNA
gggctgcttagtgagacctgtctcaaaaccatggacacattttaaaaggctaaaaattttaaagagtatttcccaagtctaagatgggccatttccctatgtccttgctcaccaagggtgcaaaccctgagcatccttcattccgggtggtgcagcttccgcactggagttgcaggttctcagaaaggcctttcccgacagggccaggaggagcagccttgaggctgccgggtctacgcgggcactcccaccttcgcgcacactgtggggggccactccgccaaagcaggtttgggatgccagccgcatgggccgaggatgctcggtgcccgccgccgatgggaggcagcgtgagcccagccgggagggatcgcggtggcagcgctcgagcgcagcctcctcccgctcccacaatgcac

SEQ ID NO: 42714 - DNA, 350 bp, Mus musculus
  source 1..350: mol_type = other DNA
agcagatgcgcgcgcgtgcatacacacacacacacacaccacacacacacacacacagagagagagagagagagcagcactggagactgcttctgcagtgttctgttccttcccatcctaaagttcacagaaggaaggggaagtgtgacacctagtgatcatcagaactcatttttaaaagaatttttcgattagtggcctcctgcccaccaagtccagggatgccaagggctgggcggtggggccagcttggtctctgagtctcagttcctccgagcatcgccggttctcagggagggcgcggtaggcggagccagcagagtccgtcaccgctgcggtcgcgtcactgc

SEQ ID NO: 42715 - DNA, 816 bp, Mus musculus
  source 1..816: mol_type = other DNA
gacagcacgggacccagcagccgttcagacgctcgccctgtcgggtccggtggttcagctgaggccggggtgtacccgccagcaggccgcgtgcagctccgaccgcccccgcggcgcgcgcagtcacgggcgttggaaattccggcgcgtgcggctccccggctggcgggggcggggccgccgtggaggtgagggggcgtgcctctgcgaggccccgccttctctccgcgccctctctggcgggtcggggttacatggcggcgactgcggcaaagcgagagcctcggaaacgccgctgccgccagcacagccggagacctgagccgaccttgagggctgtccgcgggccctgcactctgtccgggccggcgcgggagggagcggcagagggcccggcggcggcgccggctcccgcgtccattgtgtgtgaccctccgggcggccgccgctcaacaaagacgcttttgttccgtgtgcccgctcagcccgggcggcgcggccggctgcgagggccaggtccccgcgtggggctggcggcgcggccggcgcgcccctcccacccggcacgcccctcgccgggcagccggccgcaggcatagctggcgggcccccgccgcctgcaccgggctgcgcttcgcgggttcgagtccccgccgcccgcgcccggttccgcgggttcgagtccccgccaacgcgcaggcgagggcggtggtccaggagcgcttgaggcggtggaggcttgccttcctgcccagcctgcccgggtgactcggcctcagctgactccggccgggcaaagtctccggcacgttgcgt

SEQ ID NO: 42716 - DNA, 372 bp, Mus musculus
  source 1..372: mol_type = other DNA
tctacattttaaaagccggtgagaggagacagagacactaggagttctggggctcctgggtcagcctaactcagtgaaccccagatcccagtggctatagtgtactcatataagtaaaataaataaatcttttaaaaaaagaaatagtcttagctgttcaagtacttctaacccaaataaagttcgcaaacatgctgccaggatttttaacccgtattaattttggtgacatcaacaccttttgaatgttaaatattcacatcttactttccatggcatataaaatgttcgcaggacatttgacctgttacctggaccgggccaatggcaacgcgggctgccggcaagcaccagtccgggcgccagagccct

SEQ ID NO: 42717 - DNA, 591 bp, Mus musculus
  source 1..591: mol_type = other DNA
cccaagtctaagatgggccatttccctatgtccttgctcaccaagggtgcaaaccctgagcatccttcattccgggtggtgcagcttccgcactggagttgcaggttctcagaaaggcctttcccgacagggccaggaggagcagccttgaggctgccgggtctacgcgggcactcccaccttcgcgcacactgtggggggccactccgccaaagcaggtttgggatgccagccgcatgggccgaggatgctcggtgcccgccgccgatgggaggcagcgtgagcccagccgggagggatcgcggtggcagcgctcgagcgcagcctcctcccgctcccacaatgcacagggcggcggcggcggcggcggcggcatcgcgcgccgcggaggagacagggagactgaggcggcgacggccgcggaggctggtacccgagtcccccgagcacgcgcctcgggctcacgcggccgccgagccctggaggtgatgactgtcaggctcccgcccgccgctagcgcctgacgcgccccgccccggcccgcccgggcccgcccgccagcttggcccgccctgcccggcccggcccttc

SEQ ID NO: 42718 - DNA, 493 bp, Mus musculus
  source 1..493: mol_type = other DNA
attttaatgtattcaattaccactgatagaaagggctaaccgaaatgcagccaaggattaactgtatcttctaatccttctggtctccaagacagggatcacaggtgagacagggtctattatatagcataggctgtcctggcactacatagactagtttttatatctaagttcctaaatacttaaatttcatctactcaacaagccagccaccctgctgactgagctcggatgcttctagaagcagccaacggaccccggggaccgatcccaggggccttgacagcacgggacccagcagccgttcagacgctcgccctgtcgggtccggtggttcagctgaggccggggtgtacccgccagcaggccgcgtgcagctccgaccgcccccgcggcgcgcgcagtcacgggcgttggaaattccggcgcgtgcggctccccggctggcgggggcggggccgccgtggaggtgagggggcgtgcctctgcgagg

SEQ ID NO: 42719 - DNA, 661 bp, Mus musculus
  source 1..661: mol_type = other DNA
ttttatatctaagttcctaaatacttaaatttcatctactcaacaagccagccaccctgctgactgagctcggatgcttctagaagcagccaacggaccccggggaccgatcccaggggccttgacagcacgggacccagcagccgttcagacgctcgccctgtcgggtccggtggttcagctgaggccggggtgtacccgccagcaggccgcgtgcagctccgaccgcccccgcggcgcgcgcagtcacgggcgttggaaattccggcgcgtgcggctccccggctggcgggggcggggccgccgtggaggtgagggggcgtgcctctgcgaggccccgccttctctccgcgccctctctggcgggtcggggttacatggcggcgactgcggcaaagcgagagcctcggaaacgccgctgccgccagcacagccggagacctgagccgaccttgagggctgtccgcgggccctgcactctgtccgggccggcgcgggagggagcggcagagggcccggcggcggcgccggctcccgcgtccattgtgtgtgaccctccgggcggccgccgctcaacaaagacgcttttgttccgtgtgcccgctcagcccgggcggcgcggccggctgcgagggccaggtccccgcgtggggctggcggc

SEQ ID NO: 42720 - DNA, 256 bp, Mus musculus
  source 1..256: mol_type = other DNA
atgtagaccaggctggcctagacaagacaaggtcctttattggaccctttaagggcaagtaaagatttatttatttattgtatgtaagtacactgtagctgtcttcagacactccagaccactccagacctttggaagagcagtcgggtgctcttaccggcgtgcaccactaactactccatacgtatgtagacatggccgcagctgcgcacagcgtgcgagctacgacacgtcgtgtttggacgggtctggccgt

SEQ ID NO: 42721 - DNA, 823 bp, Mus musculus
  source 1..823: mol_type = other DNA
cgtccggaaaggtgtcaggagccctgtctcaggccggtccccggcacctcgtggaccgccaggcacacgctacgcaacgtgccggagactttgcccggccggagtcagctgaggccgagtcacccgggcaggctgggcaggaaggcaagcctccaccgcctcaagcgctcctggaccaccgccctcgcctgcgcgttggcggggactcgaacccgcggaaccgggcgcgggcggcggggactcgaacccgcgaagcgcagcccggtgcaggcggcgggggcccgccagctatgcctgcggccggctgcccggcgaggggcgtgccgggtgggaggggcgcgccggccgcgccgccagccccacgcggggacctggccctcgcagccggccgcgccgcccgggctgagcgggcacacggaacaaaagcgtctttgttgagcggcggccgcccggagggtcacacacaatggacgcgggagccggcgccgccgccgggccctctgccgctccctcccgcgccggcccggacagagtgcagggcccgcggacagccctcaaggtcggctcaggtctccggctgtgctggcggcagcggcgtttccgaggctctcgctttgccgcagtcgccgccatgtaaccccgacccgccagagagggcgcggagagaaggcggggcctcgcagaggcacgccccctcacctccacggcggccccgcccccgccagccggggagccgcacgcgccggaatttccaacgcccgtgactgcgcgcgccgcgggggcggtcggagctgcacgcggcctgctggcgggtacaccccgg

SEQ ID NO: 42722 - DNA, 288 bp, Mus musculus
  source 1..288: mol_type = other DNA
gagcacttatcctctgagaatgacattgcggaccagccaggacacattgtgaccaggattgctcatgaaatagtgcgatttatgaccttttctgccataaattgctttaaaaagacaaagctgggatctgagattacaggcatgtaacaccacatccaatttatacattatttggaattaaatctaagggattaagaaaagcttatagataggctttctaccttccagagtacatttttcattgtaaaggaccaggtccgtatgtatggagccgtgccccacgagtac

SEQ ID NO: 42723 - DNA, 244 bp, Mus musculus
  source 1..244: mol_type = other DNA
aagtatgtcctctttaggacctacattgttgtaacacttacggcacggcatttgctagaatttcattatttaaaggtaggaactttcaagtgaattaaaaaaaatattaaaatactctcaaccttaagggacaatgtgttctcaagagcaaagtatgctgcttacaactgccatacaattgtttgttcttcactgttctcagtggaaagctaggagtggaaagctacttccattgtagtagaat

SEQ ID NO: 42724 - DNA, 326 bp, Mus musculus
  source 1..326: mol_type = other DNA
tctagaggaagattttggtcatataactcagatctggtccttagggacaaaacctagataaaagaatgtagataataattaaaacttggagcagtgtgaatttgaacttcatccttgtgtggttgggctcagtggcccacagccgtcctgcagagctctggatcttagccaagcctcagaggcagtctggcaagagtcctcacagagaccctttaccaccctgaggcctgaagccagcaagagggtggccttggggagtcatggtgcctcctgttggtcaaacagaaggcagaaagggcagtctgagtcacatacttgtattgctg

SEQ ID NO: 42725 - DNA, 367 bp, Mus musculus
  source 1..367: mol_type = other DNA
ctcaaaagaaagtttctggaaggaaccaaacaagataatattctgtgggagttttaacttccatcagagactgcatccaaagaacagatagaacaccgcatctttaagctgtaaacattttacagggaatgagtctagggcaggcctggtctattcctatacttggcccaaagtgggccttcgctcagctgtccttgtcaacgtgctggcgcacctagattctaccggaggaccctgcgaggccatcgcgtcattgggagacgcagctgcggcccgggcaaagggtcctgtctcggagtggccaccgcgcgccgccagcccaggctgccccgctgcagccgcgcgccccgcgccccgtgccgcgccg

SEQ ID NO: 42726 - DNA, 410 bp, Mus musculus
  source 1..410: mol_type = other DNA
gtctttgtgggcacagcacaagagaactcttctcttctggagggtagtcagctccggtcagtacccctgtaccacccgacagctgccaagcaggctgcccaatgaggaatccgggggtccacatgggtcccaggactcctccgtgggcctctgtcggctcacgggcctcggcgagctcccgcttccgcagggccttctccgacaggacccgcacactgcagtccgggctccttaaccccaccagcacacggacctctggggccgtggagaagccggccgcggagggcggcgcgcgccatgcaggtcccgcagctccccgcctcggcctcgcgcctgccgcccccgcggcacggccagccgcagccccagtgaggaggaagaggcggaggaggaggcgccgcccccttggc

SEQ ID NO: 42727 - DNA, 425 bp, Mus musculus
  source 1..425: mol_type = other DNA
gctgggttctcagcaggctgcagttctgcttaaaatcattaaaagtctttggatagtaaattgtatgcaatgacctcagtcttcttcttgaaagactctcagaacatcaagatccctatttttcctacttggttagaagaaagagaacaaaacagagtgaagttttatgcacaatgtatttgaaataatattcgtaaaggctcctgtggagctgagatgccaacacagatcaataaaggcaggtctttataaggtttgatagaattatatcttttgtttataacagaattttgattatagtagaatataaaggtataacagttacccatgtctccttgacaagttcacgggtagagagggctcccctcccccgctccgttcccgcgggattggagtagcgctgggtcgctgacgccatccggagc

SEQ ID NO: 42728 - DNA, 677 bp, Mus musculus
  source 1..677: mol_type = other DNA
gcagagaaacattgcagacttccaaattttaaaggcattaaccattaaggatgcattttagaaaggtgcacactttctctattctcaaaattcagaaattccacttccaatttgtgtgtaaaacaaactggtgtttatttgtacaacttaaaacaaatcaaagtactgagtgcacttagtaataaatatcttgtagtaagcatgactacaagataatactataaatgagatatttctatttcaactattgatatagtcagaaataaatattatttctgcttaaatcttttctacagataattaagttggagctatctaattcttatctcgaatatatttactaataattcattgtctactttttcttactttaaaatagccagttgtcgttaagaatcaataaatttattccaattttaaaaattgtcttttcagtttttaagaagtaaattttaatgactttcaaaagctagaaataatctcaagtatgactgagtcataccaagttaatttgctacagagacttaatatagaagtgtattaaatgcattccatcaaaaagcctaaaacatttctgggcacgttttcagcctgctgttgtctgtacatgcatgaaaatggaggcttttctggtagcaaaagggttaacttctttttgcttattacaaggagaagcc

SEQ ID NO: 42729 - DNA, 462 bp, Mus musculus
  source 1..462: mol_type = other DNA
ctgattccaaggctatcatataaatccaataatttatatttataatatataaacttatatataaatcaaacatacttatatagaaactaaatatacatttatattataaatattttataaatatatacattaaaatttatttaatttataattacttctaacttctgacaggttgtttttgtttgaatgaaagaaaagcctttatgaatttagttattgctttttttcttaaaaaaacgtttgtgttttttaataccacaaagcgcctcggcaattttaaatagagttttgacataaactttcacagtgccaaccctacaggcttgtgggattcctctcagaggcctgggtcctgcctagagctctgactcagcggagggggggggggagtgccaccctgcctcaaggatctggctctcagcgcgggactcaggtgcccgctacacccctgcctgggcgttg

SEQ ID NO: 42730 - DNA, 409 bp, Mus musculus
  source 1..409: mol_type = other DNA
atgtattccttttagggccaaacatcatgcagtgtctgtgaagggatgcattaattaatctattgctggaataactcattaggagtcagtttaatactatgtccacgtagcagaatagtcttgataaggagtggcaggcaatgccttaacaattcagccattgccaacttggcacatgataaatactgcgaggctatattaaatattaaaatatttgcataggcctggcccaggctagagtgggtcatgattacttttacgtttgcatcactaagacaagcgaagaaatgtatagtatagaaattgcacgctggagctgaggtcaaggaggatctccgggcgcaaggctctggaggcattggctcaggaactttcccggctccagagcccctagtcgcggcggcgcagc

SEQ ID NO: 42731 - DNA, 430 bp, Mus musculus
  source 1..430: mol_type = other DNA
gtttgttcttcctgcaggtccctcagacaaggagaacaggggctatcctagtctgtttggcctgacacccagaagggggcttcccctctcaggggaatggggaggttgtaaagtgaataaatacatttaattaaacaaatcaaatttcagtcagtcgaaaatccatacccaagctgctggtttttgaaattcaaccagccagggggcctgccctgcgggctgtgggctacgggctgcgggtcagccctgctccaaagcttggggctccagagtgcatcctggagcccaagagccaggcggaaagcagcgcgcctccagcgtcccagcccggcgggcgaggaggttctcgccgccccctggtgacacgctcggcaccgcccgggaggtgcggccagctcccgcccgccgcccgcgcaggtgcgcctccctc

SEQ ID NO: 42732 - DNA, 334 bp, Mus musculus
  source 1..334: mol_type = other DNA
caaaggcagttactatagttaatgaataaatacagtctggcaagatccactgtttacggctcccgttcccccattaactctagggattgctgactagggctttggcaagcctaaacaaaatgagtagccatgtttcaggatagatttagcaacctagatgttctgaaaaacaagcaacatgcagcatttatacttaaggatgatcacatacattttgtaacattgtatgagataaatattttttaaactttagataaattataatagtctatttctaacacttgtattatcttgaaacactgaaagttttttgattaatgtttaaccataaaag

SEQ ID NO: 42733 - DNA, 334 bp, Mus musculus
  source 1..334: mol_type = other DNA
cttttatggttaaacattaatcaaaaaactttcagtgtttcaagataatacaagtgttagaaatagactattataatttatctaaagtttaaaaaatatttatctcatacaatgttacaaaatgtatgtgatcatccttaagtataaatgctgcatgttgcttgtttttcagaacatctaggttgctaaatctatcctgaaacatggctactcattttgtttaggcttgccaaagccctagtcagcaatccctagagttaatgggggaacgggagccgtaaacagtggatcttgccagactgtatttattcattaactatagtaactgcctttg

SEQ ID NO: 42734 - DNA, 416 bp, Mus musculus
  source 1..416: mol_type = other DNA
acatatttcctgaagtgtttcttcatcaatgaaactcatatccatgtattctaaaagacactttcatttcctttttatctttttttttttgcctcaagacacagaaggagttagttaatcattacgttacacaattaattttctttaagacctacaacactttgtaaagaactctgaaaacatttgttgcattggatgaaataagcaacattatttttgtttcttttttatgtacagagggaagcacatacgtctatctctgaaagcgctaacttagcccagttatagtcattgtactatcatcacatttgtccttttacttgatttcttctccagcagctattgatgatagaaaccaaacttgatggggtttgaacatctataaatggaaacactagctaaccagcagggcttct

SEQ ID NO: 42735 - DNA, 517 bp, Mus musculus
  source 1..517: mol_type = other DNA
actcttaaaacagtctattagctattctccccgccccaaactacagcgtgggtttggctaaggtggagctaatgctgaagcttctcggagcatcttttagaagatttttgaagacggacattggcaccaggaagttggtgacacgtacatctcagataagtcctgctcaccaaagatgctctcaggtcgtagggcctgccagcgagtgtgcgcagacagtgtcggaaagccagaaccgactccttcattaccccgcgctcaaggtactcggcggggcggtacttcctgaccccggaagatgaaaactccgaagttgttctggggcgcggctccctccagaatcgcacactgtgcgactccccgcggaggagaggaccgcaggagcaccgtctcccgaccctcccgggagccgggtctccaggaaaacccggagcggagcatccccggccgggacacgccctctgcgtgccgccgagtgcgcatgcccagtgcgcggcggccgcgagtaggaagcgga

SEQ ID NO: 42736 - DNA, 408 bp, Mus musculus
  source 1..408: mol_type = other DNA
tggtgtgtctaaagacagctacagtgtacctgacctttagaaagtcatttcgtactccaggtgcctataaaatgtcaattacaatcatttgaattgcttttctttctgcacaagtgtgtttatcacagaccctcctgtgagcctggctttgttaaactatgaaatgtcaacgttagcagaatctcctgtcctggtaaacatgtctcctcctctacagaacagtctatttataaccagtctcctcacaggacctgaggtgaaacttccatcaattgcaattgaatttcctcgcatccattgagtccatgacttaaaaacacttccccagcgttgccctcgagctgaagaccaaagagggagaggagggctcaggctgctccaggccagcacgcaggctcagcctgtttg

SEQ ID NO: 42737 - DNA, 473 bp, Mus musculus
  source 1..473: mol_type = other DNA
tcagggtaaagctctcggaccttcggttctgaaggtggggaaacttctgaagaaacttctcacagacctcttttgcacagtgagtgatctctgtgccgaccagagatcccattggcaaatagttaacgtacagggtttacaatgatgatatacatatatctaatccctgcccatacatggacgcatgtaacaactctatgcatatccatgccatgtggagtcgtacaacatttattaaaaagtattactcagccaggcatgcctttaatcccatgagttcaaggccagcctggactacagagtgagttccaggacagccagggctagagaacagtccaggacagccagggctaaaagaaaaaaaaaaaaaggattactcttaactttataccctttctaccagtacagagttgaacagatattcagatatttcagctctctctctctcccccgccgcagcctataaaatctgg

SEQ ID NO: 42738 - DNA, 509 bp, Mus musculus
  source 1..509: mol_type = other DNA
acagggtttacaatgatgatatacatatatctaatccctgcccatacatggacgcatgtaacaactctatgcatatccatgccatgtggagtcgtacaacatttattaaaaagtattactcagccaggcatgcctttaatcccatgagttcaaggccagcctggactacagagtgagttccaggacagccagggctagagaacagtccaggacagccagggctaaaagaaaaaaaaaaaaaggattactcttaactttataccctttctaccagtacagagttgaacagatattcagatatttcagctctctctctctcccccgccgcagcctataaaatctggagcgcggcgcacggagcggcaggcgcggaactgggcatgctctgtgagcccgtgcacgacaccggcggcgccgagtggagcgctgccgcggcggccagggccgcagggccggcgtgggagcgcgagaccgggcggcggcgagagaccccgacccgggctgtcaac

SEQ ID NO: 42739 - DNA, 478 bp, Mus musculus
  source 1..478: mol_type = other DNA
aaatgaatggcaactaattgttattgctacagcaatttgtgaatgtttaaattatctaatgtttatagtttgtatattggaacattgctgaatatacaataaacattttactataatttaaaaaaaatgtttctacactgaaaaggttacatttctaacgtttgaagtaagagttgtacagcagcgaaaactagaaaggctcttatgtttgtacctgttttaagtctttgaatttgcccagctgaaagacattacagtatttcattacaagactgataatttcgtagagtagaaatatttgcgcaaagctccacctaggttttagaacccttgctaaaaccatgaaaagggtccccttcacaatggtggcgaaacccgttaggtgggtgggcacactctgcgtcccacgcaggcttaaaccctggcttcgattggctggccgcgccattgtgacgtcacggtcagcccacgccggggt

SEQ ID NO: 42740 - DNA, 492 bp, Mus musculus
  source 1..492: mol_type = other DNA
gtagcagatagagaacactcagggtgtgtcctctgacatgggtacaagtcaaaatattttcctgtccgcacaaggattggaaaaagtcaagctgttttctattgctgtagcttgataacgaaggacataaacagaatgtggctgactctgctgttgatcaccgagagtgctgtcctcttaagaacacaaaggcttcagagaattcctctttttgaagatctttaaaaatcaacagtccacatttcaaaattgcaatatacttagaaatgctcagttgtcttcgttgctctccagagaagccaggctttgcttccagctccaggggatctcgtgtctctgacccatgtgtcgttgccagacttataattaaaaataaaatacagacagatctctgagttcaaggccagcttggtctgcaagaggtacagagtgagactctgtctcaggacattctgtccgcggaagaaatagtttcctgagccatcagcccag

SEQ ID NO: 42741 - DNA, 209 bp, Mus musculus
  source 1..209: mol_type = other DNA
cttagatatctactgaaagattgcactatgcacaatgataaacaagacaacagattttgattttattttgtgattagaaaaacagttactgttagtgactccgaagcccagcagactacctgggattccgcaaactatcaggaaaaaaaaatctgtatttcttttcagagttttgttttgtagatgtcctcttagcattaaggagggga

SEQ ID NO: 42742 - DNA, 325 bp, Mus musculus
  source 1..325: mol_type = other DNA
tattccagcattaaacacaggatttgcaatttcttactgtaattttctgagctccagaataaagtagcacaataaaattttagctgttaggttctaacacttacagaaactcaataaatgttgtctaaatgtctgtctagcatacaacgtggaacacttgaaaagggcacccagttcaggttcaaacattttgagctatctcagcatcaaacaggcgggctgagtgaggcgggccagcttagctccaccgacggcctcgcgacgggtggctggtagccaagcaggcggcggcgacggcgacgacggcattgcgcatgcgcggcgc

SEQ ID NO: 42743 - DNA, 357 bp, Mus musculus
  source 1..357: mol_type = other DNA
gaatgacaccctagattctggaagaaaaatgacattgtcttaaattgatttcaccttcctaggggtaatcccatgggccaagtccctgacctatatcccactagattagtctatagaggtggattccattatttacaaaatccatatcatattcatcagcctactgaaattatgataatttctacaaaaaatattccagcattaaacacaggatttgcaatttcttactgtaattttctgagctccagaataaagtagcacaataaaattttagctgttaggttctaacacttacagaaactcaataaatgttgtctaaatgtctgtctagcatacaacgtggaacacttgaaaagg

SEQ ID NO: 42744 - DNA, 486 bp, Mus musculus
  source 1..486: mol_type = other DNA
caaaatgcttcaaagctatcctttaagatgatttaaggtgggtcccacaatagtatatatgtatgtaggtatgattaaaggtgtacaccaccactcaggctttacaatataatttatgttgtgagttgtggtaatcaccaactttaaaattatttttgttgctacttcataactgtaattttgctactgttatgaatcataatgtaaatatctggttaaccacaggttgagaacctctgcaaacagtgttagccactgttcaaacttacgttgcaataatgctgaaatcattttttctactgtggttaaatacagacgccaaaatgtgttgttttaaaacattgtgactgtgtcccccgggtgggttcgccgcagcccagaagctcaacgctgccctctgccgagcatccgggagatggcggtggtgcagggccgcgcggggccagcgaggggagctgcagggcagcttttccagggaaagcggct

SEQ ID NO: 42745 - DNA, 480 bp, Mus musculus
  source 1..480: mol_type = other DNA
tatcttcatcccaattttctggacataactgaatgttcagcgcattaaaaagatgccaccattttaacacgtgaaagaaaggacagaacccttagccttggttttcagtgtgtcactcacattataaagttcttggactttgagaaactcaggattttccaaatttaggccgcgtgagtctgtccgctccgccttggcagaggcgccgacacgctcgtatgggaccgcaccggacacgggcgcctgggccaggagcagagccggggaaggtttaaccaatccaaactgttgtattttgcatagccccaaagcattttggttaacagtaaaaacatcctaaatttaagtattttaatttaaacttagaacgaagcgagtataaaaaggattatttaaccctaaaacggattcaggatttgttataatatcaaaaggtcaccacatgtgtaaagttacaaaattctatggccttatatacct

SEQ ID NO: 42746 - DNA, 348 bp, Mus musculus
  source 1..348: mol_type = other DNA
aaacgtttatcatgactgtacctctgtttctcaaaggcagagctatgccccaaacctgccccattctacagggtaaaaggtgaatgcacgagcttgctttctctctcgtacgtctctaatttgttttcaaaaataaagtcttgagtgtctattttagcatcacaatgttggcaatgaatacaatgaattcacaaatctgcaagctctaacctttcaataggttgatgttatagttattttgaatacagtgcatttatctgaactgcttatattactggagtgtactcagtaatgagtcagcgaaaacttttagagcaaacctgttcttctccccgggaaacaaagcgt

SEQ ID NO: 42747 - DNA, 591 bp, Mus musculus
  source 1..591: mol_type = other DNA
ttaaacatatttacatctctatttacatctattaacataacagaatttttaaagatttaaaaaatttttaattaaaaaaaaatttttttcctgtctctagctggaaatgtaaatgaaataaatacccaattaaaaaaataaaaatatatattttttttaagttaaagaataaaataaagttttaaacgaaaattaaattgcagactgccacatgcagcgcctcatttagaggggagcgcagctactatacccttgaccgaagaccggtcctcctctattcggggaaggtcgtagcgcgcagcttcgggagggcgatcgggtgacagatgtcgcagccagatcgccctcacatccgagagtaagcaggctcttggtaggtatataaggccatagaattttgtaactttacacatgtggtgaccttttgatattataacaaatcctgaatccgttttagggttaaataatcctttttatactcgcttcgttctaagtttaaattaaaatacttaaatttaggatgtttttactgttaaccaaaatgctttggggctatgcaaaatacaacagtttggattggttaaaccttcc

SEQ ID NO: 42748 - DNA, 412 bp, Mus musculus
  source 1..412: mol_type = other DNA
ccttaggcatgtgacaggcatcccggaggccagcctcatcaggtaatgattaataacgtaattctcattagcttggaaatgacattgctaatggtgacaaagctttcccacaggagtaactgcagggactcacaggctgcactgagacctagagcaggctggacagaatgtgtctggtcatccagatattttttaatcaaagcaggacaaagattaagatagatatcatgctatggcaggattttaatattaacatgcttgagacaatgcattaattctgcaatttagggctacttaacaactgaaatccaatagttcaatgtcacattgttacatagcagagggaaggtggtggcttgtcagcccctcccgatgacaccctgggtaagaattgtcaccttactaaaggagc

SEQ ID NO: 42749 - DNA, 397 bp, Mus musculus
  source 1..397: mol_type = other DNA
ggcatgtgacaggcatctcggaggccagatcatcaggtaatgattaataactaattctcattagcttggaaatgacattgctaatggtgacaaagctttcccacaggagtaactgcagggactcacaggctgcactgagacctagagcaggctggacagaatgtgactggtcatccagataattttttaatcaaagcaggacaaagattaagatagatatcatgctatggcaggattttaatattaacatgcaatttgagacaactgcaatttagggctacttaacaactgaaatccaatagttcaatgtcacattgttacatagcagagggaaggtggtggcttgtcagcccctcccgatgcaccctgggtaagaattgtcaccttactaaagtag

SEQ ID NO: 42750 - DNA, 415 bp, Mus musculus
  source 1..415: mol_type = other DNA
tttttagaccctgaaattttctatcatgtgacaaggtaaagactctacccctggcctgtgatgttgacttacagtcactgagcagcagggacccagcgtgtctgcccactgtgcaggatatcaggtgtatccaccaggggctggatgacatcatcctgattcaccaaggttcaatgaggtgcacaccgaaggtggttacttcccctgggatgtgaggctgacaaaagcagcaggagatgacccttctcctgcagcatgaaccaagtggtccaggagccaaagaaccagggagtttctgtgcctcatcccctccgggatttttttaaagatttatttacttattgtatataagtagtacactgtagctagacacagacaagagagttcactcaggaagagcagtcagtactcttaa

SEQ ID NO: 42751 - DNA, 429 bp, Mus musculus
  source 1..429: mol_type = other DNA
tggaatccagactatggctcaagatcttcaaaccaggatccagataaggatctcggtgagcttccaattccgaattgtagttcattccaaataagttggtaattctcattagcttggaaatgacattgctaatggtgacaaagctttcccacaggagtaactgcagggactcacaggctgcactgagacctagagcaggctggacagaatgtgactggtcatccagataattttttaatcaaagcaggacaaagattaagatagatatcatgctatggcaggattttaatattaacatgctgccttgaatttgagacaatgctgcaatttagggctactcacattgctacatagcagaggcagggttcacaaggtggtggcttgtcagcccctcccgatgtgggtaagaatttaccttactaaagtatc

SEQ ID NO: 42752 - DNA, 228 bp, Mus musculus
  source 1..228: mol_type = other DNA
agttttttaaatcaaaacagggaattaagacagatatcatgctatttgcaggattttaatattaacatgcttcatcagataaaacaagcaaatttgagacaatgcattaattctgcaatttaaggctccttaaaaaataattcagcagtttaaagtcaaactttgttatttcctatagagttctttatagacgcatgtatgaggatcatggggattcattagtccctc

SEQ ID NO: 42753 - DNA, 531 bp, Mus musculus
  source 1..531: mol_type = other DNA
gaaacgggggtctccacagcacagcctcgcctggcttttactccagacactctgtagacatttctaaacaattttgtaatgctgttcacatttgcacatttaatgcccttctatctaatttaaaggggggggggctctctcactctttacatgttctctattgtaaagcaagatttccaggcctgcacatgcctttaatcccagcacttggaggcagaggcaggcatctgagttcaaggccagcctgatctattcagctttaggtggaaagaataaaattccaattttccttttcatttttattaaatgacaagaatcattgttcttgggagttgctttggcatctgacaaaatgagatcccagtatctgataaagctatagtcttttagaagttagttagcttgaatcaggcaggcggcctgccttagtctccccaggggcatagcctgcgggagccgcctgggattgggccccataggaggcgggccctagtgggcgtggtctagtaaaacaccgcccacacaggtact

SEQ ID NO: 42754 - DNA, 352 bp, Mus musculus
  source 1..352: mol_type = other DNA
gattgtcttcctcacagatctttgaaaaactgatgcagactctgaaaatacagacacagggtgtgtgtgtggatttccagagggcaggcaggcttgtcagcactgctgacaggacatcgttgtattaggtttaaaatgattaaaaaaaaaaaaaaaccttaatcaggaattaattccacttaaagaagaaagattagaaataaaatctgtcaaacttgtgatgtttgtttcaaaacccacttctgtcttttagattaaaacacgaatctgtgttgtaaaggatagaccagcctacccacttgcgcggtgcgcgccttgctggaggggggggctgggcagctttgaaaagcga

SEQ ID NO: 42755 - DNA, 387 bp, Mus musculus
  source 1..387: mol_type = other DNA
cagtcaagatattgtatcaagagatactgttgctacatctgtgtgtcatgaaaggctatcttcaaagatattagtatacatagtattatataatataatttgatgtaatttatttaacccagaatcccagcaaaggatgctggagcttaggccaggcctggaggactgtgtccagctccaaaatccttgcaaagctggcgctttcatcgagttattttaagatagagcctgaaagtaattgtccggttgggatcgtttccgtggcacggagactagccgggcaaataggggtccaggtggccgctcggttgcaagcgccgattggtcaggccagccaggccccgcccccgaagcgcggcggccaatgagcgcgcagaggactggcgg

SEQ ID NO: 42756 - DNA, 467 bp, Mus musculus
  source 1..467: mol_type = other DNA
caaaaagttacacagagcagcaatttttgagctttattttaaattgcataataaggtgtggaatatagtaatgttattattataacattctgatgttagttgaaaactaagtgttgttctgccgactttagaaatcgctttctgaaagtctgcattaaaggactacaactcacacaggcactttgaatatgttctttaagagtcggtgtgctttttagaaagataagttgaaatactaattccaagcagttaaatctaacttgaaaaggttcagtgagtttctatttctcattaacaagaacagtaaattttgatttaaagtttacataaaccgggggcggatttctgagttcgacgccagcctggtttacagtgagtcccaggacagccagggctacacagagaaaccacaaaaaagtttacataaaaaagttgtttatcaactacaaatgtacccagtggctcag

SEQ ID NO: 42757 - DNA, 470 bp, Mus musculus
  source 1..470: mol_type = other DNA
ttataaatcttcctgggaccctcctctaggaaggaatatttcaactcagaggaaaacttgtatatgcatataaaatagctactagcaacaaaagactggcattcctttaaagtagggacaaggtcttgtgtgtatattatgtttaaataggaaccagagaaatggctcagtgaacaagatctcttgctctttgcagagaacctgccgtgtttgattctcagcaccggctcataaccttttattgctccagaaaatctgatgcactctaggctagatcgaggcgcgcgcgcacacccacacacacataaaataaatgtcaaaaaaatgtttaagctgtatataaataatggagttttgatagtctcccgccagcgctgaaagtacctgcggggggaggaagggggggggagaacgcacagggcctgcgcgcacctccccgcggcgaagctccaacccgccaatcaaaagcg

SEQ ID NO: 42758 - DNA, 369 bp, Mus musculus
  source 1..369: mol_type = other DNA
aatgctggtatgatcgctagaattgcagcaatcaatcaaatggctgtacatacacatgtacacatacaatctttttagtgtaacaaacctagaatcaaagtaaagctaactgtaggattcagcccaggggcagatcggtcgagctctccgctactgagctaagcccttagccgggaagggtccccaacattgtgttcctctcccagccaggagagcatgggctgcgcctccgatagattctggccgccctcttggccagcttccctggggaagtcccagggaccgcacagtgcgaggagcatgcgctcagggctgagcgcggggagagcagagcacacagctccgccctcttcccgagggtgggggaga

SEQ ID NO: 42759 - DNA, 186 bp, Mus musculus
  source 1..186: mol_type = other DNA
tgtttgtacatacattttataagaattctagacaggggccttcctctttcttagagtcagcagtagggaaaatctgtccaaattagatttactgcccgcggtacttttcaaaagccatcaatgcccgggcttttactagtgtaacagagggcgtgtcctggggcggggcaatatcctgccccgccc

SEQ ID NO: 42760 - DNA, 376 bp, Mus musculus
  source 1..376: mol_type = other DNA
gaaagcaatttctgtgctcgagacagttaaaacattcaacgtttctctagtagaccgtcattatctaaaataccttttggaaatgagaaagtttaagtcctcagggactgaatgtgttcagaaaacctgggttcagaaaagcagtgatcagtaattgctgggcaccaacgaacgctggtcaccttcatttctgacaaattgttacaaactcaggattctaatgagtacttcgcctttctttaaataaaaactaggttttttaaattagagaaaccgtaacattttcttagggagttaagtaaacatcaacttttatcttaaaaaaaaaagcaatatatacctaccgatgtgtgaatggcacgcgaacaggacaatg

SEQ ID NO: 42761 - DNA, 394 bp, Mus musculus
  source 1..394: mol_type = other DNA
ttcagaaaacctgggttcagaaaagcagtgatcagtaattgctgggcaccaacgaacgctggtcaccttcatttctgacaaattgttacaaactcaggattctaatgagtacttcgcctttctttaaataaaaactaggttttttaaattagagaaaccgtaacattttcttagggagttaagtaaacatcaacttttatcttaaaaaaaaaagcaatatatacctaccgatgtgtgaatggcacgcgaacaggacaatgcgggcatcccccaggttcccggtggcgggggaaatgggctccctatgttctccctggggagcaggaaagttggggccaggttgtggccaccgcgtgcagagaccgctttttgggtggagccatcaagtctcaat

SEQ ID NO: 42762 - DNA, 333 bp, Mus musculus
  source 1..333: mol_type = other DNA
tatttttacttgtacattagtgtgcagaagaatatgcaagactgttctgacagctccatccaggagtgaaaacaggttggcatacctgtggatgccaacatcggtcgttcctatatgatctcagcacaaagaagaggagcttttgaatatttaagttgtacgacgtagctttgacatccatgtccggcggcaggcgcggcagggcggaggctagacgggccgctgcgagaagtcgctctggctcgccttccgctctctatggtcgggagcgcgagcccctcctcttcccggaacgagccctcttgctcgacgcgcgcgcagcgctaggaggga

SEQ ID NO: 42763 - DNA, 439 bp, Mus musculus
  source 1..439: mol_type = other DNA
gtgctggcggagtatccggctccggccttctcagtagctcgcgcctgcgtgcgagcgtccccgagcgagctttagggaagagctgttactcttaaactgacaagaaatttctaaggagaataaaactaaactaggttagacagacaggcctgggaaagccatcctagccctgagccgggagcaggcaggcggctgtcggagttttcaaagtcgcgccttggagactggaagcctgtaaatcggttttaagtgctctccattgttcttattttagaaaaataaacgtattaaagaattgggttagggaaacccgagccccctagcccgccccaagcggaggagtccgcggcctcccttggcagggaacccggctgcggctgtcccccccgcccccggaggggcattgctactacggcgatcgccacgtatctttaagtag

SEQ ID NO: 42764 - DNA, 470 bp, Mus musculus
  source 1..470: mol_type = other DNA
cctcagagttaaacacgtaaatctaactctaccagagggcggggcccgcctgtcaccttctgggagccgggggatcactgccacgcccctccctcacctcgatctcacggaagcaccgtgccggccgtgaggatgggctgccaggcgggtcggcctccgggtcttggcggcgcccccgggaggacccgcgggcccgccgtccacctcgggcttcggctcggccacgtccagctgggccgcccaggggacttgcgtgccgccgaccctgacaggagacgcgcagtcaccgctgccgctaccgcctccgccacccgcgccgccaccggggaggcggaagaggcgggacacgcttctgcggccggccgctgaccggaagcgggcgtctttagccgggcgcgcggctacgtgagcgcatgcgcggcccggagcgacgtctgcgcactaggacggtagcgtcttcgcttccccgg

SEQ ID NO: 42765 - DNA, 405 bp, Mus musculus
  source 1..405: mol_type = other DNA
agttactaattattgtttatttattgagacacttgtaatttcaattttaaaactaatacccctttttaaacaagtggtattatgttctggtttttgattaccaagtttaaaaaaaaagaatcactgtcatgttttacaatataggttgcatcatcatcatcatcatcattattattattattatatcaaatgggtcgcatgttatacctcacttaaattcatagacacataaggatctgcatccttttaaacatgtggactcttcagaagagcctcccggggaagcgaagacgctaccgtcctagtgcgcagacgtcgctccgggccgcgcatgcgctcacgtagccgcgcgcccggctaaagacgcccgcttccggtcagcggccggccgcagaagcgtgtccc

SEQ ID NO: 42766 - DNA, 539 bp, Mus musculus
  source 1..539: mol_type = other DNA
tgaacactattaatttcctgtgtgtacatagtaaatcagagcattaagcacacatattttatagatcttaaacctgggaggctcgtacttttctatgctacagaatgaagtagcagaaacatcttgagacttgaagttcagggcttgtcaaccactagtgagaggtctctagccttatttgaaaatcttttaagagtaagggatcaagctataaatataactctccaatgatgaaagctgtttggaaatgatctcttacttgatttttctcaaatctaagagtctgagaagactattgccttgggaaattgctctgcccaagagatttaaaaagccaagtcccacttcgcagtctgcaaacagtaattacctctgtgaaatgagcagaggtcctctgccggcttccccgggatctttgcggggtgagcggggatgcccagctgcctaggaactgagcagggccggctgcaaacttctcagctgttgacaggctggcctgctcagcgccccaacaaagtcactgcgctgacagtgtgcgg

SEQ ID NO: 42767 - DNA, 448 bp, Mus musculus
  source 1..448: mol_type = other DNA
tcccagaatttgggaggcagaggcaggcgggttaaaaaaatgtttattagctgaccacattcctttgtagaccaggctggcctccatctgacagagagatccacctgtctctatccctttatgtcaatcatatcatatatgcattgtttggaagatggatgtgaacacaattttattttccagaatacctggccggcaggctggcaagcgctcgcaggccggctctgccatgggggccttccgaggaaggggtttttgttcgtccctcgccaaggccggccagacaaggccaccccaggccggcaggacgacagcccccggctcgggttcggccgagcccggaggggggcgagcaggctctggggcggcggcggcggcggggcgggcccggaggccggtgggggaggagcggcggcggggctgctgtggcgaccgacgcgcggcggtg

SEQ ID NO: 42768 - DNA, 572 bp, Mus musculus
  source 1..572: mol_type = other DNA
acatgtaaaatttaaaaaggatattgttgagagctttgtcagggcaatattcgaggaaggttctgaggcagccctgaacactattaatttcctgtgtgtacatagtaaatcagagcattaagcacacatattttatagatcttaaacctgggaggctcgtacttttctatgctacagaatgaagtagcagaaacatcttgagacttgaagttcagggcttgtcaaccactagtgagaggtctctagccttatttgaaaatcttttaagagtaagggatcaagctataaatataactctccaatgatgaaagctgtttggaaatgatctcttacttgatttttctcaaatctaagagtctgagaagactattgccttgggaaattgctctgcccaagagatttaaaaagccaagtcccacttcgcagtctgcaaacagtaattacctctgtgaaatgagcagaggtcctctgccggcttccccgggatctttgcggggtgagcggggatgcccagctgcctaggaactgagcagggccggctgcaaacttctcagctgttgacaggctggcct

SEQ ID NO: 42769 - DNA, 590 bp, Mus musculus
  source 1..590: mol_type = other DNA
ttcctttgtagaccaggctggcctccatctgacagagagatccacctgtctctatccctttatgtcaatcatatcatatatgcattgtttggaagatggatgtgaacacaattttattttccagaatacctggccggcaggctggcaagcgctcgcaggccggctctgccatgggggccttccgaggaaggggtttttgttcgtccctcgccaaggccggccagacaaggccaccccaggccggcaggacgacagcccccggctcgggttcggccgagcccggaggggggcgagcaggctctggggcggcggcggcggcggggcgggcccggaggccggtgggggaggagcggcggcggggctgctgtggcgaccgacgcgcggcggtggcggagacccacccccgtccacatggacagtcgccgaggcctgggctgatgctctgacgcctgggcggggtgggcgggcggcggcggccactgctggagcagcgaggggtcgcgggcgcctcacggtcgcggagccctcgctcggctcaagccgctgcggccattttacggcccgggacgtagaaggcgagcgttcgctcc

SEQ ID NO: 42770 - DNA, 450 bp, Mus musculus
  source 1..450: mol_type = other DNA
gagaggcaggctttcttcttttgtagtgacttgaggctcagactgaccatttattagagttaaattaatagttcatatttatcctgtagactcagattctcaaccagagataagtctttttgccttattttagaacctagggccttggctatgtatgtgtatattacacataatatttaaataataaattttcttttgcttcatattagttcttggaaaaatgtagaaatggagacttttttagaaattttattccaaaattaactttaggacttaaggtggtctttgttttttgtacttttatgaaatttagaaagatacaagtcatactggagccttttggactgcctttggaatggtcagctgtgcggatttcacatggggtttcctcatggcttctttacatgataaatcagctgtcataaattttcacttgtaaaattgatgggt

SEQ ID NO: 42771 - DNA, 295 bp, Mus musculus
  source 1..295: mol_type = other DNA
ttgcataggaatgtaatatttaatttaaaaagatgacccacatatggggccagttggctcagttctaaaccagcccacaagagactctctcgatatctgcatgggaggctagccagagaagaaaaaattttcttccgtggttcaatccgagcacgagcctagatgggctgcggcctcgctgtggcagtggaaacaactaccactgcgaggtgggctacctgcagcccttggcttgcagggatgcagggatgcggtcggaacctgaggcccctggccaatttttgggcgcgtagca

SEQ ID NO: 42772 - DNA, 291 bp, Mus musculus
  source 1..291: mol_type = other DNA
ctctcaaatttgcataggaatgtaatatttaatttaaaaagatgacccacatatggggccagttggctcagttctaaaccagcccacaagagactctctcgatatctgcatgggaggctagccagagaagaaaaaattttcttccgtggttcaatccgagcacgagcctagatgggctgcggcctcgctgtggcagtggaaacaactaccactgcgaggtgggctacctgcagcccttggcttgcagggatgcagggatgcggtcggaacctgaggcccctggccaatttt

SEQ ID NO: 42773 - DNA, 447 bp, Mus musculus
  source 1..447: mol_type = other DNA
tctgttatttaataacaccctagagtgaaaactttagattagttatagaattagactatttcgaagtactcagcagaagagcacttgtctgtgatagaagccctaagctcaatcctgggaagttttagctgaaagactgtttttctcacatatacctataaataaatgtttcttaaagtagttgttctttgctcattcaattcagtgcataacaggtttaaaattaaatgaaaactagctacctgtggagaacagtgtattccttacactccaggaatagcaacgaagccctcagtgggtgttcctaagacaggtccttgtacctccactgctggaaagacttgcaccagtgctccgtgtcagtgtaacctgtaagtgagaaggtttcaagctcctggagcaggctgacaaatccagaaactgacctgcttccggatcctcgagaat

SEQ ID NO: 42774 - DNA, 497 bp, Mus musculus
  source 1..497: mol_type = other DNA
agattaacgaaagctatattaaattacattatagttaaaattattgactttcttaaacacatggatagaacaatgaagcttactagatgcaagcacttgccttaataaagggtcatttacgtaggagaagatataatatttggtaatttatcctatacaattgttgaaacctttaactattagcaaattagcacattgttagtaaagtctacataagtgacttccgaatgcttagaatctcctttgcattttaatttctgagaaatttcagtacgtgaggcaaaaaattattcctcccgcaggaagcaaagattttaaaaccatctgttggcacaacagaagctttcctgaaacttttcctcgccgagcccgcccgagcccgccggagcccctcccaagcccctccgaggagagtggcgcagaggcttctggctgcgcttgcatcagcgtgcatggccgggaatactggcccccgagcttcccccgccgcctgaggg

SEQ ID NO: 42775 - DNA, 342 bp, Mus musculus
  source 1..342: mol_type = other DNA
agacccggactcactgggcacgtccggagcccgggagtccgtggagtagaccgtgtagaggacgtggtcggtgttcacaaagcagtccagcatctcctcctctgctttggcttgacgccagaagaacccacaccagcacgatcatgatggccgcccttttgggacatcggtgatggcccagtagcggtccaggaagtcgcagaccacctggcctagtgtccagcgtccagtgaccgtgtacatggtgctgatgggcatcaccaggatggacacgagcaggtcagtgactgccgatcaggtagtgtagcttccgggtccgatacaccgtagcgattacaaagg

SEQ ID NO: 42776 - DNA, 161 bp, Mus musculus
  source 1..161: mol_type = other DNA
gtatgtagaggcatcaccaatgttaaaaagttgcaaccttttgtattccagagtgctctctcagagaagctaggcttctgccggggcctctgaggatccattggtcaaggtcgcttaggcgacagacccggactcactgggcacgtccggagcccgggagt

SEQ ID NO: 42777 - DNA, 474 bp, Mus musculus
  source 1..474: mol_type = other DNA
acttatgactctaaagagtgattataatggataagagaatttcattaccaagtacgcctctgttttactacctgagagtcattacatccaaggaagcacacttctatagagcaatgtctgctaaaaaattatttcttaaagaaatttcatccttctgccaacagtagtaaaaatatgacttattttgtacaaggttatgtaagtttagccaagaatttagatgtgtagatatgagccctaacttagtctttggatgaaatagtaacaagagaatgaaaagtattttattgatgaagactcttgagattgccacacttacaagcttataaacagacgtgtaatgacaaacttttcagaatttgaatctaagcattctgtagaattctagaatgaaaacagtttgatactctaagtcctattctgatagagaagtgagaacacacatctatagaatttttacaaaggttctatctt

SEQ ID NO: 42778 - DNA, 277 bp, Mus musculus
  source 1..277: mol_type = other DNA
gactatagactttttcaagttcctatcccattctgttaataaaattctaacaggccccagcactcagaaatgggtcgaaaccttgcatttctgcactgagaccctgtccagacaagtacatgacatgcctgtcattgctcaacatttagaatttgacactgacactctttctaaagattggtttatttgaagagaaactcctcgccccggcaccgtgaaattcgggccgcagagccttcatccccatgcggactgagggataggcccgtgatcactg

SEQ ID NO: 42779 - DNA, 498 bp, Mus musculus
  source 1..498: mol_type = other DNA
aaggagttaagtcatcaaatggagctgaagcaagtacctacttacttctttcctatgaagcttttgttcatcagatgcataactaaatgagtttgtttgtttccatgtggatgctcacactctgggtaggcagcatgccgaaattgtgaaaactgtttttgattaagttttattccaataaatccttcattttacacaatatatctaaatattaaattcaaaccacaactagttattttttaattaaatgttcgataaaatgctaatgattattttgaaagaaataatgtattatagtgcacaaatataatcactgaagcaacacatgtcttgtttacattcagaaaagacacttcagtcaagagaaatcattccatttagcatatacttcggcaaagtatgctgaaaccttttctttgtcagaatatttcacatgtgctctgtcatatgctaaaatatatttcgattatcttataccaagtgcttaagccttaagat

SEQ ID NO: 42780 - DNA, 322 bp, Mus musculus
  source 1..322: mol_type = other DNA
agaaatgggtcgaaaccttgcatttctgcactgagaccctgtccagacaagtacatgacatgcctgtcattgctcaacatttagaatttgacactgacactctttctaaagattggtttatttgaagagaaactcctcgccccggcaccgtgaaattcgggccgcagagccttcatccccatgcggactgagggataggcccgtgatcactgaccgcgagggcaggacagacagctcccttccctgggggaaaacccggtctccacgctgcagcggcgcctccatcccggcatcctccgcgcggactagcaagcgcgcggca

SEQ ID NO: 42781 - DNA, 459 bp, Mus musculus
  source 1..459: mol_type = other DNA
gtaaacactttaaaaagctttaaggttcttcacttccctaattaagctgaagtacaaatctggagttcctcttgcccgtttatcaaaacaaaaacattttttttttttaaacgaacgcttcaggcgatggtagtaatattcaagtcgggcagggcagcgcgatcccgacttggcccagctgagagtgctcgctgagagtctctgtggctgaagagcctgtgctgcggctccgtgtctcccgcccgcggcctctttagagaaagcgcccgccaggcagcccgccgcttctggcggcccagggcgcgcggagcgacgaccgcgcgggcgcgggcctaggccgaggcactccttttcccgcggggggcgggggcggcgagtgcggggccgcgaaggcgcggactcctttctgcggcggagggatcccggcggaggcggccgcagccggggccgctgcctgag

SEQ ID NO: 42782 - DNA, 541 bp, Mus musculus
  source 1..541: mol_type = other DNA
atggcatggtattcacatatgaagtaggatctattctagatatagaaatcaatttaatgttagaaatctgtcatacatcagtatgtaaatttcagtatgctacagaatattctcagggaacgagttactagcaagaatttctttgaccaaaataaatgtgaaaagaatttatatcttatattttatttggtaagtttttctaataacccctgattatgctcaactctggaattattacagtataagtagaaagttgtttattattattattattatgagataatcatggaaaagttgaaggaattcttctcagtgtagacaagattagtaggtaatagtaacatttttgtaaaatatcaacaagtagctagaaaattaaaatatttaaatatgctattcatctatgtaaaagtgaaaaacagacaaacaaaaaagggaactttttgctttaagttcattttgaacctattctttaacataagtcaaacagaaatattagttcctttaaaagcaagtacagccttagacctaagctgattaa

SEQ ID NO: 42783 - DNA, 471 bp, Mus musculus
  source 1..471: mol_type = other DNA
attagctttttaaaaatgttgttgaatttgatttgataaaatttgaggtctttagtcaggataaaaccggtcttaaataaattcagataatgtattttgcaattctttgcggaatgtcgagaaacattacactatacacaaaacctggcaggtgtcgtttaaatgtacatatttaatatataagtgatttatttgttcctaaacatttatatcaattataacaattattcacacatagctgaataattggctgaattcatatatgacttgtaagcttttataagtaacaattgtacaaggcaccccgtggccctatttactttataaagttaacccagcattacttaatactaaacttttttttcctatgaagaagcctgaagttgaactggtttttcccagtgaagtggaaactacaactgccaatggggcctcgcggctggctggcagggctcgccattgggggaccgg

SEQ ID NO: 42784 - DNA, 362 bp, Mus musculus
  source 1..362: mol_type = other DNA
taatattatctttaaaatgtaaattggagacttttcccaatgcttcttaatgaatttcaaaatgtctttaaagaaacaaacaaaaaattaaacattcaacttttcccttcctccttaacaaagaggttggacaacattcgtttaaatgggtctcacagctcagttctgaggcctgactgccacataggaggaccctggcaagtgacaaggacaatgaagtgacatttttttcttagtctgatcatttctttaaaaaaaagcatcgtgggtggagccgccgccacgatgggttgaaggaattcctcctgatcagcagaggctgatctttgctggtgcaggtctgactacaacaaaggagtcca

SEQ ID NO: 42785 - DNA, 268 bp, Mus musculus
  source 1..268: mol_type = other DNA
ctcgcgttggaaacttattcttttctactacaattacagttttgcaaagaaaaataaaatatcggtcttgttctcatttgtctttagaataaagtgaaagcctgtttcatttaccaaagagattccctttgcatccaggccagcctgggcgaactgccaaggtctctgatagaggcagtgcctggtcactctgggcgccgtcagcccccgcggccgcctggccccacccgcctctcgctcagcccgcggcggaggcgctgggctttca

SEQ ID NO: 42786 - DNA, 398 bp, Mus musculus
  source 1..398: mol_type = other DNA
agagtaacactgtgtggtgtaataagaactgaaaatgttatacacaattaggtattttgtttgggagatttctaaaattttagatacttttttgacttgccagtaatgctattaccctgttagagaaatgctctaagctcagagagcgtcagagcccccgtggaaaagattttcttttaatactgcttagtgtgcactgtcaagtttaaaagaagaatatttcctttaaaaacaattctttgaaaacataacggcaagccatattcaagatggtacattgatttctttataacgaaatccaaaatattcagaaaaaaataaagggttttgtccacagaccctttctgggcgggtcgcggttccccgctgggggaggcggaggccggtcctcccgcggt

SEQ ID NO: 42787 - DNA, 445 bp, Mus musculus
  source 1..445: mol_type = other DNA
ttgtcaccataaatatttatgacttgctatttataatgaacttgttattggaccattcactgaaatcttgctttatgtcagaaactataaaaatggcatagtgtgattttgttgctgattgacctgaatctcatgtggtgaaggatttaactacatgctaatattaagacaaatggcattcctttacagtgaaaccacgcatttccttgtctgggtgacaagcacgtgccacgtttcccacgttgcatccggcagaacagaggtaggactgggtacgaggtgtccccctgcggcgttcctgtggcccaggtggtggcccggggctggccttagcgcgcctgcgcaagccggccaccactcgcgaccgcagcatccccgcgcccggggcgagaggaggcgccgccccgccccgcgcggccacgtgatgcgggcgaggggattggag

SEQ ID NO: 42788 - DNA, 534 bp, Mus musculus
  source 1..534: mol_type = other DNA
atatgttttttctctattgaacaacttgtcaatatttcttaagtaacactatataacatctatttgtatcacttctgtattcaactgggtattacaaatgatgcatagacgataaattttaaagtattcaggacgctgggagatttaaatcacatgctgcaaagggagtcagttctgtggcagcagtgaatacacacacatacaggaggttgtgtgtacaatgcctctttatttaaagacttggaatatccacagatttgggtatcagcaatttgtgacagtcacttactgaatgaactggctactgctgtagcttcttttctcgcaaccgttcccctggaccacacagtctgctaagaagcgtttctcctaagagcagctgagctcataactgaggccagggctccccccctgaccgtacaggcgcaggtcagcacggcgagcgcgtcggcagctgcgggtaactccccgggccgcttgaagtgggtgggtccggcctcaacgcaggaggggcggtgcgacgcaaggatcacg

SEQ ID NO: 42789 - DNA, 531 bp, Mus musculus
  source 1..531: mol_type = other DNA
cacacacacatatcatatatatgatatatatgcgatatcatatttgatatgtatgtgatatatatgatatatataaaacacttaaatattttaagataaaatttataaagttgattattttgactttaaatcagtcattcattgcatatttctaagttacacagcacctcgactttaaattcctagtggatttgaaggccgaaatacttactattttttgatatgatctaaatcaggataagcaaaatcaattttaaagatttaaatatatttactatttcaaaataagagtgaaggcctttcccgaattctagattttttcggaaactcgagtctttgcaatgaccatattgcacttacagaccaggcagtcgcgttgtgacaccccaagtcctgcagctgattttggggtgggacccagggaccacatctcaggctgcaggggccttggtatggcttccgtctgggcgggccgccaggtcatagcgtctctcgaggctgcccaatgaggaagcctcttagctcctccct

SEQ ID NO: 42790 - DNA, 214 bp, Mus musculus
  source 1..214: mol_type = other DNA
ctaggtctgtttctgagtttaactccgtttaatagatgatggtgtcagtggctcatacagcaacacaactctgggctccaagttgtttactaagcacacaatttgcaacctttaaaatggcttgtagatcctgcggggagacagatctcctagggtgacatctggcaccaagaaccgctgaggtactgccacgctaggccttgtgggcaccccg

SEQ ID NO: 42791 - DNA, 436 bp, Mus musculus
  source 1..436: mol_type = other DNA
tatgggtttacataaccatcgtcatgattgccatacataagcttttcacatttatactgcaaaacacttttaaaaataagagaatttagataaatgtgctgaagatgcaaattaatgaaactcacaaatctctgcaccagactatctttccacagaaagacagtcatgatgcatgtacaccttttaacttggggaaaatttgacggactccaactgcgcctgccagcgccccctgggagacagactttgggacaaacttctttcccaggtcagcccgcccacctcccgccgcgagcgctccctgcgtaagtgacttgtgctgacacaacgcactccctctggttttaattttgagaggaggggggaaaaaaaatgagtgtactttaaagttgactgtactaccctagacgtgccggcacaggtaggaaggcattaa

SEQ ID NO: 42792 - DNA, 400 bp, Mus musculus
  source 1..400: mol_type = other DNA
ggactccaactgcgcctgccagcgccccctgggagacagactttgggacaaacttctttcccaggtcagcccgcccacctcccgccgcgagcgctccctgcgtaagtgacttgtgctgacacaacgcactccctctggttttaattttgagaggaggggggaaaaaaaatgagtgtactttaaagttgactgtactaccctagacgtgccggcacaggtaggaaggcattaactaactacctcatgccgcggcggatgtaacctcagaaggggaatccctcaccttctccctaggggagtcgcccagcctaggttgcccctgaagcccctacctggggcagcagaggtggccagcgcggcggcgatctctcctgcagccctttcccagccgtggaggttg

SEQ ID NO: 42793 - DNA, 492 bp, Mus musculus
  source 1..492: mol_type = other DNA
ctttggtactgttgcttcatcacagcaaaagcaaccttaactaagacaatccccattatacaagctatgttttaaataacagctttccattcttaaaaggtaactgaaatcctatggcctgatatatttgtttataccacactagatcttttactgcatcaaactttcgaaatgtatcttgtaggagcaattaagttatgacttcttttatttctgcagtatagtgggaatgtatatcagaaattactcatttccttttagcttctcaaaagttacatgaatggtcagtcaagatacccatatctagcgcgaaatgtaatggccaatcaatccacctgtacacaaactgagctttctgttcatttcagggaaagaaatgcgtggaggtcagctctgctctctgggtcgcacctgtcctactagagcggccactggggcaaggtcggcgcctcggcagtgcgctctcttcccggtaggtggcgctctagccga

SEQ ID NO: 42794 - DNA, 485 bp, Mus musculus
  source 1..485: mol_type = other DNA
ctaagaggcagttgtagagcctcaatcccgggaaaaccagggaccggcccgggaatcccacttggatctcaagcctgcgcagctaggaaggatgcctgcagtgcggaggggagggctctaggtcatccccgccgccagcccccatccgcaggccccctcggaggacagcctccccggaccgcagtggggtgcagcatctcgcgcaccgcagagccaggggctgggaggaggggtctctgacctcgcctggcaggggctggcgtcaacgctcccgttctttagggacccgggaccctgaggcccaggctgaaaggcgcagctgtccaccccgggagccgctccgaaccgcagccgcagttccgcgggcgcgagcagcgcgcggacggctggggggcggggcttggcgcatagggcggggccacagacaccaacccgccgcgattggtcggggcggggcttgggggcgtcgggccggaagcaaagct

SEQ ID NO: 42795 - DNA, 493 bp, Mus musculus
  source 1..493: mol_type = other DNA
aactggtcttaagtatactgaaaatgtgatttcagataacttttctaatatcaacctttgaggtgttttaaagtttatcatgttgctatataaattcctgtttcattccaacaatttgagatcataagaggaagctaggtttatagcactcataattgcttccatataaaatataagtaaataatttttgaaaaaaagcaaaggtaactactatttcaactcatttatttgaaggacaattgttctcttatacttttaacacagaatattacttaaattttggcaatacttaatattgacacctagcaagtgtggacgcgtttggtttcacacaaactgcgtacttaaataatacttcaaaactgttttcaacgccgtctctccggtcgcccgcacgagggcgctgtggcgccggctagccgtggccgccgagcagcggacggggacgggggcggggacggaggccgccgacgtcgacgccggcgtgggcgcg

SEQ ID NO: 42796 - DNA, 607 bp, Mus musculus
  source 1..607: mol_type = other DNA
aatgtttttgaagaactgtgcaatgctaatataatgctttctataaaataactgagtctagataatttaaaaaagctataagtaaaataattagaaaacatttcacaggtatctaggcaatatatgtttaggcgaataccatagaaaaggctttgttaatcagacattaatctttaagtagaaatatcaataatgcaaccacagggtttgaatactggaagactatagtcttgcaaaaatgaacatcttggtttccagaataggtctgatcactggacccgcaggcggggagtcgccctctcgcccagtgccaaggcctggacccctcctgcatcaggccccgggggcatggctggcacccaggacgccgaggaagcgaggcggcccgcccctcacccgtcggggcccaggtctctcgcttggcgttcaccagcctggccggagccccgcccccgccccctcgcacggcggctcggccgatgccgccgtgactcagcgcttctcgcgggccgcccggccgcggcggcggcggctaggcgcgggctcctcccgcctcgccaccccctctcgccacccacgcccgcccccggccgcggggccttccgtc

SEQ ID NO: 42797 - DNA, 505 bp, Mus musculus
  source 1..505: mol_type = other DNA
gtgggactccaattcatgtgggtcagcgtttgcccagagagggggtgctgtccctccgctaacagcacaacactaccagaagtgtggggaaatgtttgcttagtaaaatagatcattcctttagttatcaaacttttgtccacaaggacgaatataattttgtaaaaaaaaaaaaaaatgacccgttgatccctattattcagttctcgaactaatttcgattaggtatggcaatgtttattaaaagccctaacagtgtttgcttctttcattcaaacgaggattgactcgcggctccgcgcactacagcgcgaggacctcaggcacctgggccgcgcgcagcgttggataggtaggtccggcagtcatgccccagcctcagctgccgatgactctccacaggcgagagccgcgcacgtggcccagctttgcttccggcccgacgcccccaagccccgccccgaccaatcgcggcgggttggtgtctgtggccccgccctatgcg

SEQ ID NO: 42798 - DNA, 586 bp, Mus musculus
  source 1..586: mol_type = other DNA
taattgcaatgcgcctcatctaatttaggagagggagttttgtaaagtatacccctttctcatttgggttgtaaaactcacaatgaaaggtgtcatgttaagtacaagaaatgtttttgaagaactgtgcaatgctaatataatgctttctataaaataactgagtctagataatttaaaaaagctataagtaaaataattagaaaacatttcacaggtatctaggcaatatatgtttaggcgaataccatagaaaaggctttgttaatcagacattaatctttaagtagaaatatcaataatgcaaccacagggtttgaatactggaagactatagtcttgcaaaaatgaacatcttggtttccagaataggtctgatcactggacccgcaggcggggagtcgccctctcgcccagtgccaaggcctggacccctcctgcatcaggccccgggggcatggctggcacccaggacgccgaggaagcgaggcggcccgcccctcacccgtcggggcccaggtctctcgcttggcgttcaccagcctggccggagccccgcccccgccccctcgcacggcggctcggc

SEQ ID NO: 42799 - DNA, 180 bp, Mus musculus
  source 1..180: mol_type = other DNA
agaccagtcacatatatagtatatgtgtgatatagtaaagtaaggagggggcaaatagccccccccttttttttttactagtcatacctagctgttgccaggtaacgaaggaatgctgacaatgctttgctccctgggtgtcccagccgctttgtttttaaaacattggttaaaacacgc

SEQ ID NO: 42800 - DNA, 641 bp, Mus musculus
  source 1..641: mol_type = other DNA
gactgaacagaggtcacctgtgtaaagccagaaagggaagtacctaagggaacttctgatcttagaatttaaaagaatagttaagacaatgacctttacaaatgtcaactcatgaaattacaaataatataagacgttccgacatatttaaatggcaaaaattacagtttagagtgtaatctggcattcagctttgctttaagcgttgtaactgagactagtggagcagcctcaaggagtgggcctctactgccgaggacaggccagctagtcacaggcacgcttcttaggagaaggggctgggctctgttggcagcgcacgctgccgcccttgcctcccgcggcgatccccgagcatcctgcagttgcccggcaggtatgcgcggcgcgcgcgcaccaggtccgcccggggacgcagcgggtgcgcgcggggacgcagggcgcgcgcaagaacgcaagcctagagccgcggcgcccctccccgtcgcccgccagggatgctcgcgtgcggccctcctcccgtttaaagccgcggctccgaggggggcggcgccgctggcgttctgcagaggactggcccgggttcgtcggctgccgtcacctgactcgtcgcaggcgctccagctgaggtgggggcgggg

SEQ ID NO: 42801 - DNA, 554 bp, Mus musculus
  source 1..554: mol_type = other DNA
ctgctgctgggatcagccccagactgaacagaggtcacctgtgtaaagccagaaagggaagtacctaagggaacttctgatcttagaatttaaaagaatagttaagacaatgacctttacaaatgtcaactcatgaaattacaaataatataagacgttccgacatatttaaatggcaaaaattacagtttagagtgtaatctggcattcagctttgctttaagcgttgtaactgagactagtggagcagcctcaaggagtgggcctctactgccgaggacaggccagctagtcacaggcacgcttcttaggagaaggggctgggctctgttggcagcgcacgctgccgcccttgcctcccgcggcgatccccgagcatcctgcagttgcccggcaggtatgcgcggcgcgcgcgcaccaggtccgcccggggacgcagcgggtgcgcgcggggacgcagggcgcgcgcaagaacgcaagcctagagccgcggcgcccctccccgtcgcccgccagggatgctcgcgtgcggccctcctcccgtttaaagccgc

SEQ ID NO: 42802 - DNA, 373 bp, Mus musculus
  source 1..373: mol_type = other DNA
gatctgtgtattttcctagcaaaaagaaaaagccaacatgcctattaatatatacagtatatggtttagatatagccatttatttcttacagaaacttcctttaataaaaaaatcactctatttaggagtgagctacttagagaaggtcttctggaaacgtcgtctggaaacgtcttttactcgttttccagacgtgaagtcctctttcctagagcttagtattttacaggagagaactattcagcagtctgaacgttttgatctttcagcagaaagctgtcatttccttgtggtgctgaagtttacccaagccgggcgaccgggctcacagagtgagtgagcctttccgtgagcgtgattgcgtcacgacgc

SEQ ID NO: 42803 - DNA, 311 bp, Mus musculus
  source 1..311: mol_type = other DNA
atttgctttgaaacagaacatctgaagaataaataatttatctcatatcatatgataacagtaacaggcagattgtgaacataacttttcaataacatttttttaaaaacatacatttattattgatctatatttccacatacgtgtcaggcaattaccagccctgggcatttttgcagaaatacacaaaaacgtccgtgtgtcagggtattaacactcgctccagcagccggttcccgggcgcacgcgttcacacccgcgcgcggcccgcggcgccttcacgcgctgccgctgcgacaccgacgcggtcg

SEQ ID NO: 42804 - DNA, 297 bp, Mus musculus
  source 1..297: mol_type = other DNA
gaattcaaagagtgagttttcttatttataaaaccaacatctcagagactggctctagtgttacagagtaactctaactttactcaaatagccctctagatacatcctttggaaagcggtgttgctgttaacttgaagcctgctcccagccccctgctaacgtcagtctgaccttggcatctgcctatagcagctcatgagagcttgctcaggagctcagctacagcctctgtgcccagtgccgcctccgccgctaggtcgcgagcgcgcgtctccaccgcaccgcggcgcagggag

SEQ ID NO: 42805 - DNA, 247 bp, Mus musculus
  source 1..247: mol_type = other DNA
aatgtgctcaattcagtatgtactactgaattaagttgacttgtaaattgtaaaatttaaataatgtacataatgctcacactcagatgtcaatatgcattgttgagtgaaaagttccaaagacctttactgtttgaagattttactgtgtatacgtatccagtgctctcactgactaatgccgtttttaaaactttcaacctggacacacgcgctggctctagatggtgcgcttgcgcctgcctcg

SEQ ID NO: 42806 - DNA, 487 bp, Mus musculus
  source 1..487: mol_type = other DNA
actaaagatttgtgcacatagtgaattttattctacaagtgattttttttccacatcctgttaatcctaagaaaatgttgagtttaaacaacagatctagagttctgctttcttttgaatttattttaaagaaacacgccgattaaaaaaaaaaaaaacatacagaaattcataaaacatggtttactttgtgaagttttgaagttaaacctatatcattaaagacaaacagaattaaaatcccaggacctacgttttaaaataattagtcctaaataaaaggaaatgttatatgaaggtctgagagatattacaatgattaatttttaaatctaaaaaatatcaaatatgcgtaaactcattgagaaacaacaaactgttggctgtaagttcctggatttaagggtccttgaaagatcctctatactacctgaggctcagcctttcctggtcctgataagaaaagcctgaagatggcggcgctttc

SEQ ID NO: 42807 - DNA, 257 bp, Mus musculus
  source 1..257: mol_type = other DNA
ttatatttaatgatttgttcataacaaatatggattttcagagctggccctatgccaccgctgagggtcggtcccaccgagcgggctctgcagttgtcaccgccgcccgcccggggactgcggcacccagcctctcggacctgcggccagaggctcccgggtgcctcgggtgccagggtcgcatcgggtgagggcctggggctggaagaggcgggtctgtccccgccccgccctcctctactccgcagtttagtaga

SEQ ID NO: 42808 - DNA, 524 bp, Mus musculus
  source 1..524: mol_type = other DNA
tatagataatactttttagataatactttttagagggaattattttggttttagatattaaatgaaattatagatgttagtgattttagaagcaaagagataagaaatctaaaacaaaaacctaattctgtagaagaagatcttttttcaaattgtaccttcttaaaaattagttgatgtaaatatttcatacatttttaggaatggggttacttttcaaaattgtttcatggctcatcgtagaaatgcattgccaaacttgagaaaggctctgctgacagatggcaagcatgtgccatgggtgcaattcatctgtgatgaaagacgactgtattcattttttttaaacatacatgacatgaaattagcattgtttaaattcattagctaattcattaattttacaagtttaacattttatctttaccttttcactagaaaattttgtatgacctagtttcctaagttaaaaaaattaaactaaaacataagttcaccttgataacattttccagattgaagaa

SEQ ID NO: 42809 - DNA, 368 bp, Mus musculus
  source 1..368: mol_type = other DNA
tttggtacacgttgtattaaagttggttctgaagaaattaggaatacatgtaaatttaaggacaaagacctgacaccttttcagaatattgaaaatattaatgaagctgctgtttccctgtccagtgtcagaatagcatgaaatcgagcaattatgctgtagttgaaactagaatagcttacgctctaagggtaatgtttgtagggtaaattcaaacgtttccagcttgatccccttttaaaaagcggacttgaaggcgtcctttcctcctctcctttcccagagggctccaggagccgcacgcggctgccgctccgagcgctccccagtcctcccgcgggatggtggcggcggccttggggccgcgc

SEQ ID NO: 42810 - DNA, 613 bp, Mus musculus
  source 1..613: mol_type = other DNA
cctcgcaaacccgcggcgcccctccctccgcccagggtattcgtggaagcggaggacggcgcgcgccgggccgcgggataccccattgtctagcagcggaagccggggctccccggggtgactcccgaactccagccccgccaccgggtggccccgagctccgccgttccccgtggcctcgcctcgccccgccccgggggacacgtgcgcctgcagcttctccagcgcccagggcgcggggcggccgcggcggcgacagccccagccccggcagagcgggcagccaacgtcgggcaccctcggagcccaggccggcggtggggcggtggggggcgacacgccgagccggcggccccgcccgcggagcgagagggagtgtccgcacagagggcgggtctctcattcactcggcccctcgctgtcgccgcggcggaagggcggggtctctcccccccccccgaccgggagttaggggcggggcgagaggcggggctcgcgggcgcgcgtcccgcggcgtcgtctgcgtcgtcacgtcagcggcggccactcgtgtgtgagcggccgcggacggggggggtcacgcgggggcgcgcgcgcaccgggagcgcgctcg

SEQ ID NO: 42811 - DNA, 408 bp, Mus musculus
  source 1..408: mol_type = other DNA
aaaaacaaaacaaaacacatttcaattttagtaagtgatttttttcatttcaaattcaaattatttctaagcattattggcaacacacaacataacttttgtctcttgtcaattcatatagtttgtggctattacaatggaagtccaacatgttggttcgatttcaaaatgaacttgaaaattactgtgtgtcaattcataggatttaagaaacacgaagcgttcagcttcctgcagtgctctgtacagccagaagagagccccagaccttagtaggctctgagaccttagtatctggataataagactttttattggcttaaacccatgtttagtagtcttctctggtgactaccctacaaaagacatatcgcgattatcagataggttttcccagaggctcatggg

SEQ ID NO: 42812 - DNA, 544 bp, Mus musculus
  source 1..544: mol_type = other DNA
atatccaaatgtgtgtatccatacatttaaattactttgaattatatatttgacctttgaagtcttaagtttttttctgcagataatttagaagggagaaataggccagaatgtttaacttctcagcattctgacagtataactgtcactagtgtctgtttcccggttgagcgcccaagcactggacagcatggctgtctgcagaccagataaacggagagcttttcggttttcacgctgccccgctgaatacacaagcgcagcgctggccagcggcgctcaaagctgcctgcgcggcgaagtcaaggccactccctgccgccgaccgtccgtgtcgactaggctcgaagcaggcggtgacctcgcctccaactgcggccccgccagactcggaagagaccggtggcggcgagccagcgggagcgcgcgcagcaacggagatgcacgcggcggcgggcgggcggcgcgcaccacgccccggaatgcgcgcgctcccacgcgttgcttcataatcagtgacagagggaggggcagcctcgatctc

SEQ ID NO: 42813 - DNA, 430 bp, Mus musculus
  source 1..430: mol_type = other DNA
gggattgaactgagttcacctcattaaattctgcctggtcagactggatggaagttccatactgactgcttcagagctggtaagagcactgactgctcttctataaggtcctgagttcaaatcctgtgaaacagaatgtttaacttctgaggatattgacagtataactgtccctctgggcacccaagcaggcgttggatacaacagcgcggctgccaccgggttagagttggggtgaggtcaaggctactcctggccatgccacgcctgcaactgcctgccagactggccggtggcggagagccagcgggagcgcgcgcagcaacggagacacacgcggctggcgggcgggcgggcggcgcgcaccaagccggaaacgtgtctcgcgtccaatcggtgccagagggaggggcagccttgctctcgctcc

SEQ ID NO: 42814 - DNA, 329 bp, Mus musculus
  source 1..329: mol_type = other DNA
aatatgttaaaataatacaattctaaatcattaaatgtatcatccttgccaggcaggcacacttttcttaacaaaaatagtgctttaaagatcaagttttgtttctcagctgggaaatgacatgaagttgatgtcatcaggcggatttctgagttcgaggccagcctggtctacaaaatgagtccaggacagccagggctcaaaaaaaaacccaactcttttcaactcttttcaattttcctcttggtcaaatgaatcaaatggcaacccccatcttattcttgggaactaaacaagggtttggatccatttgaaaacattactgtaac

SEQ ID NO: 42815 - DNA, 357 bp, Mus musculus
  source 1..357: mol_type = other DNA
caactacaaatagtgccaatcgtataggtattttctttaaaataattccgttgaggatatactcttaagttccatgtatgttctaagtatggacaaataaaatacagcgcatttttgaacagttgtatcactgagcctcatgtttgtcatctgtattacccaactcataaaaaaaaaacacatgcgaatggatttcaatagacagtaatggctacaatgcctttcctagcaatgaagctcagctcgctccctcaggaccagcgagagccgcccttgcctgcggagcgcgctccccggacgacgcgcacgcgcccccggggaggtgcgcctgcgcagactcgcgagcccacccttccc

SEQ ID NO: 42816 - DNA, 486 bp, Mus musculus
  source 1..486: mol_type = other DNA
tcagaaaggagaatgttttatccattgaccaggaggcctgtactccacaattagatgaatatcgagtccctgggctacgtgcacagtctgctcagatgcctaagtggcctgtgcacctctgcaggtttacagaggcaggggaagtcccgccccttaagctccgagggtgatgggcgcggtgcttgccaggaatggcggcggtcacggtaaacagtgccaagcggggcctgcgggccgagctgaagcagcgcttgagggccttgagcgcggaggaacggctgcgccagtctctcctcctcacggctccgggaagggtgggctcgcgagtctgcgcaggcgcacctccccgggggcgcgtgcgcgtcgtccggggagcgcgctccgcaggcaagggcggctctcgctggtcctgagggagcgagctgagcttcattgctaggaaaggcattgtagccattactgtctattgaaatccattcgcatgtg

SEQ ID NO: 42817 - DNA, 342 bp, Mus musculus
  source 1..342: mol_type = other DNA
ccagagatctgaactcagctaaactatctctgcatctcagaaaaattaaaggctggtgagatgagcacccgactgctcttccgaaggtcaatgtctgaagacagctacagtgtacttacatataataaataaataaatctttgagtcctgttagaaaaaggcattatctgtctctaaacagcagatgtcagaaaggagaatgttttatccattgaccaggaggcctgtactccacaattagatgaatatcgagtccctgggctacgtgcacagtctgctcagatgcctaagtggcctgtgcacctctgcaggtttacagaggcaggggaagtcccgcccctt

SEQ ID NO: 42818 - DNA, 379 bp, Mus musculus
  source 1..379: mol_type = other DNA
gggattgaactgagttcacctcatgcctgatcagactggatggaagttccttactgactgcttcaggaaagctggtaagagcactgactgctcttctataaggtcctgagttcaaatcctgtgaaacagaatgtttaacttctgaggatattgacagtataactgtcctgggcgcccaagcaggggttggatcagcgcggctgccaccgggttagagttggggtgaggagctaagcggcctgccagactagccagcgggagcgcgcgcagcagcggagacacacgcggcaggcgggcgggcggaccgttgggcggcgcgcaccaagccgctctcgcgtccaatcggtgccagagggaggggcagccttgctctcgctcc

SEQ ID NO: 42819 - DNA, 279 bp, Mus musculus
  source 1..279: mol_type = other DNA
tatcaaagctcaacaaaatgatatattttctcttaacttcaaattttcaaatcctcattcattcatgacagaatgaagagagcatcattcctttttcaagttcaagccaaagatgatttctaacccagataatggataatgtatgtgatatactcagcgcttataccaggcaaatgaaatatgtactgagtttaattgacgaaaagagctaactttgtagagtgactttgaagagcctcttgacttttaaactgaatcagaagaggaagctctgaaaca

SEQ ID NO: 42820 - DNA, 349 bp, Mus musculus
  source 1..349: mol_type = other DNA
ctgtttgtacaatcaatttgtacattcactacattcactgcagccactccaacttagaaaggccagagtagagtaaaaatgtatgctggcaaaaatgtaaatctagatttcatacataccttttaaaagagtcaggctttaatcaagattgctctaatacttcaattagaaaactaagctgttttatcttttgttaagatttctacccagctccccgggacgggacctaagctccactgctccgcagaaccggagcataaaagagtctttggagcgagagcaaggctgcccctccctctggcaccgattggacgcgagagcggcttggtgcgcgccgcccaacggtccg

SEQ ID NO: 42821 - DNA, 305 bp, Mus musculus
  source 1..305: mol_type = other DNA
aaatgatatattttctcttaagttctgtactcactaggtatcctcattccttcatgacagaatgaagagagcatcatgattcctttttcaagttcaagccaaagatgatttctaacccagataatggataatgtatgtgatatagatcccagtctcagcgcttacaccataaatgaatacttaaaatgaagtatgtactgagttgaaattgacgaaaagagctaactttgtctcctccagagtgactttgaagggcctctagtttcatttttgacttttaaactgaatcagaagaggaagaggaa

SEQ ID NO: 42822 - DNA, 378 bp, Mus musculus
  source 1..378: mol_type = other DNA
atgagaaaatcatcacatataccaagtgatgctatgtcaacttgctccttagtttaaagtgattggtcaaataatccctgagggtcaaggtttatcataaattttaaagttaaatgatcaaaagtggggtagaaacctccaattaatttttctacattaactatgtctttaattgaactattagacaaacatgactggtttttttgtgataaaacaccatgaccaagtcaacttgttaaagaaaatatttaacttagaggataagctcacattttgatgtacctctgtgaagtaggcatttaaacagggttctttagaacaactttgtagttgatcgttcttagatcaagaacattggccccgtacctagttatgttc

SEQ ID NO: 42823 - DNA, 293 bp, Mus musculus
  source 1..293: mol_type = other DNA
aacaaaatgatatattttctcttacttctgtactcactaggtatcctcattcattcatgacagaatgaagagagcatcatttcctttttcaagttcaagccaaagatgatttctaacccagataatggataatgtatgtgatatagatcccagtctcagcgcttacaccagaatacttaaaatgaagtatgtactgagtaattgacgaaaagagctaactttgtccagagtgactttgaagggcctctagtttcatttttgacttttaaactgaatcagaagaggaagaggaa

SEQ ID NO: 42824 - DNA, 284 bp, Mus musculus
  source 1..284: mol_type = other DNA
ttggcacactgacatggtctgtagatgtaagtgtgccagagatctgaactcagcttagttggtctttttaccaactaaactatctccgcactgttagaaaaaggcattatctgtctctaaacagcagatggtcagaaggagaatgttttacattgaccaggaggccctgtactccacaattagatgaatatcgagtccctgggctacgtgcacagtctgctcagatgcctaagtggcctgtgcacctctgcaggtttacagaggcaggggaagtcccgcccctt

SEQ ID NO: 42825 - DNA, 440 bp, Mus musculus
  source 1..440: mol_type = other DNA
ctgttagaaaaaggcattatctgtctctaaacagcagatggtcagaaggagaatgttttacattgaccaggaggccctgtactccacaattagatgaatatcgagtccctgggctacgtgcacagtctgctcagatgcctaagtggcctgtgcacctctgcaggtttacagaggcaggggaagtcccgccccttaagctccgagggtgatgggcgcggtgcttgccaggaatggcggcggtcacggtaaacagtgccaagcggggcctgcgggccgagctgaagcagcgcttgagggccttgagcgcggaggaacggctgcgccagtctctcctcctcacgcagaaggtgcgagaagactgccgggagctccgggaagggtgggctcgcgagtctgcgcaggcgcacctccccgggggcgcgtgcgcgtcgtccggggag

SEQ ID NO: 42826 - DNA, 507 bp, Mus musculus
  source 1..507: mol_type = other DNA
tcagaaggagaatgttttacattgaccaggaggccctgtactccacaattagatgaatatcgagtccctgggctacgtgcacagtctgctcagatgcctaagtggcctgtgcacctctgcaggtttacagaggcaggggaagtcccgccccttaagctccgagggtgatgggcgcggtgcttgccaggaatggcggcggtcacggtaaacagtgccaagcggggcctgcgggccgagctgaagcagcgcttgagggccttgagcgcggaggaacggctgcgccagtctctcctcctcacgcagaaggtgcgagaagactgccgggagctccgggaagggtgggctcgcgagtctgcgcaggcgcacctccccgggggcgcgtgcgcgtcgtccggggagcgcgctccgcaggcaagggcggctctcgctggtcctgagggagcgagctgagcttctgctaggaaaggcattgcagccattaggagactgtcgaaatccattcgcatg

SEQ ID NO: 42827 - DNA, 628 bp, Mus musculus
  source 1..628: mol_type = other DNA
ggagacctgcattcatatatacatactcatatacacacatgtgcatacacataattgaaaataagtagcacagagatagtacattttattaataattatattatgggtgctgtcatgcacattagctccttgatacaggatccagtatatgagtagtgaaattctttgttaaaattaagattcaccatatctaataatgttctactgacagtaagtgtttatgtatcagcaaatattataacatgtaatgtctctttgtttatggactatggtgaacataaaatcatatatatccttcttagggcagttgtcatgaataagacaataaatcaacttgtctttcaacacttttagaagttaaaggggatggcagattctctctgaaaaaattttcaatagatgcttttatttgtctgtgtgcaagaaaacctgttttcccccagtgtagccatggggtttactttgttgaacataggtaggaggggggagtggaggatccgtcgcctcccttccctgaatgtgttcattacgtccgggatttctccggacgtggcagacactatgcaagtcagaaaatgcgcttgcgcagcgggcggaaaggttccccgcccacctctctggtgtgcgg

SEQ ID NO: 42828 - DNA, 433 bp, Mus musculus
  source 1..433: mol_type = other DNA
ttttttggaacagtgtcagagacatacatacatacatacatacatacatacatacatacatacataaaaatagcaagacaatactttgaaactttgtgctggaacgttgaacatataaatgagataattttcaagaaatatagaaatcactaaaattatgtcaagaatgaaatttagaagaaaattcaacttacctctaggaagctgactagtgctttgaataatatgcagtagctatgaattaatttagttaaaagataactaaaaattgtttagtgttgcacacaatcagattctctcattgtggactgtcatcctgagatctcaagactttggaaaggtccgttacaagggggaggggcagcggctcctttccccacaggggcaggtaggcacctccccggctggagagcctttctcgggcgccagcggg

SEQ ID NO: 42829 - DNA, 360 bp, Mus musculus
  source 1..360: mol_type = other DNA
tgtttgaagcccgccttcaggcttctgggatatttgctgaaaactcccaccagtggcttgccagccagacctttttattctcgtgtcgccggcgaagccgcgaggaatagagaatgaacaaactagtgccaccttgaattagaaaaatagccgaccctaggtctaaggtgcgccgcggcggggcgcaaagagatctgatttgggaggaggcgccaaggtgcagcctgcgtgcggctctgcgcctcggcggggctgcgtgcggaccgccctcccctcagttagctgagggagggtcgtgcaacatccccaggggcccccgcggctctgcggagagaaagcacggcgcccgatctcaaagtg

SEQ ID NO: 42830 - DNA, 399 bp, Mus musculus
  source 1..399: mol_type = other DNA
ccgcaccagaacccggctggcccggcagcccgcgcgctctgccggtgcagcatgcgggcgctcattgcgccagcgcagctatgtgaaggctcccatggtcccaggcgcctgtgtttgaagcccgccttcaggcttctgggatatttgctgaaaactcccaccagtggcttgccagccagacctttttattctcgtgtcgccggcgaagccgcgaggaatagagaatgaacaaactagtgccaccttgaattagaaaaatagccgaccctaggtctaaggtgcgccgcggcggggcgcaaagagatctgatttgggaggaggcgccaaggtgcagcctgcgtgcggctctgcgcctcggcggggctgcgtgcggaccgccctcccctcagttagctgagg

SEQ ID NO: 42831 - DNA, 199 bp, Mus musculus
  source 1..199: mol_type = other DNA
ggtttttttttttttgagtatacatccaatactaccccaaagaacaggtttcgaagcttctggagaggcctacagaaaataaaaatctgggttttaacaagcgggcgtggggggggggcaattgtctcccactcccctcccccacccccggcatgcctctgggcggcacgggcgcaggcttgaggcggcggctgcgcgg

SEQ ID NO: 42832 - DNA, 299 bp, Mus musculus
  source 1..299: mol_type = other DNA
tctgaaaactggtcaaagccactagaccagtagtttcaacctcattttatggtgatccccaaaccattagattatttttgttgctatgtcataactgtacatttgatactattataaattataatataaatatctgtgtttttggccccttttaaagggtcatttgaccccttctaaaagacttcttcatcaaaatgctgttgggggtgagcagtccagacagccctgcttcctcccacttcagggtcagaccctgagaacccttcttcccacctcctttccacaggctgggctcagag

SEQ ID NO: 42833 - DNA, 425 bp, Mus musculus
  source 1..425: mol_type = other DNA
tggtgggcacaaaggtgtgtgtgtgtgtgtgtgcgcgcccgcgcgcgcccgcgtgcatgttctcctggttggctggctttcaggctaccagggtcccttctgaaagtctgtagccactgtcttggcccaccagagtctctaggctgttggcagaacgctgtgccgagtccatctttctcctaggttgactttggacgggcaggcattctttgcctgggacgcatactggcctgggcgcgcaccaccgccagggggacgtctgtagccctgcgggcggtccggatggggaccgtgctctgcaagaggtggcccgcccgcagggcgctgaggcctggcgggggcggggcgagaccggtgggggcgggggcaggagcccgccgggcggggcgggggtgggcgccctgctccccctcccgccctccctc

SEQ ID NO: 42834 - DNA, 362 bp, Mus musculus
  source 1..362: mol_type = other DNA
aattgtttttaaaaagctacattataaaactatatgtaagaaacttttgtcaaaaagcaattgaattatgcaacaaatgaacaattttaaaagatgattgtttaagtcagttgaacacaccatagcattctccatgttgacagcaaactttaaaattctccagttaagacagtatacttatttaagcaataaatggtaaaacatgcatgagtctttgttttcaaatgcaaagaatttgaaatttctttatctttggtatagaaatgagcaactcgatgtttgcttactcatccgaatagctgtcttcacgtgtgtctttttctgacagccagacaaacaagctgctgcacctgcagctgagc

SEQ ID NO: 42835 - DNA, 327 bp, Mus musculus
  source 1..327: mol_type = other DNA
ggtctctattgctgtaataagctcaggggtggcacggtccacagtgggctggaccctcctttttcccaaaggactatagcttgggtcagcacagtggtattttcaggtcataagggcatttgtgcagcaaaacaacttctatttgtttgccttttaccaagtctccagtgtgtgatttttttcattcagtgaacaaaccaggatgttttaaaatcaaacccaccctggatcgctaaagaacccaggctacccacgctgcgggggcgcggcgggggcgggactacaagtcccaggctgctcagcgcgccacggccctgcggagggcgc

SEQ ID NO: 42836 - DNA, 356 bp, Mus musculus
  source 1..356: mol_type = other DNA
aaagcttccccccaactgctgctctcggagacgccgggggtctccagtctttaaacgctctgcaagggaaaagaaatcgtggcatttttttccttccgtgagaagagggggaaaaaatttgccctgttagtcaaaaggggatgtcaagcgctttacaataccggcgggcgggccaatgagcagcgcgcggcgccaccgcgcgcccttcgttggcgcggcggccccgggcggggtgtgtggggggattgccgcctcaccaatcctcgcccgcgtggtacgtgacccctccccctgctcccattcatcagggggggggggggacgacgacggtgtcgtcctttcaattcatttatctg

SEQ ID NO: 42837 - DNA, 443 bp, Mus musculus
  source 1..443: mol_type = other DNA
tctctctctctctcccagctagcttgctagggctagaggaaggatcccctaccaagcagattctggtttgggtagggtgaactacaatcaggctgctgatcatatccctgtatctgaagggggaaaaaaaatctgcccccactctcttaatctgagcggactcctgtaaggagagaaaaaaagcggaagcagctggtcttaggggtttctttctttttatgtattttcttgagggaaaagatacaccaggccattcttttatccatgaaaatcgtttattcaaggagatatttcctctagaggctgcactgctctttcactagggttcttcaaaaaagaaagtcagtctttgtggaaaatccaccggggacgttgacagagggtatttttaggaaacccatccaaatagcgctctctgcaggaaacgcgagcggctccagttc

SEQ ID NO: 42838 - DNA, 356 bp, Mus musculus
  source 1..356: mol_type = other DNA
aaaaacatccaggtaacttacatgattggattttatgtctctggtttgagacctactaaagagacttgtactcaagcttgcatactcttctcaatgactagaacatctacaagacatatatgttaaagacaaaacacaagcagtcttgtggcgagtggcagtatttaataaagcctcttattaaaacgtggtgaatctcggagtgaccccagacccataacagtcatagggagactccgtctcaaagaggctcattcacctgaatgtgaacaactgaaaataatattgcctacctcctgctggtactcagtagaagaagaagaaggaagggaaagcattcctgagtctccttttga

SEQ ID NO: 42839 - DNA, 360 bp, Mus musculus
  source 1..360: mol_type = other DNA
agaacagtatattctatgcacactggtatttatgtacatgcagaaatatacacatatgcaagtagtgagtgaagactcaaaattcacctgtcttctgtgtcataggaaggtatttttagataattggaaatttcttagaaatgtccaactaagtcagaatctttttaatttaagaagcaccgctttactaaacaaaacagatgctgatttttctggtgagtgagccgcacagttcaaaccaaacctgaatgttttctaggtggtttcacagactgtgttatataaaacccataagatttttaaaaagatacttaagttccaaggtgatgaatagcctttctttccaaggcaatcaagggc

SEQ ID NO: 42840 - DNA, 435 bp, Mus musculus
  source 1..435: mol_type = other DNA
aaaaacatccaggtaacttacatgattggattttatgtctctggtttgagacctactaaagagacttgtactcaagcttgcatactcttctcaatgactagaacatctacaagacatatatgttaaagacaaaacacaagcagtcttgtggcgagtggcagtatttaataaagcctcttattaaaacgtggtgaatctcggagtgaccccagacccataacagtcatagggagactccgtctcaaagaggctcattcacctgaatgtgaacaactgaaaataatattgcctacctcctgctggtactcagtagaagaagaagaaggaagggaaagcattcctgagtctccttttgagcacagaccagtattctactgagagcctctgccaggaactcagactttggttgcgtatctttccagtcaggaaaaggaa

SEQ ID NO: 42841 - DNA, 432 bp, Mus musculus
  source 1..432: mol_type = other DNA
tgttctggtaaaataaaaactttaaatcaaaaaataagcgaatgtttttacccttacagatgtttgttttaaagaatatttgggagtcctttcaaagagtagccttcttttaaggagaatttaaagtatattaagctataaatttgaatcttagtattattgacttgtgaccgcacacacttacacttacaggggtgtaattataccttataaaagacttgctgttataggataaataaataagtaagtaaataaatacaaattgtatgaaactctcaaagatctaataataatgataataatagaagataatattatctaacaaacatttctctgtttacacaggtagtatatttcttcagagactatttctttagaagaataatgatccatgtacagttctataaatactctgagatctatagaactagt

SEQ ID NO: 42842 - DNA, 322 bp, Mus musculus
  source 1..322: mol_type = other DNA
cacacatgggacactataaatgctgcctttttttttttaatctaagttttgtcaaaacccaaagcttgtttaattttattaatggattcagcccagcaatgcttcacagacatgattttttaaaattttattttaattaggtattttcttcatttacatggcatataaaatttgcaagaccaatgggccaatctagatattacatctcgctaagactttgatgtcctttcaataaaaggctttcatttgagaagtattcttggcagatattaccgaccagaacattattaattgttaaatctattctgacaaatcatgtgcg

SEQ ID NO: 42843 - DNA, 333 bp, Mus musculus
  source 1..333: mol_type = other DNA
tctaaaatcctgagagagaaatctcagaattgagaatggcagtcatgaggacattcacctgacaaactacctgatctggaacatgttgacagtcagtacttagcataaaaacctggatttctggatttctccatgttaatgaggtatctagataggtcccaggtatttaggtatttaatccctggttcacaatgagtaagatgaatacattcacttggacaagcaaggacctccttcttcatcaaggattgaaagtggatcggcttgcccatgtgcttaggcaccccaccagtgaacctgttgtcttttatatcacatgtactccctggtaca

SEQ ID NO: 42844 - DNA, 411 bp, Mus musculus
  source 1..411: mol_type = other DNA
gccaattttacaaaacctgtgatcataaactttgagtaattttaactttaaaaaatcagacttagaactgcaggaagatttaactaacacggagtgtgtgagacaaagttgtcaaaactttcacccctgcacaactcagtttaaatcctgggactaaaaagcacagcctcaggttgcccaagctgggcttggactccgtcggttcaccggacaatgaaaagtttctgtttacagactaaaatcaaagcatggccttccttgacacactcacctccgggagcgctctgcacaagcaagctccctggagccccggcgtgaggcggtgcgccgggatagcccgggacgcggggtcccggagcagcgccccgcccccggccctggccccgccctccttggctgctcttaagcccg

SEQ ID NO: 42845 - DNA, 431 bp, Mus musculus
  source 1..431: mol_type = other DNA
gtgctctcattgagtccagtgtatgtgcatcagtaaagcacagtcactgggtgatgatgtccaatgtggatgtccgctcgactgctgctttctctgataatgagagaaatttctggaatctcattttccttcgcccactcagctgcagccgccgatgagatttctgaggactctgtagtctattttcaaacctctgagccacgctttgaagtaaggctgctttgaagcaactctgaagatcctgacgaacttgatgcgcatctgagagctgaccccgtcctctcaaccttggctgttcggactgctctaacctgcctgcagtgctcacgagtcaggcccactgcgggtgcccggaccctggcccacaagtagacctagatttaagggaaaataatggcctcagggctgtgggatcagatagcacaggctgt

SEQ ID NO: 42846 - DNA, 428 bp, Mus musculus
  source 1..428: mol_type = other DNA
tcccagagtgggaaattagctttccgatgggtagttacctgaacgctagagttacaggtctgtaagaccataatattattatgtgtttgtctcaaagccccttacaatacagaaatggaattctaattctatcagaatagaagtttaccatgtggtgagatgtgggggtctaaggaaatcttgatgtttgcctatggaggtaccagtcttcttcaacaaatttaaatagcaaaatctttttgattattttagttgaccggcaattataaaaagtcagagaaatcctcccctgggaggctgtggtgggagtcttactatcaatgtacaatttgccagttgcatacagacaagatctctttccagagtgaatcatttaaagacagaatcttttatgatgaaaccaccctctggagtttgaaaagagacgg

SEQ ID NO: 42847 - DNA, 679 bp, Mus musculus
  source 1..679: mol_type = other DNA
aggtgcggcacctgacggcctggctccctggggtcatcgccacagcaacgcgtcctggccgcaaggcaggcctgggcccagcctgtgaagcatgggggaaccgggctcctcggggacccggcgggcggcgccggtgaggaaggacctcatcccgccagtgctcactcatgcagcggcataccgctggcccactgtctgcccgcaggccctacggcggcacaaagcgataaggcccggagcgggcggccaggccccgcccccaggacctggcccggccccactccagaggcctccggggcgcctgtgtagcccgacagtcaccccagagtagccgttactgaaggtctccggtggcggagctggcgagctccgccctcccgggcgcgccctccacccacccaccgcctccccgcgagctcgcgctgacgcttcccgggggcgcgctcgccccgcccccggccccgcccctcgctctcgggcgtgcccgcgcgtgggggccccgccgcatcctctctcgagtgtgaggcgtccgggactcctcactcgcccccgcgcgcgctgctcgcccgggacccagcaaggcgcagctcaagcgtcccgggcgggagtgcgcgtgcgcgcgaccgcggctcccgcgctccctcctccccccccccctccccgcgcctctataacttgg

SEQ ID NO: 42848 - DNA, 500 bp, Mus musculus
  source 1..500: mol_type = other DNA
aagtaactttcaacgtccaaaaacgttttcctttgcgatcaagttctttgaccctgtctcagagggtgtcagcgaacatctgccgggcaggaggtgggggtgggcgaaaccttgtggccttgtccaaatccaggacactcggaaaggttgcggagaggcatactctgaagcctcttcagtgaccccgggcccagaaagatttattacttcctccttgagggagaaaccacaaaccccccgctgcacacagcgctgttgggcggtgctgctcgcgtcctaggaggggacaccagtgctgctcaccaactcttctccacccaagtctccggctgtgcgggcgagctgggaatcaggcgccggcgccgcgccccgggcgcacctagagctctgttctgctactaacggctggaggccctagcagcgcctccttgaaccgggtcgcatctccagcccctaaggaggtggcggcgggcgacagacggcggcgcgcaccaaccccg

SEQ ID NO: 42849 - DNA, 252 bp, Mus musculus
  source 1..252: mol_type = other DNA
atgctcgttttaacgtgagcagattgcaaatttgccttccaccaaggcctgtgccccctgggggatcgtgcggcaagaactgcctcatcagctgaggtgagacgctcggctcacgtggctactgcagttgctttaaaagagcagcttcccgcaggcgcgtgacgtgactgggcgccgcaagcggggcgcgtaaaagcgcctcgacgcggaagtcacgcggccccggcgccgcggaggtctccgtctcggcgt

SEQ ID NO: 42850 - DNA, 489 bp, Mus musculus
  source 1..489: mol_type = other DNA
gttaagttcttaagattacaagttcattattagaaattaaatctttaaaatatttgttgggtcctctgaaagaaccacaggtatctttttcttcttcttataaaggtgaatgtaatgcaaaaaccctcaagacgttaaaaaaaaaagtatgaaatttttctgaagttaaataaagcctcgatgctagaaccgttctcggggatatagtttataaatcttaactcatctaacgtttccttttccggcgttcggaaaacttcaaaagtgagatgagaggatctgacatttaacaacaattcactcacaaatcgcttgcttgcaaatgcatgttgtgcacacaggctcaagcgcgagtgaggagccgggttccccagcagttttacttgagagcagctgggggcaaccccccaccccggaaaaccaaggctggtcctgggtaccgctggcggggctcccttcccccctgcggccgcccaggggacaggctgt

SEQ ID NO: 42851 - DNA, 525 bp, Mus musculus
  source 1..525: mol_type = other DNA
tgggtcctctgaaagaaccacaggtatctttttcttcttcttataaaggtgaatgtaatgcaaaaaccctcaagacgttaaaaaaaaaagtatgaaatttttctgaagttaaataaagcctcgatgctagaaccgttctcggggatatagtttataaatcttaactcatctaacgtttccttttccggcgttcggaaaacttcaaaagtgagatgagaggatctgacatttaacaacaattcactcacaaatcgcttgcttgcaaatgcatgttgtgcacacaggctcaagcgcgagtgaggagccgggttccccagcagttttacttgagagcagctgggggcaaccccccaccccggaaaaccaaggctggtcctgggtaccgctggcggggctcccttcccccctgcggccgcccaggggacaggctgtggcccctcccgctggagaaacgggacattcagccgccgcccgcggctgccagggcgcgtcccctggggaaattaggcgtggagtccgcccgga

SEQ ID NO: 42852 - DNA, 541 bp, Mus musculus
  source 1..541: mol_type = other DNA
ccttgagcctcttggaaatttcaccaaactcataaacttggaagtgtattaaacaagcaacttgagattatcatttacatcaaaaacgtttgaaaagatgacttcgacatcaaagacttttagagaatatctaaagagaacattgatttttaagaattagtaagttaaatttcccctcaaatttaagtacatttatccattgctttaaaaatctaaatcttaaacgtagagttcagattttccccctagtgttgactgcaggaagcaattaaaaattattgaaaagatgcagttttcaagtcgcatttgctggacgtcagacaattgttgtctaaatagcgaatctcttaaaattagataggataaatataacgaatattaaatcacaaagattgtttttaaaacgcctttaggacaattccgtacaggatttcaagtaatgtgctgcagtagcagcagcagcaaggcgaccgaccagagaggcgcgtcagccctggagccccgcccctacaagccctagcccggcttcgccttaagcccc

SEQ ID NO: 42853 - DNA, 464 bp, Mus musculus
  source 1..464: mol_type = other DNA
tgaaaatccgttgtcgagcgctcctgagctcttcatcggattcctagttaaagaagccacagaggctttaggtcccttgctgtctggattcggacaccgtctctaagcgggtaccgcagtgccctccctgacccagtagaacgccggcgtggctgtcttgcccaccctctcgccctgggcgccggcggccgcgtctctggccagcctccggccccgcatcaatcattaacgcggcggcccgagcggtcgcccccgccgcggcgcagacaccctaaccccgggggcccccgccctgcgcggcgccgccctcccccgccagcgcctcgcgccgccgcccgccccgcgcgcacgatgcccagtcaccgccgcgccgccgccgccgccaccaccgccaccaccgccgcagtcagccgcgccaccgccgccaccgcagcgcggccggccgcgggctgagagacccgagc

SEQ ID NO: 42854 - DNA, 313 bp, Mus musculus
  source 1..313: mol_type = other DNA
aaattgcatgtctagaatttcacagctatataaatgaaattctaaaagtgcataatagaatgtgcttttattttaaaggtagttgtaatttcaacattacttttcctttcactatggaggcatcataaaggatgtgggccagttcagaagtaaagagttagaaatagtttctcgtaacacaatttcttattttttttctaggaaacacaaattaatgctagttaatggtttttcacatgattaaaaatattgttggcatttacaattaaagttctacctaggccaaattcttttgagattaagatctgtagta

SEQ ID NO: 42855 - DNA, 431 bp, Mus musculus
  source 1..431: mol_type = other DNA
tttagtttatcttggacaagagctaagaatgaaatggctaagtcatgttgtacatacatgtttaagtaaatattttgagagaactcagacaaaaacgttatttattggacgaatggcccaaccaattcttttggactttaaacagtttcagtacctgttctgcatcagttcaggactacagggccaagggtcacctaggaccttaggtcaaattttaaataggtgtggctgtttaataaagatgagagaaattgttttactttaataattatcttagttttcaaaagtgctatgcatactagtgttctgagaacacattgtttgaacaaaaacctgaggcccccttgtttgagaaccaccgtgctaaaactcatttcaggggtggtgggcagcagggatgacgcccctgcagcgcgggtgggtgcagcaac

SEQ ID NO: 42856 - DNA, 336 bp, Mus musculus
  source 1..336: mol_type = other DNA
ctgtttggggtcctgcacttcagaactgcagtgctactcagtgatgaattagggggattgtaggcatctttctcaacatgatttcaaaatagctagcttttctgtttctattgctgtgatggaacattcaaagtacagctttgcagtcagagcgcatctttacctagttaaatatgccattcgaacatagtgaaatatctaactttgttgggtaggtcacgcactcgcctgggagggaaagtgggcgggcacgtccgctgtcggctccgcccctgtcgcctctgggatttccccagggttccaaccgcaaccgagagcggcttccgggaggagaat

SEQ ID NO: 42857 - DNA, 634 bp, Mus musculus
  source 1..634: mol_type = other DNA
acccggttctcctttgactctcgaggttgacagaaacaaggggtttgcttccccccacccccagaggcaaggtctcactatttagtcctggctggcctaggggcacctctgccacccaaattctggctccgtggacccgtggccagtcccggggacttccgactagagtagcgggctggccgacgctcggcctctctcggaggagaaaccgccgcgcttccctcagaagcggggccttctcgaggccaagcgggaagcagctcgcgtggactggctccccgcgagccgagccgcggctgccacggtcaccccggcacgtgggtcgccacggcgctccggccaactgccactgtgagggagggaacggcggccacaggccgcggcgcgggccgaggagacccggcgactcgaagctggcgacgacgcgcggccctacctggccaactcccgcagggcggggatcatggacgccagctccagcccgtggtcgcccatggtgacaccgagcggctctcaaaacagccgccgccggcgccgggcttctccacagccgcctccggtggagagggcggagcgtcgacggagccccgcgaggtccaaaattctcctcccggaagccgctctcggttgcggt

SEQ ID NO: 42858 - DNA, 444 bp, Mus musculus
  source 1..444: mol_type = other DNA
caaaatcactttatctcatatacttttagacagaaattactaaattcaaatttttaatgatttttttttttgtacaaaagtggtctttgacttaaggtcagcactaactctacgtgacccggttctcctttgactctcgaggttgacagaaacaaggggtttgcttccccccacccccagaggcaaggtctcactatttagtcctggctggcctaggggcacctctgccacccaaattctggctccgtggacccgtggccagtcccggggacttccgactagagtagcgggctggccgacgctcggcctctctcggaggagaaaccgccgcgcttccctcagaagcggggccttctcgaggccaagcgggaagcagctcgcgtggactggctccccgcgagccgagccgcggctgccacggtcaccccggcacgtgggtcgcca

SEQ ID NO: 42859 - DNA, 415 bp, Mus musculus
  source 1..415: mol_type = other DNA
atatataaatatacaaatatacactaagtgttagtaataatgtttcgagatcgttaaatgcagctcttcacagctggagagcgaagctccaggagggctccttaaaagccttcccaccaagggctcctttgcaagtcctggagtgccttcccagggggagctcagacctgccgcaagccactgcggctacccgggggccgccaagcccccccgttcggccgctgacctgcaccgcgggcagctggaaggccggggtcccacagcgcagagaggcccgcgggcccgctttctgcgccgcggcctgagctcaccctgaggcaggggggtaaaacttggggactcccattttgaccgtcgacactaattccagtcgccccgcccgggcctccgccgccgcctccggccgtcgctcgga

SEQ ID NO: 42860 - DNA, 250 bp, Mus musculus
  source 1..250: mol_type = other DNA
cctctagaaagtcccagagatctgggatgtaataaagtaatttaataaaagatataaagaggaaaactataaaactctttaaaatattagaaaattaaaactcttctgtaggtttacattactcagagaatttttcaagtccacattgaaaaatagtaaatttaatacctttcttactagggtttctattactgttataagcaccatgctctgaaggatgctttcaagttaacataaagcgcgctgtcac

SEQ ID NO: 42861 - DNA, 450 bp, Mus musculus
  source 1..450: mol_type = other DNA
gcaagaacagcaagcattttttactggagtatggcttagctattttatagcattgtactaggtcaaagagctgttcagctctaagaattttttatgatctttgtaaagaagacaggtcaaaagtatgtgtttaccttctttcctcagataagcacaattttctactaaggagtgaatactagtggatttttaaaaagaaagactttctgcagtgctgtgccacttcttagggtgatgatactggctctaatgtggcctctgtcagcagtgtagcctgaagagttctcagaatcttgaggacatctgggtccttgctgtccacaacagaagagcccttttacttgaagtaagttgctgctactttgtagtcaaacactaaatactagccaacaagcatttttcatgcacaccaaatgatgttaactggtgaaataaaagtggctgacagtc

SEQ ID NO: 42862 - DNA, 446 bp, Mus musculus
  source 1..446: mol_type = other DNA
tgtatagggcagacctgtgccagatgcttcaagtgacaacccagagtaatataaacaagaaaatattcctttaagcaatttaaactttgtgtcgcggcaaagaacttggacatctattcatcgttgtgtaatacatgcaagcttttctgggaagacttcatgaggaacctcctagcttgcaatcgtcggaggtcctcttctgacttctacatgcatcaggcacatgtggctcacaagtgaacatgaaaaaaagtttaaaattttttcatctcacttgatttttcctaacagatattcgtaaaaaagtacatccagtacagcgctgcggtaaacgcagctgctcggcgcgctgccctgacgtcacggtgctaggggcggagcgtggggcgcggtgtaggaggggcggggccgcgagctctccgcccggggtctggcgtttatagctc

SEQ ID NO: 42863 - DNA, 597 bp, Mus musculus
  source 1..597: mol_type = other DNA
attttattttcattgccttatttgtaatattattgcaataaaagtgtattaatattggtagctaatcttatggttatctgacattacaaagagtagacttggaaatgaactttaaaaggtcatcttttgttaaatttcctgtgttggaaaattgagtaagatgattaggtatgtaagtaactttaattaatcatttaaaaaagaggtcaacataatttttgctctcctgagagcacagctaagctgctctttgttgatatcagaaaccctatctcagggggcaggaccaggactcttccctcccacaagggctgggcagtttctgcaagctcagagagctctgagcagtttttcaggttctgctttctaactgactgccttggagccagcagatagtcggacatgtacaattcgaattttgtgagtaagttaattttatttttaaactacttaaaattcagatggcatttagaaaagtgatagcttggatttatttttttttttaaattttaaacagcctttgtaatttagtaagaaagccaggttccatacagcaaagctcctttcttagcacctgtgtcacagtctcaagtttcc

SEQ ID NO: 42864 - DNA, 499 bp, Mus musculus
  source 1..499: mol_type = other DNA
gaagaccgcggctgcgcggccgggagcttgctccgagcggacctggctctgcctgaggagcggcggctcgcgaagaagcgtctccccgggagtgggccgagggctgtgtggaccggcggcggcccctctgcaccaagctgcggtaaggtcccggaaagggcgcgggcctgcgcgccaggggcctttggaccgggcgtggccccccgccggccggctctcccctgccctgctgcagcggggccaagcaaccctgatacctgatgaggctccggagcccgcgggctcgccatcacccgggatcaggaagggcaagggcaagagaacttttcctttcaagtagaggttactgaattctgcacaaggccctggttgctgtgcacagagcagcgggcacagtgaagtgcgtggacactcactcgcccggccacatctgcctatggctgaaatcgttaccaggcttgtagcctggcctagcaaaatgtttactttgcatttgaaa

SEQ ID NO: 42865 - DNA, 587 bp, Mus musculus
  source 1..587: mol_type = other DNA
tgttcaaacttccattttgagtcttttaaaatcccatttatggtgtttcagaatttcagaatgcagcctgaattcctggctccgcctaggcgtagcggccacaatcttgggaaaatatttatattgatttcattgatatgctcgtggagaaaaagtatactgtactccatttggttaacgatagcatatttagaataaactgcccgaggccctgcagcaggtgccgttgcgccacggcgtattgcagaaggctccggggccaagtatgtgctccaggctttgaccactaagtctcaggctgggcttccactaagcccagccacggcctgggcttccagtggagagcgcggccaccaccctgccggtcagtgtgcccggcagacttccgcccgcagccccgccgcgctggcttcctcgcacctgggcgggggctacaggggcaagtagcccggctggggcgcatccgggcggctctgggcctttgggccgcgcccagccgggcgggaggcagcggccgcggtgcgcgccagcggcgcggggattggctgcggcgggcggagacgtcaggctcccggggcccctgcggc

SEQ ID NO: 42866 - DNA, 344 bp, Mus musculus
  source 1..344: mol_type = other DNA
agggacctaaccacagtcccaggggcccactgcctggctggttaaaaccatggtctgttctcacataaaataaagtttaaaaaaacatatattttgtttgtttgcttgcttagacagggtttctctgtatagccctggctgtcctggaaccaggaaataaataaataaataaataaataaataaataaataaataaataaataaatgaatctgaattctccctactcttgatagttttacgtagcaattggccactggcgcgcgcgccgtctggctccgcccgcccgcccgtgcctgcgggaggctccgtggcgtgtgttgtggccccgctgagccaccgtacc

SEQ ID NO: 42867 - DNA, 427 bp, Mus musculus
  source 1..427: mol_type = other DNA
agaacaaccctgctctattaaatcagtttcttccttctacagtttactcactgtaaatagttcccttaagatagtggcaacaactagttgaagattttccgattctgaaatgcaaaaaactcaaaatttctctgggtctcagacaccaactttttgcagagcaatgttcccagagcccacgtgccgcactgcgggagcatctagacacctcttgacgtttgccaaaatgccaaactttttcggggacctagaggtccgttcgtgggggacgtccaattccagagcgcctctcgcgacttgcccagggaggcaaggcgaggccgggcacggcgcgaggggcggggcgagtcagcccgaggccgaggcggggctacagcgaggctcgatccggcctaggcctcgctccggctccgccttgcccggctac

SEQ ID NO: 42868 - DNA, 463 bp, Mus musculus
  source 1..463: mol_type = other DNA
cattcaagctccctttttttttaaggggaagatgaatcattacttaatactgctgttacatgtgtatgcacgttgcccaacctgtactttgcatatagtattaaaaatctactcagctcaccaaaatgatcatattcttaatgtttgcaagtactgtattccaggaaaataccctttttcaaaaccttaaggttttgccagggagcgagtcgtttcttttcattgcatgaaacagttcttataccatgtgacaccggtgcccggggcctgctcggtggctgcgcagcatctgtgcgagcctggctctgccgcagtggcgccggggggtgcgggagcctcgcggcctgcagcgtcccggaagccctgcgcgtcggcgcccgaggtcgagcgaccgtccggcctgcactgcaccaggggcagaccggggcgtccgggcccagccgccggcgtccattttctgggc

SEQ ID NO: 42869 - DNA, 258 bp, Mus musculus
  source 1..258: mol_type = other DNA
tttaaaattattattattatcttttttgcaactgtgaaattaacactatgactgtttgaagcagacgattcattcactgtgcagccgcgctgctgcttaagtgcatggaatgccttcaactgcagtgtgctgcatgcacccattcaaaataagattatgccctttttttttaaacaaagccaaataaataatgtatgttgtattgttaattaatgtgaatatcaaattaaacacccgaaacttacatgtttattacgc

SEQ ID NO: 42870 - DNA, 503 bp, Mus musculus
  source 1..503: mol_type = other DNA
tcaagaccctgagaacccgtttcctcatctatagatgtaggaagcacagctttgtcaaaaagtgaaatactgacataaagtatttaccgtggagacttaaacattcacagtaagttttcagtatatgccctacatttattttaccactcactcactcactcactcactcactcactcactcactcattcattcattcattcattcatagtgtacttagtaataggtcttccaagaaggcctgcttcccccaagcactgggggctgcccagggacagtgcctcgtctttaaataccattaagactgagggtcctgggggaacccctgttcttccaggcttctagagtggtctcaccctggctgtacaggagggcgatgcccttcagggaggccaatgttctggcctgctgttcagcgcagccagcctgcaagagaggagggcgggcagccgggccactggctatgactcaggcctggccctgacgtcacccacggcttgccact

SEQ ID NO: 42871 - DNA, 433 bp, Mus musculus
  source 1..433: mol_type = other DNA
ctcaggacagaccggtcgcttgtcaagcctgtggtattggctcaagaccctgagaacccgtttcctcatctatagatgtaggaagcacagctttgtcaaaaagtgaaatactgacataaagtatttaccgtggagacttaaacattcacagtaagttttcagtatatgccctacatttattttaccactcactcactcactcactcactcactcactcactcactcattcattcattcattcattcatagtgtacttagtaataggtcttccaagaaggcctgcttcccccaagcactgggggctgcccagggacagtgcctcgtctttaaataccattaagactgagggtcctgggggaacccctgttcttccaggcttctagagtggtctcaccctggctgtacaggagggcgatgcccttcagggaggcc

SEQ ID NO: 42872 - DNA, 238 bp, Mus musculus
  source 1..238: mol_type = other DNA
taggggaccctttccatgggccataacatgagaaagggaattagctctcttgctcccctgtctcatttctaaataagttggcatgtctgcgaaattctgttagagcagcacaaatggtctaagacaagaggtcagatttttacattttatttatttcttttctttttttttaatgaaagccattagtgacagtcagattatatataactggggaattgcctccatcagagtagtctgt

SEQ ID NO: 42873 - DNA, 694 bp, Mus musculus
  source 1..694: mol_type = other DNA
tatggataaaatataaagtgttttgatttagtcactatcgaatgagttagggaaaatcaagtgatgcgctaccctcaaaaccgcacctcttttgcagttgagagaggcacaagggtgtcactgtagtcccagaactgacaacaaaggcaatctcacaattgtggttggtgagatccttttttacagcatttgaaacaacaacaacgcgggtctttggctggcagccctggggtcatgcagaaacgcccccgtgacacagcctctcaagggtggatgcctgcaggcctttagggaccggatgtggcccgcgccggaagcgcgggacacgaggcaccgcaggacccacatccgcagctagatccgcggcgcggagagcaccctagccaaggctgggacgggtccagggcagtgtcctggggccatggcaccctcccgggtcctaagtccggcatagggaggagcataggccctgtgcgctccgagtgcgcgcgctttcccggacccggacggcgcgaccggagcctgctccaggccatgtgtgcctccaaggcccgggatgcgggtcgccgcagcctgctggtcccgcacggccgcctgcggggcggagctccagggcgccctgagcgcgtcgggccgggcagggacccggcggtcccggtagggggcgctgcggaaccccgagtttggcggcctg

SEQ ID NO: 42874 - DNA, 422 bp, Mus musculus
  source 1..422: mol_type = other DNA
tgtctgcagcaacatacttgccagagccaggtactgcagtcctaacaaaaaaaaggttgttggactgaataatttgtgttttttcacaattgaagtatacatttgaaacgtggattaagttccaaattcaatgtgcaaagcaagcaaaggataggcctaactgatgctttctgcaacttcagaaccgatgcctgtttctgagcagcagcaggaaagaaaggcagccccccacatggagggaccatgttttattcatttttgccatgagtgatcatgttcacacaagttaagtgcagacattaagtacttttttttttttgaaaaaaaaaaaaatgattaccaggaggagctcctggagatcttttgcgtgccaacagaggtgtgtggcggcgagccagctgagccagccggcttcaaagggc

SEQ ID NO: 42875 - DNA, 711 bp, Mus musculus
  source 1..711: mol_type = other DNA
tacaggctccaaagcatctggcgaccccctagggacacccaccgtggctctctaggcacgcgaggacccatgcgcatgaatgagcgcgtgctagccagtccgcagatgagtgaatggcgtccgcgccacttcggcccaggggcgcgggcgagggttccacttccctttcccgccagctggtggcctccagaaggtggcagagccggcagcggcccgagctgggacggccggggcgcgggatggtgggggaaggggcgttcccggcggccgcgccttccgcggctgctcagccggatcggctttcagctgcagcctccgggccggccgggaaggcggggagcgagcggaggagggggaggcggcggctgcagcatccagagctggccctggcggtcggcgcgcccggcgcacaaaggcgctcagcccctggggaaggcaatgagcgcacagctgcccgggccctggccaccactgcagccctcgcggcgtgtgctcagtgctctagggaagaaacccggtgctccggggacgggcggccgaggtgcggcccgtgtgccctgagcgcgggactcgtcgctctccaggtcaggcgccaagcatctcgctgagatcagcgcagtggggcacttcactactcgggagcaccctgcggagcgagagggcgctcgccgctggttgagaagcagcagccagcatccgcggggtcgctcg

SEQ ID NO: 42876 - DNA, 500 bp, Mus musculus
  source 1..500: mol_type = other DNA
aagagaaagaaataatgagatatatttctgttccttctgtgtgattagcatattgatatctatttattttattttgacgattcatctgtaccttgcaaataagcagttaacaaaaaattgaaataatggccattttctagagaaagaaaactttccctagtccaacatatacatgtaagaaatgtgttgattagtaaaataagtagctggtttattcctgtagtaaaccttcaggaatgttccacagtgcacttgggagtctaaggcttgcacaggtctctgagttggagggcaagccccagagagcagccagattttgcatctctttcctgaccaaaaaacaaaaaaaacgcttatgtttaatgatcatgtttagcgagtatattcgcgctgtggccctgggccgctagggttttcccagcgccctgctgatcagcgcatcggatgagagtgcgagccggcccttcattgaagagccccctgggcgatcacgtgaaaga

SEQ ID NO: 42877 - DNA, 180 bp, Mus musculus
  source 1..180: mol_type = other DNA
ctgagtcctaaacctgtggacgacttaagcataaagcctcgtgatcatgaactctgaaggggattcactgtgatggcgccattatttgaaacattgtttctgctgacggaagaggaacatgggtctgtatgtctaattagtcacaccctggtggagagggattatgacataagcaatgtc

SEQ ID NO: 42878 - DNA, 487 bp, Mus musculus
  source 1..487: mol_type = other DNA
ctgtcaccaggaatgacgactaatagctatttgtcttggagagagcctagtaatgctaaaacaataatctttcctttgattgatttcctgaaggcaaaaaaagaagtgttgcctatccaactctttcaaaattgacatgtcatctctagaaatggaatctcataattgcatttaagagctatttctggccactggcccgtcatcacttgagacctgctctttccaagtgggattgaaagcagcagcctcaggtagaaattcctaccataggggtttgaagataatcccaggaaatctttacaagcctccgtgaagcaccatccaggacatgatggtagatgttgtgacagttacaaaactgaattattatcatactgaatagcatttgagcatatagggagtgctccactgaactcctgctcatttattctatagtgaatttaacccattattgcattctagaatctctgaaaagctttgagaatgc

SEQ ID NO: 42879 - DNA, 354 bp, Mus musculus
  source 1..354: mol_type = other DNA
gtgtggaagaacttttttccactaaaaatataattccaaccccattttgccggaaactttggcttagtagtccaacttgttcagttggggaagtgcctccatgaaatctagctcacagatggtggtcatgatgttttgtccaggaatagaaaccctgactaagacaggtagtctgtcagggaccagcagtgctcagtcctgtcttcaaaaaggcttggctttgagagtgcaacaggatccttccgtaggagaggcgtgactcacaccttgggttatgctaatcacctcatttgcaatgtgtggtggccagcagtagccaactgccactcaccaactgccactctgcaactgcca

SEQ ID NO: 42880 - DNA, 518 bp, Mus musculus
  source 1..518: mol_type = other DNA
catgactcgtgagaaaataaaatatagtgatttttgtggtggagaactatatgaaccccacctccagagacagtgttccttggcttgatacctaggtagtgacaatgtaaaggtggcaacttctgagggagaagtttgaatgtgcttcccactgagcagtggctgtgcctgcttcactgagatggcacagagcccgggcattgctacgcaggtcctaagtgagctctagtgagcgcctggcgccctccccagaccagggcagggtccacagagacagcatcctggcccctccgcagggatgcctcggggctgcagtttggagagccgcagggggggacgccaggccctaaggctcccctggagcctcccgcatgggttccacccgccggaaccggcgcctgaccgagtcggatcacgcgagcgggagctgcgaggcgggggagcgcgcaaccccgcgccgatgtccgcgtctcatcctccctccgtgacgtcacgggccgtcccggggtgagcgctgg

SEQ ID NO: 42881 - DNA, 344 bp, Mus musculus
  source 1..344: mol_type = other DNA
cagagctagctctccacccaggagttgttaaatgtttagcattcacaagccttctactctgcaacctccgggagtaggtcctgaatctccaagaatatacttgccagaaagtcctaattgtattttcttagataaatcaagaaatcgctatgtaagctctttttctttctttttttttttttttttgcgacaaaaagtgaccatcctttcattgtaagtagctattttatactttaagaactgttcatacattgcttgatatggttttaattcaggcttttaaaaaccagaggggcggggcaaagctccgctctgtctcccgggagttccgccccagcgaagct

SEQ ID NO: 42882 - DNA, 471 bp, Mus musculus
  source 1..471: mol_type = other DNA
aatatacttgccagaaagtcctaattgtattttcttagataaatcaagaaatcgctatgtaagctctttttctttctttttttttttttttttgcgacaaaaagtgaccatcctttcattgtaagtagctattttatactttaagaactgttcatacattgcttgatatggttttaattcaggcttttaaaaaccagaggggcggggcaaagctccgctctgtctcccgggagttccgccccagcgaagctgggagcgcaaggtcaagttcactcgcggctccgcccccagcctgggtcaagactagtgcagatccgcggtccctgttgactctgagcggagccccgcgacgcgcaggtaagcacagccagcgaccttggctgcctgcttcgcccgcgtgggtgtccacgaagcctgagtccccgcgtacctaccaggcccacgtgactctcgggggcggcgactcgggcg

SEQ ID NO: 42883 - DNA, 284 bp, Mus musculus
  source 1..284: mol_type = other DNA
taaaggtcttcactgctactgttgccaatggcaacaaggatcatgtaaattccagaaaaggtctgtgctttcctttcctggaagaagacagaaccacacctgggcgtaaatggcctcttccttgatgacgctggagacgcgttttcaagagaattcttccacacctcctctttctaggctaggaggggttgggtgagcagggacaaacctggctctgcaccgccctctcaccctgggaggagggatcgctacaggaatccagctgtcgccgccccgcggagccc

SEQ ID NO: 42884 - DNA, 200 bp, Mus musculus
  source 1..200: mol_type = other DNA
ccagcttgccttatattcttgcatgcaagacgtgtgggacaaatatccaggcagtgtgtcatggagatcacagggacacgcagacctggcaacggcaggactttgtgcctggactgcccacagacctgttgaactttgcaaaggcaagggcagttcctttgagctttatatacctggtccactaagctataaaagcagta

SEQ ID NO: 42885 - DNA, 565 bp, Mus musculus
  source 1..565: mol_type = other DNA
agtcgttgtatactatgacagcacatgttcacacaacagttcaaacattgaagaaggaaagtcaatttttaattgactattaaaaatatgtctcaaaactaagttagtcatcctctgtgtgcacagacactaccaaacacctcaaacctggaaggtgggtaagtgacttggtcaaagttgcctttgacccggtgcagactgcaagggcactgacaggcgccctgaccgccctgagagtcgggggcgccgctccttcgcgggtacccagttacactactgtgtcaccacggcagcctcccggtctggccttcttcctcccaggacgccaacgggacaggaggagtagcagcgcagaccgcttctagctactgctcctagccaagaagccccgggaacccgccgcagccggtgggctccactcggctccgactgtccgagcgagcccctgcccgtcacaggcgaccggccaacccactgacgtggaacttccgggaagcgactctcgcggtactcggagccaggctctgcgcctgcgcacaccctccgtaaggcggtccgtgcatgg

SEQ ID NO: 42886 - DNA, 522 bp, Mus musculus
  source 1..522: mol_type = other DNA
ctaggcttttctccaactagaggtttataaggagctaagggcattgtttcatagcattatctttttaaaaggtgtgtgaaatcgatacacaatgtatttcaatcatttttttgaaattcaactaatttattaaagagctattttgagcactgggcttccagggcgtattctcccctgttactatgccatcttggccataaaacggagacgactcctacgtgatgtggcagtaccaccacccggtggatgctctttgaagggtaatcacccgactgcctccgggagcctccagaaccaagatctcagggctcctcggagcctcaaaggcgggagccgcgcccacatcttttgacaccgctctgggccccgttccggagcccggctgccgacgttcagcaggaatccagcactgcgctccatctctttctgaaactgaccgaaggtgagcagcccccatgcacggaccgccttacggagggtgtgcgcaggcgcagagcctggctccgagtaccgcgagagtcg

SEQ ID NO: 42887 - DNA, 569 bp, Mus musculus
  source 1..569: mol_type = other DNA
aaagagtcgttgtatactatgacagcacatgttcacacaacagttcaaacattgaagaaggaaagtcaatttttaattgactattaaaaatatgtctcaaaactaagttagtcatcctctgtgtgcacagacactaccaaacacctcaaacctggaaggtgggtaagtgacttggtcaaagttgcctttgacccggtgcagactgcaagggcactgacaggcgccctgaccgccctgagagtcgggggcgccgctccttcgcgggtacccagttacactactgtgtcaccacggcagcctcccggtctggccttcttcctcccaggacgccaacgggacaggaggagtagcagcgcagaccgcttctagctactgctcctagccaagaagccccgggaacccgccgcagccggtgggctccactcggctccgactgtccgagcgagcccctgcccgtcacaggcgaccggccaacccactgacgtggaacttccgggaagcgactctcgcggtactcggagccaggctctgcgcctgcgcacaccctccgtaaggcggtccgtgcatgg

SEQ ID NO: 42888 - DNA, 309 bp, Mus musculus
  source 1..309: mol_type = other DNA
acacgtacttgtgaataagcaagtactgtttctctgtgtagccctggctgtcctggaactcactctgtagaccaggctggcctcaaatcttaacatgtatgtattatgttgtgtatgtggtatatgtcttgtatacaaatgataaagctaataccgagttccatctctgggtcgaaagagagcggcgactctcccaggctatcacaaacaaaattactttaaaaaaattctttaaaaagttcattcccacatctgtaatcagaggtcagaaagcggattgcacagagctttaaacctctcgagccggaa

SEQ ID NO: 42889 - DNA, 324 bp, Mus musculus
  source 1..324: mol_type = other DNA
gagcactgactactcttgcacaatcatctgtaatgagatctgatgccgtgtctgaagacagctacagtaaatcttttttttaaaaactccctgtctcgaaaatccgggatgcatagcatacaaaagacccttttttcttgtgaatgtgtgtgccacagtgtcaccatgtaagactgagatgagagttctgttgaaccctctctggaccagacttacctaggccctagaacccgggattgactactcacattaaagattttagaatgcccgaaaccgtagaatataggtcaaaaaatgtatttggggcggagcctccaggactcc

SEQ ID NO: 42890 - DNA, 725 bp, Mus musculus
  source 1..725: mol_type = other DNA
tgcagcggctgcagcagcggccgccgcagccgccgccatctggcaggaggcgtagggcatgggcacttgggtggcgccaggtagccatagccatcggccccagctccgggcacgccgcagccacccgccgctcctccgctcccgaagagccccttgccgggctggaagtgagcgggcggcggccggaagggccgcttcatgcggcggcggcgccggtagttgcccttctcgaacatgtcctcgcaggccgggtcgacttgcgctcgccgccgccctcgcgcggctcttctcgtagaagagcctcttctcggcgctctcgcggatcgccatggcgatgagcgccacgtacgagtacccgcctcccttgccgggactcggcggcgacgcctcggcctctttgactgcgcgtccgctctccggagccagcagggtccccgccgtgtcttcggggccatcatgacaaaagccggctctccgcggccgggcagcccggaggctgtgctctcctggtgcaggctcgccttgcaggcgggcgcaggagtgtgcgctcggcgcagagcctctaacttctgcaggctgcggggaccggaggcctcgcgctccccccggggagcggtctgcgggagtggaagtcagcctctggccatcgggagtctgcccaacagcgaggggctccggccccgccgcccctccccgcccaggccagtccccgcctcggtgggttt

SEQ ID NO: 42891 - DNA, 185 bp, Mus musculus
  source 1..185: mol_type = other DNA
aaattacagctgagttaatctaattgattaatgttctggcccaacaaaaaagggtttttggcaccacaccacagctgctgcttcggaggtgcaaccctgagtctctctgcagctacatggacattgtcaagaagattgctaatgcagccgccgaattctcgctggcacaggggccagaagcacct

SEQ ID NO: 42892 - DNA, 330 bp, Mus musculus
  source 1..330: mol_type = other DNA
ttacgtagtgagattctctattaaatctttatcagacttaaaaaaaatctctcattggttttatataaatgaaactgtagattctgtgtgtttgtacatatgtattatatacactaaaaataatttacataattattgtcagtaagtgaaattcaaacatctcactaaaggcagccaaacgacccctgtggtcgtacagagggcctctcccggaggtgcgggttatctaggggcagcagcggcgcagcagggcgcaccgcagagcgctcaactgtgcacaagggcgcagagcggcgcaccggagcctctgaaaagggctctcgcactcgc

SEQ ID NO: 42893 - DNA, 508 bp, Mus musculus
  source 1..508: mol_type = other DNA
taaatcacttagttacatccgcagaatcaaactattgttttggtagattctatcctagactacttaagtatttgcttgtaggttacagtaggtttactatatgtaaacaaaaagactacaaaaggtttggctgacagtaagtgaaattcaagcgtctcgcagccaaacgtcagctgcctttacatctaaatgatcgttcacatcgcgcaggtgcggcgagctgggggctgcagacaccgcagtgctctgcgagccaaccccagcgcgccggcagcgcagtaggaacgcggcaccgacagccgcacagggcgaggctggtgctgcctcccctcgaggggcggggcttgcgcggtcagcggggaggagagcccgggaggctcgcgcgcgcgctcgcgcaggcgcgggcacggcggtggcgcgcgcgtgctccgtcgggcggtgcagcggctgcgacggagccggccatggtcgtgggcggtgggcgggtgtcgcgctgagccccgaaggc

SEQ ID NO: 42894 - DNA, 445 bp, Mus musculus
  source 1..445: mol_type = other DNA
gctatgcagctttgcctagtctgcaactcaggaaggcaatgcacctgcctttaaatcacttagttacatccgcagaatcaaactattgttttggtagattctatcctagactacttaagtatttgcttgtaggttacagtaggtttactatatgtaaacaaaaagactacaaaaggtttggctgacagtaagtgaaattcaagcgtctcgcagccaaacgtcagctgcctttacatctaaatgatcgttcacatcgcgcaggtgcggcgagctgggggctgcagacaccgcagtgctctgcgagccaaccccagcgcgccggcagcgcagtaggaacgcggcaccgacagccgcacagggcgaggctggtgctgcctcccctcgaggggcggggcttgcgcggtcagcggggaggagagcccgggaggctcgcgcgcgcgctcgc

SEQ ID NO: 42895 - DNA, 238 bp, Mus musculus
  source 1..238: mol_type = other DNA
ccagcatgctgaccctgccacaggcagactggcacctctggaattctgataacagtccctcctataagttgttcgaatcattttagtcactaatacatgcccaaaatattactataggagactgacattctggcatatttatctgttttttttttttttttaaactaaccaacatagccaaggaggtaattaggtcacagaggttctgccttcatgaacggaatacatcggcccagtc

SEQ ID NO: 42896 - DNA, 428 bp, Mus musculus
  source 1..428: mol_type = other DNA
tgcctgtacctcctaaattctggaattacaggtgtgggccccactttagagttaacctggaggcccatagatcgttttcaaggcttttcagctctgcctatctagactgagcttcgtcactcagttcttcgtagacctttgaaaatattcaaggagaaggtgaaatgttatcaaaggcagccccggcctcactttcacttgcaaaaatgtgtgtatttctagcttctcggggatcaaagaaacaccatggtgactgagcgactatcacgcctgctacaaagtagccgcagcaagtccggccccgccccgtgggcggagctaacgatagagcgcggcgtggacccgccttcccggcgcgccaggtggtgttgtcccgccccgctgggaggccatcgactgcgtcagttcggtcagcctggctgcgctaa

SEQ ID NO: 42897 - DNA, 174 bp, Mus musculus
  source 1..174: mol_type = other DNA
aggctggactcttaagccctgcaacattgcttaactctgcagagggactgcgtgacttctgtgatacatagctggtatcaaggaaagctttggcaagagtgctggacactgtgctaagcctaatagactgtacccttcccaggatacccagagttccatattacatcacatttg

SEQ ID NO: 42898 - DNA, 344 bp, Mus musculus
  source 1..344: mol_type = other DNA
gccacgggctgtgggactttacgtgggcccccttcaggtgcacgcccaaaggtggcttctccggaatccggaactcaccagccagggccctcagaatggagtcgccccggctcctacgcgctagctaggaaatgcgcgtgcaggtgtgggcgtggacctccctgcggggagcccgcccgtcgcgcgctgtcaggtgatagcgattatacgttgattaatgtgtattatcaactaatcaataattgtttcattgcctctaccttagacacaggaggcccggggttacagaattccctttcttgggatgcatggatttttgtaaatagtaaatagctagtaaatgg

SEQ ID NO: 42899 - DNA, 249 bp, Mus musculus
  source 1..249: mol_type = other DNA
ccccttgcagcaagtaattttatccagtttgattgtaggtgagtcactgtctgactgatcgttcggcctgggcgacacgaatctgggtgcaccaagagagaggttttcagtttgactgtgctgggagctggggctgggagtggtcccagactttgggtcagatccaacgcagtgctgtgggatcccaggatgccctcaaggcctcatcgggttgcccctggtggcggagacccagactccgcagtccgg

SEQ ID NO: 42900 - DNA, 280 bp, Mus musculus
  source 1..280: mol_type = other DNA
caaggtcgcttgagggtttctctgtatagccctggctgtcctggaactcactttgtagaccaggctggcctcgaactcagagcttgtgaagagcccaagcccttgcctgtcaggagaggtcagtggcatctgctatagggacttggtcttaaggtatcctgcattacttacacacaggctgtgggccatttctgggaattgaagggaagggcagcccctaatgcagagcaatttcctccatatgggttgggtcgctccagccccagtgctgggcacaccc

SEQ ID NO: 42901 - DNA, 309 bp, Mus musculus
  source 1..309: mol_type = other DNA
tttcagaatattttagtaggaaacattcacatagtttaattctccatagtccttattttacagtcgggagaagtgaaataaatataacagaccagtttctccagctttaagagaaagtgaacttcagactcgagccagggtgaggctccgccccccacccgcggaaggtggggcaggcaggcttctgcgcatgcggaggccgctgcccgcgcccacctctgaagccggggtccggcgcggtttccccttcggtgctcgagcgacgcctgggggctgtcgaaagtgccggccgcgcgccggcgccggcag

SEQ ID NO: 42902 - DNA, 297 bp, Mus musculus
  source 1..297: mol_type = other DNA
tctggctttaaataaaattactgaatgagtaataattcctgtgtaaaggactgtagttacagagcttaggaactttgtaagagacttataatttcagaatattttagtaggaaacattcacatagtttaattctccatagtccttattttacagtcgggagaagtgaaataaatataacagaccagtttctccagctttaagagaaagtgaacttcagactcgagccagggtgaggctccgccccccacccgcggaaggtggggcaggcaggcttctgcgcatgcggaggccgctgc

SEQ ID NO: 42903 - DNA, 347 bp, Mus musculus
  source 1..347: mol_type = other DNA
ggtacaccaaaaactgtgctgtgtgttggtggcgagccacacgtggcgctacatctccagaagttttcgagatattgcgagttagcaaacataattttagaaattccccccgggagggttggtgtatagttttaaaataatcagtaagcttcaacgttgcatttaaattttaatgtcatcattaaaacctctttttactttctaattcatttttaaggcatctagggaattaattgctccttggctgtcctggaactcactttgtagaccaggaaggccttatttctttttctagttttaaacaatgtaacccactagattgctagcgttccctctctcgcgagact

SEQ ID NO: 42904 - DNA, 419 bp, Mus musculus
  source 1..419: mol_type = other DNA
aggaggcacatgtggagatccaaaagctggtcttgggtgtgctcagacaaatgtgacagcttcacttctggatccacagtccgtccgcttttgcccgagagaaagctctatgctctcaccagggaccatgctagactatggagggaggatcctactccgcagtggtacatcaaggggctatgaagggcctctcatgccattgctttgatggcacaaatggtttcttttaatcaaaccctttcattatggttcccaaagagaaatcttggtcaaattacatattgtcccatgacatgagtttggttcaaactgaactgagaggtacaagatgtccttaaacatcatgctcttaaacaatttcttcacctgagaggattctctgggagccccgtgaccacatatcaacttaaagggtgtgt

SEQ ID NO: 42905 - DNA, 375 bp, Mus musculus
  source 1..375: mol_type = other DNA
tgtggctacgcggaaccacgtgcatccagtctgcacacaccgatgttgtatgactccatttatatagaatgttctgaataccattagataaataactatggtcgcacaactttgttataccataccaggtgaggcctgaatctggcacctagcaggccctggactcttctaaggactggggaggcgtccgcaggtccccagcaaagccgcccggggccaattcgtggaggcgaggggacccttgcccggtgccagctgtcccaatgcccacagtggtgccgtttgggggtcgtcgcagccactcggaaggctcccgaggcgcggggtgcgcggtcgctttaaggcgtcagcggggcggggacggcggcggccggg

SEQ ID NO: 42906 - DNA, 342 bp, Mus musculus
  source 1..342: mol_type = other DNA
gtacagcctgaggctccacgctgcaggcgcagaagagagacccttaggtgaatcctcaaagtgaagagtcctgaagagtgttaagggcttgccaatcaggactctaagcatcctggtctcggctcaaagctcttggctccgacccccagggacccagaactgctccgcagagcgtcctggattacaggtggaggcgccgcctaaaaatttatattattagaagcaccggttctcctttgaacaactgaccgagttggcaggtgcgccccctcgccttccctgcattggagcccaggttggggagtcgccgccccgagagtgcgtgcggtcccggcccacccg

SEQ ID NO: 42907 - DNA, 235 bp, Mus musculus
  source 1..235: mol_type = other DNA
ccatttatcataattgcacctgacccacctgacccgtaagggtgggcggtctgacatgggcgttttgaaacctcaaagcccactcaaatagtgcatggcaaaccattttgtttcccacagtggcagtaccattttgaatagatgcagagcttggcacatctgatcaaattggagcacacctatgggtctggatttccttaacgaattcaacccgggctctggggagaggctaggg

SEQ ID NO: 42908 - DNA, 283 bp, Mus musculus
  source 1..283: mol_type = other DNA
tatctcacccaagcttgccaaagcacaaatgtgcaatgtcagatgactgtgaggagatcttctctctctttggagatacggaaagacagacaggttagagtgtaatttaagcacattcaaagtaaagactgctttgacaaatggccatcagtgaaatgcaaatcaaagtacattaggattccatttcacttctgtcagaatgattccatatgctggtgggaatatacgttattccagctaccatggaaaccagtatgaatcctcagaattctaaaattagaat

SEQ ID NO: 42909 - DNA, 113 bp, Mus musculus
  source 1..113: mol_type = other DNA
ccaagataacattcaaatactctcagtttgtagatagagaaagggtagaaatcactactgctgcctcttacagggagagtaggttcgtccactcagcctgctccacgttctgg

SEQ ID NO: 42910 - DNA, 331 bp, Mus musculus
  source 1..331: mol_type = other DNA
ttcaaagttttaaaattacttttaattttccgtagtataaaccaggctggccttgaactcagaaggattcaatattttaaaaaaatatttggtaaagaatcttgttcacatttttaatgagattttctttttgcagatttgtaaatataaaactattattctttatgttttgacttttttatgaagtgtgtatacgcaaacagcctgctgctcactggtaagacccagggccttcacaacagcctggatgcccagatgtccttgatgcaatatctgggtttgggcaaaaaggagggtgctgcaaagcccgcccattttgagcatttgggcc

SEQ ID NO: 42911 - DNA, 411 bp, Mus musculus
  source 1..411: mol_type = other DNA
aaaaatgaatttttaaaagatgaaaggaagctgtattaattcctggaggcaaaaactcgtgtttccctaacctagaatgtttcttttaggtgccacttggcaggtggctgggactgtgccactgccatactcacccctagctacccacgcgccttcattaacaaactgcagctggtcggccctttcagatgctgttcgacattaatgagcgatttaaaatgggggagaacagggcggtggggcccggcgctcctcaccttctgtccccgcgcagtctcagctcaggaccactcagggcccgcgcttgattgacaagcccgctcgcccaatcccggagcggcgcattccgctgaagcgtcaggggcgggcgcaggaggggtttcctgcccgcaacggtccgcccaccggttg

SEQ ID NO: 42912 - DNA, 217 bp, Mus musculus
  source 1..217: mol_type = other DNA
gatttgggattaaatttaagattttcaagattgtcaacagttgccatctgtgcccacctcccaatcctttgggtggggcatagggtttcattgtgaaacatacacaaaatgcctccctaggggttgtgtgtccccttcctttacctgctgaaccatctaggttctacatgaacataaaatttacctaggctgggctagagatttcaacctgaatcaa

SEQ ID NO: 42913 - DNA, 413 bp, Mus musculus
  source 1..413: mol_type = other DNA
gccttcaaccaagcaaacgttgtttgtgcacaatggtctctaaaagtttacttcaccattctgtgtctcgtcacaaacttaaaaaacatcaaataatttgtgtgtatccaacatggggtgtcaatggtccccttattcagaattactctggctgagtactgagtttggggaccccaattttggtcctcacttagcactgagccaagtagcttcccagctgaaatctggatataaattatttcaaggctaagttttaagagcaaaacctggcacagcatttaggaatgaagtccttgttctgtgtggctacacgggcacagagctgaccgccttgagcctgaatgcaagcctgtgacgctttagggccagcgacgacgcgcaggcgcagactcgcaatgtctacgctctctgcg

SEQ ID NO: 42914 - DNA, 641 bp, Mus musculus
  source 1..641: mol_type = other DNA
caagatctacgcctggtgggagaatctgattgctcgcagagtctatgcacctcggcgagaacctgctttacagaggcaggacgacgccaatcggcctggaggctgaaaaagcgcctcatcaataataataaaccgcgcgttccggggagggagcagggctcgggggcgcgttggcacggctcaccccgataacgggcgggtgtgggcggctggcagcctcagggcgggagcggagcgcggcccccgccggggaggggcctcggcggaagagccgggggcggacttcttccaggctcttggagaagctctaaaaatggcgggcggcaacccagcgagcgggtcgcgcaggcgccgcggagtccgtccttccgctcgcctggggcggcccaggagctgtccacagcgccctcgtccagacgtctccgcggctcgccattggccgagcggagcaggagcgtgcagccacgcaaaaggccacgtttcccgcgccgctgctgcgcgtgcgcgccccccggaggcgagcgatggcgcgcggccccgtccgagggcccctgctcgcgcctcagctccctcccctttccgggcaggcccgtcctgtcagcggagcagtgagcagcgcggccagcagagggcggtcggga

SEQ ID NO: 42915 - DNA, 357 bp, Mus musculus
  source 1..357: mol_type = other DNA
aaacacaaaactctaccagaggatttgggtaacagtaactctgtttaagacacttggcttcatccatcaaggtgagtcctgctggcagaagacacttgttgcattgtcaacttcaaatatcaagaaataatttttagttcttacaaccagatagaaatgaatggagaatgcttcctcatctcttcccagacctggctggtctccgccccagggcgttggcagcttccattgcctgggacgctcacgcctctcggggagggccagtcccccgtcttccactcccgcagcgcctgcggtggggggttggggcagcggagagcgcaggcgcagtgcccgcgtctggcgcccctctccttg

SEQ ID NO: 42916 - DNA, 505 bp, Mus musculus
  source 1..505: mol_type = other DNA
ccggctcgaaaccgagcatgctccgtgcacggacgcgctgtgcgcaccacttgcccgttggggtaacggtcgtcgttaccggccgggcctgaggcgccgcaccatctactgcggccggagtagccccggcccaacggagctagagccaggcgcgagggaggggcctgcagcgggcctggtcgtgcgcgctgggtggcggcggcggcggcctggcggggtgagctcgcttaaaccgcggctgggcaggcaggcggcggcggcggcggcggcggcggcggcgcagcaccgtggcagtcgcgcttgggctgagaagcggaggggcgccgccgtcgccgcctgcctgcctgcctgcctgcctgcctgccgggcctgctccccgccccctcccgccgccgggccccgcgcgcacttcctcccgggcctccctttcgggcgggggcctccctcccgcccgcctgccgcgccaggcgcagcgtgggccccgcgtccggcatggcgagaacgg

SEQ ID NO: 42917 - DNA, 709 bp, Mus musculus
  source 1..709: mol_type = other DNA
gacttaaagttaaacttgcataccactggataataattaattcataaaattttacaaatattagctatttcacctgaatgtgattaaagaagcatttacatatggaaatgtatatcttaaatattttaatttttacatttatttattatatatgcatatatatacttttatggttttagttttgttctttatggtgttttatattttctagaaataaaaaaataaatcctgattggtgagattaattaagaataaatagtgaaatataaatatgcataagagaatactttggtaatttgctcataaatattaaagtgaggacaatattttatatatggtaaaattatggaatatgtttatttctttaacgtccctcaaaggaaaaagtctcattgttcactttcttaaaaacacttttgaaggtaaattttcaaactatataatcatttcaaaggctaaaataccctgcatttaaaactaataatatttttgtaaattatcatataaaaatgactatttctgtcatattttgagtgaagagattaggggaatatggaataattgcttccccttctgataataattaaaaagctattcttgaaataattcttttacatttgaagttcagtttattctgttttgtttttttaaacaatatcaagtagacaaaagacaaaaaataaagtatttgagcattatctgagaagtt

SEQ ID NO: 42918 - DNA, 660 bp, Mus musculus
  source 1..660: mol_type = other DNA
aagcatttacatatggaaatgtatatcttaaatattttaatttttacatttatttattatatatgcatatatatacttttatggttttagttttgttctttatggtgttttatattttctagaaataaaaaaataaatcctgattggtgagattaattaagaataaatagtgaaatataaatatgcataagagaatactttggtaatttgctcataaatattaaagtgaggacaatattttatatatggtaaaattatggaatatgtttatttctttaacgtccctcaaaggaaaaagtctcattgttcactttcttaaaaacacttttgaaggtaaattttcaaactatataatcatttcaaaggctaaaataccctgcatttaaaactaataatatttttgtaaattatcatataaaaatgactatttctgtcatattttgagtgaagagattaggggaatatggaataattgcttccccttctgataataattaaaaagctattcttgaaataattcttttacatttgaagttcagtttattctgttttgtttttttaaacaatatcaagtagacaaaagacaaaaaataaagtatttgagcattatctgagaagttcagaaggcacaagaagcaataggcccttttgcaggctgtt

SEQ ID NO: 42919 - DNA, 454 bp, Mus musculus
  source 1..454: mol_type = other DNA
ataatgattgattgactttttaatttagaattgaactgcacaccaaagttcaaacacttggaacttcagagctttgcagacatacatttactataccaacggggttacatccctaaaagcaaacctcgcttattattttagctagggtcaaagcttaagaaatcaaaattgcaaatgttgttttacatagctttgtttatttaacaatttttattctgttaacaattcgcttaaaataaataaataaataaaaataatgacggccatcataaagtgtataccacagcggcggccgaggcgacggctctcgcagtgcccctcagggccccctttcggaggaaggacccagcacggccaggtgggcggggccggggccgagggggcgggctgtggcgctggcgggcagctaagctgctgggcggctgggcggggcgcgctcaggcctcggctcctc

SEQ ID NO: 42920 - DNA, 174 bp, Mus musculus
  source 1..174: mol_type = other DNA
atctccagctcgctcttgtgtttttttcaacaaatgcctaactgctgcagcattcagttattaaaattgcactcgctcctgttcatgatctgaaaatagggactgacaggcccagctaaaatattcatctgatgatggtgtcactgacacacgtgtattgtatggcaatcgcat

SEQ ID NO: 42921 - DNA, 392 bp, Mus musculus
  source 1..392: mol_type = other DNA
tttatataaaacaggctgtgatgtaggcgtgtctggccacgtctcactctcctgctgaaggccccccttcccaggctcccagcaaggaggtttctgagagacgtgtcttacttttctcatagctcgtatctatgcctacagactgtatttttttttgcaaagggctttgaagacacaagtgaaaccaccgttttaagcaacccatttaattaaagttgtgtctcttgctggcatgagagcagcatagatcagagcctgggtggccgtgtgccaggcttctctccagcacagatgggaaggccaggggtaattaccctgccctggccacttgccttattatagaaaagtaggagacagtgtctccacccgattcttatccttcatcatttcca

SEQ ID NO: 42922 - DNA, 245 bp, Mus musculus
  source 1..245: mol_type = other DNA
gggagggggctgaagcccctcccacatgagtcttccaggagcaccttgcgggaggaggtgaggaccttctgccacacagcttctgaaggccagggccggatcgggcattatcatcagagctgatgtctgacagcaggccctacagtggatgctcagagatcggaagcccacagggtgttctaactaccgcaaaagtttttcttaaactaacaatgccagtgtaaggagagagctgatggtggggg

SEQ ID NO: 42923 - DNA, 432 bp, Mus musculus
  source 1..432: mol_type = other DNA
ggcatctattacctgtgtcaacacaaattagggaattgtctcccacctggttgaaccatgccctgtcgctgttggctgggcagacaggaggtccagctccctgacagcagctggcagctcccagcttcccctcaggcaagagctagtcttcccgaaggaatgggggggtctgacacagtcatcaatgacagttggggacctatgaggcagcactctgtacagggaggaagggtcataaccctgcaaagtgcatcctgggtgcagttcagggccgcgcccggggatttcctttcaaaggtgacttagaggcacttcaggaggatagcgccctcccgggcgggttcgaggcagagtcagcgaaactgcgcccggcggacctggcggcggggcagcgccctctcccgcgccctcgccctctcccgcgccaggcag

SEQ ID NO: 42924 - DNA, 382 bp, Mus musculus
  source 1..382: mol_type = other DNA
ctttgctgcttgcctcaaatgatctatgaaacaagtcaggtcgataatatcaaactctcagctctcagattgtttcctttagaggctgagtgcagtgagacatacacacctttcatgcacacagctttgtaaatgtatttctaagctacgagaatggccctcggaggccaccatcctgggacactacagtcacccgctgcagcgacttccggaggtcgagcgtcgccatgggggctccgttccactccgcacagcgtgcagtgcgcctctggaagcggtagacgccggagttcgagggcgaacgcttggccaccctcggaaacccgggccgcgggcgcgcgggtcacgtgactcgcggcgctctcaagccccggatgtggct

SEQ ID NO: 42925 - DNA, 297 bp, Mus musculus
  source 1..297: mol_type = other DNA
tctggaacagaaccgaatccctttcacagaggggtatcctcgcacatatgttcatgcgcctcaaatgtgtgcagataaagaggtacacctggtgcgcacacaaaggcaagctcagactcagggtctctaaatttggccttcctcctggtaagcgggtgacccgctcctgagttaccaacaacaacaaaaaagaggcctttttctttcctttcttacagggcttgagcactgcacctggttaaggcctctcactgtatcaggtccctgggcctggaagaaggcccaactcccttgagg

SEQ ID NO: 42926 - DNA, 519 bp, Mus musculus
  source 1..519: mol_type = other DNA
tataataaagtaatacatttttgaaactctaggtaggcccatctctgagtttgaggccagcctggtctacactgcacttttggcaacaagtctacaaaagcgctgttgtggaattcccctaaccctgcgggcttcccgctgggcggctaacgctaaggcctggtcctacaccggcggcagcagcagcagccgggtcccttcccgggagccatgcagcccacagcccgcagcccgccctcccgcaggccgaagcacctggccggccagcccgacgaccgggcagccgcaacccggcattggaaagccccgcggcaggtgggccgcaacgagctgcggccgcgggccatgaggcctggagcctagcggcaccaccgtggccagggccgagaccgttggggcatgcggtcggttacagagcgcgcccccggcagagcgcgcctccggcggagcgcgcccccgggcctgcccgccgttcctccggccggggatgcgcgcaaagccacatccggggcttgagag

SEQ ID NO: 42927 - DNA, 259 bp, Mus musculus
  source 1..259: mol_type = other DNA
ctctctgccttgtcaggttacggagaccggatcatttagttaggtagtgggttaaatccaccagattttcaacccgggccgaaacatcgtttcgtccaaggctgggcggatgtgaactgctgtgcagtcctcccggcgtgagacctgccgcgacaaggctgaggccagcccagcggccagccgcagcgccgcctcccgggaggaaggcgggggctggcccgggaacctcagccgcctccagcgcgggctgacctagagg

SEQ ID NO: 42928 - DNA, 490 bp, Mus musculus
  source 1..490: mol_type = other DNA
gccgcgacaaggctgaggccagcccagcggccagccgcagcgccgcctcccgggaggaaggcgggggctggcccgggaacctcagccgcctccagcgcgggctgacctagaggctgcgcactggggcgcgagcaagcagatcatcggcgccaccgactagtgcgcacctccgttgctgcgaaccgggtctgcgtgcgccggcagccgcgggccgcagcggtaagcaaggtgccgggcactccgggcagtgcgcgaggccggcggggacgcttcccagcagcagcgggacaggacgagcctccccgggagcgggaggggagactgtgaaccctttcgaggatcgatcctgggtgtctagcctagaaccattctccgacccactggggctggaggaaggacagatacagccctcagctagctctcacttagaaagaatgcagcctgctgtccagtccggtgacgtcaaggcgtacccgcgatgcttaaagac

SEQ ID NO: 42929 - DNA, 323 bp, Mus musculus
  source 1..323: mol_type = other DNA
tccttaaccggtttagggagacacatacattccatgttttggccagcttggtctacatagcaagttccatgcgggccagggctacataaccaaaatacaaaataaaaagtttactaaggttttatgagttttttttgttttcttctcactaaataaaacagcattcttttcttttgagagctggggactggctattagcctagagcccttcgcctggccacctcaggtctgagacgctctcccgtgcacgcgcgccccagaaccaggcgctctcggtcgggcggcacatgcgtgcgcgccctcgcgcacggcgggcacgcgca

SEQ ID NO: 42930 - DNA, 368 bp, Mus musculus
  source 1..368: mol_type = other DNA
tgggctgggctggaagaggtggtttggaagggcgcctcctccgaactgcctcaagagcttttgcgggatctattttgtctttttctggaaaaggctcaccttagaggaaaatcttgctcacgacccgctgacactcgacagcgggctccggtccagtgagtttgagcccagccctggggcggcccccacccatcaccggaaccgagggcccaggtttgcggagcgagtgcagaacgcagagccctgcaggcgagtcccagagcctctgggcttccgcagccgcgactccaggacccaagacacctgcctgggggaggcgacagcggctgggcgggggctagcagcacctctgacaccctttcatcatc

SEQ ID NO: 42931 - DNA, 234 bp, Mus musculus
  source 1..234: mol_type = other DNA
gtacttaaatactttaaaataatgacagcatatttttaaattgaagctcacatttttttttaaatgtttgaaatcttaagtagaagagttcccatgaagatcttttataaataagtcctcttgagaatttaaaataaatctctcaatgaagttttgtagccgttaattttgctaaaagtcatcattctttcaaaaatccatattcatttatgaaattctccaaagataaaaaat

SEQ ID NO: 42932 - DNA, 377 bp, Mus musculus
  source 1..377: mol_type = other DNA
ttcagaatggaaataaaaagaaccttctaggtgtcttcagtataaacaggatagactataaataatgttgttctagaagcatactcagtgacttagtgttagtcatatataatatggatatcctatgtccatggatatctagcatctcctgtgaggatgggcacactcacatgtgaccatggggagtgttcccaggctcaccaggtaaaatggtgccggccaggccacatggtcactggccattccaatgactttcctgggatttcatctcaaggggcacaaagtgacctttgactcccaagttcctggtcccttccctcagtgagggaagagagcccaggttcctggttccgccccacagccagggaggggaagag

SEQ ID NO: 42933 - DNA, 539 bp, Mus musculus
  source 1..539: mol_type = other DNA
caggcaggttaggtttcaaaccctagtaggcatatccggatctatctgggtctgagacggaagaagtcttttttttttccccctaggtgggtgggtgagacaaagagggcacctctcttaggctcaagaggaggtggctctccggagccggctgcccgggtgggggctggatggcgcacgccccccaagccccgcaaacccacgggctccgcatgacatcagaggcttgggagcgcgcagagcgcaggcgcgggcggagcaggcgggcgggagggggcgcgtggcgctgctcggagagcgctcctccgcccagctcggtccctgcgccccgctccgcccgtgcctcgctgcccgcgccgagcttcgggcgtccacagcgcgcccgtcgcccgtgcagccaacgccacccagggctgcgccgcgcaccccgcctcctccctttccgccgtcgccgccgtcggacacgcagccgcaggccggggcccggccgcagctggggagtcaggggcgcgcgcagccagcccttccccctccggctc

SEQ ID NO: 42934 - DNA, 245 bp, Mus musculus
  source 1..245: mol_type = other DNA
atggcatcaaatttgaaatgtaaataacaacaaaaaaaaggaagcatcctctttatgcttacaagagctcaagggcaggaagctttcagctccagagcaggccaggcctggcagggatagaccgggagcaagccactcttccttctaaacacaggctttttgagtgagtgtgtccatgcgcagttctgtcccacagctcaggaaatgaggtgatcccggccccctccctccgtgcataaaggcga

SEQ ID NO: 42935 - DNA, 450 bp, Mus musculus
  source 1..450: mol_type = other DNA
ttttttatttagttttagatcctagtaatgtatataaaatgaaatgaaatttctgttcctagcggcactgtctgtaaggatggaatcggtactacattgtcaatcagggtgagagatgaaatattcttcattcacatgataataccaatttaaacttgggtgaggggccacctatgtgggagaacgattcggcctcctataattattacactgtgctagcagggtttgttgtacacctactactatattttaattagaagttcttcgagttttatttaaaattaccagagatctgtgcctgagccaggccttacacagctgggacaagcaacactggtctgtgtcacagaagagatagctccactggatttccaaaagaaaatggctttcccggagaagcaccgtttccacccagggaccgaaccggggaccggactggggctgaagaac

SEQ ID NO: 42936 - DNA, 392 bp, Mus musculus
  source 1..392: mol_type = other DNA
atcttaatggattaaagaccttaatgtcagaactgaaatcctgaaaccaaagggctttctgaatagggccctagttgataagcatcagatgggagaaaatctttgccaattatacacctgatagaggatatctagaaatacttttctctatatagtcctggctgtccaccaggctggttagaaatacatattttaaaagtcttgaatgtgaatataaccggctgatcggtccggccgcccgcaggccctcgccacgaacgatgagctgcgccgcagccgaaactgttgatctcgggaaagcgtgcccaaggaccgccctcttccgaccgctccgcttcccagagcgggggccccgatgacgccacttcctccggaagaggtgtggcgtccgc

SEQ ID NO: 42937 - DNA, 271 bp, Mus musculus
  source 1..271: mol_type = other DNA
acagactctgcgctgacatgcagagctagcgttagagggtcagatttatttagcctgacccttatttaagatccttccgtaaatggatggcgagcagacgcacgtgtaccctgcgcatgcgcgcaaccaaggcacacaggagtcactagggacgtcgctccgtccgggcatctgattggctctcccggaagacccgccgcccgcccccctcggcgcgcccacagcggcgggcggaaccgagcgcgcaggcgcggcgctgcctctctctgct

SEQ ID NO: 42938 - DNA, 275 bp, Mus musculus
  source 1..275: mol_type = other DNA
atgcttaaaagaattaccaatatccttgaagtacaatttaaggacattgttattgtgtgtgtgtgtgtgtgtgtgcgcgcgcacgcgcgctctcaagcacacacctggaaagaggaatccagccaaatcagggaaccactgccaacggggccagcgggcagtcatgatcttcccctgccaaaaggtgattaaccttcaccttccaggccctgggctgtgtagaggttaataattaagcagcatccaatgtcgctgagacagctgcactgtccacc

SEQ ID NO: 42939 - DNA, 325 bp, Mus musculus
  source 1..325: mol_type = other DNA
gttaatttttctgcagcaatagcagtaacggggtccccaaagctactggaacactgtaatatctaacaatcctttgtctgcagatatgaaaggtggggctgggggtgctgcctgctcccaccccaaaaaagtctttagtctcaaactcaagtgtctttgaggcaacagttgtaagcagctgttagaaatagttgaaactggagggaccatctccctaaagtgttctattttagatatttttttcaagggatgtggtcacgtcacctgcaggaaaccaccacacacacacatcactctgattcatggttgagggtgcttcaagctg

SEQ ID NO: 42940 - DNA, 368 bp, Mus musculus
  source 1..368: mol_type = other DNA
agcctaacagctgccctgcagctcaggtcctaaaacgtctgctggctgtgtcagagttagcaatcaaggccagctgctgacaagcaggaaggaagaaagcatgaccaggcttgctttgtttcccctttgtgcgcgcacacacctgcacattagcccagaggcccttacacggagtgccctgacataataaaagccatggactggggttcatagtatgcatgagaccctggattctattgcaggaattggagaagaatcaaaaatttaaagtcatcctggctgcataaggattttgaggcttatctacattagagaccatttctaaaaagaaagagaatgcctgtgtgcctctcacaggccaggctggg

SEQ ID NO: 42941 - DNA, 311 bp, Mus musculus
  source 1..311: mol_type = other DNA
tcgtgaagtgaaaacaccaggttattccttttacctggtattaatatcttaatatttatataatacttttcctaattaaaggacacaatgcttattttacatttaattatagctttagtttgtttttttaaaagtacctttaacattttaacattttctttgaaacataaaacaataactaagtgttgagattccactgtacacagtatgctgacttctgttgactgttgtaacccagctgtccagcagcctgtggtaaccctgcttctctacatgggctcacttccgctctctacctgaaaagggaaggg

SEQ ID NO: 42942 - DNA, 269 bp, Mus musculus
  source 1..269: mol_type = other DNA
cctggctgtcctggagttcactttgtagaccaggctggccttgaactcagaaatccgacaaggcttctctgtgtagccgtagaccaggctagtctcgaactcacagagatctctgactgcccaccttaatttggctgttttaattagtagctgtgacccctactagatcaggtaacatagacatgtgtttgaacacgggtattttgtcatggcaatacattagctaataccaatcacaactgtgagcagagttgacaccagagagtctt

SEQ ID NO: 42943 - DNA, 364 bp, Mus musculus
  source 1..364: mol_type = other DNA
ttataactgtaattttgctactgatatgagttataacataaaaatatatgtctattttaaaacattgttttaaaattcaaacgtaaagtcttattacaggctgttgagattctacaaggctgagccacacgtgtgaggggcaggggctagccacatcattttttaggtgattcttatttaagctaggatctaagaaataactagaagggactccccggggagccagcgtgaggccacgtgaccagcgctgggctgtccacgcgacacggttctcgcggacgctgacggacagggccggggcgggccagagcccggtcggaggggcgcccgcgggggccggaggggcgaaggcgcgagtgcgcgt

SEQ ID NO: 42944 - DNA, 470 bp, Mus musculus
  source 1..470: mol_type = other DNA
tgcagggcctgctctcccaccaatgaggcgctgggccagctgagtgcagcccttggatatcaacatggtccaaccagggatgtccatatggtctctggtgctaatataggccacaaaccctgttgctagccacagacccaggtatgtccctatggcctcaggcgactgcgtaggctaccctcatctcatagcggaggtgacaccccattcaatgagttctagtcagagagaaactgggtctctcattcataacctccacacatgcgcacatgcatcatgtacttggacatggacatgcatgaataatattaatgacaagtctttattgttcaggcttctggaagcctggcatgactctgacagccttaagcaggaaactgcacactaaagagtccctctttgggtgaccactagactgttgtcatggtaaccttcatagatatcttaagaaaactacctctgctgcagaa

SEQ ID NO: 42945 - DNA, 137 bp, Mus musculus
  source 1..137: mol_type = other DNA
tccttatcgccaggcgttataaaacctgagctgaaaagagcccttttatgtgatctagttcttgctcactgagacaaagttcacgcattgtaggtttgggcctagtctggaaccttcccttctgcttgcccagtgag

SEQ ID NO: 42946 - DNA, 229 bp, Mus musculus
  source 1..229: mol_type = other DNA
ggtccttgtgctgattcaggtaggcctccagggacctgaggtcgaacttgtgctggggtagcacttccacggtgtcactggtgacatccgtctccatgaccgccactgttgtcaccgaggaatccacagaagtctgggactcggagtttaccctcagcgtcagtcctcagttaaaagaccctggtgtttctcatgcgatggcggcggcgcaccggaagtggcacgccgg

SEQ ID NO: 42947 - DNA, 433 bp, Mus musculus
  source 1..433: mol_type = other DNA
gaggccggctgaatccctcgcgcggagcgtggccctgcccgccccgtcatggatcacctgtagggattggaatccaacacctcgtcgctcatctcctggatgcgggtccggccgcagtggccgtcccctccagagcgccgggttctctcccgggcgagttcctgctccagctcctcaacccgctgtcgcagccgctccaccgagtcggccatggctgggctcccggtggcctccgatcccaggccggaccgccgccgtcgccgtcgtcgccgcctccccacgctgcctcgctgggcccacgaagcgccacgtctccggcacgcccaccgggcttccggcgtgccacttccggtgcgccgccgccatcgcatgagaaacaccagggtcttttaactgaggactgacgctgagggtaaactccgagtcccagact

SEQ ID NO: 42948 - DNA, 447 bp, Mus musculus
  source 1..447: mol_type = other DNA
gattttttgcttgaacaatcattgagggaaaagaaaactctgaggcctccctgggaaaacctctccaaaggggagtttggaggtttctatctagcccttgaggatggaagcagtaagtcctgctgtaactgcctattttagtttttcagaaagataactttatgggttaaaatcattttagttttctctcttagacaagataactcagtcaccccagccccactcccctgggcagggcctatgggcactggatgtggtcagtgcctgatgaccagggcttggtgaaccacaggcactctgttcccttcagctgagtggaaacggaggagccagactggaactccctccatctgcatcccaggacatttaggaatttggatggactccgagcacttaatcaagggctccggaggctacgtttcaggaaagctctcttggatccaagat

SEQ ID NO: 42949 - DNA, 289 bp, Mus musculus
  source 1..289: mol_type = other DNA
ttgcttgaaataaccacaattctttccagttccataaaaatgacatgtctttctgctctctttagagaccaggtctcaaagagcccaggccagtctggcctcaaatgaggactaaacccaggctaggcctatgggtccattcccagcccccatagggcaggtcacaattgtggctccagtttcagcagatctgactgcagacgtgtggtacacagacactcagaagcccagactctgtgcgattttttgcttgaacaatcattgagggaaaagaaaactctgaggcctc

SEQ ID NO: 42950 - DNA, 565 bp, Mus musculus
  source 1..565: mol_type = other DNA
taatattaaactgtgtgtatttagagggtagtctgcccctctcacatcttagatgagacaccgtctgttgctcagagcctgacacaatttgagtcaacttacttgagctcaaatactaagtctactactgtggaactacacatcaatttattatctgaaaatagaggataacaagttaattgaccttaagtagttggccaattaaatcctggctcttaactgtcccaacacttcacccgcaaaggcctttgacctctgaggcttacactcaaaacttaaatccgcgttcagggtgtaggctttcgacggcttcgttaggtaacagagctgctcctttgcagggggcgtggcctctcggaccgctccagggggcgtggcgcctcgccttctgcttgggccaaggctctctttcgctaagcgcacgcgtacttcccgagaggcggaacggcgggcggcgcgcacgcggcgcttcccggaagacggcgagcacagtgctcccgagggcggggcgcgcggaagcgccgaggtcagctgacagggtctcgtgacggccggggcggcggcc

SEQ ID NO: 42951 - DNA, 162 bp, Mus musculus
  source 1..162: mol_type = other DNA
agcttcatacgtgtgcataatttgcgttgctgtgatcccagatgccttcaggcatgaagagaaatcttctttcttcccaaaggctatgcatcacgagcctgaggtcttgagttacgcctgctctggctccgcctccttgcaatcctaatagggaagaatgtg

SEQ ID NO: 42952 - DNA, 419 bp, Mus musculus
  source 1..419: mol_type = other DNA
agttgctgagtatagcatctcctatactttaaagtcttgtgactgaaaacactttatttttaatttctaattccaattggcctcagtggccaggttggcctcagtggctaggttgtccagcctttcactcgcgtgcaaatgcgggtccacacaggggcacacccagggcatgcccatacaagtttgtttgtttaatacacacacacacacacacaacacacacacacatatgtatatatatcgagacctaagtcttcctcattcaaaagacatggggcctctcagtccttgtctcactctgggagatccctaatcactgaaagtttcaattacaatcgcctgatgctcatgagagcaccaggtcccagtttcccggtagataggagcttgtgaccacacccctagttcctagcagtcag

SEQ ID NO: 42953 - DNA, 552 bp, Mus musculus
  source 1..552: mol_type = other DNA
ggagacaactagaaacagcctgaccctcattgtttcaataaatttgtgacagaaaagctttgtagtgtgttcaaagtgttttataatatgtgacaatggttactccctaaataagacctatagtttttctctaacctagggcggtttcaaactccctttacctcccaaagtctgggatgcaatgccatgtacaaatgtacaaatgcctggctttgtacaatgttacggtttgaatgcagaacccatgttaggccagtgctctaacaactgtggttcaaccccagccaaaaactttattttaaaacatacattcccctgtattcaggaaaatattctgatatgaagagaaaaatagctgttcactcatttaatcatgcatttattgacatgtaggtaccaaaataagtattcagttttcttgaatgtatgcaaaaaaaagtatagcccactgctttatcatagaataaggagaaagaccatggagagcgccagggccgcgaccagggcggggcgtcgctgagtccccggaaccccccagggggcgctcgagag

SEQ ID NO: 42954 - DNA, 332 bp, Mus musculus
  source 1..332: mol_type = other DNA
ctctctctctctaaagaggaagctgaaaggccaaattgctgtttctacttttccaaaaacagtatacagtactgttgtagctgtatcacgatcattctgaaactttatggtaacactctttcctgaaacaatctgggacttacataaattttaagtacttgctcccttagttataatatagaaataacttctttaaattgccaaagtgcgacttacttagcacagtgagttttccctctctttctttagtttacaaagaaatttttatcttttcttgcatggagtctttacccggaccgctttgagaaacggaccggaagtggcccggctgt

SEQ ID NO: 42955 - DNA, 521 bp, Mus musculus
  source 1..521: mol_type = other DNA
ctttgtagtgtgttcaaagtgttttataatatgtgacaatggttactccctaaataagacctatagtttttctctaacctagggcggtttcaaactccctttacctcccaaagtctgggatgcaatgccatgtacaaatgtacaaatgcctggctttgtacaatgttacggtttgaatgcagaacccatgttaggccagtgctctaacaactgtggttcaaccccagccaaaaactttattttaaaacatacattcccctgtattcaggaaaatattctgatatgaagagaaaaatagctgttcactcatttaatcatgcatttattgacatgtaggtaccaaaataagtattcagttttcttgaatgtatgcaaaaaaaagtatagcccactgctttatcatagaataaggagaaagaccatggagagcgccagggccgcgaccagggcggggcgtcgctgagtccccggaaccccccagggggcgctcgagagaatctcagctagaagctgccatctcc

SEQ ID NO: 42956 - DNA, 291 bp, Mus musculus
  source 1..291: mol_type = other DNA
agagaaactttcaagtccaggctgtgacctgaagtcagatttgatatatggactcaacttcaggtggggcagcctagctgaggtgaaggatcctgaatgccaggatctcagcattagaatttaaagttctgagggtattttaaacctgtgacatttccatgtcattttccagccaatgcagttggttgttgtaaccacctgaagccaggttttctaaaaaatacgtcggagctcctgagagacccatcctgattggctgatgcggagtctcgcaaagctccgccccgaggc

SEQ ID NO: 42957 - DNA, 306 bp, Mus musculus
  source 1..306: mol_type = other DNA
tgcctgtcttgtctacaagaagagaatggccagccagtgactggcccaacttatcaatccctggcattatctgttatgcatgcagacaggcgtctagcataaaggctccatccatcaccgtggacccttagggaatcttagggctggacctgcacatatgtagcaaatgtgcagcttgggctgcctcagggggagatggggggacctcccacttctcagaggtgaaggatttaaaatgaataattaatgggaacaataaaacaaactggtaatctgattttatccaaggtggaaaacctgagacta

SEQ ID NO: 42958 - DNA, 403 bp, Mus musculus
  source 1..403: mol_type = other DNA
taaaacaccaactgatacctcatttatgtgtaactttttatgtttcagttgtaacaaacagcaaacaaaacaacataaagtcattttacttacataactgtaattttgctactgttatgaactgtaatgtaaatatctgatatgcaggatatccacatataacgatgaaatcagtatttactctgaatcaaggctttaatgcaagtgttgatcaaaaatacatcattccaggctggtgtccaagctgtcacaagggcactgggcttgccctggatggacgcagtactgagtgcctgtgtcttcagagtgctcccagcatactggaaaccccgagggctgtacgtctgagggaaagctttcaggatgccagacagagagggctcttttccttccatggtcagca

SEQ ID NO: 42959 - DNA, 368 bp, Mus musculus
  source 1..368: mol_type = other DNA
taactagacccttgttacaggtcttgagtgcaactcataggattagtattacagccttgcccgtgtttaaaatcgtgaaagttttgccaaccttggaatttttgcattttgatttttgtggggctaccacataaaaaaatgcatcctttctgaatcgtcatgtctttttgtcatgtggtttctgcgaactcactgtaaactaatgacttgaccttgagcgaactccggatccgccggctgcttccgcccgaccgccggctcacttcaccagcagcagcagccacgcctcgaagggtccggcgcgcttccgttggattggacgccggaacgtcgacttcccagcagcccccgcgccgtctccgtggcga

SEQ ID NO: 42960 - DNA, 487 bp, Mus musculus
  source 1..487: mol_type = other DNA
agactttcagatcactaataataattctcaatgtggagaggcgattaaagtccccacttagtaaagtgtgagcagcctctccaggctctccatggaatgtacacacactgcaggcccgaggatgaacttgggtgctagggacacaggttatgcttgtatcccctagctaacagctgacatacagttgttagcaaacgtttggtaagaactgagtggtttatgtccatgtcaaaaaacccaaaaaactgttttgacctgaggttctgctaactaaatctgacctgagagaaaaaacttgtctcttcaacaaataaaccttaagtttttcgcggagcgtccaggggctgtgggacccggctgcccgcctgcggcgcccggccaagcctccgtcagcctagagctcgctgcctcggagggcgtggacatcgtcgccacggagacggcgcgggggctgctgggaagtcgacgttccggcgtccaatccaac

SEQ ID NO: 42961 - DNA, 418 bp, Mus musculus
  source 1..418: mol_type = other DNA
ctttaaagagtagcaactattcattagttgcattcacgcaatgaaaaaaggtcagttggaaactggtcccatgatgaccagtctgacaggaacatcagcttctctctgtgtcccaggcgactctgtgacccggcaatggctgtgcctacccgcggccgcctcgacagaatgtgtggctggatacggggatgggtgtccttccgccccttgcgccgccgggtgtgtagaaagcgggcagtcgctatcccgagagccctggaggagccgtgggccccgcgcgctctccaggctcggcctcactgcacttccgctcacccgcgccgagagctggagtgcgcctgcgcgcgcgcctctccgggcggaagtgcgacaaagctcggtgggcggcgggctgggcagtgcagggagcgccgggcgg

SEQ ID NO: 42962 - DNA, 297 bp, Mus musculus
  source 1..297: mol_type = other DNA
tctgtctgactcacgtggggcaggttggtgaactaacaatcctagtgatgttgtacctaatatcaggttaaagttttggtttttattgtcaatgtcaacagaatctatagcaccaatcccttcttgctcaattctggccctgacttccttcagtaaagacatcatcgtctaagttgcttttgatcagagtgtttcatcacaaagtgaactaggacacagggccatgtgagctctatagccatcttttcaataccattggagtcaaatagtaagaatggaatccttgctttcagacta

SEQ ID NO: 42963 - DNA, 429 bp, Mus musculus
  source 1..429: mol_type = other DNA
agttggggcaggggtatttccctgaaattaaaaccagccaatcttgacactttgaaaaatggttttaacttgattttttgacaatcttatacatgtataatgtgattactgtaagactcactgagttgtggtttctctcctagaatacattagaagccaacttccccaaccaatggttgatgtgaagccatgacagctttggctcataccgagataacttgtgtgtgtacatacaaaatatgcatgcatgcatacatacatacatacatttttttttggagagaggatctctctttatagacaggctagcctctaacagcttctcactcaataaagttgaaatccaacttagtgggggagctaggttttctaagtacgtgggtaagtttacttagctcctgcttgaggcagcgaggccacgcttccttc

SEQ ID NO: 42964 - DNA, 257 bp, Mus musculus
  source 1..257: mol_type = other DNA
cattgcccaataaatgcaaagtgtctggttactggcacgtattcaaacagtgctagcagagaccaggaagcctgcaggggtctgccccaagtcctctgctgggtctgtcccagacacccttttcctcctcctggggagtggggaggaggtttctcaaggctgaaatgaattgacacttttgagcggaggcttcatgtcatgccctcttagaaagaaagaaaagtcagtcataaggaacttccactcaaagggggagc

SEQ ID NO: 42965 - DNA, 190 bp, Mus musculus
  source 1..190: mol_type = other DNA
acataatatataagtataactgcagagttccggttctcccaaaggggactcatggccccctttgcagattctagcttaatctttagaatttatttgagaattaatttgtggcctgggcacctactcaaggtgcacagcactttggtgcgctccagcgcagagagtgaacccagggtctgcagtccaggag

SEQ ID NO: 42966 - DNA, 430 bp, Mus musculus
  source 1..430: mol_type = other DNA
aactctgtagtgagtgtcagagcagaagggatacattctttggggacaaaccattttactcgcacacaataaatttttcttattaatgaaaagcaaaacgggtattggtttacagaattttgtgttctctctgtaaaaaaggaaacgacacaagaaaaaaaaaatcttagtcatccggtttgtctctcgcaaatatctccagtattgatgtgtaaggatagccgtgctttcagaaggataaaacctgcggctgctccggaggttccttctaactagctgggaggaactgcaggactcctcagccccagtagccacagtgacctctcagccagctgagatggtcgtggatttctgagaaactctgccttgccaagtcagctggaggcctctgacgggaagcccggccaagggcgcagggcgggagtcagcg

SEQ ID NO: 42967 - DNA, 368 bp, Mus musculus
  source 1..368: mol_type = other DNA
agagggaacctcatctgagaaaatgccttcatcatattggcctgtaggcaagtctgtaggtagtattcctccatggacgccctgacttcccttcatggcggagcataaactctaagattaagagtgtttacaaaaaatcgactagcacacatatatgtgcacagcaatctagaatgctgttagaaattcatctttttctttatcatcatgtagagatcaagtatgcattgaatgctttcaagaaacttaaaaagtttcgagacttcctggaaagtaaaaactttaaattaggagaattagaatagaaaaaaagttggtttcatttgtgttttttgaccatttttggcgaatggcaataaagcattgct

SEQ ID NO: 42968 - DNA, 334 bp, Mus musculus
  source 1..334: mol_type = other DNA
ggcatcaggtcctctggagctggtatgtgcacatgtgaacatgggtgcccacagagtctggaagctgtcagcttctggagctcaggtcctttgcaagagcagtgtgtgctcataacgtatatagatcaggttggtcttaaaattaaacttacaggccagccactcagcaaggatagcctaggtggctattgaagtctttctttaataagtctaatcatctattctgagggtatataaaaatatatataaatgactggtgtatttcttttgttgggttgtttttctaagtgattaaacaattctccaaatataccacccggtacaggagataact

SEQ ID NO: 42969 - DNA, 261 bp, Mus musculus
  source 1..261: mol_type = other DNA
cagcccaggaggtccatggggctctcgaggaaagggaaccctgcctgttcccccagcccctggaccttgaggggccactttaacagccccgctccgggctggtgcacctgcggtcagcaggggtcccactccggctggccctggcttcccaagccagcccccattcaagtctcagatcagaacctggcatgggacagggtgggaccccaccgggggagtcaggctttctctcggcagggacaggggcagctcgtcctcccc

SEQ ID NO: 42970 - DNA, 318 bp, Mus musculus
  source 1..318: mol_type = other DNA
gtccttcactctgcccagtggagaaaatgattgttgatgttcctggcaaggctgatcatgaccagctggtcttgtcctatagattgagccccatagcacatgtccttttgcttaaagacttgctgaaggttggtaaatctgcagcctttccacatggacccagctttgccagactggtgctagaggtcaatggactccgggtcagttggctagacaaccaatagccttttttttttgtggcccaggggcctgctggtaggaacggcgtccttcatgaatgattaacttctaggcctaggaggaaggtccacttgaact

SEQ ID NO: 42971 - DNA, 324 bp, Mus musculus
  source 1..324: mol_type = other DNA
atgcgctctcccccaatagttatagctatctaggggtaaaggtgaaaatttccacttccctcagtccaaggctgcaccttagaccagcctggagcactctgagcccgcgtcctccccttgcggaagaccgtcgctagcagggcaaggctctgttgtaagccctagagtagaggggaagggcttccactctcagaggatcgagtcccacaggtgcgggtgagcctttgggatatgtgaccacatctcctgccgatgggcgggatggggcgtggcctctttcacccccaggccccacccccaggctcgcttcctcccagtggcggg

SEQ ID NO: 42972 - DNA, 396 bp, Mus musculus
  source 1..396: mol_type = other DNA
aggcaatcactggggattgagtgcaaccacctgtggaaggtttttctagaacagatttgcaatttggaaagttgccatccatgtcatgcctttgcaatcacctgccagtgagtgaaatgttagggatcttcatgcgcttcgactctcattaaattttaaaagaagttccaagcttctgaagtttaatataaacccagttgaaaatgccacttaaaacaagtgtatgttgtcaggcctctccgccaggtcctgcggcctcagagacaccagcgtctccccggggctcgacctcaagtcctgccctcgagagagagggtttagatgattcacaccccagaaccgcgggctccagctccggggcctcagcaacgggaggccgccccgctgacgtcatcg

SEQ ID NO: 42973 - DNA, 217 bp, Mus musculus
  source 1..217: mol_type = other DNA
cctatgcaaatgcttttttaataatagctgctattcggcacaagggacccttggggccccttcttggccagaggtggtagcggccgggcactgggccatccggaccccggcgcccgctgcgcgcacgcgcggcaccaatgcccgcctctgccggcctcgccctccgggggcggggcgcgctgggggcgggtcctgcggcaccgcccgggaagctgcg

SEQ ID NO: 42974 - DNA, 205 bp, Mus musculus
  source 1..205: mol_type = other DNA
cttctgacccctggcagccccaaggttcctcgagctgtggccatggtcctcaccttggcaccgtgtccaagatggaggcttgtagtcatacttgcagctatgcatgtgtgtgtgtgtgtatacacttgtgcatgcttgtattctctagatgagactcagtccacttagattgaccagctgagtgagctatcccggccagcaggcc

SEQ ID NO: 42975 - DNA, 319 bp, Mus musculus
  source 1..319: mol_type = other DNA
tgtcttgcctggacaattcactgtccaactgggatagtgtgtgacctatacacaataaaattcattggtaaaccattggctggaccagccgcagcctacctcagaagctccagcagcttgctgtgctcagcagatgttggctccagcctctggctcacagatgctctccatagagttctggggatagagtaggtgagagagccactgtcccgagagcacccatgagacaggcactgaggcatgagagtgaggtgacaccctcctcacgagggtcagtgctctgcctagcctggtagggacaaagtagctactaagctgt

SEQ ID NO: 42976 - DNA, 297 bp, Mus musculus
  source 1..297: mol_type = other DNA
cgcagaagaccctggattcaatactcagtgttgtatcctctaggtgcggctcctacctgcaatcccaggactgggtttgagaacgtgcgtcccttctgtggctgccatccatccatgcagcaaagaaggttgatcggacgacctacagccctgcgctcttggctccggcagcgtaggcctgagacataacagagagggaccctggcaccttgccgggccggcttcggcgcgcgcgtgcgcgcggcaggccgcacccaaggcgcatgcgcggcggtcactccggctctatatttaggg

SEQ ID NO: 42977 - DNA, 202 bp, Mus musculus
  source 1..202: mol_type = other DNA
caacatagttaaaataggatcagatatagatcctgtatctctcatcaaaacactaaaagaattatttttaatggtgtgtgtgttcagaactggagttccaggcagttgtaaaccaaatgaatcattcttttgatggaaggttcttgaatcttacaaaacatccagttcccattttttttttttttaaatagacacttaggta

SEQ ID NO: 42978 - DNA, 279 bp, Mus musculus
  source 1..279: mol_type = other DNA
gatggaaggttcttgaatcttacaaaacatccagttcccattttttttttttttaaatagacacttaggtaaatgtagttctacatgtagaacttcatttccccgatggctgcgcgctccgttacctgagctagagctgaagggccgaaaccttcatctaagatttttttttttaagttcttaggaatcgaacgacccgacttccggtcggcggacaaaattgcggtgggcgggacgcggcgacgccaccggcgttgctatactgaactggcacaactg

SEQ ID NO: 42979 - DNA, 212 bp, Mus musculus
  source 1..212: mol_type = other DNA
gtgtacttacatataataaacaaataaataaataaataaataaataaataaataaataaataaataaatcttaacaatcatctgtacttacatataataaataaataaatcttaaaaagcccaggctgcaggcagcgccctctccagtgcattccacacaggagcccggtgagcagagtcggccgccgtcgtgggcgtggccaggctctaac

SEQ ID NO: 42980 - DNA, 479 bp, Mus musculus
  source 1..479: mol_type = other DNA
cgaacagcacgctggacgaggccccgcccacttccagctgggtggacccgccgcgggacccgcctcctttccccgcagcctctttcggcggcgattgactatctgccgagcgcgtgcccttatggagcgctccctccccgtggcgaaaagctttcttaaagagctcggagagcggtccttgaacacccctcagtttccatttgttgaatgaacgctatctggctctgggtgaccgccccctgcccccagcctttctgcaaggccagagatctgcgaggccgccttggctcgcccctgggcaggtggtagccaggtcccggctaggcgggcccgtaggagccggccgagggcgctcccgcgccgcttgcgggggaggggctgcggaggcgcggtgcctttaagcccaggcgccggcctcacggccccgcctcccggaggacgcccgggcgcgcggccgccggagccgcggtttaattggg

SEQ ID NO: 42981 - DNA, 394 bp, Mus musculus
  source 1..394: mol_type = other DNA
ggagctggctcagcctctggaactggtggccagagaaacacttgtgcctctgtttctctctctgctggcaaaagagcgctgaagggtcagccaagcttaataacatggcaccttgcccagacgcccactctgcctggccagggttagagccccatgggctcgccgcggcggcttttagtgccaggccccgccctctttcctcgccctatccggaggctgcaaggggaggagggtccccctggggggcgggaccatcctgggtttgcagtccaggctcggatcccgcccgcagaacctggcagggacaacggcgccggctccgctaagggaactgggacagcccctatacgcccctccactccgcccaggccacgtggtgggcggccccgggcgg

SEQ ID NO: 42982 - DNA, 205 bp, Mus musculus
  source 1..205: mol_type = other DNA
ggcgttccaggcgccgaagatctcgaaacagtcagcgttgtcacagaagtctggagctgctgcatcatctggcattaacgctaggagagcttggtgccaagaactcttctgattttgcaaacagggtgaggcgggcctcggtgctttagggcaccgccccacgttcttccctggtaaccaggcttggcctgcagctgcgtactgc

SEQ ID NO: 42983 - DNA, 186 bp, Mus musculus
  source 1..186: mol_type = other DNA
caagcctggttaccagggaagaacgtggggcggtgccctaaagcaccgaggcccgcctcaccctgtttgcaaaatcagaagagttcttggcaccaagctctcctagcgttaatgccagatgatgcagcagctccagacttctgtgacaacgctgactgtttcgagatcttcggcgcctggaacgcc

SEQ ID NO: 42984 - DNA, 372 bp, Mus musculus
  source 1..372: mol_type = other DNA
aagagcactgactgctcttctggagtgatcccagcaccctgtgtctgaagacagtgtactcaagcctggctctggggttgccatgcgagggctcctcgctagctgagccacagtgtggacacactcccaggccgctgcggccccagccccgcctgacaggatgagcatagtatcaccctcaccctgcggatgctgatgcacggggggctggcacagcccagtggtggcacgcgtcgactcagtgctccctccctgtcagagtgactggaggagcgggagcattgggaaggtaggtgtccagctctgctctccttacagaagggagggaggagcagacagatccatccctgccaccaccgtggggaagctgcc

SEQ ID NO: 42985 - DNA, 452 bp, Mus musculus
  source 1..452: mol_type = other DNA
gggtccccctgccctttgtccactaggccagatggagggaaagggagattggattcccctccccacccactgagatgggggaagggcaggctcaattcccccccccccccacaccctagtaaaggagttaatggcctagctctctcatgcccctcctccagctggtcgggtagcctctcctgggaggaccaggaccaggcggggagctccgatccggggcccctggtgagccgcatgggaagggtccatcgctccctcccggaaacgacggatgctcggggcgccggaccgcgcggggcggggcggggcggggcggggcgggcggctgcggcactggggctgctggggcgggcccgccgcgctgtaatcggatccggggagggggcggggcggggccgggccaggcgggccggggggtgggggtgggggggcgcggagccgggctccgggcc

SEQ ID NO: 42986 - DNA, 305 bp, Mus musculus
  source 1..305: mol_type = other DNA
ggaagcaagtctctcttgcgatccggcctgcgcttgcgctctgctaacgcctgactagcagggggcatgcggtgcttgcgtcttatggccacaagtttccgctggaacagcgattgaatggaattcaatggatatatgctgggccagtcagcgtgattgctgggaaatccctgaaacagcctggccctgccctagagtcctctgcagggcagggaagggtgaaaagcctgaaactttggctggcaccccagaactcaggactgttcacttggtccgctcccctgtagctctgattcagcccagca

SEQ ID NO: 42987 - DNA, 260 bp, Mus musculus
  source 1..260: mol_type = other DNA
tgaggagtttgcctagggagacactcaagtctggggcccctcccgctggagttaccttttgagccacctacctgggggagggagtttttaagatttatttattattatatgtaagtacactgtagttcagacactccagaagttcaccagagctcaagcttcagagctcgacctcctgggggttcacagaagagcctccagtctccagctggcagctgttagagccaagggggctggcaccaggccctgcccctccctta

SEQ ID NO: 42988 - DNA, 326 bp, Mus musculus
  source 1..326: mol_type = other DNA
ccctgataggttcccacggcgcagcgggccccaccttccgcagctccattgggccctcttcaagagctcctataggctccggcgccagcctggagtaggaagcaagtctctcttgcgatccggcctgcgcttgcgctctgctaacgcctgactagcagggggcatgcggtgcttgcgtcttatggccacaagtttccgctggaacagcgattgaatggaattcaatggatatatgctgggccagtcagcgtgattgctgggaaatccctgaaacagcctggccctgccctagagtcctctgcagggcagggaagggtgaaaagcct

SEQ ID NO: 42989 - DNA, 362 bp, Mus musculus
  source 1..362: mol_type = other DNA
aacagtcctgagttctggggtgccagccaaagtttcaggcttttcacccttccctgccctgcagaggactctagggcagggccaggctgtttcagggatttcccagcaatcacgctgactggcccagcatatatccattgaattccattcaatcgctgttccagcggaaacttgtggccataagacgcaagcaccgcatgccccctgctagtcaggcgttagcagagcgcaagcgcaggccggatcgcaagagagacttgcttcctactccaggctggcgccggagcctataggagctcttgaagagggcccaatggagctgcggaaggtggggcccgctgcgccgtgggaacctatcaggg

SEQ ID NO: 42990 - DNA, 434 bp, Mus musculus
  source 1..434: mol_type = other DNA
tgacccttatctatccttatctggatcttggtttgaagatcttgagccatagtggctatggattccagaagattgaatctccgagtttaaggaacacacctttaatctggctgcgactgaacaattgttgggaattgactgtaagtcatcaataaattcctttactatctagagactatccataagttctgtgactctagagtgtatctagagatagctagctttgtaactcactactttttaaatatttatatagtattgaaggtataaagcagcctataaatcattaaataaatcattgaatattcaaaaatgtgaatgaagtgttatcatcaatggttcattatacacctttacagcgattcccgtgactcggtcttaaagccagcgctctgggcatttatggcagactgactcaactgttgcctgagtca

SEQ ID NO: 42991 - DNA, 305 bp, Mus musculus
  source 1..305: mol_type = other DNA
cctgaaatgaaaaatcttttaaatttagaccccattaacaggctggtacttaggagcctagctccagtctctaggctaagttcaccaaaactgtcttgcatgatggtggtgggggatcaaagtttacatagctatcaccttaatatctgaactctcgtccaaagatgctattaagaaaagatttattcttattttatgagtatttgcctacaccatatggatgctggggactgaacccaggtcccctggagcattgcccagggctctacacacaacacaggtgctgatcataggcacccttatga

SEQ ID NO: 42992 - DNA, 243 bp, Mus musculus
  source 1..243: mol_type = other DNA
gaagagcagtcagtgctcttaaccaaacagggtttcacgactgtagcttgtgtctaaaaaaaaaaaagaaatctttcctcctcctttaaaatttccccatcccaagggaaaggacctttttgtcatgagagctacagccctcaaaggccaaccctgaggactctagtcatccctagaaacagaaagatgcttttcttagtacctgtgatactggaggaggccatctagtccctgggtcacagt

SEQ ID NO: 42993 - DNA, 439 bp, Mus musculus
  source 1..439: mol_type = other DNA
tctggtccaaagggacgtccagcagccttggcggttgcaacggtggagctggagcgtcacatcaatgacagcagccgctaccctgaatgtgatagcatcagtgacagcagcgcagcagcaatacctatgactggtgccacgctagagtgacagcaagtagggccgcagcactacgtgctggtggcaagcagcatcaataacggcaaaattgcctcttcccctatgatggcagccatgacagtgacggtagccgctgaacagctccagagagcagctcagaagggattggtcagcctgagtcaggagggtaggaagtcccatgtcccttcctgtgacaacaacaggtattcccaatggtgcaggagactctccatcaagcatctttgagctagtagaagacaacgaggtctgtgagtcacaggtatctttgtgacgtcac

SEQ ID NO: 42994 - DNA, 455 bp, Mus musculus
  source 1..455: mol_type = other DNA
tccttggacttgtatgacaagcacctggcatactgagacatcgtagcatcacaggtatgtacatcttcctgcctgctaagcaggcactgtatgatcaaacagcctgtgcacacactctgtgaagatacattttcagatatatatttggcataattgaaaactgccaaacatcgccaaaaggatggaagagctgcaatcactttctcatttctctaggacagacatatttgcaggagccaaatagtttagccaaataggagtctgctatatgttttgccagacccactgtgggactgagctgacccactgtgtgactgagctgacccactgtgtgactgagccaccatctgctaattttaataatttccaccaaatcaaaatactaaccaacttcggaaatttccgtaggcatgggagccatactgatttctgcatcacagatggccttatgacat

SEQ ID NO: 42995 - DNA, 489 bp, Mus musculus
  source 1..489: mol_type = other DNA
aaataagttaaaaaatatatcccagtactggcagatttctgagttcgaggccagcctggcctacagagtaggacagacagccagggttacacagagaaaccctgtcttgaaaaacctctctcttctctctctctctctctctctctctatatatatatatatatatatatataggattttctctaattgtcacaatagcagtacttctgtctttgcgtcttcatgctgtgacactgggtgaatgaacacaggagcagaagtccctgctctcatgggcacctgggacgatgctgtctttccatacaacatcaggaggcacagcatctaatccaagctaagaaatttggacaaaaatatacatttctattgtttcatgttgcctgggacgtttcctggaaccttgacattgaacattttcccaaacccacaatggctgtgagcagttttaacctaagattatcttacctgaaagtttgctctccactacaa

SEQ ID NO: 42996 - DNA, 374 bp, Mus musculus
  source 1..374: mol_type = other DNA
tccccatcctgctgtgggaggaaggagtcaagcagcttctccaggctctagctcccgatctacgcagcagcaatgccctttgctcataggagcagagatttcagaaggaaggggaggcccatcctctgacctccccctcaggccctagctctaacacggggcctgtctactatgtagctgcagtcactgcgtggagagaatcaccgtgctcactctgctagctcagtgaccttttctgactgaggggcagagggggctgagaggcacctgctccagcgcacagtgggagcgcccgggacactgtggacagctccaggccctgcggacctgtcaagagcgggaggtccggcaaagccgggcaggctgcgagcggc

SEQ ID NO: 42997 - DNA, 293 bp, Mus musculus
  source 1..293: mol_type = other DNA
ctagctcaagattgaacctgtacttgggagttacctaagttatattaacttagtagaaactcggagtgaacttccgcactcagctcagagtttgcattctccagagattgttcagagcatcctcagctgttaagacctgagcaagcggccagacttgagattcctgggcttctggagcaggcaaacaggcgggcccaacccagctgggagacggggcggggcaggcctccgccctccaaatctggagcgcacgcgcccacagccacggtcacgtcccgccgcgaaaggggcgg

SEQ ID NO: 42998 - DNA, 179 bp, Mus musculus
  source 1..179: mol_type = other DNA
tatgtgacacagcagattggcacctgtagcactttttggaagtttgaaactttgccaagaagtgacagtatggccagcagtcaacttctcactgtctgtgtggtgtcctcttgacacccagtgtaaagtagctgtgtggacaggcaaagcagccctgagatgcttgagctgggcagact

SEQ ID NO: 42999 - DNA, 275 bp, Mus musculus
  source 1..275: mol_type = other DNA
ctgtacatatttaaacttttgtaatttgagagatggttctaatacatgcctttaattcaagaactggatttctgagaaaccctgtctcttctggagacagctgcagtgaacaacttttgttggaagctacagctgtagtagcaaccagttccagttattcatgaaaaggtcctctgtagtaaataccaccgtttagtgtctttccctgggaaagaacaacaggacttcccgcccgggtggccgggtgagagggccgggagggggaagtttctggc

SEQ ID NO: 43000 - DNA, 287 bp, Mus musculus
  source 1..287: mol_type = other DNA
ccactaccactcttctgatacaggcttagtaacagttatcacacagaatcgctgggtcaaaattttccttaactctaaaattgataaattgaattatataatacatttgattcctgtcgaatatgtttttaacagaaagacaaaggaaaaccgaatttctaacgatacagttgtttctgaatacatttgtgaagtaaattcgggcagcccgggcttttagagcctcgcgccaacgttacacacccgcgcgcgctgagtgcgcgcgcgaccagtacgtagcctgcgag

SEQ ID NO: 43001 - DNA, 411 bp, Mus musculus
  source 1..411: mol_type = other DNA
atgcatcaatgatccgcatcctggatgtggtcagaacactggccagcagtctgtcaacttggcaagaagtgataatggcattacctgtggacccagtggcaccaagatatgcatactccatggaaggaaatagagtttcttcgggccaagcggccacacctgctccggtgggcgtggccccgacagccgcggcctgccgagctcgagagggaatctgcgcgcgacccaggagccgggtgcctgggctccggcagccacgcggcggcgccaaagctcgcacgtggtgcggggccacggagctccgtgataggcagcgagcgaaactctcggcccgcccaccgcggtcacgtgtcgcggccggcgcagcttgataacgcagcgccgggcccctcggcgccgctcccgccccgc

SEQ ID NO: 43002 - DNA, 363 bp, Mus musculus
  source 1..363: mol_type = other DNA
caaaaaatgtgacttttagatgtaatattgatccactgatttcactgaatgccttccagggcgagtggccaaagcccttgcacttagcattagggcagtgccttgccgcgaggtcctcagaggcccaggacgggaaacgactaggcaggccgagacctttcgttctgccgtctgacccaggttaaagcgggcaaagtggacgttccccttgattggctcggcaatccacgtggtagttcaaaacaaggaacctactggcgtggcgccacgagtccgggcgtcgggaggagtggagccgccggtctgggctccttcgcacaccaatgggaagctcaggtttctgttccagcccactaggcggaa

SEQ ID NO: 43003 - DNA, 336 bp, Mus musculus
  source 1..336: mol_type = other DNA
ccatgttgactgctgtactagtttaggcttcctggatcctatatattgggtctaaatatagagtcatcctaggagctactccctgagccccgggatggtggctgtgatagcaatgtgacaacgacatgagtttaataacgatccgtggccttcctcacgcaggaccacgaccccgttctgcggtagctgcagccaaaagggagttggcctcccgggccgggctatccaatccccgctggcccgcagcggcgtctcgtggattcgcgcgcgggctcgggcgggcggcgcgagcccgggtattgcgagcccccgcgcgccagggagcggcgcatgcgc

SEQ ID NO: 43004 - DNA, 508 bp, Mus musculus
  source 1..508: mol_type = other DNA
aaaaacaaaacaaaagattgattggtttttcgagacagagtttctctggctgtcctggaactctctttgcagaccaggctggttcgaactcactctgctttcagagcgctgggattaaaggcataggccactatgcccagctaattttattttttaaaaacatagccttcaccatggccagaacttgaacttttattagttgagattcttagaacctaaagctcaaatcgcccaatacatttatttggaatgacaagtgaattgcaaaaacattcaaaaagttgaattctgaaacacttagctacctggaaattttgggagtctaaaacaaaatgtcttgcgctgtaacttacaacagttgaaggagctcctagcggtgtcccagggcgctgcgaaagttacagtgaacttgacgaggccacgccccattcgactcagaggcggagtctgccaggggctctgccctggcctgcccaacccggactagcctggccctttaaggttgacc

SEQ ID NO: 43005 - DNA, 508 bp, Mus musculus
  source 1..508: mol_type = other DNA
agcctagcctgggctggggaaagcccagtcactatactcagattctagacactgccagaagcctgtcagtgtactggttctccagatcttatctccccatatcctgaaccgtggatgtggagggagatcacgggacttagcctataagttcacattgtaaacctgtactcagaagtttggggccagcctggtctacaaactgagctccaaggtagtctgaattcaattttaaaacaaacaaacaagccatcgacagggctgtctgggagctgactatctctgtttactgactcaagagggtaatttccccaactgtcggtccacggcaaagaagggatgagatcatttgattacaaaagattagatgtaacctgaactctgaggaccggcccgaccctgcccccgcgctgtagttctagggggggggggataagcgcacccatccccaaagaagtaggaagacaatctggtctccagttgcactcccgcccagttttcctggaaagtt

SEQ ID NO: 43006 - DNA, 473 bp, Mus musculus
  source 1..473: mol_type = other DNA
gggacttagcctataagttcacattgtaaacctgtactcagaagtttggggccagcctggtctacaaactgagctccaaggtagtctgaattcaattttaaaacaaacaaacaagccatcgacagggctgtctgggagctgactatctctgtttactgactcaagagggtaatttccccaactgtcggtccacggcaaagaagggatgagatcatttgattacaaaagattagatgtaacctgaactctgaggaccggcccgaccctgcccccgcgctgtagttctagggggggggggataagcgcacccatccccaaagaagtaggaagacaatctggtctccagttgcactcccgcccagttttcctggaaagttcttggaaatctgtcaaaggtggccgcaaagcccgcggttctaggaagatgaggcttccgaggaggcgcctggccccgccccaccggcccagcccgt

SEQ ID NO: 43007 - DNA, 223 bp, Mus musculus
  source 1..223: mol_type = other DNA
tatttatttttgaatattttatgttatttcttaaaattataagtatgtatgcaaccttttaaattttgagacagatttttactaaattactcaggatgtcttctgggtccctttccgaaacgtgggtgacaccccttcaagcaatcatctgggaccccccttaggggggctgcagatgctggccagttgagcctcctcagcatcctcaccggagccctttctc

SEQ ID NO: 43008 - DNA, 372 bp, Mus musculus
  source 1..372: mol_type = other DNA
cagacacatatgtagtgtacagatacgtgtgcagacaaaaaattaattaaaaattaaacccaggaggtggaggattgccttggttcaagactaacctgggcaacataatccatcctgggttacacacagtctgtgaggaataggtgggctatcacacagataattccatcgtcataaattcaatagaagatcaaactgaattcattttaggtttcaaatatccggcaggccatcagggtcagaggtattctcagagagaatctcttttgctcccgctgggagcagagctatatctgggggggcaggaggcaaggcactccggctcctggggatcccccgaggctgctcatgacccagcccaccccagctcag

SEQ ID NO: 43009 - DNA, 462 bp, Mus musculus
  source 1..462: mol_type = other DNA
acagctcattgttgtaactacagtccagggagcggaggcttgggctccgtggcccgtaaatcttgaggtagctggagcttgcagaagcctgtgactccaggccttaagcctgttgaaggtcgagtcccagacccccggtgggggcggggacgtgcactgggcgctgggaccacggctggggctcaggactcgcgagcttggaccgagcacgaggggcgcgcgggcacaggcgggcgcgtgaccgcggcgggggcgcgcggaggcgggccggccaagggcggcgccggcaggttggcggcggccgctatttgagcgcaggtcccgggccaggcgctcaaagcgcttggagccagcgcggcggggagatcgctgcgcgcagcccgcagaggcgctgcggccagtgcagccccggaggccccgcgcggagaaggaggtggagaagaggccggctttccgcccgcc

SEQ ID NO: 43010 - DNA, 368 bp, Mus musculus
  source 1..368: mol_type = other DNA
cagcactgcagccttacaggggtattcctatgaaaagggaaggctgttacacacagctcattgttgtaactacagtccagggagcggaggcttgggctccgtggcccgtaaatcttgaggtagctggagcttgcagaagcctgtgactccaggccttaagcctgttgaaggtcgagtcccagacccccggtgggggcggggacgtgcactgggcgctgggaccacggctggggctcaggactcgcgagcttggaccgagcacgaggggcgcgcgggcacaggcgggcgcgtgaccgcggcgggggcgcgcggaggcgggccggccaagggcggcgccggcaggttggcggcggccgctatttgagcgc

SEQ ID NO: 43011 - DNA, 349 bp, Mus musculus
  source 1..349: mol_type = other DNA
agttgagcctagaccaacttggcacttatagagagacttaaatatattttttctttaatagaaaccctggaactggagttacagttatgagaagagcagggagatttctctgtccagtggaatcaagtgggaaagttcatgtaaacaatggcaagtcgtttacacagttgccttctttgatcgttaagataggaagagcctgccatcatcatcatttttaaggctcctagttcacacacgttggtacaactcatcagaaccgggcaagcccgtacactctacgggaccggtcggcgcgactccgtatcccagcatgccgagaagccggactcagagggcgtactgccgc

SEQ ID NO: 43012 - DNA, 296 bp, Mus musculus
  source 1..296: mol_type = other DNA
ttggtgatgatgtacacctggaccgtgtcaaacagttctcgcctcagggacgccatgagagagagctccctcttccaaacacatgctatgtttttgggggacaaaactcctcccccacactagaacctgattcagtttgggggacaaaactctccattcaatggaagagacacgcgtaggcggccagctgagctccgagcatccctcccctcgcctagtccgggagtgtggaatacattcgatgcggcagctgctgccctttgtgacagcgcctgcgcagggcgactcagggggcg

SEQ ID NO: 43013 - DNA, 219 bp, Mus musculus
  source 1..219: mol_type = other DNA
gggcagtctcgccacgaggtgggctgcagccccagaggcgtcgtaggcgttggcaagagtgcccactgtccacgcccctcactggggacagtaaatggcaccttttcccggagaagcactaacagtcccaaacacctgtatttgaagtggtaacgatcgcaccttccaagtgggagacgcgccaccgctccgttcgccccctgagtcgccctgcgcagg

SEQ ID NO: 43014 - DNA, 209 bp, Mus musculus
  source 1..209: mol_type = other DNA
cgcactatacagagttaaagccagcctggctgacatagtcaaaccctgtctcagaaagcctgtaaccagccctggctctatagcgagctccgtgtcggtcttgaacgtttttaaaataaaaactcctggctgcgggcctgagcgcggtagctacctaagacagtgcagctgcaggagttgcacactcacagctgtgcaagccaaaacta

SEQ ID NO: 43015 - DNA, 391 bp, Mus musculus
  source 1..391: mol_type = other DNA
aggaccaaggagggaaggtcacctagtgcttctgtgcacctacctgcccggtcgtgggctgaaacctacaggctggatgtcctagaggcagtagctccggagaggccccgctgcggctactgcaacgcagaggcctccaaggatgccagggtattgctgcaggtgaggcgatcctgggaccttagttgccatgcaacccaccccgctgcagggagtgtcaacccagactgtgactgagcttcagggacccctggtgagcacagctgagtaacagtgtggcgctgtacagaaggggctctttgaaagggcccacccctgtgccgtgccccgcccacaagtcaccgccgccctgcctggatcctgggggcggtgccgaagtcgcggcccgccc

SEQ ID NO: 43016 - DNA, 427 bp, Mus musculus
  source 1..427: mol_type = other DNA
gttacatatgcacctctgccgctcagtcgtaaattaaatgcctttgttttcaagttaatggcaaagctaagtaatagcgtgttaagcatgcttggatccctaaccgcctgaggcctccagtgtccagaggtgcctaaccgaggcctctgggatacagaggctccctcattcagtgggtcacttcgctgcgggccccgagacctgggctgggactctgcacgtgtgcagggttaatccctacgccgtgcataatgaacaccccagcgctccctggctgggagcacgcgcacctctcacaccccgcttccggccctaagggcagcggcggtgcacatgcgcacacgccccggcccgctgggaggcgggacctgagaggcggagccgcctctgcgacgagctgtagcgtcgtggccccgcccctcgacgt

SEQ ID NO: 43017 - DNA, 375 bp, Mus musculus
  source 1..375: mol_type = other DNA
gggcccccagtcggggtaacacctcaccctctcaaggtcgcagtgggacctaccaggggaaagctggtaataattattttcctgaagaatgttctctggtgaacttacaacacttagtttaggttccttcagacctcaaatatactcttaagaaattgatcaaaaaagttttaaaaagaagtttattcgggagacaggctacatggcaagttccgtagtttctttacaggcaaatgtgacaactgcaaagacacaccttagcctcagacaggcctaaggtcccttaggggtgggagctgtcccagctgacccttgggacccataggcttctgggacctggaggcagcgcatcctgtggtggtcagcctctgagag

SEQ ID NO: 43018 - DNA, 382 bp, Mus musculus
  source 1..382: mol_type = other DNA
tgcgggaccccgcccccgccccgcacgtggggccagagttcagccgggtgggggtggatgagggcgcccctacaccaggcttgcgacgcccgccctccgaccaggcgccaccaggacccacgccagggccgccgccatcctggtacagctcgagcctctgttggctccgccccgaggcccgcgggccccctcggagaacatagtatgtaagattgaaatggggattcccgctggttttagccaccaatttgaaataaaagcttatagctgaagacacgagtggatccagaacctcttggaatgcggtcagaaggaagccccgccttttgccgtctagaggagggggcctagtacagcttctgagccctcctttggcaaagca

SEQ ID NO: 43019 - DNA, 300 bp, Mus musculus
  source 1..300: mol_type = other DNA
acacacgttacttatgcgtgtactcactgagtcctcacacttgcaggtataaatacctgggaatttgggcacgagcccagttaccaaacttaagaacaaaaggtttatttgtttggctcttatatgtccacgtgggcacaaactgttggagcaatgtttttgcttgcctgcctaaggcaaaagggaccacacatttgcttgcccggctgtccacacaaagagtgttgtcgagtaggaggggctagtccagccccagtcccgccccgccccgtgccaaggccagcctattggttgggtggg

SEQ ID NO: 43020 - DNA, 236 bp, Mus musculus
  source 1..236: mol_type = other DNA
tcctttctacgaagtcaagtggctagatcactttcctgctttgccaaaggagggctcagaagctgtactaggccccctcctctagacggcaaaaggcggggcttccttctgaccgcattccaagaggttctggatccactcgtgtcttcagctataagcttttatttcaaattggtggctaaaaccagcgggaatccccatttcaatcttacatactatgttctccgagggggccc

SEQ ID NO: 43021 - DNA, 284 bp, Mus musculus
  source 1..284: mol_type = other DNA
ggccaggcatggatgatgcacaccttagatcccagtacttgggaggcaaggccagcctggtctacatattgagctcagcggcaggccaatttctgagtttgaggccagcctggctatctagctccaaagactactgcatgctgatggtaccctcagagggctggggaaaaacaaagctgtcttatattacttagctgtttaattagctcctaaaataatccaattgtgttgtctgaagaaagtgaaactctcatttctttgagcctggagctctgttgtgacgc

SEQ ID NO: 43022 - DNA, 305 bp, Mus musculus
  source 1..305: mol_type = other DNA
ctaccaaatgcactactagtatttgctaccccacaagtgaggcgcacacgtggccaatgccagctggggcacgtgcgagccttagcagagttctgggactgggctgatctgggggcgctgaccgcccttgcggagcgcattgcccttccgagcacgaggcattcctggaaccggggtcagggacccggagggcggggactccaaaccagcgaaacgctggcaggagccacacgccgcgcgcgccaccatcttcgtgaggcgcccttagcaccgcccaagttgtgcgcagtgcacgacgggagtag

SEQ ID NO: 43023 - DNA, 240 bp, Mus musculus
  source 1..240: mol_type = other DNA
aaagctgtcttatattacttagctgtttaattagctcctaaaataatccaattgtgttgtctgaagaaagtgaaactctcatttctttgagcctggagctctgttgtgacgccttaggaggaggtgctctgtctcctgcgaagactgccatggcccatggcccacaaggggtagggtaacctgggggaaccctggcgctctgagctaggggcggaccctaaggttcctccttcctggcct

SEQ ID NO: 43024 - DNA, 260 bp, Mus musculus
  source 1..260: mol_type = other DNA
ggctggccctacctgcctgcgtagaaattcctgaggagccgagcactcggaggcagaggcaggccgatttctgagttcgaggccagcctgaaggacagccagggctatacagagaaaccctgagctaaggtctgttaaacgctaagctattatctgtatttttatccataaagtcactccaagcaggtgcttcgttatcaggccctgcagacgcttctactactcccgtcgtgcactgcgcacaacttgggcggtgctaa

SEQ ID NO: 43025 - DNA, 323 bp, Mus musculus
  source 1..323: mol_type = other DNA
gatcagcttgtcaacggaagcgatcgatgcgtgttcacttgcatgtccgctgtgcctgcacacacacctgcccatgtgcacatatgtgattcatgtgtgtatacacacggcaccgcgtgttaagtatacagatttgtacgcttatatctacataggtgtgacacctgcttgctcatagacatgtatgcatatggacacgcacacacgctcatgtatacatacatgtgttcgggtatgtgtgttcacaaagggaccctcgcagggtgaccctgagggaccccccagcctctatccctaggggctgtaatctgatcccttgggac

SEQ ID NO: 43026 - DNA, 381 bp, Mus musculus
  source 1..381: mol_type = other DNA
tcttcaacaagacttagaataggatccctgaggatccctcatcagaagaggcccagagctgtgctggcaatagcactcatctgcactgcctgcaccagcctgctcagccgagggggttataggccttgggagttcaaagctagcttggtctacaaaccaagttctagaaaagccagagctttacaaggttctgggcagtcccctcagctatttatgtaaatgccatttatgtaaatggctgttgatcagtacagagtgctctacagtattatagccccttcctcaaaggctgtaaagaaggccactctactgggcgttgagggggggggactccccatcccagaggggctgacctcagcctgggctcctggtggtggcccc

SEQ ID NO: 43027 - DNA, 302 bp, Mus musculus
  source 1..302: mol_type = other DNA
cttcaatcgtccaatcaaagttggtgggggaacagattataggatcatggcaacgtttgttcctgcaggagaaagctctttttgtttttgtgcaacctacacagaagattgggctactagatcaactagtccagaaacagagcctcaggctctcagcatccaatcggagactgcccagaggcctaagcctgtgttagtgcgcctaaggctggactgagcctctccagacccgccccggcccagtcgcgggcttggttcgcccgggccccacccctggcccgccccgccgtcggtgcgcggcg

SEQ ID NO: 43028 - DNA, 335 bp, Mus musculus
  source 1..335: mol_type = other DNA
gagtcccgactcccagcctcaggcagggaagcatgagacccggcctctgaaggcatgcttcacatcggatcagagccagtggctgagaaaagagaggcacagctgttgtcccggcccctttagcctacctgcctctgagcaccggagctgtaggtgggaacagggcttgaaaagacacagtgcgatcctctagggttcactgtcctcacaaagatctctgctggatccttggccaggccccgctcctccccggaccagcccctcctccctcgggcagcctgggattggcgggccgggggcgggccaggggcggggccgggcacccttcatcccct

SEQ ID NO: 43029 - DNA, 450 bp, Mus musculus
  source 1..450: mol_type = other DNA
ggctggcacaggcaagcatgtatgcacacacaggcacacaggtgtgcatctaaatgcttaggtgtgaattcacagagcatgctggactgaagtacatgcccagcatgcgggcatcctagacttgtttaaacaggtatgtaagagcacatgtacttaactactagcaggtacacatacatgcaggtatacaggactgggtgtgtgcacttggctgtgtatagaggacatgtagacaccatgtacagggtcacataaccctgagtggtaggcaaatagtcacctattccctcagggctcccaggaggcacagtaccctctggccaagttcatgtaagcttacaagataaggagaggtgaccacagctgggactcccgggactaaaggccctcaattctgccaaataaatgtatatcatctggagacgcagttgaattggcccaccaggacct

SEQ ID NO: 43030 - DNA, 529 bp, Mus musculus
  source 1..529: mol_type = other DNA
atgggctgctcagagggacccttcctggggtcagggaggcgcacccacttgacctactctggaggtagccatctgtcggaaggtccagaagtgccaaccgtcccaagggctgcacctgctgagaggcctgggccatcccaggtccttcgccgctgggccgtggctggcagcgcaggtgagtgctagctggttgctcccctgcgctcaccagggagttgaatgcccgggtaaacaccaggcgcgatgtgcgccgtgtatccacggagacaaagccagggcggggcgggggcgccgcccgcgatgccagggcgggggtgcagggtgcagagcagtctcccctggcgcgggttgcccaccgcctgggaaccctgagccctgcccgcggacaggtggagcgggggcggggcggtggccgggagggtcccgccccggaggtggggccgggcgggcccggcggggcggggccgtgctatgcaaatgtcgcccacgggcggccaattgcctgcgctccgcgcgcggctccgagcgt

SEQ ID NO: 43031 - DNA, 421 bp, Mus musculus
  source 1..421: mol_type = other DNA
aagaaattaaaaccaataagacattttaaagtttttgcaattttaatgtatacaaagctctattaatatgaatttttttatataattcaaattcactccagaaatagatggcctttctgttctttccaacttggccagacatgcaattttgcctttagatgctacaaaaacaaagttcatagcatgatttgtaagaaccatattgcttatttgtaaaggggtcagactccttttaaacatctgagctggatatgttggcttcaaaaaaatgtaaaataaaatctggatatcctatttaagtctgttcttatagttttagacaactattagatcagagttttgacctttcaaagtacagttatatatatactttatgaactttcctaaccccctgaagaaacttgcattaagagtagtcctt

SEQ ID NO: 43032 - DNA, 373 bp, Mus musculus
  source 1..373: mol_type = other DNA
cttggtcagtctacattgtgaattccaggctaaccagtatttgaacacacatccatgtttcagaaatcctgtgaattgcagggatggaactcagggttttaggcttggcagtaagccttacctgatgaggctttgcttgtggcagggtcttacaacaaaatatccatggcttctgaaaacaagctagttcagtttccagtttaccgaattattagctctgtatgtttgtaaaacgactagggaagtaatccgtagtatgccttctctacgaactggattatacgttttacagtgtgtcaagaagctgaatggcagcacaggctgcctgggcgaccacacttcccggcagccctcgcgcagaccggcaccctcg

SEQ ID NO: 43033 - DNA, 291 bp, Mus musculus
  source 1..291: mol_type = other DNA
gaagaatggacctgtagaaacaagttttattatttttttttaatgggttctgaaccttcgagtctttgggtcctaatacttcaactcaagcagtagccagcagccctttgccgtaacggaataagaccggaaagatctaggcaggacctggcaggaggggcagcagctccaccagccgtcaaagccgctgcgcgcagggcacggcgggagaggaggccgcgggatttgcggccgtacttcatctcccggcgggcccagcgctgaaggcggtggcgcgacgcctttgtggaa

SEQ ID NO: 43034 - DNA, 327 bp, Mus musculus
  source 1..327: mol_type = other DNA
tatacagagagcaaactgaattccaggctgtttaaataacttgtagtactggcctaaatagcttctgtatgctaactctgaggaatcagtttcctgaagatttcacctcgccaatgtaccagtaaaacaaaggtactggtctcttgttaatcacaggtgactcttcagctctaactgaccatgactctgatggagtttttaaacttccttcaggcaggcaggtctctctgagttcaaggatagcctggacttacacaggcaaacaaagaaaaaaattattttaaattatgtgaatatatgggttttttttttagagacaacgtttct

SEQ ID NO: 43035 - DNA, 490 bp, Mus musculus
  source 1..490: mol_type = other DNA
gatccccaacttctccgacctccttagggagcctgtcaaactgcaaggaaaagtcagaggtttttgactttgtcctttatctcagaactaatgactaacatgaagcttgaaaagtaagcaaattgcttcagataaaatataagtaatactagccattccctaattttgcttccagaaataagggctgctgggaaaacttgttttcctgtttttattacttctaggaaattataagccttagaaatcacccaggagctttttcaaaaggatgtttttttaaaagctccccgggtcagtttatgtgaattgtttattgccttaaaataatatactgtgaccagacttaaggtctttttaagcaacaatttttgagtcttttcaacacaacccgggtcctaggtcagaccccgcctctggcatcgccaggctcgggagcccggaaccgctcccgcagctttaaggctgcggagctggggctggccaagaggct

SEQ ID NO: 43036 - DNA, 209 bp, Mus musculus
  source 1..209: mol_type = other DNA
gcagctgtccattaccctgaggtattgaagaatgggcttcacccatcctaccacacctctcctgtaccagggcaccggaggagaggcattttctgaggccaacctcctctaagtattaccacccagggcgggtcagactccatagcagggccttcgacagggctccgcccgtagccccgcccccagccctgccgcacccactggggccc

SEQ ID NO: 43037 - DNA, 326 bp, Mus musculus
  source 1..326: mol_type = other DNA
atatcaattgctatatatacagtactgttctgaacatacacactgtgtgttcagttgtaatttgtaattgccacttagttaacattctggccaggatgaaactgacacaatgtgaactggccctgggcttcagggacatgtggctctggggaagcagagactgccaaggagctgctgtccctggagcgggagcgggaggggagccggaggctgagtctgggtccctcaccctcttctgtctctgacttaagtagtaagaggctttgctctagcaaagggcccagtgtcatctctgagacactgccctcactgaggggctggtactg

SEQ ID NO: 43038 - DNA, 401 bp, Mus musculus
  source 1..401: mol_type = other DNA
tggaaaacctaaatgtggcctttatttattgtctcaggtcctcaggacttgatgggcagtgggatggaccttcagtcctcttgaagaacttcattggaaattccttcctagtaacctagcccaggtcacctgggtcatgttgcttaggaaattagtttgggaaattcctaagtagatccaaccctttggatcagggttggggaactgggcagggccctggtctcctgcaaactacttctagccaggagactcctgtctcactcctaactccttacttcgggattaggaagggccccttccaacctgcatgcgccctccctcgagtgggattccagtctccgggtctgccagggtgggggcgggccgggcgaggaggccccgcccccagcccgcccccggcc

SEQ ID NO: 43039 - DNA, 310 bp, Mus musculus
  source 1..310: mol_type = other DNA
actattgaccttgcggatttcattctgttggagcagacctactttataaagttatgtatgcttcttctgagggagtaatactgctattatttcctggtctttgaagcatctgtacctccaaaatcactaatctcaaaggttattaggtcatatccacctttccaagatgagaaggtttagaaagtgtggcattccagtctatttgactgccctgaagtgcagcaagaagttcgcaccggctctagcttgagacaatcaggattccgcacggctggcgggctgcttatcgccctcccggaacactttcctt

SEQ ID NO: 43040 - DNA, 360 bp, Mus musculus
  source 1..360: mol_type = other DNA
tagaatgacagtcctagaacatgatcttctggccacaaatggctgttgtgctcttgaactcacagtagttgtgacctgcacaagatctgtacaaaagactcatgaggcctcgcccctccaggagatatgatcaaaatgtacacgtataaaagtgccataacgaagcacattattatgtgtaattaatatatggtgatggaacaacaccctgtgttattttcacaacttattgtgagtctacagttatttcaaaacaaaagtttaaaatatatatgtgacacatgtcttcattttgactcagagagtcacttcttgtaacactgggacttatccaagcgatacactgatatctgtagtttc

SEQ ID NO: 43041 - DNA, 430 bp, Mus musculus
  source 1..430: mol_type = other DNA
atctgatatcagccatatctttttaaggatagattcaacctgtcttcagttcgagtgtagtgaggatgcagatagccccgcgatcccctccagcctatctcggctcagatcaggccggagggaaggtggaggggattttgccttggccattcgggatggtcaaggccagcctggacagacctgagttcgaggccagcctggtctacagagtaagttccaggccagccagggctacaatcgggccccagtacaagaaaccgctatttcaccaggggactggtctcccgtgctactacagccgggctccaccagcagagtgggggctggagggcggggctgaaaggggcaggacaacttcatcctgccccgcctccattggctagggcgccggggaggggcggggcgcggctgccagatgttggggcggcag

SEQ ID NO: 43042 - DNA, 391 bp, Mus musculus
  source 1..391: mol_type = other DNA
gacacatgacatgatttccttagctgcagagggatgctgacagtgaaggttttgcctgcaccctccagccaagtaaggctcctttaccagtctgccccagggttgctggccatcctagctcatataggaagggagcccgcaggtcagaggatctggttcctgggagcgaggtggttcgggtcaggcctagtttattctactcgattggacatgtgactccttcctgaaagtttggattgagagccctctcagctgacggggtagtgaggaccaccgcacccctgtcgcgttcagggcgccagagggcctttgaaaggccccggccctgggccagtgcggtgttcgatctcacggttagcgtgcgcgcggtaaaccagtggcccccacgctg

SEQ ID NO: 43043 - DNA, 335 bp, Mus musculus
  source 1..335: mol_type = other DNA
ctggggaccacttggtagttaaggagatggcctgaggtacccagacctgccctagggggtcttagtaagtaaacatggccctacaagagaaacatccgatagccttgttctgaacgttcagtcatttggggttgaccaccatcgaccaccaagatggaagctggattcacctggccaagggagacacagtgcccacgagtgaggtctctgacaagagtctggaccaatgatgggccaggggatttcacctcaaccagccgccggccagcgtgggggccactggtttaccgcgcgcacgctaaccgtgagatcgaacaccgcactggcccagggcc

SEQ ID NO: 43044 - DNA, 240 bp, Mus musculus
  source 1..240: mol_type = other DNA
ttgaggttgaggtaaatgacctccacggcctaggacccccgagtgtgagcctcaggtgactaaggtgtcaggataagttaataataccttcttctcctagactgcaaggggccatcctggtgtacaatgacactgtgttggggcctccatggccagagcagccctgcacctatgagtgtgaggtatcccactccatagggaatttgaaagctgggttgccaatggcagtggttctggaag

SEQ ID NO: 43045 - DNA, 497 bp, Mus musculus
  source 1..497: mol_type = other DNA
gccctaacataggagtgcaccaggtctgggcatccctggtatgtggacatgaatcaggcttgcacatctgtgtgccagatggaggaacaggatcttcctcaatgtgactatgtgcgtgtgggcacatagttggcatttccccgaggcacagttccactgttaaccagcacagaggctgccttgtccatagaatgggggtgggtaagtgtccccatcctgggagggctgatgcctgctacatcatcagccctcagctataggtaccaaaacttttgacctgggaagaatccgtgttagcagggaccctctgagtcaatagggttccacatgccggcgagcagtgaacaagctgctttatcggagactccagcgacgcagctccagcttcctcagggcgatggacgtctgtccccatacagggcccccatttcctgtgctggccccagcctgggcggggagggggctgagactctgggcccagatcccaccttccgccc

SEQ ID NO: 43046 - DNA, 301 bp, Mus musculus
  source 1..301: mol_type = other DNA
ttgttcatcttcattttatagacagagcaactaaagagaagctaaagctcaaagttctcagagttagggcgttctcatagtttgccttggagatagatcatgatagccaagggcaaaaagacactgtgtcacaggaactcggctgtgcctcggcctaagactgtgtgaccttggctcagccagttaactagggacggtacctatgacattctgctagcaaacctgagaatggcgcgcatgcgtcaaggcattctgcacgagaggcaagaactccttcaggcgtcccaagaagaggctattg

SEQ ID NO: 43047 - DNA, 270 bp, Mus musculus
  source 1..270: mol_type = other DNA
actcatggaactctatgtgattacgtttacaaagtgaaaaactgaaattttcagttacacgggtcacatgtcaagagtctagtgaccacagtggctgccaagtgaggtatcagctgagtcccagctgtagggcagtcagccctgcccattggatctggtgtcacaggtagcaaatctgctgtcagaagtggtctttcaggctgcatatgcgcgtgcgcggctggagcagcgctcgagcgggcacgcggtttggccctggacgggtgccgt

SEQ ID NO: 43048 - DNA, 386 bp, Mus musculus
  source 1..386: mol_type = other DNA
cacactcaccagggaggcggcggccgcctgggcagatgcagcggtcaggtgagccagcatctgttccacctgggccagctgtcgtctgagaactcagtgcctcttgaatactcccaggcagggaatttgctattgaggatgccaggtgctaggggctctggctgccccaataaaaaggtgcttgctaccaagtcgtcgtccgacgtctgctgagggctgaaggcattctcccctaagtccttttgctcttcaagagggaagtcaggcttccagccaagcagactgggacactggggccctctggtggccacactgggctgctccgccccttaacagcaggagccaatgggaacttaggtccccgcccctgagcggtcatttcctag

SEQ ID NO: 43049 - DNA, 207 bp, Mus musculus
  source 1..207: mol_type = other DNA
atgcagcctgaaagaccacttctgacagcagatttgctacctgtgacaccagatccaatgggcagggctgactgccctacagctgggactcagctgatacctcacttggcagccactgtggtcactagactcttgacatgtgacccgtgtaactgaaaatttcagtttttcactttgtaaacgtaatcacatagagttccatgagtt

SEQ ID NO: 43050 - DNA, 218 bp, Mus musculus
  source 1..218: mol_type = other DNA
tgaccctccacatcggcccttggagtaggttgagaccccggcgccccagggccccgggaattcccactccattagtgttcccttcgaacgctcaggccttcgtaggccccgccttcttactatccaggccccgccccctgccgactggccggagcttatacagggccctgcgggtcccaggtcgccactgagtgtagcggaaactggggaccgcctta

SEQ ID NO: 43051 - DNA, 398 bp, Mus musculus
  source 1..398: mol_type = other DNA
tgcaaactgctttgaactttacagctatagtgctcattttaaaaactacattttaacgaggaaaaaggaggaaatttcctttgcttctgtggaggaaatgtaagacttcctggatgcatacgtggctccactggcgcttaggcgcgcagaggagtgcttggcccaagccggcctggtcgtatacgtcataaagcgggctgagctgggtcgggacgggcggggcggggcagatggcagctgccgcgtggcggactgggttccgataggaagctaagcgagtctccgggtccccatggcagcccagggcgttggaaagctacgtccgccgcagcgtaaagtctgacgctcggctgcgggcggccctgccacgtagattggctctccctgttacgtcactg

SEQ ID NO: 43052 - DNA, 362 bp, Mus musculus
  source 1..362: mol_type = other DNA
cggacagcgctatgccctttctctcagagcgggatggcctcgaactcagagatctttactttacagaagacaacgtggaagtcggttctttcctttcaccatgtgggctcctaactcacagcatcaaacttggagttagtcgcttctaaggtctagtgaacctccaaagtggtccagcagattgcagccagccacccgaggccgccggccttcattcaacacccgccggccgcgttggctgcggagggcgcatgcgcgggttccggagggaccccgaggctggtgcgtggacacgagtcttcgcgggctggcgtgagcgcgcgcggggaggggggggggcgtgtgcagggcaggagcgcgcg

SEQ ID NO: 43053 - DNA, 522 bp, Mus musculus
  source 1..522: mol_type = other DNA
tttcttcctgaaaattttttctcctagactcttctgaagagaactgcccgtcctttaggcaggaatcccaggctgagtagccgccgggtctgtattcagaatgagtttactgataacagcttgtgtctgaaactccagcctggccctaggccaaagaggaatgcaggtttagtaacttgttaaatctccagtctctggaggagcccaggagagttaagaactactttaggaccctccataaatgggggaggccagattctagcagtaaccagtttctccatccatattaaggagagggtaacaaggcctctcttcctttgcaaggccggaccggttcgccggcctgtccatacctcgggagaagttgggaaaggtgcccctcccccaccccagctagcaagcgctcccagctacccggactggctaaggcgtgtcccgggacccacttggtcgacttcgggggcggggccggccaatgggcgtgcgggacggggcggggcctgtgcgcgggtgcggcgcgct

SEQ ID NO: 43054 - DNA, 246 bp, Mus musculus
  source 1..246: mol_type = other DNA
tctgtagtgagatcttgtctcaaaaaatacaatcaatttattgcaatgcctggcattttatttcttaactaaattttacaattttggtggtgtaaatcagattggttttaaactctcagtgattctgatctggtttgtagttttaaaaataccataagactggcttcgaactcggagacctgcctgcctttgcctcccaagtgcgatcttactatatctggatcctttggataaagaacggctcga

SEQ ID NO: 43055 - DNA, 376 bp, Mus musculus
  source 1..376: mol_type = other DNA
catgctcagggtgctgagagagccctgggggagtgcaagccaacgtctcactgacactcattgaggctgaggcggcagtattattaagccgtgctgcaaggtgtctcagatctgaggtcctgtcttcttaccatagtccagtgttcagggaacaatggtcctcagtacacttgggcaaagaggatcgggccagccagggtacagtgctggcctggagggcttcacttcaggcttttcaaacatttggagaactttgaccttctgaggctgggagttctaaccccctgaggccttcgggagtcagcctcaattttggactagaaagacctgtccaggctgggtttggactacatctcccagcgtgcctggcagagta

SEQ ID NO: 43056 - DNA, 646 bp, Mus musculus
  source 1..646: mol_type = other DNA
acccggtatagaacgggattaataatccacggagttgtaaacgcgcttcgcagtggcaggctaccccagcgcggtcgcggaccggccgggagcccccgcccagcccggcgcaaccctgagaggaagcgacgaggagggcgggcggctagggctccaccaggcccggccgggcgggggaagggggactggaggcggcggggcgcgcttccggggactgcgcgggcggggccgccgcctcgggcgcggggccccaggtcaggggccggggcgaggggctgcgggccgagagcagcaggtggggcgcgaccgcgggcaggcgacgggccggaggccggaaaagtgcttgccgatcagccgaccagccgggcccggagccgaggcggctggagggatcacctcaaggcgaggactccgagtccggcctcttcgcgctgaggacgcttgtccgcgagtccgcgagctccgagccaaggacgggcagctccgtgggagacggcgcgacggaggaccgcgggcggcgggcggggagcgcgagcgaacgagggcgggcggtggcgggagggcggggagcgacgtgcgcggccccgagcgccctgcgggctcgagctggcgccagtcgcggccccgcgcacgcgcgcacactctg

SEQ ID NO: 43057 - DNA, 740 bp, Mus musculus
  source 1..740: mol_type = other DNA
cgcgcttcgcagtggcaggctaccccagcgcggtcgcggaccggccgggagcccccgcccagcccggcgcaaccctgagaggaagcgacgaggagggcgggcggctagggctccaccaggcccggccgggcgggggaagggggactggaggcggcggggcgcgcttccggggactgcgcgggcggggccgccgcctcgggcgcggggccccaggtcaggggccggggcgaggggctgcgggccgagagcagcaggtggggcgcgaccgcgggcaggcgacgggccggaggccggaaaagtgcttgccgatcagccgaccagccgggcccggagccgaggcggctggagggatcacctcaaggcgaggactccgagtccggcctcttcgcgctgaggacgcttgtccgcgagtccgcgagctccgagccaaggacgggcagctccgtgggagacggcgcgacggaggaccgcgggcggcgggcggggagcgcgagcgaacgagggcgggcggtggcgggagggcggggagcgacgtgcgcggccccgagcgccctgcgggctcgagctggcgccagtcgcggccccgcgcacgcgcgcacactctgcctcaccgcatcctttaagcaagcagggtggggctgggtgcgcctgcgcggttttaaaaacccctccccatcgcgcaagcgaagtagatcttccttgccttgtattacgcgtgcgcactgacaggcctaaccccg

SEQ ID NO: 43058 - DNA, 394 bp, Mus musculus
  source 1..394: mol_type = other DNA
gcctcctggaggaccagtggtagtctatgtggtcacctggacggtgatacaacccggtcactgtgttcccgtagaacccccaggccagctggatgcccgagtcactctcgctgcccagggtgcccagcgctccgagcaccgtggcgggcaaagcttgcagtgcccggcacggggttaggcctgtcagtgcgcacgcgtaatacaaggcaaggaagatctacttcgcttgcgcgatggggaggggtttttaaaaccgcgcaggcgcacccagccccaccctgcttgcttaaaggatgcggtgaggcagagtgtgcgcgcgtgcgcggggccgcgactggcgccagctcgagcccgcagggcgctcggggccgcgcacgtcgctccccgccctccc

SEQ ID NO: 43059 - DNA, 701 bp, Mus musculus
  source 1..701: mol_type = other DNA
tcgctgcccagggtgcccagcgctccgagcaccgtggcgggcaaagcttgcagtgcccggcacggggttaggcctgtcagtgcgcacgcgtaatacaaggcaaggaagatctacttcgcttgcgcgatggggaggggtttttaaaaccgcgcaggcgcacccagccccaccctgcttgcttaaaggatgcggtgaggcagagtgtgcgcgcgtgcgcggggccgcgactggcgccagctcgagcccgcagggcgctcggggccgcgcacgtcgctccccgccctcccgccaccgcccgccctcgttcgctcgcgctccccgcccgccgcccgcggtcctccgtcgcgccgtctcccacggagctgcccgtccttggctcggagctcgcggactcgcggacaagcgtcctcagcgcgaagaggccggactcggagtcctcgccttgaggtgatccctccagccgcctcggctccgggcccggctggtcggctgatcggcaagcacttttccggcctccggcccgtcgcctgcccgcggtcgcgccccacctgctgctctcggcccgcagcccctcgccccggcccctgacctggggccccgcgcccgaggcggcggccccgcccgcgcagtccccggaagcgcgccccgccgcctccagtcccccttcccccgcccggccgggcctggtggagccctagccg

SEQ ID NO: 43060 - DNA, 539 bp, Mus musculus
  source 1..539: mol_type = other DNA
aatcattgtttcaggaaaaaattaagaagttgtttaagacaactttgttccagcactctggagaaaagggcaaatgggcctattcgagactagcctagaacaaacaacaaatttcactattgtgtgcctgtttggcacaacaaaggacaactttaaagagtcagttttctttttcgggatcaaacccagacaactattaatggctggaccacaccggacagtccagatctcaatgcgtccgtgtgcacttggctacaggggctgccgaggcagtaaattcaatctcgcatttaggcagtcttgctgaaagcaagcaagcggcaggctcctcctgcacggatttagcatcaggctaacctcgggccagcagtcagatcgcaggagccgctcagacacgggtggatgtggccgccgcctctgggcgctgtccgcttcggctccggagggggcggggggcggtgccgggcgcgcgcacgtgcgtggttacgtgcgtgcgtgggcgcggcccatagcacgccgtgcgctaggcggatgtccgg

SEQ ID NO: 43061 - DNA, 349 bp, Mus musculus
  source 1..349: mol_type = other DNA
ctggactaagaccaacacagggagtcctgcactgctgtccacccttacaaaaacaaccaaaagaaattgcctttgatagcgctgttagtgctgtggtacaagcctttagtaccatctcttgagttctaggcctgcctgggctactaacaagccagtccttcgatttaattaaacaataagtgtaattaaacttatgtttttaaaaccctataaccttatgactagaaagttacaaagcaagcagcttccttggcacctccaggcgctttgccggccgcaccctcttccctgttcctcgatggggggagggtagagagctggctgccagccggaaacagttaaaaggagg

SEQ ID NO: 43062 - DNA, 262 bp, Mus musculus
  source 1..262: mol_type = other DNA
aagactgctcaatctcaaaccagatgaggacattacctccttttatgagaagaggcctgctttctgttttttcttttaaacgcacctgcagggctggattctggtgcccacactgctcaccccagtagtctggaatttagctctcccttaaaagaagtctattcataaaacttcagaagaacacaatgggtatttttcagatctccaaacattctagttaataaggtttaagaaaatactttttcggtaataacctagtagg

SEQ ID NO: 43063 - DNA, 458 bp, Mus musculus
  source 1..458: mol_type = other DNA
taggaagtgtatgcagctactatgaatccttttctccatgtgtgtggccagacacactgggacagacttcctgctggaggcaccagcagagtcgaacactgactgttttccatatggcagctcacaactgtcgggagttcagcacacatcactcagacacaaaacaaagtcttatttttttctctgtcttttaaccagcttcttttggtaaaaagaaagaggtgaatggatcatgtctgtatacaacccaaacttgctcaggcctggaccatgaccaagttctgctgcatcagcttgagggtgatttttctcctaaaagcaaaccacatccatagaatgctttctaaatttatgtccctagcaatgtcattacagagtttttaagatacagtgttttctgctgtggagctctgcacattctctcatactgctgccccaacagcagcattgtgcagtca

SEQ ID NO: 43064 - DNA, 433 bp, Mus musculus
  source 1..433: mol_type = other DNA
tggcaaaaccctgcttttgctgtcagctgctgggaagcagccccgtattattcctatacgatttctctgatgttaaaagaaatcaaaatttcagaattctcagcagagagactcctggcatcataacctacttttctataaagaaggtctagatagtaggacagctcggctgggctccccaaccagaggcccaggctacagccctagtggcctctagggggcgccgctgggaagcttgtggtttggcacctccaagctcagttgtgatgggcggactccgacaggttccactggctagcccctggctgattgtacccagagtggccaccataccggtgttgcctactcctgccgtggcatgtgcagagttggggaggggggagcgaggggcggacccggtccagccccgccccacgccggagcggtgcgggag

SEQ ID NO: 43065 - DNA, 270 bp, Mus musculus
  source 1..270: mol_type = other DNA
aagctttccaactggaagcttcggctgatcaggagccaaaccttgaatctaatttcttttggcaaaaccctgcttttgctgtcagctgctgggaagcagccccgtattattcctatacgatttctctgatgttaaaagaaatcaaaatttcagaattctcagcagagagactcctggcatcataacctacttttctataaagaaggtctagatagtaggacagctcggctgggctccccaaccagaggcccaggctacagccctagtggc

SEQ ID NO: 43066 - DNA, 512 bp, Mus musculus
  source 1..512: mol_type = other DNA
taggaaaaagctgtgaagccaggcatggcagcacatgccacctttgatcccaggaatccagggctatgtagggatacactgtctccaaaaaggaactgttcatctgaggtctcagattcctagagtttcttgtgttgtctacaggacataggtaggactgagtttgcaatctctttgccaacagagccaacggattcagatcttggcactccactgtgtatacatacctgagcaagtatattcaggcccacattgatgtacagactggccatctacagccccaggctgctgtgtattacttgtgcctacatgtatataccaggaggattctttcaggaagtacttggtgaaacaaggggactttcctgagataatccctgtcaggcacactctcttctgatcaggtgccagatcctatattacattttagaaaaggacttgtcacctccgaggccactcaacctgctccgcccccagacttggggggggaggggagagttcccggaagcacg

SEQ ID NO: 43067 - DNA, 254 bp, Mus musculus
  source 1..254: mol_type = other DNA
ccaccctcttcccgcctgaagtcccaggggtctgggtggggcgcgcgcctagtgggtgcgcgcattccaaccctccgctcccgggctgccaggcgactggaaagtccgtggtccagagtctgtcacccagaacccaggtcctttgcaggtacaatagaattgtggtttccatagtgacaccaggacaaaggccataggttagcagctaagctcttctttgcctgctaaataaacttcagcttaaaaagaaagtg

SEQ ID NO: 43068 - DNA, 239 bp, Mus musculus
  source 1..239: mol_type = other DNA
atttggccacaaagttgccgaaagcgccgcagccctgacccagacgctgttgccgactctgggccactctggctggcggccagtgctacagggcccaggagggggccgccgcttcccttatcactggacatgcaagtattggggtctattgccagtgtcccttcctcgaaaggaaccaaccaatgtagatgctgcgttcacagacacggactgtgtgtccgtgtaccccgagaacaggg

SEQ ID NO: 43069 - DNA, 353 bp, Mus musculus
  source 1..353: mol_type = other DNA
agtccaggctggcctcgaactcaggcctctgcctcctgagtgctgggattaaaggagtgagaccgccctgccggagtgctcttctatttcatatatgtgaacaatgcatctttttgttttcttatttttcgagacatagtctcactatgtgagtttgcataagattttaaagaaatcatagaccttcctatgaagtccgtacgcacttaaaaagtaccagaccaggaaattcagggaattcatttatgttgccatgacaaccccaaaggaagctaactgcctggaaaagccagtccgctcgctctctgactcataaatggctggccccgcccctttcaccgaggaaggccaca

SEQ ID NO: 43070 - DNA, 184 bp, Mus musculus
  source 1..184: mol_type = other DNA
gaattccactgattctggctgcacaacctgttgcaggccgctcaggataagctgcagcggctacaactatttcttgaccctctggtgtgctccaggccatcaacttgcaggtccagatcagggctatacacgccatcagctgtaggctaccagcagaggccgagcaccggcccactcttgccgg

SEQ ID NO: 43071 - DNA, 232 bp, Mus musculus
  source 1..232: mol_type = other DNA
gaattccactgattctggctgcacaacctgttgcaggccgctcaggataagctgcagcggctacaactatttcttgaccctctggtgtgctccaggccatcaacttgcaggtccagatcagggctatacacgccatcagctgtaggctaccagcagaggccgagcaccggcccactcttgccggaagtgaggagccgggacgggggaggggcgcgccggaaccggaaccgac

SEQ ID NO: 43072 - DNA, 422 bp, Mus musculus
  source 1..422: mol_type = other DNA
ttgtgtctttgtggctagagatcaagagacacatgaccccgtttggggaccccagcaaactctaaggtttgccccagactgagggccccctgggttgctggctacccaaggcctgctttaaggtggacctgactggcgcccaggggtttgaaagggggccaccttaaccacgaggccgagctaggcccggccccgcctcgcgtggaactgtgcaactagaggaggcgctagaggggcaaaatacccctggatgctgaaccccgggcctaagccccgccccgcatggaggggtgcccatgggcgtggcgctccttcccacaacgaggggtacgctcggctgcagcgttccctttaagcctggcaggcagctctcgcgggatccgacgctccggttctcgcgagaagggccttcggctcccatt

SEQ ID NO: 43073 - DNA, 467 bp, Mus musculus
  source 1..467: mol_type = other DNA
tatatatattttttttttctccaaaacagcatttgtgtgtcagattgaagctagctggccaggcatggtgatttatgcctttaatcccatcacagggaagacagagacagatggatctccagcttgctctacatagtgagaacctatctaaaaaaggatttttttctgtttctgtatgtctacctgtctacacaggtgcccacagaaagcagattcccctggaactggagttaagttggttccagcacccgacactagtgtgagaaattgatcacaagtcctatgcttatgtgcacaatatatgtcattggatcattctgtttgaaagaaagcacccaagtataattagtatactatacttacatattgttccacagaaatgttaaaaatgtcagtgaattaatagccagaagactatttagttttctttcttcccaagaagtgtactaacaccaggctggcctcac

SEQ ID NO: 43074 - DNA, 551 bp, Mus musculus
  source 1..551: mol_type = other DNA
aaaggagaggcctccacattttttttaaaatgtaaaagacgatattgccctctttgcatcttcataaaatgggcagacccctggttcatagggatctgggttttctgagaacctggatacagacccttcccttcctcagggaagatggagctgctgatgcatcagcctgtttttttttttttgtaatgctcagacataaacttaacatcttgatggaagaagaataagggaacttcaattatgatttttatttctattacacccttctttatgacaagtgacataaaagttaaagtaaaaactttaccatgcgcttttttttttttttggcctaacattgaggccttaaaaatgaggctctgtaacatacacttgtgtatcatataaagataccactttctgtattcttattctagttgtttattaagaatgacaagcacgtcttttcaacaacaggcctttggccttgggcctgtgagcgtggttaagtgccagctccgcctctatacggggcgtggccctcagtacgcacgccctacgcctggcgtcgc

SEQ ID NO: 43075 - DNA, 430 bp, Mus musculus
  source 1..430: mol_type = other DNA
atgccgcgggacgccaaggactcatgcgcgagactctcggtacgcgcgcgcagagcgcgcaagggcggggtggtgctccaggcgcggtccggtttggcccagtcagtcccactcgtgtccccagcgggaagccaatccatgctcggccacgcctctcatggagcgctgcgccgtcgccaacggtcgcgctggtgacggttggggacccggagcccgattctccaaagcctgggattaagggcctggaggctggcaccacaccctggccaggtgttcataacaggaccaggtgcgcagctgccccgccctggtccctgggagcccacaggtgctgacacacccgcatggggagacagaggctctgcattggcctactgcgccgttcaaggtgcgcggtgccctccgggacgcaaggggcgctgtggactct

SEQ ID NO: 43076 - DNA, 392 bp, Mus musculus
  source 1..392: mol_type = other DNA
aacagctgctggaggagggctcttgctcccaggtcactcgcccttcccttcccagtgggctgagtaggaaggagccccgggacgaggtcctgatccggattagatcagaagggctggattagccctgtgagtcccaagcaggagccacttcggaatccgtctgggactccccacagctcatgaagtgccaggggccaaacatgccgcgggacgccaaggactcatgcgcgagactctcggtacgcgcgcgcagagcgcgcaagggcggggtggtgctccaggcgcggtccggtttggcccagtcagtcccactcgtgtccccagcgggaagccaatccatgctcggccacgcctctcatggagcgctgcgccgtcgccaacggtcgcgctgg

SEQ ID NO: 43077 - DNA, 332 bp, Mus musculus
  source 1..332: mol_type = other DNA
gaaaaggctggtaatcctggaatcatgatgactaattcctcgggtaataatcagaactcaaattttgctttgttagttcaaggactttctggtctacaaagagttccaggacagccatggctacacagtgaaaccctgtcttgaaaaacaaagtgtcattaatggtacagcctgaaactttggtggcaaagtgtcttgcctggtaacaaagatccgttatcaaagtaataattcggggtgacgatttttttaaaaaggaggaaaaatggaccctcaaatttggagggccggatccccgcccccgccaggcggacctcccggaagctctacgg

SEQ ID NO: 43078 - DNA, 506 bp, Mus musculus
  source 1..506: mol_type = other DNA
cctgctgtctggggcagggaaacttctctccacaacccaggctgggaagagctatagccaagctcagaagcaaggaagcttggttaatttttgtgtgcacagctcaggctgagccaatctagggtttccttcttaccccaggctgggtgggtgaagtggacgactactcgttgcatgggggctgcctggtcacccgcggcaccaagtggatctgtggaccctagccgggcacggcaagccttgttccagcaggagatggctcgtctgacctgcaggtcctctactgcagaccagccaggggccggcgagctaagcgcccgcttgggggaggggaggcccaccgcccctcccggctagtctctgtgtgtgggggggtgactctgatccggccaatcaggagcggagggtcgtcattggacgtccgcagcccagcgccagggctttgctacctgtagctaagggcttcggagctctgcagcgcggctctccagacggctggttctcgc

SEQ ID NO: 43079 - DNA, 367 bp, Mus musculus
  source 1..367: mol_type = other DNA
ttgtttgtgtgtattgtttaaaaacaatttaataataagccgcccagaggccagcctggtctacaaagtgagttcagccaggagagaggctctttagctaagatccatcttggagaatagagacttaaaaacgtctgtaaacataaaatgttttagttaaataaatcgcttctcccaagagtgagaaaatgcccactacactttctggggccgggcccgggaacactgtggatggccttctgcactggagtatatacagctccatatgcggctccgtgtaggcacagcatcccggagcaccgtctcctagtgaccgccgggcgcgctgactctgccgtccgggtcccagcgactgcgcaacgcgagc

SEQ ID NO: 43080 - DNA, 274 bp, Mus musculus
  source 1..274: mol_type = other DNA
ttaaaatccgatctgagattgttaggcctgtggtttctcagatttgacaacacagacatctcagagttttcaaatcttctcttgtttaacaaattagttacaaattatttgtctcccccatttttaccataggacatatgccatttttaacttagtcaaggcttatcaaagacagggactatgcgacctctggggagtgcaccttcctggaggagtaagtccctgacaggcggaagccaggctagtacgactgggccctctttccgacctgccc

SEQ ID NO: 43081 - DNA, 279 bp, Mus musculus
  source 1..279: mol_type = other DNA
gttatcttaacatctcgatggagttgctacttgagcgacacaacaaggcttggtgaccagaacttggtgactgcagcgaaacacttacgatgccttggctatatagtgagttgcttctaaatataaccacaccaaagagaaactaaacttctacgtagaaattccgagtaaccatagttgcccggaaactcagagtagaaaaactgctcccggaaaattgtcgactacgcagtcgtcagaagcctgggagcctccagggcgaccgcaggtcgaccccta

SEQ ID NO: 43082 - DNA, 300 bp, Mus musculus
  source 1..300: mol_type = other DNA
ttactgcactcactgcagagtgtaggtgcttaataaatacttcagttttaaaaacctatgagctagatgcagggtttggcatcctcatgcaggagaccttctgaatgacacaggctcacctgtctaaacattttttaaaaattattatagtgtgttgagtgtgtgtttgtgagtgagagagagacagagacaaagagcaacggcttgacctgttgagcctgctaggttgaccagctttgcagtttatcctgtgcggggcaggtcttccaggccgcccagtccgcttgcgcggcttcgggt

SEQ ID NO: 43083 - DNA, 466 bp, Mus musculus
  source 1..466: mol_type = other DNA
cagggagagggagaacagtattctcgctggctctttggcacttcttttgttcaagtttggtgacaggaggaaacaagttgaggaacagcaggtgcctctctagttcacctccaaaggcaaaagacaacacggtctgtggtctgctcaacttcacaggaacaagccccgaggtctgtccagctcctcagggtatttctctgcttgaggctcacaagtgactatctcactgacgacgtcattaactccttaggacctcaggactttcctccagaaatgtcctagagtaagccctctggccctccactagagcaggggtcaaggtgagcagtgactcctttaagaggctcgcagcatgctccgagacgcactaaccagcccgcctcgcagccgggccaggctgctccgagagcgggaggctcagcggcgcacgcgcactctgggccagctcctggccggggacgcgcac

SEQ ID NO: 43084 - DNA, 360 bp, Mus musculus
  source 1..360: mol_type = other DNA
gaagcccaggctcctcctggatgctgggatcatgcttcagaactcaaaacatgctttttaaacctcattgtatacacgcagtttgattcgttatgagtaaatatgaccttaggtcatagacttaaatccttttgtaacaacaaaaataagatgcattctggacagtacaacctggacccctcctaggaccctaagtcagctgactggagtctgaggcctgaagactcccaccccgccccgccaaacctctctcggccgcgagggggcgcggcgctccaatactggagccgactcgctcctggggcggggttccggcggtcgcgcatgcgcacgcgcggcgtgtcacggggcggggcgggg

SEQ ID NO: 43085 - DNA, 424 bp, Mus musculus
  source 1..424: mol_type = other DNA
ttaataagtatggtccctgacctatgtgattctgacagctgctcacgagtcagcttttgtattgctttctcaggaagtctgtagaaacagagaaaaataacagggccccatcttttaaagagaggctttagtaagctcaaactgtgtcagagaatgtatgcattcttatagtcagaaaacactgtgtatctttttaaatggagttagccagcttcaatcagttgaacagacgttaatcattaaagcggcactctgagagagtcaatcatattaaacaatacaacaactggttttccctgttttaaaatccactttataaaaatataattagcagagtaatttaggaaccatttatctttaagcatgacaaccttaattataaaattgtaaggttttatctgttaggggccccctggagcccagt

SEQ ID NO: 43086 - DNA, 516 bp, Mus musculus
  source 1..516: mol_type = other DNA
gtctcctctgcataaagtggggaccttctacaaattggccaagcgtagcgctgggccttcgttccagggaaggaaagggttaaaattttattctccgggctcgccccgcccagagagttggagcttgcggccggccaagttctgggcctggcgccaccttctagccggtagtggcctcctggtaccctctgagggccatgggacttcccgatgggtccggtgagttgcagggcgctgcccaaattccgcgtgcccgcgaagcgctagtagcccggcctgggtcaattcaggaagggaacctccaagtccccgacaggcatttcccgtctatgggggcgggctctggcgcgaccccagctcccctggagtcagctagacaggctctagccaggcggtggaccagccgcggcctgagtcggcagggctgccggcccttgtgccctcccaaagggaggtgccaagcatcaaggctccgccctccaaggcgcgtgccgcctggtaaggggagggagccct

SEQ ID NO: 43087 - DNA, 350 bp, Mus musculus
  source 1..350: mol_type = other DNA
atttcatgggagatttggaccaggttcccatttccgaagttggagcgcaggagctgcgccaagagaagccacgctgacatcaggccagagcttccagacctggaaaggatcctgagtgctccatttccagtctaggcaagaagccaccctgtagacaagtctggtctgagggtgatactcacagcttggtggtcgaggctggggcccctggttgcacacctaggcatccagagtctcctctgcataaagtggggaccttctacaaattggccaagcgtagcgctgggccttcgttccagggaaggaaagggttaaaattttattctccgggctcgccccgcccagagagt

SEQ ID NO: 43088 - DNA, 254 bp, Mus musculus
  source 1..254: mol_type = other DNA
ccagaatcatgaacttcactattcatcaggtacgctccaggcgcggtgctaggtaccgggcaagttcaaaacgcagaggtttgagaataaagatgggaagccacacttggaagtgcttgcagagtggagctgagcttcggaagcttaaaggcagcagggtgaggagggttggagtccatctccccacttcccaaggccatgggcccagctggaacctgctgctgcctcagagctgggcctgctcgccaaggtac

SEQ ID NO: 43089 - DNA, 554 bp, Mus musculus
  source 1..554: mol_type = other DNA
tcatgaatatatttcttaatgattaatttttaatattttatgctcttttactatgcttaactcccaaagaatattttgcatgttttgaaacaatttagtattcaacattagatataggatcctcagttatggatagtattaaatattcattaatgatattttagggtatgaaaggatatgaatataaaagttgaaaaaaatttatggattatttgattctcaaagtactcaacattattaatatgtttgatgtataaaatgcatttaaataataaaaaattaagaaaaacaaaaagttttgaaataatcacaaaatagaaaaaacttttttgcttagttattttatttgtcttacacaatgctatatatttggcaatatattattaaacgtctttcaagtcaaccatttaagcatattttattcttttaaactaactttagtgctttagcccttgggctcaattgtgcctagccatctcccacagttgcataccgcctccctcaggtggactcagatgggaccagatgaaggctgagcacccctccgctctgcg

SEQ ID NO: 43090 - DNA, 312 bp, Mus musculus
  source 1..312: mol_type = other DNA
gtgggtggtccaacacagctggatggcatggaatcttggggtccctaggatagtcccaagcctgaggctttgtctcaccccatggggttaggggtgagtcagcgccagctgagtatgtcccctatgcaatgacttcattggggaggtgggtgggggcgggccgccaggtccccgcctgctgctccgcctcctgggatcagctcctcagtgccggcaggacttgctgcggcgcgggagcaggctgactcctcgcacaggcaagacttggggtggggggtactcggtttccacccgccaaaggcagagacacta

SEQ ID NO: 43091 - DNA, 331 bp, Mus musculus
  source 1..331: mol_type = other DNA
agcagaagttcaaggttatcctcagctacacattaagttccaggacagcctggcaataaaattataattggtaaaatataatttcagagatttagcctaaatagaactttttctgtgtggttgaacaagttgttcttgtggacccgggaagtttttgacttccagggcagcaagtcgctggtccactgaggatcacgcaggcctgctcagctacccttctcagtaggcgactgtgaggtcacattggcagggctgcagcaccctgctagtattgagcatgcgcgttatcagggcatggaggggcgggacctcgggtggcccgaggtggccc

SEQ ID NO: 43092 - DNA, 347 bp, Mus musculus
  source 1..347: mol_type = other DNA
gcatttgaaatgcatataaagaaaatatctaataaaaaattaaaaaaaaagattttgctgatatgaccctgatatagcttctcttgtgaggctatgccagtgcctggccaatacagaaggtactcctgggcagtgctcactggggagtgacattcctcagactgaggtccagcgggatcctcctccggtgaatctgtgtgaggctccaaggagccagcaagaaaatcgcagcttccctgagggcaaattggaggcgcgcaccagctgtacactgcgggactcccatggccaggctgggaggggcggccgcttcccttctcctcctcccctctcgggcgggggttccg

SEQ ID NO: 43093 - DNA, 170 bp, Mus musculus
  source 1..170: mol_type = other DNA
catgacctctttactgataggtcaagaactccataggcagttgataaagtctagtaatgaaattcatatggggtctcttgcaacccaggctactttgacctaatagtctccagagctgaaatttcaggcatttgacagatcagagcaggtactttccagatctcaaagtt

SEQ ID NO: 43094 - DNA, 286 bp, Mus musculus
  source 1..286: mol_type = other DNA
agtccaggcctgcctagaattctccctgtggtcctaggggctgggggagcctcaggcactagagacagaggcaggaaccactgcaggcatctgcttctgtgtcagccagaaccagggtcctgccctgcctaggcaggcttagccttcttttagaggcctgggaacacagggctgggaaagtgtcacccctggggcctctgtccccttgtcagtgcctgcctggcagctggtgctgaggtccttcctgctgctgacgtcaggaatggggaagattcgatttcctttt

SEQ ID NO: 43095 - DNA, 197 bp, Mus musculus
  source 1..197: mol_type = other DNA
caaagatctgtccgacagtcgctgcgctagggagcatgggggcctccaagcccccaaggactgtaactgagggcctgagcatccagccacaaggtggcgccagctcccacaagcttccatggtaggcagccctttttaggaaggcctggggccaggcctggcaggctaacagcagggcgggccctgttcaggcttcc

SEQ ID NO: 43096 - DNA, 319 bp, Mus musculus
  source 1..319: mol_type = other DNA
cctgcccccatcatggatgctaagagcaatcctgtctcaggctgtgccctctcaccctaggcagtcagagcgctcactgtgatgtgtctgcgggacactgtgctgctgctgcatagcctatctcagaaggacaagctcttcactgtgcactgtgtcgaggtcctgcatcagtacgaccaggtgatgccaggggtcagcatgctcaaagatctgtccgacagtcgctgcgctagggagcatgggggcctccaagcccccaaggactgtaactgagggcctgagcatccagccacaaggtggcgccagctcccacaagctt

SEQ ID NO: 43097 - DNA, 356 bp, Mus musculus
  source 1..356: mol_type = other DNA
caaactaaggcaaagaggaggcatccacctggcatccttgtcgaagatgaatttttctcagaaacatcatgcggttgggtaattcaaggaccactcccagcgttttttttttttctcaaatatacatacttgaaacatttgttatcctggaagatctctgcttccaggaagaaaagcattccttctcctggtcagggagagctgacccctgctacacagtgccaccctgacagcactgtagtaccctggcatcaccggggaccccttcgtactgagcccagacacgcaggagcctgtcccgggtaacggcgcgccacccatctgtgcccggtagctggcagctgattggcccgcag

SEQ ID NO: 43098 - DNA, 335 bp, Mus musculus
  source 1..335: mol_type = other DNA
cttccaatcatatgaaggactggaacacacaaggccgtcttccactcagggccttggcactgcctgctcagagagcccctggagaagtcttttttaaccaggtcacataaggtgtgatgctacaatgtatctatacaaagtaaatttgcaaacacttgcactcattgtttcaataagtccgaactttttcccgctgaagctgaggactgggtgataattggccactacccaggaaaggcacttgcatgtaacccaggcagaaggagccgtacctgaattgcctaagcctattaggctccactgcctagcagccaatcaggggccacgcataggtg

SEQ ID NO: 43099 - DNA, 274 bp, Mus musculus
  source 1..274: mol_type = other DNA
ctaaggagcctggacttttatcctctagtctagatagcacgactcagtatcattactgataacaaggttaacaacctataaagtgaattgctagtttgactcagaaacttagctatatgtgtctgtccatgaactggaagcccatgactgtcttgagaggcaacgccaaggcagggggcttggctatcttcctgcagagaggcaaacacctgtgggcgacacgagcatgctcggcccatcacctatgcgtggcccctgattggctgctaggcag

SEQ ID NO: 43100 - DNA, 376 bp, Mus musculus
  source 1..376: mol_type = other DNA
gagagaacctctgcccagggtttccttcccagaaagacccaggtgttttccaaggagggagtccagacttgctcaagggctccgtggaggagggaaggaaatcccgggctctcttcttggtcctaagcggcgcgcaggtgaggcccggctgggcggggcggaccgcccacgctcccggctccgctcctcccgggcgctgcagcccccatttaatgagaggggttgatcacccccaaactcggatcccgcgggaccggaatgcggggtcccggatggctggggccgcgtaccccgttctcccggcagcttccggcctggtccgggcggcgcgcggggggagggcggcccgacgggcgggggggaaggagcggagccc

SEQ ID NO: 43101 - DNA, 410 bp, Mus musculus
  source 1..410: mol_type = other DNA
cccgggctctcttcttggtcctaagcggcgcgcaggtgaggcccggctgggcggggcggaccgcccacgctcccggctccgctcctcccgggcgctgcagcccccatttaatgagaggggttgatcacccccaaactcggatcccgcgggaccggaatgcggggtcccggatggctggggccgcgtaccccgttctcccggcagcttccggcctggtccgggcggcgcgcggggggagggcggcccgacgggcgggggggaaggagcggagcccgggccggccgacgcggctttgtctcctttgttcccagcggaggcagcgccgcggcgggaggggcgggcggcgggcgcagttttttccgcccctcggtctccgacagctgcggctccgccagacccacctccgaggg

SEQ ID NO: 43102 - DNA, 335 bp, Mus musculus
  source 1..335: mol_type = other DNA
tacactggagtagccatacactggagtagccatacactggagtagccatacactggggtagccatacactgggttagccatacactggggtagccatacactggagtagccatacactggagtgagtagccatacactggagtagccatacactggagtagccatacactggggtgagctactgaacaagaattggcatcatggtgggaaacatggtagcatgtttgctcttacgtaggagtaagagaaattacttgactcgtgtctgttgcaggaaggggagaacaggaaagactacttttctctacactgcgggggccagcagagatagagac

SEQ ID NO: 43103 - DNA, 240 bp, Mus musculus
  source 1..240: mol_type = other DNA
tctctagtgtgaaaataactgactgcaagatcagtgagtgctcttaaacactgagccatctctccagtctgaaagttcatttagttctatatacctgcagtcagttttttttttaataatattattatttattttatgtataagccaagcagtcagtgctcttacctatgtggcttctgcatgcacatacaacacacacagtggaagactggttgcatagtttacatgtgtttcaaccat

SEQ ID NO: 43104 - DNA, 350 bp, Mus musculus
  source 1..350: mol_type = other DNA
tatacataaaataaataataatattattaaaaaaaaaactgactgcaggtatatagaactaaatgaactttcagactggagagatggctcagtgtttaagagcactcactgatcttgcagtcagttattttcacactagagatgggttatattctccagaggatccagcgccctctcctggtttcataggcacacgcacgtgaaacatacatgcgcaggcagaatacgcttacacgtaaaaaatttttaaattaaagcctttaaaaaaaataaagagcccaccaggcgtgcagcgccagactgcaggatccggagggctgccctgccgcgtgcctgaaggaccccaaagg

SEQ ID NO: 43105 - DNA, 286 bp, Mus musculus
  source 1..286: mol_type = other DNA
atccagaaaagcctggccagcgaaatactgagtcagtgtagtccgggctttggctaaaggccacattagccatgattggtaccatggatgccgtcatgcttccatgatgatggtaatgcttggttaccatgccctgaggatcggagccagacctaaggaatagacagtcactggctctcttagtccctctggggcccaggagaactgcccagagtctcatgaggcaatgagagtctagcccccccacaccctggccggcagccaggggcagggtgggccaggaaga

SEQ ID NO: 43106 - DNA, 601 bp, Mus musculus
  source 1..601: mol_type = other DNA
tcttcaaagcaatattgcttgtcatttgtaaatccctgccgacaaagcaggagaaattcaaatatcctaagggccgatctctctagagagctttccttgtttaatgattgatttgacttagaatgaaataccatatttatggaagtcaaatttttttggttaaataaattaaaaaaccacacactcaaaatggaaataagattcagtttaatatgtaataagtctctgaaataaataagttgaaaacaaatctgggaaataaagttatagtttagtagccaaaagcttgccaggcaaactgaaaaaaaaatttgatttttgaatatgacaagtgatctcgcaagaatccattttggtaacagcattctctaatgatctacattcctgtgatagcactgcaatctcctgaaatcaggctggtgttattaaaacagtttaactgagtatcaagagcagatggttttcagtataattactaaccatagtagcacacacagactactgtgtgcatatagtcctggatattcagaagaaactctgtcaaaaaagttttaattacatttattatttgaaatgtatttactttgggaaattttaaaaa

SEQ ID NO: 43107 - DNA, 263 bp, Mus musculus
  source 1..263: mol_type = other DNA
gggttttgagttcttaaaaacccacagctattaaaaaaaaaagtccctatttcaaaaattaattaaattaattaatcagagtctggagatcgatctgaattcgaggccagactggtctacagagcgggttgggatccaggatccatggtactgtacgcacagcactatgctcagtaggtgtgtagcacacctttcggtagggactagcgccgcccccaccgagagagggcgtgacctcgaggaggcccacgagacgcttcctc

SEQ ID NO: 43108 - DNA, 258 bp, Mus musculus
  source 1..258: mol_type = other DNA
ctggaacccacatggctgaagggaaccactcaatggaatttatttaacattaaggtgtttgttttaagtgaaaatttgagcaattttctgaatccttacttattttaaaacagtttttttttgagataaatgaatgtgtgggtatacatatatctatatgtaaagctgacatgtactgtattttaaattacttatatatacagattaacacacagtggcgttctttctaaatgcatttagcacccagctggcttccag

SEQ ID NO: 43109 - DNA, 630 bp, Mus musculus
  source 1..630: mol_type = other DNA
cggctcaaatttgtaatctcaacactcaggaggctgaggctgagggattgccatcactctgagggaggtgggcaaaggtgatctttaagttttcaagtaactacgttgaaaaaagaaaaaaactaaaagaaacatgaaattatttaagttactaaatacactcccaattatataatcagttttttcttgttttctgtagagccctggctgtcctggaccttactttgtagaccaggctggcctcgaactcagaaatccgcctgccttgctggagctgcgccctcagctccagagcccaccagtcagggccggcggggcccactcaggcccacccgtacgcaggcgcgtgcgcctgacacaaggaagcggcggccctctcagaacggcggaggcggcctgagcctcgccattcgctgaggcatccgcgggcgggaggccgcagtctagacccccgacgcgcgccgcgccaacggtccgccactcgtgctgcttccacggagagggcgaggagtaggggccggcgtggattggttcgcggcgcctcggcccgcccttcggtggcgcccattggctggggcggcacccgctgacggcgagcacgctccgccttcgtgccggccttcaagaggg

SEQ ID NO: 43110 - DNA, 453 bp, Mus musculus
  source 1..453: mol_type = other DNA
acatggtttttttttcattaattaattaattaatttaggtttctccagacagggtttctctgtgtagtcctggctgtcctggaactcactctgtagaccaggctggcctcgaacgcagagttttaattcaagtcatggctagaatgaaacacatttcttcttcccaatcagaagcccaggtctccactcttaactgtggagtcggcccttgactccagtccagggattaaaatcagtttatatttaagaggtcttctctatctataggagatgtgccctgcttagcactgtatcaacaaccaagtcaggcattacaaagcagtttgagcaaatacctagcgctattttctaaaatggtatgcatcctagctgtagcctagctttcatgctctctcggcaccgagtccccccggccagcagagggcgtgtgctgagccctcgaaggtactgtcg

SEQ ID NO: 43111 - DNA, 427 bp, Mus musculus
  source 1..427: mol_type = other DNA
ttgtcacctataaggtgagaagtggtatttttacctcagcaataaaaaacctgatgccatgtcacttggtaccacacacatgcacatagaattttcttcgtctgttttaaattacgagctattgtattagttctccaaatatcacgaaagggcacttgaaccggagagatgagcctgagatggtcacccgtccccagctcccgccggctctcgccggctcccacggcacaggccacgcgcgtccccggccgctccgccggaagtcccgcctgtgtctggggctacagccgcgctccctccagccagtgcccgggtgcaggcgcagactgactgtctcgagagccggggccgcaggtgggacttccgcctcgggacccggaagagaccgcgccgtcgctggtggtccggccgtagttgggggggcccg

SEQ ID NO: 43112 - DNA, 320 bp, Mus musculus
  source 1..320: mol_type = other DNA
ctttcaagctctatgtacatcaggcaggcctggacagccaatacattgtttacaatgtaaactttcagccttcatatagccttcattgtgatcacatacttttaaagtgaatgtggttcgagaaacattaatgaagccccaagaaagactactttaatgcaggtggggtggggtggggctcggctcgcactgcacaccctaagctgaggctcagcagcctcagtccgtaggggactaccggcgtgctgcgcatgcgtacgcccgctctggtccagaaggggcgtggccgcgcctcggcgccggaagggtggcatctgcgc

SEQ ID NO: 43113 - DNA, 576 bp, Mus musculus
  source 1..576: mol_type = other DNA
gctgccgcccctgcgcgccgcgcttgcatcgccgtcccgtgccagaggggtctgactgtcccctggcgaggaagaccgagaggggccggcgtcaacgcgacgtgctgcggggcgggcggagtgggggcggcgccgaacgcggcagcggcaagcggcagcggcggcgcgggaggcggggaggcgcggcgctcggaggacagcggctgacggcggcatgcggcggctcatgctgcccaccgtgggctgaggcggccgcacacgggcggcaggcgcagcggccgggcaagccgagggcgcagccaagccgcgcgcaccgcgcacagcggcaggggctccgcgcaatgggccgagctggaggcgggggcccggactgggggccgccgccagtgctgctgcccgctggggccgtaccgggtaggtatccacccggaccgggaccccagccagccccaccccatgccagggtctcgctgacttcaggtccaggtggagtccccaagccctgacaagggggcggggcaccgcctggcctacagcccgggacccggcgggaaagggggcagcccatagcctgtg

SEQ ID NO: 43114 - DNA, 549 bp, Mus musculus
  source 1..549: mol_type = other DNA
atgatcatttagacctctctctccacgttgcatgtacgcaaggtggagcctgtggacagattaggtctgatccaattagagcctaggctctccggaagaagacttagagtcggactggagaacccgaattctggattggcaccggacagtccgtgccccgggctccgctctctccacactgggggcgcgggcttccgccccctgtggcccttccgagccccgccccgagcctgcgggtgtcggagcccgcgacgtccccgcctcccctgcgcgcgcgtggcgggtgggttcctcgcaggtccgcggcccagcgcgctcagcactggaagcgcaagcgggccccgtgggctgccgccggtgcacctgtcggcttcccccagtggctctgctgccgcccctgcgcgccgcgcttgcatcgccgtcccgtgccagaggggtctgactgtcccctggcgaggaagaccgagaggggccggcgtcaacgcgacgtgctgcggggcgggcggagtgggggcggcgccgaacgcggcagcggcaagcggcagcggc

SEQ ID NO: 43115 - DNA, 328 bp, Mus musculus
  source 1..328: mol_type = other DNA
aaaaaatttttcaaggtcagctgaagacacaggatataaaagattctgccttttattatgtagctaacacttgttgggactctatagagagaaacacaccaaaaaacttctagtggtatactacaactgagacagtcacaagtattgaggcaagacatgtgagctagctctttgcttccctgagaaagacacacatccataaagtgtttttcagtagattgagctgtcatagctgatctgtgaactaaactgctgatttccatccactacctctggtagttggtagactacaagagaggttaaaatgtttaaaaatcattaaaaatgg

SEQ ID NO: 43116 - DNA, 333 bp, Mus musculus
  source 1..333: mol_type = other DNA
ctcctgacagctgagatcacagatgttggcagcatcttgcttatttaaaataaaactatgcatacgttttgatggtatgtataggtgcaccacttctaattccctgggaccaagtggataatgagaatcaaattagggtcctctaaaatcttctgagtccccttaaattttaaaagctcgcctgctcgtgctaaatcgtgagggagcaccagcactgtgttggtccattgcccgaatgagagatcgctctaaggctcagctttacgagcatacgtgctcacgcgcttgcgcagcagcagcagcagcatcacaacccaagcctgattggctgac

SEQ ID NO: 43117 - DNA, 360 bp, Mus musculus
  source 1..360: mol_type = other DNA
ttaggatacttttttttcaaaatagttctcagatgttatttttaaaatttgtttgagacaacgtattgttccattatttatgtctaaaatttaacaatacacacaacacaaaattcctgtttcacaggtgtctccagagacaaatgctcgtcgctgcagagggtggtggtgtggagcagtgttcctgccccctcaagatttgggaattacaaattcatgggtgagttgtggattgggtcgtctctccacccaagacccttcgcgcgagaagaccgagcatgcgcgaaccggggtgggggggccggactgcacctcccaacaggctgcggggggagtgcgtcactccgcgtgacgagcagc

SEQ ID NO: 43118 - DNA, 401 bp, Mus musculus
  source 1..401: mol_type = other DNA
cctgtgacactcagagagtcaggaaacatagcaaccagggttggtgctgttgctgagtgtctggaacctcactttccccaaacatgggaataaacactgagtatatatcattgtatttttaacaaaaatggaatcctaacaccagcttggttttgaactagctttcattataagtgctcatttaacatccttggtgttggaggctcctatacctagttcatcaactgaatacacttgctatttagctcccagtggaacacgagctcttgtgcatgttctcaaagcttcctctcgcagttgtgtggcaggggaccaccagggcgttggcagtgccagactacgcatgcgcacgccgccgggagcacgtgtggagggcgagctgcgcgggcgccgggcggccg

SEQ ID NO: 43119 - DNA, 272 bp, Mus musculus
  source 1..272: mol_type = other DNA
ggaattgaaggtgtgcacctgagactcattatgaaaaccagtctggccttgaaatttaaaagtcaagatgtggtgacactcagtgttttaaaagtcctggctgtcctggaaagaacaggctggcctgtattttaaaaattgatgagctcacgacactgaggcccagagtgaacaggcaggcccagcctgcccacaacttggccaacagtgtttcataacattggctaataaggaaaggaggggtcctctttctagagacaccagacctttat

SEQ ID NO: 43120 - DNA, 344 bp, Mus musculus
  source 1..344: mol_type = other DNA
tcagcatgagatgaacccaaatcacccagtgtgtggaatgcttttctaaaatgtgtgtgactaagtgatgacaccgtgtcttaatcctagctcctctccgatttttttttttttttcacaaataaaagaaccaaaggagtctgacagcagctgggaggatatccccaccactcgtgaccactgctcacctcgcggggcagtggcgctcgggtagagcgaccgctagaactgcagcaacttgagggagctctgttcgcaaccaggacagctagccgactggctgtgtacacagtcgccatggcaacaggaagcctgcagtttaagcccacatttctcagccgtga

SEQ ID NO: 43121 - DNA, 224 bp, Mus musculus
  source 1..224: mol_type = other DNA
cctgaagagaaggcttagcatttaacattttctcttttctgtatgacagaaaaggaggcggatatgctcttagggcgtcagacacgtcgcatagccctgccgccggatctcctccatgacgccgtagccgcgactaggcaaccggccgccgcaactgcgcaggcctggccagcaggcttcacggctgagaaatgtgggcttaaactgcaggcttcctgttgcca

SEQ ID NO: 43122 - DNA, 446 bp, Mus musculus
  source 1..446: mol_type = other DNA
gatcacatttcaatttattggtgattccaattaaaaaattagtggcgctaatccagaaataaaaagtttctagtttaatctaacttttttttttttttttagtaagactaattaataaccttagcccaggctgagaagcagcccctgcttagcttggttttcggtgcgcgagggcggcagctgcgctacctcagtgcccggaggccaggctctcccagggcttgggctgttcccgggacggacgctgtccagggaggggcagcggtggctcccctccagctccgggacccgcctccaacactcggccccgggacttattgttccgggaggccgcaggctaggcctggcctggccggcgggttgtaccccgcccctgccagggtcggtggtgctggcgcgccgactggcggccggtgggctgccctggctgggcctgcaaggcagag

SEQ ID NO: 43123 - DNA, 531 bp, Mus musculus
  source 1..531: mol_type = other DNA
gcagcttggccggccgggcaggttgtggggtgcggctgccagggctcaccgcatctcatccgagttcgcgcggaggctgtggcgctcctcgcggcgaatctcccaggtgtcctctggggagatggcgaggctcgctgaacctagagtctaggcgctcagacatcagacccggcccgagcctgattctctgcccaggaactactgcaccagggggtgggcggggcccaccctccagctcagggattgggaagtcccgcccctcgccggctgaggggagacctagcgtcggcctctgaggccgctgctgcatattttgcacaatctgggccacctgtggccttaatcctcaaaggtgactatcgctggcctggcatgcttcttcctggccaggctggcctcggtgtagccagcggaggcgcctctggctttgccggtccattgcatggcatttgcatgccagtggcctgctctgccaggcagtgctccggcgtggggcgggggcgggaccgcgccctcgagctcggccccgcc

SEQ ID NO: 43124 - DNA, 293 bp, Mus musculus
  source 1..293: mol_type = other DNA
ttaacctggtctgtctgggaccttcccttacagtaggagacggggtggctgccagcccctggcatagagggtatctgtgcatactgatcgatccctaggaccaataggagccatcttgactcagccaggcctagagccgggccctgggaggaggggctcccagcaatggagcacctgggcaggcctgcagtcgactggtatcgggttaaagcctttacgggccccaggcggagctccatgcgacctcccgggccgccctgaccccccgccctttggacagtcctaggagaggc

SEQ ID NO: 43125 - DNA, 279 bp, Mus musculus
  source 1..279: mol_type = other DNA
tgactcagccaggcctagagccgggccctgggaggaggggctcccagcaatggagcacctgggcaggcctgcagtcgactggtatcgggttaaagcctttacgggccccaggcggagctccatgcgacctcccgggccgccctgaccccccgccctttggacagtcctaggagaggcggggcggtggccgctgccacacttcccccagcagtgtagcgccgctccgccccggagtgacgccctcccgcccatgggcctggcccggggcaaccggcgggc

SEQ ID NO: 43126 - DNA, 315 bp, Mus musculus
  source 1..315: mol_type = other DNA
cagggtttccctgtatagccctggctatcctggaactcactttgtagaccaggctggcctcgaactcagggcgtgcgccaccacgcccgtgattatgctgcagctcccgaaagagatgcgagaccaggcctcgaactcagcagttctggatcaggcgagtgagtgcaagctgccactggcactctgtatgcgttaagacaaggttatcttacgtagcccaattttgatgcctcagcctctgaagtgctggaattacaaacgtgcaccacctgcttgaagaatcacaaattaagtgtcggacaaatcttctcctgc

SEQ ID NO: 43127 - DNA, 454 bp, Mus musculus
  source 1..454: mol_type = other DNA
ggggatcccgagagctccatgaagtccccccggggctgcggacggggcgctggcttggggaggctgtcgggggggccccgacattcatggcaaggcgggggccgcggcggcgagctcggagtaggtcgggcgcgcggggcgcgggaggccggagtcgggcaggaggggactcggggcccggccagggcgggcccggctgccccgtctccgtgtcagtctgcggcgcctcctcggagccctgtggagtcgccagccccgccttggggccgttacaagcagacaggcagcctcagcgtcggggcagcagaaacgcccgtgccgctcgggcgcacgcagcgcgggttcgggccggccacgatgccgcgggagagccgggagctggcggcaggcccctcccccactgggcgtggagcgaagccacggctcgccgggggcggggggcccagccatatgg

SEQ ID NO: 43128 - DNA, 342 bp, Mus musculus
  source 1..342: mol_type = other DNA
gagatggtaggcttggaagtccaaagtctagaactctggtgtccagcgtggagtccaacccgagtcttgtagtctcgaattgcccgaattggggctagtgctggaggcggagcagcttcccaaccccatgggtacacgggcagcgccgcggcccacggcgcgagaaacaggaggcttccccagtggctcctctcgtgtggccgcccgctcatcagcaagggcctttcccaaaggatgctgaaagacccggggcagggtctctggagagatgtcccgggatgggggacagcgggctcggctctgtcctgcacacacccgcctgagaggcagtggcgggggcag

SEQ ID NO: 43129 - DNA, 404 bp, Mus musculus
  source 1..404: mol_type = other DNA
tatgtgtgtgtgcacacatgtgtgtgtgtgtgcgcaaacctgagacactagtcttaggagttttgtaaagacagtcctcgagggagtgccacgtgggtgttcctggagaccctgggaccctgtgagtactgcagctgcctgctgtatccagagctggggcactgacaggccgggaccctcccctatggtgtatagcatgtggtacacacttttctttattgtgcagaagtctgtcagtctgtgtctgtgtgctcagagcacaggctgagcagaggccgaggcctctgtctccctctccctccctctccccaacaggtgactgggggaatggagcacactcccctcccccaccggacccaaaatagccccttgagcagagccaatgcccttttatggccctgtcc

SEQ ID NO: 43130 - DNA, 305 bp, Mus musculus
  source 1..305: mol_type = other DNA
atttggccctcctccttcagctggggaaagtcgagaagtcttacttaagaacatatatttatttttattttctgcatgtatggacatgcctagggcccacagaggccagagaagggcactccatcccctttccatgtggatattgaacagcagtcctttgcaagagcactgtgcttttctttcaacttgtcccatagctcagagagaagaataaagcaagaagctgtgatgcctctgactcactggcgcctccctgcagcctccacggagcccgtttctcctgacagaacggagggcggccacgt

SEQ ID NO: 43131 - DNA, 362 bp, Mus musculus
  source 1..362: mol_type = other DNA
atcttcttatatcaagagccttaacttaatctattgtgctgtaacatactacagtaagaataaagatgttaatactataagcatttatacaggttaatagaacataaatctttatttctttggactaaacatccaggaatgtaattaatggagtgtatggtaaactttttagagtggctgtgtttaccactgccagcatctgagattgttacagcaccctgtcgcagaggtacaacatatctgctaaggagtcagggtttctctgtatagccctggctctccgaccaggctggcctcgaacgcgctaaatgaaaccacccgtttcctgcagaactgtgcgtagcctaggcaacggccacgtg

SEQ ID NO: 43132 - DNA, 284 bp, Mus musculus
  source 1..284: mol_type = other DNA
tctgtgggcatcaggcacatcccagagctcttgtaaactagccagtatttgtcagtggtacttggaagaggacagctgccttctttatatccagttcagctattacgttctcaaaaccgtttttcctaactgggggcatcaagatgcccccagccctcttagagcactaggggtgctgtcatagatctggaatctaagacccagtcccagatctggtcaggctcttggcgccaggtgacgccatcgcgtactgggatgtgggcacgtgacagcacgccgcagct

SEQ ID NO: 43133 - DNA, 204 bp, Mus musculus
  source 1..204: mol_type = other DNA
attctctgaggcagcagggagggcctttccatgaggcttccccacagccccccccgggtggctttgaaaataattcagggcagctccatggaaggcctttgctggccagggtggcgtccgacagcctccctccacggctgtggcaccatccccttaaggctgcatcagcagggtgagcccttgccctcgggcagaggcctaccc

SEQ ID NO: 43134 - DNA, 246 bp, Mus musculus
  source 1..246: mol_type = other DNA
tgatatcctctctgtgtatggcacacacatgatgtgactagtttagtccctgttcttgaggccagggagagacaggcaagcctctttatttcctgggtaccagccgggcatctctgtgagtttgaggccagcctggtctacaacctgtccatgtatttttaggagtcctgggcacgaggcccgacactcgctcagaagaatgagtcctgaagtgtcagacagttgtctggactactgtttaaggga

SEQ ID NO: 43135 - DNA, 374 bp, Mus musculus
  source 1..374: mol_type = other DNA
cccctgaggggggggggggttcctgatcccagccacagtgactcttccccttcctccaccaggaagcagaaatgtgtgcttttcagatccttgataagaacagactttgtctcttaagctaaaaatatagttgagtacattactttttaaatgttattaactatgttgctgagtcattaacatgtgcgagtaagtggctctagagaattgcttcaaatatttcagcctttaaaaattgtcattgaagccaagctcgacacgtcggggatggccttcctctcgctgctgcggctgctggtggagcgagcgggagcgccccagcgaatggcatctagggggcgccacgcaggctgggcaccagcgcaccatgaggc

SEQ ID NO: 43136 - DNA, 396 bp, Mus musculus
  source 1..396: mol_type = other DNA
cacaggtgactcagctattgtggggccttccctgggccagccaggtcacctgctcctggcagcctctctccctctgggtgataaactcgcacctgggttctggcctggacgcagggcacggtgctcgcgctccgcactgctgctaggggttggaccccgcgctgcgtttaaaccggagccgggcggccacggcgggaggaggagagagcccccacccgcagctgagctcgtggggcagcggaccccgcccaccgacgcgcgctcttacctgcgctttgcgccgcggtgccccgagtggccgcgcagctccgcgccgggccgcccttcctctccgcgccccgccccgaggtgttgttcgcgcgggggcgtctccgaggaggcggggctcggcctcgg

SEQ ID NO: 43137 - DNA, 435 bp, Mus musculus
  source 1..435: mol_type = other DNA
tcttgggcaacaaacttggagcctgccaccccttctgagaaactcttagaagtctcttttctctctggcagaatgcatggaggctgtccaaatactcaggcttggaaggcttagaagcaactcagccaggctggtgacttgcttgctggccaaaagggagcccggcagctggacagcaggcctctttgaggttgaaccatggtccctcctccaagtgctctttccaaggtcgaaggctttggcacaggaaactggccagcttcaggctgtacccggaatgaatgcagggggcctccttcaaggttacacacagcagtagcggggtggccccaggcactgcctgccgtcctcggggtgcgatcctggggagctcgcggaccgaccgccgaggccgagccccgcctcctcggagacgcccccgcgcgaacaacacct

SEQ ID NO: 43138 - DNA, 513 bp, Mus musculus
  source 1..513: mol_type = other DNA
tagaagtctcttttctctctggcagaatgcatggaggctgtccaaatactcaggcttggaaggcttagaagcaactcagccaggctggtgacttgcttgctggccaaaagggagcccggcagctggacagcaggcctctttgaggttgaaccatggtccctcctccaagtgctctttccaaggtcgaaggctttggcacaggaaactggccagcttcaggctgtacccggaatgaatgcagggggcctccttcaaggttacacacagcagtagcggggtggccccaggcactgcctgccgtcctcggggtgcgatcctggggagctcgcggaccgaccgccgaggccgagccccgcctcctcggagacgcccccgcgcgaacaacacctcggggcggggcgcggagaggaagggcggcccggcgcggagctgcgcggccactcggggcaccgcggcgcaaagcgcaggtaagagcgcgcgtcggtgggcggggtccgctgccccacgagctca

SEQ ID NO: 43139 - DNA, 324 bp, Mus musculus
  source 1..324: mol_type = other DNA
ctggccacagtagatcccaggctaccttaggcagagcatgccttgcagagatggtctgggcatcattgaacccagagccacacagtgagaccctgtctctctctctttttttaatatttatttatttaccatatgtaagtatactgtatctttctctcttttttttccttaaagtgaaaatgagggtgtgtgtgcatacagaccgaaaacagctaggtgtttgttgtatcaaaccctgtgatcactccgtgagaaggctcaaacctttcagaagttcggagcttgagatgatacacaccgctcagtgagtcactgcctagttca

SEQ ID NO: 43140 - DNA, 362 bp, Mus musculus
  source 1..362: mol_type = other DNA
gtcctagaactacgggcctttgtgtgatctatataataatgtgagatatatatcaaaatgtatcactcagggatgtgtttctcaagcttagcactgagttgagtcaagtgacttccgcagccgctcgccccagcgcccacccgcaggctctgggccagggcttgcaattcacaaaacaacaaattttgataatgaagtttcaaatgcctgtatggtgttgaacaccttggtagaaactccctttacctatagaaaatttacatataaccagactatagagaatttacatacctcggagcttcctggcctagtaatgggcgtggggccccgtaatgggcgtggggccccgtctccccgcccac

SEQ ID NO: 43141 - DNA, 336 bp, Mus musculus
  source 1..336: mol_type = other DNA
ctaagagtaaagggtgtgagaccacacactcagctttcatggacttttgtttgaattttgagactgtgtctcaagtatttctgatcttcttgcaccacctctgaaatgctggtctaggttgaccttgaaccatttgtggatgagagtaaccttgatctcctgacttggagttccattatttattggatgtcattcctgtgtaactctctaaagactccaaacattgcagaaaatgtttttatcctgcatgcccagctcacttaataatcttgctgtgcccggtttctcctgctaggctgagtcacatagaatagatagatagtttatcagcattat

SEQ ID NO: 43142 - DNA, 262 bp, Mus musculus
  source 1..262: mol_type = other DNA
tcccaaatgatgtagttaatttataactgagcaaataacattgagcggagcgtggcggttcctgttggtcttggaccagggggaacagctggatgtctacagatcacccacgaggacttcccagagtgtgggactcccagggaggcctcttagcctccagccctttcagagactctgccagaggtgagaccttaaaaaccaaagcttggagttttgtgagactcaactgacctttgtccctgggacagaaggatctgaacta

SEQ ID NO: 43143 - DNA, 222 bp, Mus musculus
  source 1..222: mol_type = other DNA
aggctggcctggaactcaataatatcataatatgactcttaagacattcattaaaaagaagttctcatttcttctcttcctaccaggtcaaccctgggtggaccccacaggaatggccaggcctgagctgctccttcctgtaccagcgcctgtgtagggggtactggagtccctgtttcctccttctgggctccaggaagctggcggggggccagcccggtg

SEQ ID NO: 43144 - DNA, 259 bp, Mus musculus
  source 1..259: mol_type = other DNA
agatctcagctgacagctcaggggaccctggactgtagccatgtccacgggtagacagggcatcctgggaccccctactgggggaggagagaccttattaggaagtgcctcataatgcaaaggatgtgcctaaatcacagacatcacctagtccccagattaggtcagccatagctcgtgggcctgagggcagtttacacatgcttcccgcccccggggcttcccctgagcggggacgtaggaatgctcagaagcctga

SEQ ID NO: 43145 - DNA, 280 bp, Mus musculus
  source 1..280: mol_type = other DNA
gccaggtgtcatggtggctccgggacatctaagagatctcagctgacagctcaggggaccctggactgtagccatgtccacgggtagacagggcatcctgggaccccctactgggggaggagagaccttattaggaagtgcctcataatgcaaaggatgtgcctaaatcacagacatcacctagtccccagattaggtcagccatagctcgtgggcctgagggcagtttacacatgcttcccgcccccggggcttcccctgagcggggacgtaggaatgc

SEQ ID NO: 43146 - DNA, 339 bp, Mus musculus
  source 1..339: mol_type = other DNA
tcattaccttgtttatctgatcaagttcatctactcaattagaaggcatgatcagggcttccggtgcctggaactgccctgccacaggttccagggtacccgggacaacaggtgtatagcatcatacctgattttaggaaatctctttaaaaacaggtattttcatcgggaccaggcccggcttgagccagtgcgtgtcgagcgtgtctccctccccgtcacccgcgagccctgcgctccgcggtccagccagtagcctccgagccgcgcgcgtccgctaccccgccgcctgccacaagtacttccgggtgagcgggtcgccggccggtggccccgccc

SEQ ID NO: 43147 - DNA, 479 bp, Mus musculus
  source 1..479: mol_type = other DNA
gttgctgtcaatgctcagaatcctctgccgtgtgatctctggagacaagtcaatgccttccaggacgccgacgtgcgcgacccttcaaggccaagaagcggcagaggccgaggcctgcccgggtcgctctctcctccggagtgagcacggcggcgccgcagacgctcgaccagggccgcgcgttcctcgtcccctacatagtggcgcctcacgtcgcgttcccgagtagaggcgaccaggcggcgacacaccaggcacagggccccgtcaccggcgtcatccacattctgcggaggccacaggagaacgccgagctctgaggccgcagcgccaagcaccccctgggttctgcgccagatcacccgagcaggggtgcaccagcctccgccaggtattccctcagctctcagaaatgagccaatgcgcttgactggcattcatgctgcccaatcagcactgcaggactgcagtcggccgaa

SEQ ID NO: 43148 - DNA, 344 bp, Mus musculus
  source 1..344: mol_type = other DNA
aagtctcagatgcaggtctaagtctcagactagggtcaccctgatacgtctgaataaaactcagaagaatcttgtatgtaacgacccaaacaggtctcgcgcaagtcgtgaggaccctggcacgcgcagggtccctgtgcccgatgcccccacggtccccgtgctcggtgccccgcacggtggccgactgcagcaggtgggtcggcccgccccggctctcagtcggggaactcggttcggccgactgcagtcctgcagtgctgattgggcagcatgaatgccagtcaagcgcattggctcatttctgagagctgagggaatacctggcggaggctggtgcaccc

SEQ ID NO: 43149 - DNA, 233 bp, Mus musculus
  source 1..233: mol_type = other DNA
atgagcctcaaaaccattttgagagtctcacacaaagatggttatccaccatcaggtgttgcttgacttctgccacacaaggcaggagactcagcatcttctgggtgcaaaaagaacgttttggtggcgtactggctgtccagctagctctcctggagcgcctgccaactccaccgcccccgggtggcctagggcgaggcggggcgaggcggggggcggcggcggcagcgcgg

SEQ ID NO: 43150 - DNA, 645 bp, Mus musculus
  source 1..645: mol_type = other DNA
tgagaaggttttataaaatctctttaaaatgaaaggtcagcaatgtctcatgacagcaagcctttcaaattctactacttgatacaatgtcttggaaagctttaagttttaaaaatcccaccagggtgggggtgggaccctaggctaacactgaggagcctaaaggctcagccctaggcagtggggtgccacccaagggttttgaggctgctggtcagggctgactggttccgactcccctggaggagctgggaaggaccgcggtgttcctggcctcgtccccgccctgggctctggcccaggaggcccatgagccaccaggaggcagcgtgccagcggccgcgccctctgattgggtcccgggcccctggagggtgggaacgtgactcctgtcccctcagtcgcgaggaccacccggcggggggcgagcacgcatcccggctcaggagagcttcggagccacctcgcccttctgccaggcgcctggacggttcccgcccgcgtgacaggaactcggcaaatgacggaggcgacgagcgtcgcgctgctcggagcttcgctgcccggtctgctcccgacctccaggaacggcgcgtcgggcgcgcggtgagtgcgacgtcggcgtctgaggggacgacccgaggg

SEQ ID NO: 43151 - DNA, 404 bp, Mus musculus
  source 1..404: mol_type = other DNA
ctgcccctgcagtggggttgcaaataggcaggagatagctcccaaaggatgctcatggcccaccttcaacatctgtgacactgtatcgcaacagtgggttttatgtgaaaaaatatgtttcttgtgaacagccctcgcctcagtccagtacagtgctcagcggagtcaagcaagcaggtacgggaaatgtttcctttcaaaagagaaaatttaagtcacatgtttccctacccgattgctatgagcctgcgcatgctcatacatcctctgagtttattttaaagcagagaaacaaccagcgccggctttaaaagaaggctcctgactatgcagcgtgcaatattggccagagccccggcagccactgtgcagtgggaaggggggccgagcactgagcaggtctc

SEQ ID NO: 43152 - DNA, 407 bp, Mus musculus
  source 1..407: mol_type = other DNA
ataaggatttatatgtgcacatgaaaatatcaaatgacaaaataaatttagttttctagacataaaaataagtcatgtacgaaaggctttttataaatgtagaagtacaatctccatgccaagagattgagtcagcctctaagcctggcttagctttgaggcaccccagtccaaatggcatggatttgaaaagctctgccatttatagctgagtggctttaagcaacccttttcaatgaggctctgtccatacacctgtattatctgcctctggccgccagggatgacccagcgcgggcgctcagcgcggatctcccacactgtcggagtgggcgcggccccctcccgccctgggttccccgcaagccgccgcctcccgtcctcggaggggccagcccgggcccacc

SEQ ID NO: 43153 - DNA, 336 bp, Mus musculus
  source 1..336: mol_type = other DNA
tactctgtcagaggcgaaggaaaggaccttccaagctgcagctgctttcatttccgcatacacgaacaggaaataaagccacttcctgtctgtagcacctgccaggctgcctctccagagcttgcagcactgatgcagcccaggtactgggcaggaacaggaagctatgctgctgctgctgctgcttctgctgctgctgctgctgctgctgctgctgctgctgctgctgctgctgctgctgctgccatggccactgaacacagtgcagattgcaacttaaaaaatcattttctgaattatctcattttgacagaaggtgtacgcacatgtgctgat

SEQ ID NO: 43154 - DNA, 526 bp, Mus musculus
  source 1..526: mol_type = other DNA
gtgagactcagatctgaatttctaacaagatcccaaatgatgccagagttagtggtccaggaatcacaagttgagaaccagttattgaaaaacctaggctttcttcacagaatgcagtttgtataaccactggatgaccataatttcatgggcttcccagaggcctttaaaagacaccttccaaagaagctagttcccttctgaaattactgcagtgtttgaagccactggggcccctcgaagttccttgagggtcaggcacacactctttctctgtgaaggatgagatggggacccatggctcctgttttcagatgagtcctggatgcctagctcaaaatttgagactaaaacacaacactaaactttctcacgttgaggttttcacaggaggtccatgagatctgggggcacctgcaagccactgtccagagctgatctgttgaggtgcccctgtcagtctgtctgcctgtgtacccacctatgtggtcagagctacagctgtggcctcctcttgtataaccag

SEQ ID NO: 43155 - DNA, 354 bp, Mus musculus
  source 1..354: mol_type = other DNA
atggttgtattttcaacagttgttttccactgcacaacaaatggctttgtaacccaatatgctgttaacagatggcaaacgctctcaggatcccgactctgtttgcatccaagctgtctgtgtggctgctccacacggaatgctcagctggcagagttgtccctgcggtggacaaaggctttgatttagaaataaaaaaggcaaacctttgccatgtaggtgattttgattcttattgaagcaaacacacaaacttgtgtgtgtgtgtgtgtttttaatacaaagtgcgagatttcactaaaaaaggttaaaattgaagtgagtaatcttcggtgcataattcagttgttgaac

SEQ ID NO: 43156 - DNA, 342 bp, Mus musculus
  source 1..342: mol_type = other DNA
taagtagttagctaaatgactagtcatataactagcagagtattaagatcaggggactactgcacaggttcactgagctatggtcccatggtgagtctggggcactgtacttctggaggtcatgttcacagaatctgagagagcagacacttcctggcaagaacactctgcttaaagtcaaaatagttttgctaaaaatcatttgtaggaggataattataccagtgctctggaagatatataatttgtttagcttcagaagctaaccctgcaggagcgactcagtgttttgtaacacatcatttctgcactctaacgtcctgacgctgaagagagttcctg

SEQ ID NO: 43157 - DNA, 436 bp, Mus musculus
  source 1..436: mol_type = other DNA
agtttactgctttaagtaagcagcaaagtagacagggcaggcagggaggcacttcttgttctgtgaaaatcagagagcctttgatatgcattttagctaatgtcattttcatgaaagacagtcatctagagaatacatttagatgtctttttaaagtgatacatgtttccattctcaaagattgggaaaagatcatctcttgtttaaaggcattgctttagaccattgtattatacatgtccgaatgacaaagtaactattcctctcggagtgcttatttaacagtactttggatgaggcatatttaaagaaacttaaacattaatttcattcacttcagacccagacaagtgtgtgtgtgtgtgtatttgcacattgccaatctctcagtgactctgtagcaatcaccctgttagagcgtgctgcactgcagttt

SEQ ID NO: 43158 - DNA, 353 bp, Mus musculus
  source 1..353: mol_type = other DNA
caagaagtgcctccctgcctgccctgtctactttgctgcttacttaaagcagtaaactgcagacagtttagatttattctgcattggagcaaaatttgaaaaaaaaatacagattcatttccattctagagactgtcattctagcttgcagaagctgcatcctttgagaaggcagagagcgaaatgatggtctccatctttaagacttaggctccagtcttagtctgtgtctgtaaaatcaagctttgaatttaatacatcttccgaagaaactttttaaaacacttgcccttgggacccaggacctctgtggtaactgagacaagttttcaactggaaacttctgttacaga

SEQ ID NO: 43159 - DNA, 546 bp, Mus musculus
  source 1..546: mol_type = other DNA
cagctctaaagcctgggcatctgagagctcaaagctgagagcacttggcctcggagagtaagcacccctaggactcgaggtggtaccccagcgcggggcgcgggtggcggggccggggcagcgcgccagtttcctctgattaatgatgctcgcgctgccgcgcgcgtggctcatgcgcttttctccagccccagcgcctggcgcacagagcaggtgccggctgcgctcaagcctcggctttgcgtggtggcccagagaccgggcatcactgagcgtcccctcagggccatctccctccgcagaggggtcgtgcccgcccggctggacgcgtctttggctggcggggaggagctgggcgctgcctgggagcctagccagccctgtgggagggcatggccgggtggggcggtcgggagcaccactgaggctggctgactccggcgggactgcgagagtgaccctcaggtgggggagggacagggacagccagccccgtgcactcgctccctgcagtcacctcctcccacccgacctggggaagtggcc

SEQ ID NO: 43160 - DNA, 463 bp, Mus musculus
  source 1..463: mol_type = other DNA
gttacccagggaggcctttgtaaaaaatataaaaaaaattgcttaagtacgactgattgtactaaatagattctagacactgactacaagtttcataatgatttgtggtgtcactctttgtcaaattgcgagtattcttttaaattcatcttaggatgtttcttaaattatctcttctaagaaaggtatattgacctataaaattaatttttgtaataaaaaaggaaaaatacaatcaattaaaaatattttaaaaagaaaaatagaatctaaggagaatttaaaatcttcttgcgagttcgaggccggcttggactacaagtcagttccaaaagaatctttttgaaaatttaataccgcctgatcccaccacgcaggcgccgcacaggcgagcccaggtgagcgacgctttggtggcaccatcacgtgaccgagcggcgcgcccctccgactgcgcctgcgc

SEQ ID NO: 43161 - DNA, 487 bp, Mus musculus
  source 1..487: mol_type = other DNA
gttctctgagtcagttaccaggaagagaattatttatctcagaggctgacagtaaaggaaagcataggacttagactttaaaattactgtagcattcagtaagcactttttctgagccccaaggccttctcagagctgtctctgcagcctggatagagggtgcttagctcccctgcagctgcgcactggaagcaagctacggcagccagaacgcttcctgcataagcttctgttgtaaatattaaaaggtaatgaccaaaggatgaaaaccttttttaaaaggtgcaaaccagctaatccatcagatcatgtgattgctactgattacatggatatcttatgattgaacacatgccttgtgttttgatgattgcattaaaagtctgctcttagattaaattccaggcatccgttacaagcagctaaagaataattttgctacaaaaacgagggttttcagcaagaccccagacttttgcggtgcaga

SEQ ID NO: 43162 - DNA, 488 bp, Mus musculus
  source 1..488: mol_type = other DNA
tctttaagagttaacaaaaaaaaagtttattttgaattgttctgatttcttaacagagtgattatatataaagcacaagttttaagctcattaatttctccatatgttatgagatgttaacaaaacatttgctgaaacagaatgtaattttagattatttatttatttttcccattaacaatcttaaattttgtcttcatgtattcagaatccgtgcatactccggaaggagcctccgagtcacttaagagaagagactgcttgctttcatttctgttgctactaattatgtacagcagcgagccgctgatgcagctatttatatggattttcatatgtagtaagaaaaatcaaatctagatttataaacctctagtatgaaatgcttttacattttttatagaggatacattgtaagtgcagatgcatggagaatcatgaggcaggagctgccataagatgatgtcaccttgcagctgattggctgt

SEQ ID NO: 43163 - DNA, 259 bp, Mus musculus
  source 1..259: mol_type = other DNA
tttccaacagttaataataaacctgtcaaagtctctatgttttgttttagaaaaacactagttttcttcacgttaggaataacgagggtgtcacacactcttgtgctagagacaagcccttgtatatacaagctgacctcgaactcagaccagcatgcatcttctgcacaaggggccgacggaagtaggacctggaaccacttcctccagtacgcagaggctcacgggaatccattccggccgcttcgccgtgactgcc

SEQ ID NO: 43164 - DNA, 356 bp, Mus musculus
  source 1..356: mol_type = other DNA
agtctctatgttttgttttagaaaaacactagttttcttcacgttaggaataacgagggtgtcacacactcttgtgctagagacaagcccttgtatatacaagctgacctcgaactcagaccagcatgcatcttctgcacaaggggccgacggaagtaggacctggaaccacttcctccagtacgcagaggctcacgggaatccattccggccgcttcgccgtgactgcccacacctcttccgccgccaggccgcgacaccgcgggggccgggcagcgccgctcggcccaggcgctagtgccgccgcgaggcgcggggccgcgaggggcgggcctgggaggggagcggccgcaggg

SEQ ID NO: 43165 - DNA, 626 bp, Mus musculus
  source 1..626: mol_type = other DNA
caagacaaggtcatatatatcccaggctgacctcgagctcgctgaggatgacctatctggtcctacaggtgtacaccaccatgtggcactggggatggaacccagggcttcatgcacccgaggcaattggctgcctttaaaaactatttattttatgtatatgagtacactgtcattctcttcagacacaccagaagagggtaccagatcctgttacagatggttgttttgtttgtttattttaatagagagaatccacaaagggagccccagggcagccagctccctcctcagagctgcgtggggcaaggagaagtgggcgggccgcgtgcctacggatcgcaggccaatagcggtctccgagcccaccttgaggccggggcggggcgtcgggctggcgtcaccaggacaacgggcgtcgccggcgccgtgtgacttcaggctgtgggcgcgctcgcggccatggtgagtctggggcccgcgcctgcggggcagcggagatgctgggcgcctagcagagaagcgcctagggctgctgggcggggcagggcagggcagggccgggtcggatgaggccgggcgcgtcagggcagggcagagcgtgagatcggtcctgagaaaccagg

SEQ ID NO: 43166 - DNA, 540 bp, Mus musculus
  source 1..540: mol_type = other DNA
aagtacttaggattccaccttagccacttggcaccagtttaaggataatactttttaatcaaaggaagtagcttatagaataaatgcatgtttcagaatgtatttaattggaagcatgcaagcgatttcattgatcatttaaaacggcctcaagacaaggtcatatatatcccaggctgacctcgagctcgctgaggatgacctatctggtcctacaggtgtacaccaccatgtggcactggggatggaacccagggcttcatgcacccgaggcaattggctgcctttaaaaactatttattttatgtatatgagtacactgtcattctcttcagacacaccagaagagggtaccagatcctgttacagatggttgttttgtttgtttattttaatagagagaatccacaaagggagccccagggcagccagctccctcctcagagctgcgtggggcaaggagaagtgggcgggccgcgtgcctacggatcgcaggccaatagcggtctccgagcccaccttgaggccggggcggggcgt

SEQ ID NO: 43167 - DNA, 508 bp, Mus musculus
  source 1..508: mol_type = other DNA
tcaccattactgtattaatcttaacaatgctattattctctattgattgagtaattgagtcgaaatttccagtgagccgctgctggagaggcaggaccctgtgaactggaagggaccttctgtcccaggtgggaccaaccttggggctgataagcgtcttaagacacttaagagtgcagcttctcattctaagcgctctggaggtcaccaagatctgagtgataatgatgatgcctttgaaggaaatatttaaattagatgcactccctctatcagctattaccaccacgcccaggctccgtgcctgccaggcaagccctctgccatcctgaggaccgaggctagcaaacttcttcatttaaaaaaccgttcgtttaaagaagcttctgtctgacgacggtcctcccctcgggggtacccactgcccgccctccaggccccgggtgcagcccccacagctcccaggtgcccggcgcgaaggcggagccggacggcagccgcctgggtg

SEQ ID NO: 43168 - DNA, 430 bp, Mus musculus
  source 1..430: mol_type = other DNA
tcatcgctaccaagtgatgctatctccttagtttaaagcgattagttaaataaacaggtattataaatttaaaagttttgtgtctttaatgatcaaaagtgggatagaaacatccaattaatctttctacattaattatgtctttaattgaactattaaggacagatagacacatattttttttttttttgtgataaaacaccatgaccaagtcaacttgttaaagaaaatatttaacttagaattttaagtttcagggagttagaatctgacagctcacattttgatgtgtggatcaaaaaagacctttgtgaagtaggcattttaacatggttctttagaaccatgtagatgagagaaaactaactttgtagttggttgttcttagatcaagaacattggcatttatgataaccacctagttatgttc

SEQ ID NO: 43169 - DNA, 460 bp, Mus musculus
  source 1..460: mol_type = other DNA
ctctcagagttgcttatcaaagctcaacaaaatgatatattttctcttaacttcaaataagttctcatggcagaatgaagaggagcatcatgaagcacctatacatctaaagtcagtctcgttggcttcgtttttcaagttcaagccaaagccacaacggagacaaggcactatgactcttatgtcagtgatttctaacccagataatgaataatgtatgtgatataagaaagtaactcaggaattaagaacaaggggatcccaggtcccagcacctgcaccaggatgccttgaatacttaaaatgaagtacgtactgagttgggtttaaagccggattgttttctatcagaaattataacttgatgaaaagagctaactttttctcttctcagagtgactttgaagggcctctagttcctctcatttttgacttttaaactgaatgagaagaggaagag

SEQ ID NO: 43170 - DNA, 388 bp, Mus musculus
  source 1..388: mol_type = other DNA
ttgaactgagttcgtcactagccctgtttgcagtaattctgaaattctgtctggtcagagttgatgcttgccgtaaaataaataaaggccaattgtgaggatactgacagtataattggctgggcgcccaagccaccggacagcgtggctctctgcagaccagcggcgtccccagagtgcacgaagggcagagcggctgccacccgggttagacttggggtgaggtcaaggccactccaggccgccgccggtggcggcgagccagcgggagcgcgcgcagcaacggacaggaacgcggcaggcgggcggcgcgcacctcccccggaaaggccgggagacccacagcttttccacgcggtgcttcaggaacggccgcgcccccacgtgc

SEQ ID NO: 43171 - DNA, 272 bp, Mus musculus
  source 1..272: mol_type = other DNA
ccacggtgcacatatgtcagttgaactgagttcgtcactagccctgtttgcagtaattctgaaattctgtctggtcagagttgatgcttgccgtaaaataaataaaggccaattgtgaggatactgacagtataattggctgggcgcccaagccaccggacagcgtggctctctgcagaccagcggcgtccccagagtgcacgaagggcagagcggctgccacccgggttagacttggggtgaggtcaaggccactccaggccgccgccggt

SEQ ID NO: 43172 - DNA, 451 bp, Mus musculus
  source 1..451: mol_type = other DNA
aagggtatgtgtatatgtatgtgtgtgtatatatatatatatatatatatatatatatatatatatatatatatacatacatacatacatacatattttacaaaagggtatgtgtatatgtatgtatgtatatatatatagttttgaattctatccctatacctttgctgtaaactatttcaaagtgtacagaatcagggtttctctgtagccttggctgtcctggaactcactctgtagaccaggctggcctcgaactcagagatccgcctgccttaaacccgcagcctattatttatggcaggcttagcgatgtaaatttgaaataaatttgaactatagtgggagttagaaattaggcgtgcatacattcttaaagtgataaaccaggctggcctgcaccaggcacgcccatctcggtcccccggcgaggaggtctgccggacggggc

SEQ ID NO: 43173 - DNA, 351 bp, Mus musculus
  source 1..351: mol_type = other DNA
taagtgaaataaataaataaataaataaatgagataatgcctaaaataaatgaatattgttattgactacaactcattaaactcatgtatatttaagtcaacgtcaactaaagcagaggtgtccaacttggccatagctgagtcacacttatggggcccggcttctaaggccagagcactgaggactgggcagccgggacaggctgaaggtgaatggccagcccctgaatcatcattgctcattcaggggtgccgccattccggaaggaactggacctccactcgcagcacagagcctcggggcggggcggagctgggggcgggtcctggcatagggtcctcaacaacccc

SEQ ID NO: 43174 - DNA, 178 bp, Mus musculus
  source 1..178: mol_type = other DNA
aggctgcctgctggttacctctgggtagttacctgacgaagtcaccttgtaagtcagactcattttttaaacaagacccagggctttgatcactctaagacttgaaaagccttaaagttgttcaggttagccttaattggtatatcacagtgtcacatcacatacccttcaaagcacc

SEQ ID NO: 43175 - DNA, 531 bp, Mus musculus
  source 1..531: mol_type = other DNA
atttaaattctcctctagggtatttatcacagaagcaaaaagtctaacacaaatgcttttaatgtctgtttctctccgtgaaatgaacctctgttattataaatgctgtttgttggtcattgagcaaaaccagaaccagttcagggttaaagcctttgccaatagtgagattctgtctcaaaaaattacttgaatctaaatcattgtgcttagtaatcgtgatgcatcaagcttttagagaaaccgcatgcataatgcagtctgaatggctttttcaacttggcttaacaaaacagctctgaaactttgaaaaaaaaaaaagccttttttctgggggaggtggcctcctctaacactgaaatgcggaacaaaaagctagtgtacttccgggtttgcagaaggacgcgcttccggggccgaggccagccctaattcccacgcccagctggccccgccccggaagtagcgtctcccttggccgctacggtgttggcgctgttgctagacgacgagcagtaacttcgtcacttc

SEQ ID NO: 43176 - DNA, 439 bp, Mus musculus
  source 1..439: mol_type = other DNA
agagctaaccctttttcctttcaaagtataatctacagagtgaaattttatacacaatttgtttatgtattttaccgagttaatttgacagagggacagtaaaaagttctgagagcagcctttccaagtctttcttctgagagccttaaagtttctcagaaccgcctggggcaccacccagatggccgcggggcccgtcagtgggtctgggctcccagacgtccagaattcagagtcgtttagttccatgcatccaactgcacaactgtgcgattggtcggtctcagctttgtagagtcctagaggcaaagattcagaatgaagtctttttttctttctttctttcttttttttttttttaataaacggaagagctgaggcctgggggcgatcgtctcccccgcggccggagcgggggaggagggtggattaaaaggat

SEQ ID NO: 43177 - DNA, 416 bp, Mus musculus
  source 1..416: mol_type = other DNA
tcacgtgaacgagctttcaaaagtcagactatcatttagctaatcaagttctagtagagaattatgactcctgtagggagtcttttcagatctcacaggaatctgaaacatcagacatggtgggcatagtgatgtgcaccggttcacctgcctggtaaagactctagcctgggctattgaaatggtccaccttgtcatcgtccttttagaatttaaggagggggtgggcagcgctggatatcggttaccgccccactgaaaggtgggaagctgcttcgcttactgacatgcccggcacgcccggcgggcaaccgggatgacgggtggtgggccgcgcatgcgcgacccggtctgctgccgcgcatgtgcagcagcgccctcaggcttggtccccgcccccgcaggcgcggtcggct

SEQ ID NO: 43178 - DNA, 326 bp, Mus musculus
  source 1..326: mol_type = other DNA
ccttgtgatctctggcagttttaaaaatggttttatttcttttatttttaaatcagaccgaaacgaaactaaaaactgaaaatgaattcaattctcaggaagaaatgactcagaatagttttctggtggatggacggatggatagatagatcgatagatagatagattaaaaatatagataaaatagatagattaatcaaagtgtaatttaaaaaatatttctgagttcgaggccagcctggtctacagagtgagttccaggatagccagggctacacggagaaaccgagtcccaggaagtgacgccccctaccgctcggccgaga

SEQ ID NO: 43179 - DNA, 277 bp, Mus musculus
  source 1..277: mol_type = other DNA
gtctggtcgactttgacagtggtatcattccagagccagtggtacccgatacccaactctggcaagagagagtatgtttttgtggcacaggtgcgtgccccgtgcacacacatgtgacctgggcggtgcgctcctgggagaggccagggccccaggcgtccggtttcctgcccacgcggcaggggcttgcggggcatctgctcccgagtcctctccgggtccggccgcagctgggaagagggagccgtgcgccccgcccctgaggctccgccccgtc

SEQ ID NO: 43180 - DNA, 228 bp, Mus musculus
  source 1..228: mol_type = other DNA
ttccatcatgagacaaaagaatctctcctcttttctctatgtcctgagatagacgaatctctcttcaccggtctggtcgactttgacagtggtatcattccagagccagtggtacccgatacccaactctggcaagagagagtatgtttttgtggcacaggtgcgtgccccgtgcacacacatgtgacctgggcggtgcgctcctgggagaggccagggccccaggcg

SEQ ID NO: 43181 - DNA, 302 bp, Mus musculus
  source 1..302: mol_type = other DNA
cagggttctgcgcagcactcacctgactggcacacagctgcccacaggagatgtcccaaagttgtggagagcgcctagaagcctctcgcgaaacagcgccggctttggtgacgggccacgtccctagaggccagccagagcctaattgtggctcgagctagaaggagaggaggtgccgctcacccttagcgatccggtacgcgtccctgcacccccgagagctctcagtccctgggagacaggtgctgtggccgcgcggcggcgcccccgaggggaggtcctggagtgcccgccctcacccg

SEQ ID NO: 43182 - DNA, 286 bp, Mus musculus
  source 1..286: mol_type = other DNA
gccgcggcaaggggcatgcccttgacaagtgcctcccatttttatttggccaaggataacctgggactccaaattcacacaggatagtgacactcagcagcaggagctcagagctccgcacgtggcccgcctggacacatcccaagggcaggggtggggcgacaccggaggctgacccggccacccacccggaccaggcgtgcgcagtggttcctggcagctgtggccctaggcgcctaggcagggtggcgggcggggcggggtcgcccggagcgcctatactagg

SEQ ID NO: 43183 - DNA, 277 bp, Mus musculus
  source 1..277: mol_type = other DNA
tccagagctaataattttaaaaatatttttaagtgtgtggtctgctggtgttcctggagacaagaagaaggcacaccctctttaatattaatagaagccaatgccaaaagcatgctagcatagctgccagctggcactgcctccccagcttactctatatgagagcagagaaagaaccacggtatatggacatgtgtgtgcatgtacacatatgctcaactgtttcaaatgtaacataatctaatttttttttaaaaagttaaaagcaggcggtacc

SEQ ID NO: 43184 - DNA, 463 bp, Mus musculus
  source 1..463: mol_type = other DNA
ccattacatgtacacgtgtgtgctcacatgtggaattagagggtaactcaaagccatcttgattttgctttttaaaagaattaaaacatttttattttatatgtatgcatgttttgcttacatgtatttaagtgtactgcacgtgtgcctggttcccgtgggtgggtgctgggaaccaaaccaccaagagcagagagcagccattgaccgctgaaccctgtcttcttttgagctaggatatcatgtagcccaggatagtcttaaactcaatctgtagctgcaggtgaccttgaatttcagatctccctacacctttatgtgttgagccatctcagcaaccttagttacttatgttgtgtctggatacctgacaaagatgtcagagagacagaaatgctggtgttcagttcactgtctcttttttgtcttcccacctcagttaaggtgatctagaatacctcac

SEQ ID NO: 43185 - DNA, 272 bp, Mus musculus
  source 1..272: mol_type = other DNA
tcacgtgacccaggttagcctcaaactcactgtctagttaaggatgacattgaacgccgcggcaaggggcatgcccttgacaagtgcctcccatttttatttggccaaggataacctgggactccaaattcacacaggatagtgacactcagcagcaggagctcagagctccgcacgtggcccgcctggacacatcccaagggcaggggtggggcgacaccggaggctgacccggccacccacccggaccaggcgtgcgcagtggttcctgg

SEQ ID NO: 43186 - DNA, 431 bp, Mus musculus
  source 1..431: mol_type = other DNA
tctgcctcctgggatgtagaaggaaactgacctttctgagcccagaaagcagttttgtaaataatatatctcttgtaagtcacaagagccagatctgtgagacacacgccagtccgtctgtgaagagagagacagggtctcagatagcccaggctagcctcacgtgcaagaagcacagaacatgttcttctgtaggagcctggtgaggcattcagcaacatctgtagctagtgcccactagatggcggtctgagagctcccaggcagggagagccatccaggccacagccctgtttggcaggtctataggcaaagggactgagcctcagcgtgttcctctggcttgggcagaagtgagacccgcagccaagctgctgggaaatggtggggaaaagccccgctctctttgccagaagtgtgacagtctatcc

SEQ ID NO: 43187 - DNA, 248 bp, Mus musculus
  source 1..248: mol_type = other DNA
acacaccaccgtggctattaccagttcacacacacatgtgcacacgtgtgcacacgtgtgcacacacacacacactgcggtgctcctgcaaacccccaaatttataattatgatttagcagctggagaggtcgcaggccttcattgattgaatcgggcagcgctgactttccatctttgaaaagtgaatgcacagctgtgttccaggccacagggtgttcccagcactctgatgggtgctctcatcac

SEQ ID NO: 43188 - DNA, 509 bp, Mus musculus
  source 1..509: mol_type = other DNA
ggatgttccagggtccacacttagattatgaaccttggcaccaagcacagaaatcgtcacctgtgaggtgttggctgtgagaatcccccagagtcaggctcacaagcccagggcatctggcaatggcagaggcacctgctgattgacagctgcacaggaagatgagaacttcagccaaaaagttatttctctgttatatttctcaagtatggatttactttaaaatcatttttactatgcttattcattagtgtgcactcgtgtctatgtgcaattgcataagggtagacatcagagagcaggagtctattctctccaccacgtggtcctggggatcaaactcaggtcactgggctggacagcaagcctccttacccactaacatttatatgaatttaattatgatgtttccctaactctaagtcttcataattgagtactagttaggagaccagcagctaagcttgtcagctgttcctagttgacaaggagcatttccttacagcctc

SEQ ID NO: 43189 - DNA, 695 bp, Mus musculus
  source 1..695: mol_type = other DNA
cggggacagagaatgtagcgacccagccactcactctgggcacagcggctggacccacgcgcctagggccccgcaccgcgcctgcgcgccccgtcacgtggcgggcgccccgcgctgagcgggttaaaagtcacggccgccgagcacccggtgctcgagtcggaatccgcgcggggaagcgagccgaacctcctggtgcccttccccagggccccgaacgggctcgcgcgcgaaaccgccacggccggcggcgaatacgaggcggagggggtggagggccattcagccgaagccccgcccaaggccccgctcgcgctcctattggcgcacgccgccattccggccccgccccttaacggacctgtcgctctgtgacaggcggaggggagtcaaaggttgcctgagctccgcccggactccagggggctccgcggctgggcgggcgggggaatgtcattgccgctccgagccgccgctcctctggcgccgtcccgtcggctctcgccgccaccgccgcctcctcagccgcacgggggacacggatggctagtggggcgcagggcctttgggttgagaccgcgacggtcgcggccactgttgaggcggagacttcggatcgctgccgcctccaccacccccagtgtcccggcctcgcggtgctgagggcgggagcgcgcccagctcttcctccgcct

SEQ ID NO: 43190 - DNA, 492 bp, Mus musculus
  source 1..492: mol_type = other DNA
agttcctacgtttcagttggctagagtggcaatatgaattcttgcagtcaaagaatgtgacatttatgtgtgtcggggacagagaatgtagcgacccagccactcactctgggcacagcggctggacccacgcgcctagggccccgcaccgcgcctgcgcgccccgtcacgtggcgggcgccccgcgctgagcgggttaaaagtcacggccgccgagcacccggtgctcgagtcggaatccgcgcggggaagcgagccgaacctcctggtgcccttccccagggccccgaacgggctcgcgcgcgaaaccgccacggccggcggcgaatacgaggcggagggggtggagggccattcagccgaagccccgcccaaggccccgctcgcgctcctattggcgcacgccgccattccggccccgccccttaacggacctgtcgctctgtgacaggcggaggggagtcaaaggttgcctgagctccgcccggactc

SEQ ID NO: 43191 - DNA, 116 bp, Mus musculus
  source 1..116: mol_type = other DNA
caggagccctcctccaggaataactcctggcactgagcagggcttaatgaggccttgtgtgtgtgtgtgtgtgtgtgtgtatacacatacaagtacatatggatgtagatgtgaag

SEQ ID NO: 43192 - DNA, 400 bp, Mus musculus
  source 1..400: mol_type = other DNA
gactccaccaccaaagacacttttttttgttgttttttttagtttcggtccttccaatgggaggctctcagacactctgggttcagacctactgaaccagaacctgcaggttacgtgattaatacgcacattaaactctgagacaaactcctggattttgttccacagtaaaaaacagtcctttacaacgtgatcacaatctgaaactaagctctagtgaagaagtgcttacctttattttattactgaagctacatttcagagctctctcctgggtctcaatggaattatgaagcccctgggactgagtttgaacttggagcccagaccaatccagcggccttgattggcggccggaggagctggaaggctctccggcggcgagaggtcctgcccagct

SEQ ID NO: 43193 - DNA, 518 bp, Mus musculus
  source 1..518: mol_type = other DNA
ctgtattataatgtagcagaatattattaggaaaaactctgacaagtaattatgagtttttgttcaatttttattttattctccaataagcgaataaatgtaaagatcactttgatttcgtttttaaagcttggcttccccacagaggtacccagctgagaatttaatgtgttaacagattttgaaaaagccttgaatacacttttctccctacttaactagaaaggttggcatgtgtgtgtaaatacacacacacacacacacacacacacctcaccctggtcggagcagggcagggaggctgggccatgccccacccaggcacttcacagagaagctggggttcggttccacccgcggctcggctgcagacgctgctcactgtgctattccagatagctagcagaggggtggcagcagccggaggaaatactgcagcttctggactgcgtgcccggctccctggagaggctctctcagttccacccactggctggaaggaggggaagtgagtgaga

SEQ ID NO: 43194 - DNA, 221 bp, Mus musculus
  source 1..221: mol_type = other DNA
ccacgctccggaggagcgccaggcaccacgctgccttctgaagcccgcgggtccggcagtctgcgtgactgctgaggcttctcagactccagcctcactagttgagatctgtagcggaaacccccctcccagctgcccggtccagtccggatgaagcagttttctttcccaccgcggaaaaaggtgtgttccagctgctctcactcacttcccctccttcc

SEQ ID NO: 43195 - DNA, 435 bp, Mus musculus
  source 1..435: mol_type = other DNA
gttcaacctccagcaccgcattgcttgattatagatgactaaaattcttcacccggtggtggaaaagagttggccatgggctccttttctcctgcacacggggcctgcgtggattccaggggccccagacacgcatcacaccacggtgacaggcgcctctgagctgagcagcacggacccacagtggaaaggacgcgctagagggcgccctgaacgcgcgcctcagcgcagccagcctgcgacgctgtctcagccgcctccccgcggctgggcgcgacacctcacccgccgcggggaccactgggactggtagtacgtacgccccgccgcggaggctcacgggactcgtagtgcgcctctgccctaccgcagaggctcatgggacctgtagtacgccccgccccgctagagcgccacttagcggcaccctatata

SEQ ID NO: 43196 - DNA, 444 bp, Mus musculus
  source 1..444: mol_type = other DNA
actaccactttggggactataacagttgtgagtattcttaaagagtgaactgacgtctttttcagatatgttatttacctgtacagtataatgatttattttgtatttttgcttaggatataattaatgctaaaaatgaatatgaaaatcacaattgaattatttaaaactgtttaaaacaaaaatgcaaaagcataggtctttaaaattatttcttgccttagtatttagttttagatcattttagaagatactctattcaataagttccatccatttgaggaattatttaaatcagatgatgaatagctctgcattgcagcactatatatcttatagtatatgactggtaggtttaggtaaaatagtacatggagagtgactctctcactctcatagaacttgatagtaactgtttattttccattctttagactataaagt

SEQ ID NO: 43197 - DNA, 317 bp, Mus musculus
  source 1..317: mol_type = other DNA
cgaggaagtggaaaactcgatgcttacacatctgggcttgagaactagaaatgaaactgttttaagattttgttcaatccaacttaaaattcaacacttgaaggaccactgttagcctgccttgcaacccagccttagactgatggtcacggccgctctgtgcgtctggccaggcgacagccaccaggcccctcctggctgtctccaccgtccgggcgagcgcgagcgatccactcaccctgaaccctggctacgtagggcggtccccaaggccaccgggtttcgcttccccagtgtttggaagccggctgaaaaca

SEQ ID NO: 43198 - DNA, 389 bp, Mus musculus
  source 1..389: mol_type = other DNA
aagctgagtgaagctttaattctatgctgagcagagacacactttcccaggcctgtgatttctcttctgccaactgaccaggcgggctcagcagcagggaagggcagggaagaggcagctgctccatgttttagatctgatcacgactggactgtccgcccaggagaggtctccagtgcaggactcctgcaggtggcttttttgagatatgaggcctaagtctcaaagcccacgtgcacacacgaggcggcctcttgggagagcatgcgtggccacgccctcttccctgcggcgtcccctttccatcaggattggcgtggccagttctcactgcagaggtcgcgctccggctctcccgcccgaggctgcgggcgagcaggcggctgcgc

SEQ ID NO: 43199 - DNA, 411 bp, Mus musculus
  source 1..411: mol_type = other DNA
gcctggactatagactcggaaatgccgtttccaagaaaatgatcccggaacaaaatgtcaaactgtgcacagttttctgggacaactgtgtctatagcctgtcgcggagagtggaaacccagccgccaggctaggtgaggcgctagccgcgcatcctcggggcacctgaccgccggcgccgggtggagacccgcgcccaggccctcacaaccacgccgaccccagtacctgcggggtccagcgccatctcggagggcggagaagcgccgggaggggaggagcctgcgctgggctgcgcgcgcagccgcctgctcgcccgcagcctcgggcgggagagccggagcgcgacctctgcagtgagaactggccacgccaatcctgatggaaaggggacgccgcagggaagagggc

SEQ ID NO: 43200 - DNA, 360 bp, Mus musculus
  source 1..360: mol_type = other DNA
taattcaatatcaaactgattatttcactaattattctgcccgcagagaggcgcagggaatcttaactgcacagctgctccccaccaaagatgttgggtcttcagaagcccacttcagaagctagaagctggagtctctgattcagacgcggaatccttttgcgaaaagtctttacgctaaaagggagggtgtgcgcagagacttcgggtcgctctccagcgagcagggagcttgtaaagacgccttcacgggcctcccgtttctccggcgccatagagcgtgggattatccaattaataaatacttaattgaattagtgccctagccatggggctgcgaagcccctccctggccgcaca

SEQ ID NO: 43201 - DNA, 296 bp, Mus musculus
  source 1..296: mol_type = other DNA
taatgttctgttcaaagaatcagaactgaatggatgccatccaggtagtaaggcagataattctgactaggcagaaaattgtggtctgcctaattcagccagactatttatgtttgagacaactgaaaggtatacacctttcgagagaattctaaacgatcactgtggtgctcagtggtgggatgctccctatttgacagcagagtcagcgcagacgccactgtgcacgcgcgttcacccgcacctccgccgcggcgctccgtagcaagcccctggcaagctccacgtcgaccgcg

SEQ ID NO: 43202 - DNA, 430 bp, Mus musculus
  source 1..430: mol_type = other DNA
ctgcccccgcccaccggttgacagggctgcaagtggggcctgcaagttggaggccgaaatgctcagaccctccgaagctgatgggcacctgctcacacccagctttggctgtcacccgtcctggaagtggctgaacccctcgccgaggctgcttatgcggactacacagtgtgagcccggtctgcagactctccacctggactcggggtgaataaacctccccgggcctcagccggcgatcccgctgcaccccgggcttccgccgagcactttccgcgccgcgcggccctctgtgccccgcacgcgcgcgccaccgccccagacgactcggccccgcacccctctccccggcgggcggcggacggcgggcgggcgggcagcgccggcggcggtggaggccagtcctcgggccgggacacacccacccgcc

SEQ ID NO: 43203 - DNA, 451 bp, Mus musculus
  source 1..451: mol_type = other DNA
ctggaagaggctcttcacctgtaaaggctttgactgttgttgtaagagagttagttcaacaataacattaaacttggcttgttaaatttatgtataatttaatttgcaagatgagctattgatgatcacataaccaaaatgaggttatgacgtaaactttatgcaacgtatacttcaccataatctccacatacaggggagcacacctggctgtgtcagggagtatggaagaacgctctgctctcggtcttgagcggttgcctctgaagaagagctttgtgtgtgagagagagactttcagtgtaagacacgaggtccagaacctggacccgggggtgcgcctgagaccgcgtccagcagggggcgctgcggacccgtcccgcccgggccgcccgggccgcccaccccgcgggcgcgcctctccgcagtccagtgccgcccgggcccggga

SEQ ID NO: 43204 - DNA, 348 bp, Mus musculus
  source 1..348: mol_type = other DNA
atcccaaccctcaggaggctgaggcaggaggacgggctatacagtatgacactgtctcactgaccactgggcacaggctggcccagagtttctggagtgtctagtcagagagaggtcttgcatactgtctgcaggcaggatgctccctggggacctctgtgctgggcagccagcccgagatgggaggtcggggtcagaaattctgggaggcagccccgggcgtttcctccccaacccgcgggggtaggggggcggttgcccacttgagctcgggggctggctcccagacggcttggtcaatatttattgacccctgtccatgctgcacagagcacggggtgtgtcctg

SEQ ID NO: 43205 - DNA, 309 bp, Mus musculus
  source 1..309: mol_type = other DNA
acctcctgcaagaggacgtctacatgtggcaggagtccagcccccaggagaagaaggctgccctcagcagggctgtggtgaggtcctgaaatggctctcccttggaacatctttatcctggggtctccaagaagagggacccttgtcttggggctccttgccttgaggcctgttgtcatggccagcccttcaccaggctctcaggggcctcgggagagtaagtttggttaattaactcagagggcctttgagcctcaggcctgacagagctgtgtcccagggcttcatctgtggaggtggtgaacgacg

SEQ ID NO: 43206 - DNA, 532 bp, Mus musculus
  source 1..532: mol_type = other DNA
aatggagccttactcattcttcatgcagtacagcgcccagcttgtggaaaggaaacctggggggggccggggagtgggaggcctgagtgccagccccacactgtgggggtgcgggtggggcttcacaggccacggaggcctgtgaggagagcccggctagactcttccaggccccttgcccaggcagccagctcccctcattagggagtgagggctcagagctaaagagaggggcccctctcttgaaaaaaaaatctgtgcatgcacgcatttcttagaagacagaccagactgcctggctaatcagccgctttagcagtgattcctgccccggcgaggccaggcgcccacaggcagggcgtggggccggcagctcgccgtaatgtctggccctggcgcacccagctggcccgagccccggccagggttggctagtcttcccggcccccagcaccgcgtcctttccaggtcccctggagggggcggggagaaggggtccggggggcggtacggtgttctggacccacccccg

SEQ ID NO: 43207 - DNA, 248 bp, Mus musculus
  source 1..248: mol_type = other DNA
agagcaggctggactcactgctagccctgggattaaggtgtgcggctcagcctcacaccctctattggctgggttctctagaggaaaggattcctggagagtcacagcccaggtctcaaacccagcctgagagcttcagagtgagacgctgtgttgtcaggtggcttacaattgcctagcagctcccagagattaagctagattacctagctggacgttaggaatgcaaacttttagatgacgacagt

SEQ ID NO: 43208 - DNA, 267 bp, Mus musculus
  source 1..267: mol_type = other DNA
cttgcaggatcccctggggtctgactggggaacccggtcttactcaagccattgatcagttaataaggccttggcagacaccttgcatacagaggatgctacatgggacactctcagagaccttttgtgccttgatagaacgggttcttcgaacaggaatcagagtcaggtcctctatctcccagtttacacttctttcaaaaatgtgcacaagctttttttttttttttaattatattttaaaacattttcttttattaaagagtc

SEQ ID NO: 43209 - DNA, 293 bp, Mus musculus
  source 1..293: mol_type = other DNA
acatgactttgggctaaagttagggctaagcaaaaagaccagagtcctgtttcttttgtgtgtcaacctgacacaagctggcgttatcacagagaaaggagcctcccttgaggaaatgtctccatgagatccagctgtaaggcattttctcaattagtggctggtagacctgagttcatgatgaccctgactaagacaaggagtgctttcagtatagaagacagttttttttttaaggcacacaagactggccacttgtgtgcctggagtagaatatggtcctctcacaatgg

SEQ ID NO: 43210 - DNA, 247 bp, Mus musculus
  source 1..247: mol_type = other DNA
tgcacgcgatcatgcacgcgatcatgcatgggtgatcatggtccgccgccacatgccattacaagatggcgctggctaccgctggccaccacctgaaacaaccaatgtgtgtatgtacataagggtttcctaggcctatataagcagcaccagttctggttgctggcaaataacaccctcctggtgttctggaagcacagatgggacttactctcagtagtactagcaggtgggctagattaaatat

SEQ ID NO: 43211 - DNA, 386 bp, Mus musculus
  source 1..386: mol_type = other DNA
caccgaagagctcagcagtgctgctcagctgaacactttgtccgcagcgcttctaaggccaagaaaaccagtcaaggcgctgcctgggcagagacaactggtgctgtttcttcggagaaaagacagaaaccgcttcctcccggatcctggaggcggcgagcttccggctccactcgggagcccgggcttctccacaccccggggcgcggtttgcacgtctcgagggtgtgaccgtgacgccgtgacgtcacctcagcgaacccggtcctgaaaggttttggcgcgggcaacgcccctccctcagcttctagaggaagcgccgctccttgcctcttgtccggccacactcaagatggcggccggggggcggcgagccgcggccaggc

SEQ ID NO: 43212 - DNA, 343 bp, Mus musculus
  source 1..343: mol_type = other DNA
caggtcatgtgtagataactacagctgcaacagtcatgtcatgtgcagaggtcagcattccacagtactcccacttagtctgcagtttgaacagttaagtgagtgtggaaaagacagttttccagtacagttatttaacatctgtggaacagatctagagcacctagggcagttttgccacacttgccccggacatctcgtgaggtttcgtctctggaagagaaggcagattggcctgcctagaaagatgttcttcttgtgatgcctgtatctgtcacagtcaataacattctcacgtaaattgctgcctaaagctgggttaaacattaatgtagctgccagc

SEQ ID NO: 43213 - DNA, 267 bp, Mus musculus
  source 1..267: mol_type = other DNA
tgctgtgctcagccccgggtcccaaaaccgagaactgattaagccccaaccgggttggctgtcacagaagctctctcagaaaacaaagccacattcctttgtctcagaaaatttatgggcaaggtcgtgggctttcccctttaaaaaggatagctaaaggtagactgagccttcgggttatgtacatgagctaccatgcatgtccatccaccttgatcggtgggccaaggcaattctcacaccttcgaggggaggtgtctagattct

SEQ ID NO: 43214 - DNA, 356 bp, Mus musculus
  source 1..356: mol_type = other DNA
aaggctcagtctacctttagctatcctttttaaaggggaaagcccacgaccttgcccataaattttctgagacaaaggaatgtggctttgttttctgagagagcttctgtgacagccaacccggttggggcttaatcagttctcggttttgggacccggggctgagcacagcaagcagagaagccatgggccgggctccgccttctacgcggctgcgcgctgagctcaaggggagggactcccttgaggctgaaagtttgggaaacctccttccccaatgtctacaaaaggttgtgcaaacttggaagtttccagtctgccaaggggtgagtgggcggccctcaatcagactcccc

SEQ ID NO: 43215 - DNA, 402 bp, Mus musculus
  source 1..402: mol_type = other DNA
gattgattgattattaattattattattattattgagacagatcttgtaactactatcccaaatttaattaagatttttatttttattttattttttagttgactctacacaggtcagacaaaagcaatatcttcggccttagactagactctgtcctggatcactttgtagaccaggctggcctcgaacccacaccaggctggtcttgaatttgagatcctcctattttagcctcccaaatgctgggattatattcgctgccttgctggtgggtagcgaccactaagtgccccagcccccactcgcgaccttcccgcaggcggcgccagagggcattcccgcctcgtgactccagtccagagtcctgcggggcgtggcgaaaggcgggctctggcgtctct

SEQ ID NO: 43216 - DNA, 561 bp, Mus musculus
  source 1..561: mol_type = other DNA
gtgcccaaggtgtttcaaaagatgccaaaatcggtcctgtggttctggaacccttcctgcaagcagttccttctcattttataaaagtgaaaatcaattatcacaaagacactgagttgcatccgcaggaggctgtgactcctggtgcgtggacatgcgtatacacgtgtatacacgtgtagatgcgactcggaacatgtggtttaagactggagccagcctggccctgtcaagcttgtcaccagctcttccattacatcagcagctgcaggtgaggatgttttgtgaataaactgcaaagcaggcaaggggtgccctatatgctgtggaccctgcatcagtgagtgtggtctgccaagcctcccaggctaaagtctctgtaggctctgtgcctcctggtgatctccagctgggaggatgccacctgcttgcccaggtgccctcaacagagagagacctcactgacctcacagagggcttacccacagggtcttcctggtatgacagacagggtgacccgcagggttgcctgcagtcactgggggaagggaaaccggaacg

SEQ ID NO: 43217 - DNA, 403 bp, Mus musculus
  source 1..403: mol_type = other DNA
agggaagtccgaggctcgagcaaatggggcggcgggggggagcgtccttcctcctatgacccacttctcacactctgattgtgttctgaacagatggattgctgaggatccttcagaaagcaggtcgccattcctgccaattaattagcccataaatggatggggaccaggagctacccactcactcaggggtcccagacggggcaggaaaccagccaagttgtgggcagtccaatcccaccagctcggagagcgcgccccgcctagccctagagtctggtgctgcaggcgcgctgtctccagagggcgcgggctggggggcggagccttgttcctctccggccccgcccccaaggggggcgcggaccacgcggccggagggcccgcctcccctccccctccc

SEQ ID NO: 43218 - DNA, 439 bp, Mus musculus
  source 1..439: mol_type = other DNA
ggcatgcatatccctatcgtctaagatgatgattttaacttcttttgagactcatttggaactcactatgtagtctaactacatcgacttatttatgtctggctgtacatacctgagaggacagtcagtcctcctaccaatggttcaggaattcccagagtctctggctaccattgagtactgttttcccaggaaactcgtaggagatctttgatggatcatgaacaagcatttactcactattaaatgggactaaagacaatttcttcagcacttaacccatccattaactggccaggaccagggatggaggtaggcgtgcctcccctgctggactctaggggacgcgcgagaccctcagcagcgaaggcctctgggaggcggttgcatgcgcgcctggttccggagccggcgattggaccattccggcctcggagcc

SEQ ID NO: 43219 - DNA, 339 bp, Mus musculus
  source 1..339: mol_type = other DNA
atgaatctgtacctacatgtacaccagtatccttgttggacagtcctggtcaggtcatgcccatgtccatgcacgtggataactctgtagcgaggcgtccgcaggtcggcgtgcgtccgcgtgggcggccgtctccagcagggcgcgcccggggtcagagtggtgggcgtgcgccccgccgggcagggtggctctcctcgcgagccaggcgggcgcagcgccacgtgcggagccccgggcgcgtcgctctggggcggagccagcccggggccccggagccccaggccgagcccaggcggggcccgcccccgaccccgcccccagcccgagcccgcgccg

SEQ ID NO: 43220 - DNA, 357 bp, Mus musculus
  source 1..357: mol_type = other DNA
ccagtggttcatgagcccctcagcctggaatggtgattggcttgattgtgctgatcaccaaccatagctggagcacagcactgcacacattccctgcagttcagagctgcactgatctaaatccttgtagatttaagtttctccagaaattaaaacaattggtttggtggccaagacaatcatcttgtcattgcttcatgtggggctcaacaaccaggctcaggtggccggcagagcccagtgtattctgtcttccctcacactcttaggctaaggagaaaaaccaacctgtttctttattaatgatgctttttgcagagttagattaagcactgattaaagaaagggagctctagc

SEQ ID NO: 43221 - DNA, 385 bp, Mus musculus
  source 1..385: mol_type = other DNA
ttttggggaatcattttccatccatgcaagtgtatctctttgaaattctgtattttagattttattttttaattagtttataaaggtaatgtttttgccaaaacgatcatttaaaatatattgtcaagttagcagggcctatgcgaacattatctcacttaacataatattatagctgtacagagaagactaccacaagttgtcctctccgctaaaataactaaatgacaacaacattttattattattatttttaaaacctataaatatggagttagaccagttgctaagcactggcttaagtggctggggcacgacttagcatgcaggcgctgggacggccctggggcttagctgcacagggacatccgctggcgcttcaact

SEQ ID NO: 43222 - DNA, 242 bp, Mus musculus
  source 1..242: mol_type = other DNA
ggtgagtttctgaccgtgcatattctaggaactgagccagatccccagttagcaccagggcagcagtcctgactgcagaagtagtcccgagcgcaccatgagagaggagtcatcgctgctcatggctgcagcccggctcaggtgatgaccggctgagcgggattcccagctctggccgcccaattcgcagcccactcacggccggcgcgcgcgtccttggcaacctggctgctgtccgggag

SEQ ID NO: 43223 - DNA, 367 bp, Mus musculus
  source 1..367: mol_type = other DNA
gcccagtctagcctaaaataaatagatagatagatagatagatagatagatagatagatagatagatagataaaggcaggcaggctgacccaacagccagacaacctgagtgtgacacgtagggccccaccagccccttgcaatgctccttagagaaggggcctcggatctggcctcgcaaggcatgcagggaggtcactgcaggcctcggggctgtgcaaccctccctggtgatcttccaccaccccggctcccgtgcagatggaagccctcgccgcccgccggctgctcgctgcttgcccgctgcgtggcctagtcacgtggggccaggccacgccctcccggacagcagccaggttgccaagga

SEQ ID NO: 43224 - DNA, 474 bp, Mus musculus
  source 1..474: mol_type = other DNA
gcttccacgaaggcttccaggaggaggaggcagtcctgaggactcggtgctagaacacactttcttctgccttccagcaatctctactttaggtatagggcagaggtgaaggccaggccctaggatgaccttttctgggtggaggcaggggaggagcttccatcgctcgcagcctcagtctacccagtctgcagctcgggactgctcggcgtggagaagcgggcatctctaggacccggctctgcacgaagctcggctccgcgatcttaggagccgagcgcggagcagcggcgtcgcggcccggtcacagtccgcggggaggctcgaggcgggggagggggcggtgcctccggggcggggccgaaggctgcgggctgcggggcggcctggcgggaggcccggcgtgcgtcagcgccgtgagccccggagttggagggcggagccgcgggcggggccggggctgagccagtctct

SEQ ID NO: 43225 - DNA, 295 bp, Mus musculus
  source 1..295: mol_type = other DNA
acctccatagacgacggaccatgccaggtcatggctctgtagaccaggctgcccggaactcaggttccccagcctctgcctcctgaatgctggagttaaaggcctttgttctcaaaatggtttaaacttcacatgctgctgagcagactcagccacccggcagcttctgtgtaccaaagctgtgtgaggatctcagaccctctgtacacatgtacatcggtgcatttaggcaggacagaaggtcacctccctactacacccgggggaggggagaatggaatcctgcttccacgaa

SEQ ID NO: 43226 - DNA, 202 bp, Mus musculus
  source 1..202: mol_type = other DNA
agcctgccaggtcccccggggctccgtgtgactgaggaagagacaggtgcacagtctgtcactccatctgtgacgactcattcccagagagtctgggccgtgagtcagagtttgttttatccaggactgagtcacccaccccagtcctccgggcagacttgggttgaatgggactcccctctagccggccagataaaggcag

SEQ ID NO: 43227 - DNA, 204 bp, Mus musculus
  source 1..204: mol_type = other DNA
gaaatacatgtgaagttcccaaggaattcctgagccccaggggaagctgagtagcccctgacttagctgctctctctgtgaatctctcctgcagggaaagaagagaggctcctgagaactcccaagagttgtgatggggtcagcgaacctgggcccagtgctgcacagggggtaccagaggcagaggggccctcctcatagaga

SEQ ID NO: 43228 - DNA, 355 bp, Mus musculus
  source 1..355: mol_type = other DNA
agcctggggcttgagagcccagacagggcagctcaggactgcctgtgagcttctggcctctgcaagaagctacattggtatacacgcctttaatcccagcactagaaaacaaaaaagaagaaatgtgaattgtatttttaaaaatttgtgtctaaagagaaggcattcatcctgctgtagaccaggctggccttgaacccttaaataaattaaatacaattaaaaaagcgctttaagaataaataaataaataaatatatttaataagaaaaatatttaaaaaaaaaaacggaccctgcagttttaagtgcagccaccaggtggcgatgagatctcgtcgccggatacgctatgt

SEQ ID NO: 43229 - DNA, 281 bp, Mus musculus
  source 1..281: mol_type = other DNA
ctgggcaggggtggcagccagttgtctctgacatcagcagcacctgagagtccgctgttcacagtcagctggcttgccccaagctctacatgcctgcagctctagttcccagggaggcagagttatgtggctccctggggctcactggtaactgctgagcagcagtaggcagtactgttctgcagagaaaccctgttttgaccctgcttatctctgccccagatctgaggtgaacctggttgcatagcacgctgtcccaaagctcttactgttccaacctt

SEQ ID NO: 43230 - DNA, 226 bp, Mus musculus
  source 1..226: mol_type = other DNA
cattatccttcaatttaaaattataacataaaaattataacatacaaattataaacataccttctcctgtctaagccataggccataggtttttaaattgacagataaaatatggattcagtctataacctgcatagatatagatccattgtagtgtttgatctgggagttaatactagtcattaaatttcgcgtataaaacatatagtttatgcattgcggaaag

SEQ ID NO: 43231 - DNA, 381 bp, Mus musculus
  source 1..381: mol_type = other DNA
ttgagacagagtatgactatagcttcaaattctgggatttgttccagaaccacctatggatgcgccccggcactccggaggcagaggcgggcggatttctaggccagcctgggacagccagggctgtacagaaacaaaacaaaacaaaaatagtctggtattttctaataagtcatctctagattacttgagacatggaatacagtaataacttactgggtaactactattttgtagttctcaaatgtaggaaggagccagtagctacttccggcctggggtctgtgcagcgactgcagccgcgcaggcgcgggccactttaacttccgctccgcgcgcgctacagcgggcccactcactgaatctgcgcgtgcgccagag

SEQ ID NO: 43232 - DNA, 510 bp, Mus musculus
  source 1..510: mol_type = other DNA
atttagaactgagatttagattttgaaatcaccgccgtagcgcttgctgccaggcagttgacactgacagggcttgctggatgagcaagtgcggccctagatttggggaccatggactgcaagccacacaggattagaacccctgagcgagcgtggctagctcagtaaattgttcctaggaagcctgacttcaatactagggatgacgtaggggtgctcacgatcgcgacccccgcaccgcactgcgccgcagcccgcaacgacccgggtgcgcgcagccccagcccgccccgcccctcccggcgcgtgccacccgcgcacccggggagctcgcgaggaacccgcggggtaggcggccggtgtcccggcgcaggcgcgctggtgtcgccgccgctcccgccagccgccccgcacgcgcccccgccccgcctccgcacgcgccgccgccccgggcgcctgtgattggcggtcagcggggcccgcaggtggcggcggccgcagtggcttggg

SEQ ID NO: 43233 - DNA, 749 bp, Mus musculus
  source 1..749: mol_type = other DNA
gttcctaggaagcctgacttcaatactagggatgacgtaggggtgctcacgatcgcgacccccgcaccgcactgcgccgcagcccgcaacgacccgggtgcgcgcagccccagcccgccccgcccctcccggcgcgtgccacccgcgcacccggggagctcgcgaggaacccgcggggtaggcggccggtgtcccggcgcaggcgcgctggtgtcgccgccgctcccgccagccgccccgcacgcgcccccgccccgcctccgcacgcgccgccgccccgggcgcctgtgattggcggtcagcggggcccgcaggtggcggcggccgcagtggcttgggctggcgctggctgggagcctggagcgggcgcctccctcgcgccgcgcgccctcgtcctgcccgcgctgcccggctcccgctgtgactgcggccccagctcgggcgcaccggcgatctgcagcctcgggatcgcgcgctggacgcaggctgcggcaggtgacccggggccatccgaggcgcggtggctgtgagcctggccgccatccatgagctccgccgcggacccactccaggccggccaccccgggtgagtcctccagcgccacgttgccgcaactttcgcgcgcgcggtcccccgcacctggtgcgcgtctggggccagggctgcgggacatggccagcctgcctggtcttggacttagcctcgacagagtcagatccgcctctttccgtggctacgggggcgggag

SEQ ID NO: 43234 - DNA, 493 bp, Mus musculus
  source 1..493: mol_type = other DNA
aagacctgggttctgttcccatggtctcataaccagctgttatggcacataaaaataaaatctttttaaaaaggaaattgtagtagcgattggacctactgctacatctaacatagtatgtatgctatctacctacaaaaaggttaagaattccaaatttttagtctactgctttggtctagaaagccaaccaccgaggcggcacccacaagggttctgcaaggaactcaggggtctcgggaaccctgggggctggggagggcggcggaggcgcagagcgcggtccccgctggttgcaagtccagacccccgggggcacgtttctcgccgttgcacccggaagcgcctccgcccggcgcctcgggcgggacggaccgcggctgcccgcagtgggctcccgcccgctcctcgctggcccccggctcggcgctccggggcggacgcgcggtgcgtgcggacggtcacgtggcggcggcgcgcggggctaaatacg

SEQ ID NO: 43235 - DNA, 333 bp, Mus musculus
  source 1..333: mol_type = other DNA
tccattatcatcatggtgggaaccacggagccaaaagttctacatcttgatcctaaagcaaacattcaaacacatgaatttgtgggcacccagggggtgcctcttggagactgggtgtctaggctgggttaactgggccagaaagacccatcttgaacgagggtggtaccagcgctttcctgaatgcagacaggatgtgactgcagtctaagatcctgccaagatacgtttttaggacagtacctacacgagggaagtaaccatgccggacaggccctggccccagcgcttgcgggaggcggtccctagcaggctgcgccacccgcaccccag

SEQ ID NO: 43236 - DNA, 395 bp, Mus musculus
  source 1..395: mol_type = other DNA
tgcccctggggctcagtgaccagctctgggttcagtgagaggctgtctcaggaaggcacccagtgtgctcaggagggagccccacttggaggaatgcctccataagaggcatatctgtgaaatatatctgtcttcagacaccccagaagagggcgtcagatctcactacagatggttgtgagccagcgcagtcagtgctcttaacagctgagtcaagacagaagcggccttaaatccagatttgcttccgccgaagggttaattatatcctgtgtatacagaagaaaactgtcatgccagtggaaggcctactgcgtaaaagcacgcacgtttccccgtcgaccaatcggtgggcacgctggacgtcgggggcggggcttctgccgacacatgcg

SEQ ID NO: 43237 - DNA, 368 bp, Mus musculus
  source 1..368: mol_type = other DNA
catgctttagcctacattgtagaaataagcttttcctaccttatcatttttctgctattttaaaattgtgagccaccatatttgcaagagcaacaggtgttattaactgctgagtctatgaaaatactttatcaatgttgctatttaaaattggtaccagagagatcgctcaagcgaatttgatttctgccggagcgggcaacgcttgcgcacctctcagatcttcagagcagatgcgcgggagtctgcgcaagtgcgcaggcgccctgagcccctactccgctggaccgacaagtggtggggcggtgttatcaccgagatgaggcctccggaactcctagagcggccggagtgcgctcgcgcttccg

SEQ ID NO: 43238 - DNA, 403 bp, Mus musculus
  source 1..403: mol_type = other DNA
agcccacctttaacaggggcgatctgaaaatttgtcactggagtaaccagtttctatttgcttggtggggattttcttgtttgattcgagatttagcccagaacaagcagcaaggttatctttgtggctctatagtgcctgagagacctaaagcagacacttagagcgccacagtggtgtaccgtcacactgttacgaacacacagctaacaagatttcattactgtgggaatcgccctctgagggtacacacaaacagatagaacatctttttttttttaatggaaaaaataagcaacgcatttattgctaattgttatggtgttaaaaacacacttctgagatgtctaatgtttaagcatttgcttcccaggaggcggggcctccttgaaggaagtgggag

SEQ ID NO: 43239 - DNA, 527 bp, Mus musculus
  source 1..527: mol_type = other DNA
caggtgactggccgttcatgaaacaagactattccataattttgtcaccaaaaacagatgacaatttctgtgaaattaagacaaatattgtcattacaatacctgatgaataaagaaacctgctggttttatgagctaatttgaaaataacataagcagctaaggaggaggtggttttataaaattagttgctaaaataattgagatggcaattggtgtctcaaggcccaatgggttcgacataaagtaattcattttgctgtaatcagaccacctgcagatcaagctttgcctacactgaatagtgtagaataatagtgagcagagacacacacacacacacacacatgctcagtctgtgtttgcactttgtgcagtgattaacaccttcatcgtttaaagtaaaactgtaattgtcagccaagattagggtgtggtccactttggactgggaaggaagactcctttacagccaatactgactctctaagacctgttaaaaataatttctttatgataacgtggaa

SEQ ID NO: 43240 - DNA, 497 bp, Mus musculus
  source 1..497: mol_type = other DNA
gccctgcctgcgttaattacagcgctgggatgaaagaaggcagtggggcaactttccctgttgccagttttgacaagtgccaatcgtgaagaatgggggatacaaaattagttttgaaaatttaagaggttaccactgacccagtgagtctgggccaaggccaggaaaggtggctgggccccaggttccctgtccggattccagaggcacagcggtgtggcggccggtgcaccggtgatggcagcctcgaacctgcgccgtccgaggccgcactccacccggcccgcggcggcggcccgctctcgatcaatggagcggcgtctggacgccccgccccggctcggcccctcccggcggcgcacgcgcagagcgactcggactggcggggactactttccccggcccgcccgcgccccgcccctcgtcctcgcgcggcggaacgctccgcgcggagcggcagcggcaggatacacggtgccgcgccgcttataaatcgc

SEQ ID NO: 43241 - DNA, 254 bp, Mus musculus
  source 1..254: mol_type = other DNA
gtgtggagtcctcagccctcagcctccaggcttagcttcccttcctggctacgtggcaggggacagcggccagcagggccaactcacagagaatcggataggagcacctgtgttgttatctgtgacatgcagggaatggctagcaaggtacaccatcaactgtggccttcgtcaggatccctgccagattcctacgagcacaccaggaagtctctcagctcagaggtgttggcctacagacaggtgcacctgct

SEQ ID NO: 43242 - DNA, 315 bp, Mus musculus
  source 1..315: mol_type = other DNA
ctgctctcacatcagaatggaagttggaggactccagttggaggccaacctgggctacagcgtgaaaccctgtttaagaaggaaacaactttaagtcccaccccgcaggcagcttgaaggctgggttatgctgccttcccggtggggatcacagccgatgagcaggctcagaggcatcggcgcgcagatggggaggggactggctctagccacgccaatctccggccactcaatcagcgccctgcatcgccggcgtcctattgcccggaagcgccgagggatgctcgccgggcaaacctgagaactgcccacgat

SEQ ID NO: 43243 - DNA, 375 bp, Mus musculus
  source 1..375: mol_type = other DNA
agtctggtcagctggaatgttctgcacaccacccatagtcacctctcagcattcaaggaagattttgcctggacaattttcctgttcagttcctatctagtctgaaatgtactgatggcattgccctcatggctggtcttgactccggggttgataccccaagaccacagcgctggcagtggggtccccaagccgccccagcgagcggtcccggcgcacgctccggggtgccaagtgggtcagagctttgggggtctcggagcctctcgctgcggggaccgaggacggtagcgctcgaggactgtcgcgcaggcggccagggcggggcggggcggggacggacggggagggcccggcgcgcgtcgggcggtgacg

SEQ ID NO: 43244 - DNA, 513 bp, Mus musculus
  source 1..513: mol_type = other DNA
cgcactacagcagagagagccccctctctccttcttgcttggtaagagtctttttctcagccaagatccccaaatcccataggtgcgagcccagcccgcatggctcagccagccagagcttgggagtgcctgagacactctctggcgccgtggaaagaaattacaaatctttttcccagaggcttttcgcagaaaggcaggagctgcacccgatcttacaattgtgtaagaatagaatccaggatgccaactgcaattgagttctgaaaaattgggagcccgatttccctctcttacttgtgagagcccactcaggtctgaggtggtcccagagaacacaaaagctcactgaacttggtcagcttctccattgcagataaactcctgtttttcaccgagagtggaggtggcaccctccctgaggtggactcgacccatgcaaagtgcccccctgggaggggctatcctcattctccctccagtggctgcctctgagcacgtgtcctgctggac

SEQ ID NO: 43245 - DNA, 583 bp, Mus musculus
  source 1..583: mol_type = other DNA
cgtagcgcgaagggctctgagtcggtaaccccgcgccccctcagatcacccgctaccggcccgcccgatcttggagacacagcgcgggacactggcaccctgatcctagtccctggggactccgggaagaccggtctgtgggcagcctgggcccaagaaagggtacaggctttggtccccgcgcgggggcgctggaacaacgagctgcgccggccaagtcgtgtccagctctgagtgcaccctgccctgggcggccaagaggaacccccagttgggactccccgaccccggctgccagatggttccaacagcgtgatccgctggaccccatcggaggccagccttcaggggctgcagcccgctcactgccaggggccgaggcggggaacactgggcggtgttgagcccagcgtccccgcatcggagagccgagaggatgctcgctagctagcagctcccgacgacgcgcacctctagcgggactctgtgctcacgcccccgggggccccggctccgccccctacctgcgccgaggtaccgcctccgccgtgccattggcgcctggagctgtgcctcatagcgc

SEQ ID NO: 43246 - DNA, 290 bp, Mus musculus
  source 1..290: mol_type = other DNA
gaatttctatgcatggggagagagaccatattgacattttctagctgtgcaaacagtattttgggaaccattagtctttccctcagcaggaacatggatgtggaccaccatggctaatacatgatcttgttgaaagaataagcaagcttacccttaaggggactttgctgacaaatgtgctctatagcccacctaccagcccggcagggagtccacgttgcttgcaggctgggtactctgccggcactgcctgctccatgagaaactcttctagaaccttctctatgaca

SEQ ID NO: 43247 - DNA, 397 bp, Mus musculus
  source 1..397: mol_type = other DNA
tgaattcagctgaggtcctgagaacttaaccacagagttctgtgcacaagcaaatgtctctgaaacagagacttggagaagcttttccgcataactcgtgtttacacacttcctgtgtacgcagtgcgcggcaaacagcggtgctcagcaccctccaggctggcacccacgcccagggagtgtcactccagtcacacggggcctagacgcctctggagaacagccctgtccgctccaggccaggcatcgtggggacgtcggagcctcttctcaccgctcgaggtgagactcgcacgtgggcctggggaggctgaggggagcaaacccgggccagccctggtagattcactcagacggtctgtttggcgtcgcttagcagcagcgaatgggagctcac

SEQ ID NO: 43248 - DNA, 428 bp, Mus musculus
  source 1..428: mol_type = other DNA
acttgagaagtaagaatctctgagtccccccagggagttctctagatcttcccttattttctgttctgtaaagtggagaaaatgctagtactttttaataagcaatacgactatgtttacttctgtgttacacctgtgtttgccacatgtatttgagtgcctgtgcaggcccgaagatctgaagagggttttaaaatttttttattgcctagaaagaatctagacacactcaagagaacagctaatatcagtgctttccggtttgatctgactggaaggagcctctcagttcccactgtactagaactagaagggtctgcaagagcaagcaagagcttgctcgcgcgtccaatcacaggtgtctctaacacccccgcctccacgcggggcggtgtaggcttgcgtcagcagcgcgcgactcgggggct

SEQ ID NO: 43249 - DNA, 586 bp, Mus musculus
  source 1..586: mol_type = other DNA
aggagagaccacggtggtagtccgtagtcccgccctgctgtcgctcggcctggcagcgttccttcgcagcctcctgccagcacagccagccccctgcccccacggagccggtgccagagcagcgagccgagctgcatcttcccagcgccgaggctgcgcggagggcccctcggccgggcctgggcctctggcccccacccgggcggcggttgctcggaggttctgcagccagaggcccccaggtcggctggggtacgggtccatcagagtcgcctggctcaggggagcaggtgggtcggggggcggcgcgctctgctcagcgacctcacgcctaccctggccccgcccatgcagagcagcgggaggacacccgcgggagggtgggatcgagcggtccaaacgctcccacgtcaccagccgggtcggtccggggaccccgaggctctcccgagggcagctgcatcgagacggcgcgcgtccgcgcccccagccagcacgcagggcggcctggccctttaagcgtccagacggcggccccagctgacgcgcgggctccaatcggcgccccgcgccccccgcccgccgc

SEQ ID NO: 43250 - DNA, 440 bp, Mus musculus
  source 1..440: mol_type = other DNA
cagcctcagactgagagccacctacctctgcctctcgagccgctggctgggcaccatgtgcatgcttggtgtccacggaggtcagggtgagctgggctttgaaccaggtccaatgcaaaagcggtatctcaggctgaccttgaactcccaggctggcctcgagccggcggccagcctcgtctcaccctggcgggcaagggaggcacatctggctccatctggtcctggaagcctgggattcagtgctgcatgagtgagccgtggttgacagctcgcacacgtctgcgcactcgggagatcctgaggggcggggcacgagagccctggcgcggaccgcctactccgaccccacaccccgctcggcggcgagacgaactctcgcgacgcttgcgtccggcctcgcgagctctggcgtggcgctcgccggctggccctcacgg

SEQ ID NO: 43251 - DNA, 712 bp, Mus musculus
  source 1..712: mol_type = other DNA
ctgtgtagcctctggccagatgcttccggctccttgaagctgaggaggcttctcaacacctgggtacaccagctgcatcgcagccctcccccagagggacacctggaaccccggcggcaggttccactccagctgtgggcgccccccgcctatggagcgattctccggcagagcggctgcagcgcccacgtggcccaaggcccgggcgggaatccgactcccccttttagccccggggcggcgccgtccggacgcagagaagctcccccctccgcccgtcacccctgagccgcgccgccgcgccgcactctgggccctgcacaccggacagatagggtcgaggaccccgggggaggggccaggtcttccagaccctgcaccgggtcccaaggggccgtgcgctaggcagggccctgcgtaccatggtgccgcggcgctgggagctcacagggccccgcaggatcgcgctgcccccgagggccgggcccgggccgctccatgaagcgccgcgctgggggccgcccctgcgcagggccccgcgaccatggccccgggggcgcggccggccgggcgggcggaggcgcagggccgcggcaagtcccggccgagcagctgcggcccgggagcctcgggcgcggcgggcggggggcgcggggcgccgattggagcccgcgcgtcagctggggccgccgtctggacgcttaaagggcca

SEQ ID NO: 43252 - DNA, 439 bp, Mus musculus
  source 1..439: mol_type = other DNA
ggcaatttaacccacagcaatgggagagagtccctgtagaatattagagatttgaaggtctaaacaccccaaatagtagaaccctaggaaattaattttctagcaggcttgacctggagcatgctaccccagggtctctggccctcagcagagttgagctgagacccttggattctagctcctctccctccttgaatgggagaggaaactgaaacagctacccttattgacttaaggagtttgtttaaaggaaggtctctgagtttgggcagaggaaactccttcccattttatagactaaggaatccagaggcaactgggttctgggtcgagagacctgctgactcaaggctgctcagagagaaagcctctgcccagctgtcctctgtgcgtcatgtgcaggaggccagcagctcctcttacaggttctgggcatcct

SEQ ID NO: 43253 - DNA, 523 bp, Mus musculus
  source 1..523: mol_type = other DNA
ccaaccctgttcagggtcggaggccagcatcatggcttctcagtcactcaggagagtatgtgggaggaagctggcctaacttcccagggtttttacaggaccctcctgggtagaggtatatgggaggtcccagggcctttccttgagccctcgcacgtgagaccctctactgtggggatctcaccccagaggaagactcaagagtggagatctcccgggccctgcccagcgggcctcaggtgggcttcggtgaccctgatgtcacccctggagcctccagcaccatggtccttgccagtcgaaatgctagccctaacacccgtgcctgtctagcccaggctcttggacctgccctgggcacccttgaggggtcacaggtaaaaggtgtgcaagcctgcacatacagtatatgggtgcccaggcagttctgcagagattgcctggaggccttcctggaagaggtcaagtgaggcccaggtgcccctgcctgagcctgtggcagctccctgtggccaagtgcact

SEQ ID NO: 43254 - DNA, 612 bp, Mus musculus
  source 1..612: mol_type = other DNA
ttgagggcccaacatctagccccagggtccagacattaggaggtgctgaccatgttcacacaagtaaatgtaataaaattagtttacaacctctgcagagctgcctctggcaagacggaatcctttctcttggagacaattgttcctctccctgaagtcactcaaaggcgctgagagtcttggacagacacgtcccatagtggggctgtcggtgtctgccatccccggagcccacaccagactcctccccaggcatgtgtgaggtcatgctctccggccaccaccagctccggggagggacccaaaggcgccccgacggcgcatgctcccgctcgggcgggccgctcggctcacctaagccggtctagcctgcgtgcgtggcgttcgcggagcccagcgaaccggtcgcgagaacctcgaggcaattggggttgggaggcagcggccgccaggcggcaccgcgccagcactgccgcccaggcctcacgtctgacacgaacagcgcgcgccgccacgaaccgggccggccccccagccaatgggcgccgcgctctctggcccggcctcgccggctgctggcttctgattggctggggcgagcagtggccgcag

SEQ ID NO: 43255 - DNA, 330 bp, Mus musculus
  source 1..330: mol_type = other DNA
tgttttttaaaatcttctaaaatgcaaataaataaataaattcataaattttttgaaaaatttagcattattaattttggcctactccaatcacaattatttccaaagataatatggttaactatgttaatgcatcccacggtggtgcagcctgtgtcatccagcattcagccagtctggactgtatgatacgaagagtggaggcttcgtaggcgtcttcccggacccctcagaggctctctcggcccccgtagacgcgcgcgaccgtgctggtttccctggtgacggttgccaaggcagcacatgccggcgtcgggaagggcggaggaa

SEQ ID NO: 43256 - DNA, 290 bp, Mus musculus
  source 1..290: mol_type = other DNA
aagtgatattctttctataaaagaacataaatatggttctgagtcacttctaaggtgtctttgaaggcaaagcatttgccaaacagagcactcttcagccgaagactgctgagtgtacagccagcagcataccatccatccatccatccatccatccatccatgcatgcatgcatgcatgcattcattcattgcaggcgactgggagacgaggctgccactttgctgacccgtgtgcacagacacagcacagtggggaatcccactgcagggaagagcgacccccgatgt

SEQ ID NO: 43257 - DNA, 520 bp, Mus musculus
  source 1..520: mol_type = other DNA
ggaggaagctggcctaacttcccagggtttttacaggaccctcctgggtagaggtatatgggaggtcccagggcctttccttgagccctcgcacgtgagaccctctactgtggggatctcaccccagaggaagactcaagagtggagatctcccgggccctgcccagcgggcctcaggtgggcttcggtgaccctgatgtcacccctggagcctccagcaccatggtccttgccagtcgaaatgctagccctaacacccgtgcctgtctagcccaggctcttggacctgccctgggcacccttgaggggtcacaggtaaaaggtgtgcaagcctgcacatacagtatatgggtgcccaggcagttctgcagagattgcctggaggccttcctggaagaggtcaagtgaggcccaggtgcccctgcctgagcctgtggcagctccctgtggccaagtgcactgcagcactcggctctgcctcaccgctctagcctccagggggtggggaccccagagctgg

SEQ ID NO: 43258 - DNA, 513 bp, Mus musculus
  source 1..513: mol_type = other DNA
cctcacgttgagtgtcaggaactgaacctggatcctcttgtaagaagagtaacaagtgcctagttttatcatgtataacatggaatgtttcctacatatgacttaactcaaataatttttaacctgtgtttgatccttggaacctgtgggcaaaggaaacaacaggtcccttcatgttgaataaaatggtaatacaaaattttaatattcagtcatgacacctgttatgtagttattgcagccttcaggaaattcaagaaacgtattgagggcccaacaagtctagccccagggtccagacattaggaggtgctgaccatgttcacacaagtaaatgtaataaaattagtttacaacctctgcagagctgcctctggcaagacggaatcctttctcttggagacaattgttcctctccctgaagtcactcaaaggcgctgagagtcttggacagacacgtcccatagtggggctgtcggtgtctgccatccccggagcccacaccagactcct

SEQ ID NO: 43259 - DNA, 312 bp, Mus musculus
  source 1..312: mol_type = other DNA
aggctggcacagagccacctttgagactggccaggagatagctgcccatgctattagattggagcccaagagcctcatgatgctcaaaaagtcccatgtgggcctcctgagccaactctttcaaaagtcttcttacaaagtaaagacctggagttatgccaggcctaagagctgacctcttccagttcagctggctgtccttttgtagaccaggctagcctcgcaacataactcttgaatatgttgaacataaaggtatatccttgatcgaagagcaatcttcctctatgaaggagggtcaccctcttgact

SEQ ID NO: 43260 - DNA, 380 bp, Mus musculus
  source 1..380: mol_type = other DNA
ctgcatctctactctaacaaagaaaagttgagggcagcaggagccaggcaagcacgcccattgctggtgcttgtctaaataagtctacaaattttttgcaccactttttttttttaatgttaaatgtctttgtggtacacaatgagatcacttagttcaaaggtttcttggaagagggaaacctgggccttggaagcccaggaaccgcaatcccagtggaagccccctcctcagcagaggcacagggactcatagggatgaatccagacatggctggctgccctctgttcccagaagcagacagcagagaatttcttaggaggcaaagcttttcagagcagagatttcccggatgaggattgtgagatttcaagtcctga

SEQ ID NO: 43261 - DNA, 190 bp, Mus musculus
  source 1..190: mol_type = other DNA
gttaacagcatttctgctttttcacaaccatctgtaactccagttccaggaaggcatggctatggaacaagtacatatatataagtatatatatatatatatatacacacacacacatatatattaaataaaataaatttttaaaatcttaaacaaaataaggtgaagattttgcagattttatacagct

SEQ ID NO: 43262 - DNA, 368 bp, Mus musculus
  source 1..368: mol_type = other DNA
gtagggtggaactttatatgccccagtacagggcattgaaatgtaaataaaaaagaattctaagttccaagtatgagacttcttaggagcagtcttttccagctgttagcagtgaggccagcaggatcctggagtattgattccttacgcccttgggcactgtgccgccagtggcagactgccgggcggcccctgtagaggcgcgattggggctcctctgagcccagcccaggcgctgaacccagtgggggtgggcgggagtgagactctttccttcctagcaccagcttctgttggccagaagtgggtagggcttttattatgaaaggggcctcccccttctggctgtgcaaactctggaaaggtcc

SEQ ID NO: 43263 - DNA, 444 bp, Mus musculus
  source 1..444: mol_type = other DNA
atgtgtatgtgtgtgtgtgtgtgagagagagagagagagacagacagacagggaggagtgaggagggtcccttaatatatacccccacccccacacaaggttccacatgacatttgggtcatcgtgtcagaagtgtcacaatgtccattatcagtttggttgtaaagccaaatggcagttcttaactgagcacagaagccttcagtaatgaccatgaacagctctgttcagtctttgtctcatctacagtgaatactttaactgctgagccatcaatagtctctttatgagtcttaaaagcaggtatggattattttttctctaacagattacatatgaagatttctgtatcttgtatttaagtttatcatcagaactgaacaccaagaagagcttctggtcttccccctggccgaggtccgagaggcgggtcccaaggcccgc

SEQ ID NO: 43264 - DNA, 588 bp, Mus musculus
  source 1..588: mol_type = other DNA
tgttttttcttcttctgtggatgcaggaacacagaaggaaaagtaggagaaacctggcacctggcttcttttcaggagccccagaggactagtctccatggctcattatccttccaggagatagagctgggagttccctccctgcctggcctggccagtgacttttgactctagaggcaagcctgcatttgcttctttctgctttagtggtaacaaaagcaacagaattcttgaaaaagtaaagaaatgtgtatgtatatatatatatatgtgcatatgtgtatgcatgcttgtgtatatatgatacacacacacacacacacacacacacacacacatatatatatatatatatatatatatatatatatatgcacgtgcatatgtatattaattttgttgtgcttcaagctagatggggcatgtgctccttgagctatagctctagctgctatgagagtaggatgtgctcaggccagggccaggacgccctccagtagaccctgagctggcctgcaggtgcgccgggttaaccccgccccgcccgactttcgtcacgatgacgcaaggcccgcgcctgcgcagcgc

SEQ ID NO: 43265 - DNA, 299 bp, Mus musculus
  source 1..299: mol_type = other DNA
ctctgagcaaaaaggatttaatagatattccattaaaatgattgtttttcaaaaaatttcaaacatttccaatcagataccaaagaatgagttttgactctaatttcagaattctgcggaacacccccaggggttggggtgaaggccttgtcccctgagaaaaggaaagcgtaaggagccttatcctttcccttccagcgaggccccacccctccggatgaggctccctttctgccccgagtgacagccggaaggccccgcccctcccggtcgttgacgcctcctgtcggccaaggcgc

SEQ ID NO: 43266 - DNA, 418 bp, Mus musculus
  source 1..418: mol_type = other DNA
tgaccggaggaacctgcccccagccaagggaaacatcccttatgcaacaccaggatgcctctatttgtttaatcacagtgagaaaaaattattaaaataatcccactcgagggtcttgcctgtatgtgcaccatatacattaaggtgctcctggaactggaattacaagcagttgtggggctccccctttaaatttatttattttaaagacagggtctcactgtgtagctctggctggctaatcaggctaatccaactcacagaaatgtgtttgcctctgtcatgagaatgtgtgtgtaattctagtacccacacataagctctccggagtctagagtctggcagggtggagtcctagagcttgcctagcgccccgtccagggcagtccacacgggcggaatgacgcattaatggtca

SEQ ID NO: 43267 - DNA, 523 bp, Mus musculus
  source 1..523: mol_type = other DNA
aaattattaaaataatcccactcgagggtcttgcctgtatgtgcaccatatacattaaggtgctcctggaactggaattacaagcagttgtggggctccccctttaaatttatttattttaaagacagggtctcactgtgtagctctggctggctaatcaggctaatccaactcacagaaatgtgtttgcctctgtcatgagaatgtgtgtgtaattctagtacccacacataagctctccggagtctagagtctggcagggtggagtcctagagcttgcctagcgccccgtccagggcagtccacacgggcggaatgacgcattaatggtcattattccgacggatgactacctaggccccgcggcgtcggagtgcccccgcctccgcgcgacaggcgggcagcgcatgcgtgtctgcgaggccgggccgctgggacgccgagcctgcggtggcgcggccgcgccctcggatcgtcccagcgggcggacgacgcatgcgcgggcggtgcggtcttaagggcg

SEQ ID NO: 43268 - DNA, 435 bp, Mus musculus
  source 1..435: mol_type = other DNA
cagaatccgttctctgcagagaactggagcgaaaagcaacgcccggtcgtgggtggttaattgcaaccatgggctgaggactggacttgcactcagaagaccactgccctctctggggagggtgggccttctctctcgccggtgcgctcccaggttcagctgcggtgatcacccggcactgcagctaaaggcctgtgttccccggcttttccgggaggaaagatggggtgcccatagcgggtggggcgcgccggctgcccagtcgggcggtcacgtgtccccctccccctcctactgcagcgggagttccaatcagagcgcgccagggggctcctcccgggcaggaaccaccgggctccgcggcgcggggtgggccgccatcacctgaccgcccgcccccgccccccgcgagtaaggggcggtggtagcgtctgc

SEQ ID NO: 43269 - DNA, 202 bp, Mus musculus
  source 1..202: mol_type = other DNA
tgtctctacctctcagtgctggaattacaaacatgtgttctaggaatctaatttaggtccctgaagcaagtggctttcatgagggctacttgatctctctctctctctctcacacacacacacacacagcagtgatgcacgtagagcagaggtgcagtgatgcacgtacagcagttctccccgttgccaatcagagaacggc

SEQ ID NO: 43270 - DNA, 319 bp, Mus musculus
  source 1..319: mol_type = other DNA
ctctttttaataaaaatcctctaacttacgactggtgaatctctggaacactttccttttacaaggtcagtactgattaaatattcacgaggcatggcctggcaagctggtcaaacttgacatttgataaattaaatggtccagaagtccaggtctggtgaggctctggccggggtgagaccctgtcacctccgggtgcagccagggctcttcgagggagcaagtggacgggcggaccacgtggccctcagccagttgcccgaagcgaggccaggccgggccagggtgggcagtatcctgcagggggagcagcggctct

SEQ ID NO: 43271 - DNA, 258 bp, Mus musculus
  source 1..258: mol_type = other DNA
aagttaaaacttcagaagttgtcagtcttcaaggccagccttgtctacaggacaatagtactgtacgacaaattcaagagtcccagcactcttaagcttgcgtgacatgtggcgcacagcttcttgctggttgaccaagccaagttgcaggtctggagatcagttacagacggtgggttacagtgtgagccactgtcccaaataattaaactatctcaaatagattagattgaggaaaactgcatctgggaacaccag

SEQ ID NO: 43272 - DNA, 449 bp, Mus musculus
  source 1..449: mol_type = other DNA
ttgagcccataaatgtgtattttataaatccaaagcacaggaataaaagtatttacaaaactataatagttaaagaaatttcaataaagaaagtcataacaaatttgaattctcagagaattgtcctctgagagggacctacccttttatagtaaataaagttctccatcttgttagatagcaaactttataacacaacactttgaggtgagatgacctcagagataaattgcctgagcagaggcagcccagggtacctttcccaggaaagctgtaacacttagaactgtacagttgcgggaaccttccccttaatggaaccgagctgtaacacaattaggaattggacccagatgttccctgggtaaaaaaaaatcttagcgttcaagattattgctcaccttggcaaccaagacttccggaatccaggaggtaccggaagtgatgct

SEQ ID NO: 43273 - DNA, 280 bp, Mus musculus
  source 1..280: mol_type = other DNA
gtgacttggcaagtacttccagccactggggatgtggcttggtccactacagaggaacacctgggatatccctaccctagagaccttctagtcgcttgacttgagggactaattgaagtggtgtctcactagagaatgtcacaaagccgagggtgaaggctatcccacaggaactttcttgagtaaaataattctcagaatgaccctctaggaggtccaaatgtgaacctctgacggaggatctgccaagccatcaagaggcattatggcatcccgggct

SEQ ID NO: 43274 - DNA, 194 bp, Mus musculus
  source 1..194: mol_type = other DNA
catacggccgtgttagtcacatggtcagtccatgcgtacgatacggctgcgttagccacatggtcagtccagccacattggccctggtggactgctggatctccaggaccagcattttgatcatccattaaataaagaaaatgatgactattcattatacacatctacttcatgcttgcaaataataaagcttc

SEQ ID NO: 43275 - DNA, 437 bp, Mus musculus
  source 1..437: mol_type = other DNA
accacaataataataataataataataaattaaatttttttcaaaaagactagtatgattttatcccacgtcagccaatgttacatagtgagaccctgtctcaaattacaatagtgataataacagtaataagaataataagtattacacataagacctttaatggatgctaaatgtttcgccagtgtcttggctggcgacacagcggggcttgaacacaggcccgcggctgggtcgtcctgggagagcctggtccccgagagccttggcaggtcctgtccccacgggagccactcgctcctggagcccaatgcccagggcgagtggcaacagagacttgcatgccttccttgcgcctgaggcccttctaggcaacgggaccctcagtccctcaggccctaggcagccggaggtctcagcatctctgtgccccaggg

SEQ ID NO: 43276 - DNA, 538 bp, Mus musculus
  source 1..538: mol_type = other DNA
catgtacatcatacattttcttaacatggtgtaggtgctacagaaaacctatataatagtggttgttccagttcttcttgagagctgggatcacagatgtgagccgtgtaatcatttaagatttaccatgaggaacccgcgctgccttcctctgggtttatcatttcaaacacacaaaaccaaagaatggcacagagatccacaagattatggtatggctctgtgtgctggtgtgcaccaccacttctaacggttttgaaatcttttgagacagttaagtacatctgaatatgaatagttgttaatttttctagagttttactgtttataatttccaaaattgaccttaattatatatgagaattaaggcaaatatatgaaggataggggtatcctctgtaccatcctttctgtaccatttgatattttgaagataaaaatgctgagggaattgggagagtgccgctgcctggcgggctaaagccctgcccgccctgggcaccgaggtgttcctagagaggccggcctgcctggggag

SEQ ID NO: 43277 - DNA, 611 bp, Mus musculus
  source 1..611: mol_type = other DNA
aaacaatataaagcctcatgctacacaactctttttagccaggtactataattattagatcaagtggctatatcacaatgcttgtgttcaagtgacttttggatactaactctgtcatactgtctacagaatttctctcagcgtataataagacactatgtcaaagactactttcaaataactattactgtctattactataattgaggcaaagactactttcaaataactattactgtctattactataattgaggtattttagtattagctaatcttagtacacttagtttacagagcacattatctatagggttctgtactaactggtttcaggaactcatgaagtcttgcatgttctttaaagttccctcctctgagggtaggccaccgaagggaacacattccctctcgggtgtagggtggccgaggcgggacgcccgcgctccgtgaggaactcgggttcccactgcgtgtgccgtcgtcgccctcgcggggcgccctaagaggtgacgccccgtagcaccggcatctgccaatttgcagccgggggccatggcgaccccgtccgacgcagatttgaatttggcgccgcgacggtctacgtcaga

SEQ ID NO: 43278 - DNA, 512 bp, Mus musculus
  source 1..512: mol_type = other DNA
ggggaatacccttttcacagcttctaagagtctagacaactaagtttgagtactcaactgtcattgtgttttcaatgttagcaggggttctactagtcctggctgattccttcaaagactcctgattcgagtcgtttaatcaagtggcttcggtctccttatctgaaaaaggggacgacgctgtcaatcaccttgctcaggtaaagtgctgtctagactagctactagggctaggtcgttttcaagaattcctggacccgagaggccagacctggggtccggctggtcgcgagtgagggacctgtcagttacgtcggcaccgaggaatagagggtctgactcggggcgactcccgcggcctcaccttggtctctacggtgggcccctccttgtgggctctgcgggccgcacataggtagttctggttctgaccaacaataaatagcactcggcagacttggcagggtacaaagtgtctgtcgcccgcgcggacttctgacgtagaccgtcgc

SEQ ID NO: 43279 - DNA, 522 bp, Mus musculus
  source 1..522: mol_type = other DNA
ctgaattcaggatttttattcctttattacaaaaacaaaaactttttgagagtctcaaaaagtccttgggctggcctcaaactcagtaattctacctcagcttcagaagtgctaggattacgggtgtgtgccaccatgcctggctgccagccctctcaagtgagacaatgtctccctaagttgctcaggatgaccattaactgcctcagcatttctcaattactttacacgaacttagaagtggcagaacaaacgttttcccaaacaacgttctgtctgatccatcatctcctgcgtccacgagggagcagaggtgcttgttaggtgcgcatccatgtaaagtggcagacctccctttaggtacctctcggtagcacgcttccttcagtggcgcaccaggttcgccggagccgcaggctctccttagtcgcgggtttgcacacgctgcagggtatggggctccggactccactgcagcagattcgcctcactcgcctggctccgccctagccgggctcacgg

SEQ ID NO: 43280 - DNA, 415 bp, Mus musculus
  source 1..415: mol_type = other DNA
atggcctccatggtcatctatacatgcatgtgcatacatacatgcacaatagtaataataatgatgatgataataataataaaaaatttaaaagatggataattttagaaaatatgtgcacaagcaagtataacatacatacacatatacactatccctaaatggcatgttcatttccacaagaaggcctgtggttcttcctgtttccctgcaggtaagatgtagaaccatttggtgtaaggcttacacacattctcagtggacacagtacatctgccaatgaattgtatgtgcattatacgttcaaaatacaaacaaaaattccatcacttaatttaaaaaaaataaatcccagcttctggggtcacagaagatgatatggtggcagccactgcagagttgcatctaacccagg

SEQ ID NO: 43281 - DNA, 151 bp, Mus musculus
  source 1..151: mol_type = other DNA
agtatcgcttttaaaacagtggtataaaagatctctctgtagagcttgggcctggagccctgcctgccctgcctgaagctgtctggcccacaggtgctgtgctggcacttcatgttcttgaaaacaagtctactctcaggctgagctctat

SEQ ID NO: 43282 - DNA, 453 bp, Mus musculus
  source 1..453: mol_type = other DNA
ctgctttgaaaaattcttctcagtggtgaaaaggcatgccttctgccaaggcaggactgataggagttaaatgcctgccagaaagaaaaacactccctatttttctctattttatagctcagtctggccttaagctgggattacaggtgcgcactctggagcatgctggcctcttgtgcaaagtcaccagagtccattcacgtgccgctattctgattacaggatctcgggcactgcagcctcgggaactgcccccgctccctgatctccatcccgagagctgtggacatctaggcatacaggacgcactgcagcaaagcctcgggcgtccgtcctgaccacgtggccgccccgctcgcggccgccaccgctctcggcctcgcttagcgccaccgacgccatgctgctcagctcaccgcgcgcgctggcgtgtcatcagctcgcgcctctccc

SEQ ID NO: 43283 - DNA, 383 bp, Mus musculus
  source 1..383: mol_type = other DNA
ttaagctgaagggttacttttgtttaaaatagaacaccaggtaagtcagaaaagccccattcctggggttgaggagatggtccgtgcgcgcgctcggctacttcgactccggcccgagcgctcgggttgcgcgcttcccatccagtcccggctggggccccgcgccaatctggaggcagctagcagtcccgcgccgcctgctgctgccccggggcccagccgccagcgtccgcgatggcacgggcacccggcgccacggcttgccggactcggcctcacacggggcggtgcagcccatggagctccaggcggtggcggcagccgcggctgcgggagcggccaccgcgcgggctgatgacgcgcaggcgcggtggggagaggcg

SEQ ID NO: 43284 - DNA, 269 bp, Mus musculus
  source 1..269: mol_type = other DNA
gacctcaaggctttggatcttgcctttcagggaccagatgtttctgcattcttatgttgactacacatatggatttctctggatatgttcacattcacaggtgcttggaatccagcactgttgcaggaggcttcaggacagatttttgagggaaaaaatgtgaggttccctcaacaaaatatctgtcctgtcactggccaggctgccacagcagtgtagctatggctcccaagcctttgaggtccttgtgtccacagccttaagacgtg

SEQ ID NO: 43285 - DNA, 347 bp, Mus musculus
  source 1..347: mol_type = other DNA
atatgtacattaagattcataatataagcaaaattatagttatgaagtatcaatgaataatttcatggcattattagaaaggttgagaacctctggcctagaggataaggtaacctagctatatctgagatgcaggacagaccagcttctgatcactttggcatctttgggctcgttgcccaaataggaaagcttatcttgtctgacactaagctggagcaggcctaggcccctgtcccaaagtctttgaggaagcgtgggtcaccctcgctcttgctgagcgggcggggcggggtcctgcgcgcaggtgagcggcggggcagggcggggcgcagctgcgtttcggt

SEQ ID NO: 43286 - DNA, 542 bp, Mus musculus
  source 1..542: mol_type = other DNA
ggacactaggaaagcacccttcctcccaagaacgttttttgttctttacagaaagcatctttctgtgtccaggctggcctctccaaaacttggaaggtaggcttcttaatataaattgtatcctattaaattactgactctaacatacaaattttttgtgtctatgtgcacactagactgcaggtaaccaacaccaaaacttcagaattttgaggatttttttatgagttctcttcctgtaaaacaaaacaacgaaacaacaacaaaaaaacccatatgtatctattgtggtgaccagatctgaatttctgaactcagcagaaaggtacaagagtcctgtctctggctcctgaggtaggactttctcccttcttagtttctcctaagcagaaaggaggtactgatacagagggactgtctgggctccgggactcgctctgggcttcccgccctcgggggtcccgagccccgccctcccaattccccgcacccggtgagccgggggcggggcgcgcggaaggcggagccaggggaatcctctc

SEQ ID NO: 43287 - DNA, 365 bp, Mus musculus
  source 1..365: mol_type = other DNA
cattttcttgtcatgattcctgaaagacaacaaaacaaagctgagaactatttgcataacatttacatctattaggtatttaaatagctggcggctgtgtgggaaacgtaaactatccccagtcacctcataggagctaacccgagggaagcctggcgcacccttgactctccagcagcggcgggaaactgaacgcaactctctcccggtgcccagagagggacgccaaaactcggcgtgcgcatcactggcctgcagggggcgccccgccccgccccgctcccgccccgccgccccgccctccgagcctccgcccgcgcccctgcgcggcccggggcgggcgcagccggccagcgagctcccgg

SEQ ID NO: 43288 - DNA, 345 bp, Mus musculus
  source 1..345: mol_type = other DNA
aacaacctggtgttttgagctttaaatgatacaaaagcttctgggtggcacacagaatgaagttatacatacagttacaacacatgtggccttaaaaagattcttcctttaaaagatagagtgtaattacaccattgttcctttgcaattccttgatttattacaaggcaagaagctcttgctccatgcagtgcgtgctgggcgatatatgatggatgaaaagtgcttcaatcccagcccagtagcagcttctgtgacgctgagattcaaaccctggccttgaggcgaggcctgggcggggtcagccctgggcgagcagcttgggggcggagtcagcgctgtctc

SEQ ID NO: 43289 - DNA, 318 bp, Mus musculus
  source 1..318: mol_type = other DNA
aacttaatcatggagtgactggttaatgacgtaaaagaggctaggtcggctttgcaagcggagctagccaaggcaagagtgttttcgtaagaaaaccgttttaggtaactccgggtttcaaataggtattattttttcgcaaagcaacattaaaacgtaagtccttttcaaaccattgcgccactggcccggtgctgaggaggcctcctccacctttctctgcaacgccggcgttttggtccgctccaatccgcgcatcggaggcgtgcctcgcagcgtccgccgccggctcccgtgctcgcccgagaggcggacccg

SEQ ID NO: 43290 - DNA, 309 bp, Mus musculus
  source 1..309: mol_type = other DNA
tattcatgtatatatgaatgatagatagaggtatagctatacacaatttaggatgagcttgaaaattgcataaccttcttagtagaataagacggcagcttcctgggaccactcaggtggggttaagctggactgaatcatctgtgcggggtatctggacaccccagagaactccctttgcttcttagatacagttatcactgaggcccaagcgtcagctcactgtctgatactagaaaaattgataagtacatagatcagagtttttctgcagtctgtagctaaacatttagctaaacatttgttttg

SEQ ID NO: 43291 - DNA, 283 bp, Mus musculus
  source 1..283: mol_type = other DNA
attgatccattatctccttgtactaaggtcaaatctaagcagatttggaaaggatctttacctatcccaaaacttgaagattctaatgactcaagttagacttcataagtgaaaacttttctaaacctatgtttttgcacattttttttccaaaaaggtaaagttattctcttctgccagcgttataaaacaatgcagaggtctggaaccaccagctctggatcccggtgccgccattggcaacggcgagggcccacgtgtctccgttcccattggcaacgcg

SEQ ID NO: 43292 - DNA, 470 bp, Mus musculus
  source 1..470: mol_type = other DNA
gatgcaggaaatatatatatttagtatatatatatatactaaagcttaagaatctagagtttctttttttttctattacagatgaaacaaggtcaaagatgttaaatggcttgccaagtcacagaatttagtctaccaaactttactgagttaggttcattttttgttggactggcaaaaacatgagaattcttgggtttccatctgacgtacaggtgcaggcaagggccggtagttggagaccggagagtgatccatcaccgacttaggtgaactgggtggtattaattaaaggaaattaccccagtgggttaagaacgagtcactccgtggtatttgctcacagcagtgcagtaagagaggacacacgcagggccaaggaggggcgccttccccgcccgccgaggctagggtggggctcaccgttccccactcaccggcctcgccccgcgcgcgcgttaatgagaggc

SEQ ID NO: 43293 - DNA, 486 bp, Mus musculus
  source 1..486: mol_type = other DNA
aggacaaatcatgaaatctctttgttcttagtctctgtgatttgtatatttcaaatataaaaaggagttttaaaaaaatgaagaagatatcacctgtgagtttctataaaaaatataacatttgcatgttgagacttttcaaaactttactgaaacacctgtgattcataaagacactttagctctcaatgttaacatatgtgtaaaacttttctgaactttctgaggtaacagcatccgcagagtgctctgccatgtcatcatgggtgcatgtgttgagtgtcactgcagaggtgctccccattatagtttccatttcagtgggaacatttgggtctcgtatagaggtagtacctcacatatacttgttcttataaatgtgtggggggcctaagaagacaatttgctcttagactctgtgtgtacattgtccacactgaagatggttaatccagtgacaacacaggcagaggtggcctggcttcc

SEQ ID NO: 43294 - DNA, 252 bp, Mus musculus
  source 1..252: mol_type = other DNA
agaatcttattttccttgttacgttcttctttaagtcctagtaacaatagcaaaaggaaaaatgtgttcttgtacacctatctatccctgtgctgcattatcttgaattttatgtaagtgaaagcaaacagtatatacttttagatttcaacttttccatctattactaaatctatagtttcatatggatgcattttttccttaggtaatttcttaggaataggatgaagctacatctgagtgagaggttct

SEQ ID NO: 43295 - DNA, 354 bp, Mus musculus
  source 1..354: mol_type = other DNA
agattcttttaaaaggagaggtgtttcaacttttgttcattgttcactgcatccatgggtagaataaaatcaaatactagtttctagattctctaattttcctggaagtcagcaatgctagctcatgggcactgcctgccagaggcctgtgggggcagagtgtagggctataccaggtccttttcactgtggtaatggatcttcatacagagcctaatccatagcatgggctttgtgttggcccagaatcgtcagtggactgacaaaagtcaagtctactttctccccattaataagggagtatgaagcatcagaatcatgcttcatctttgactctcaaattaagtgggcagg

SEQ ID NO: 43296 - DNA, 231 bp, Mus musculus
  source 1..231: mol_type = other DNA
gtagaccctaggcatctgcttagtgacaagcctttgctgacctgaccagtcactctactgcttagaaatattttagacagattcaaggtgacatgttactgtgaacatcagcttttcttttgtaaacaggaaaggtgtttaccctacctcgggaatatggtgctactgaagggcaaattaaagcttcctaaaggccttaagtcgtactagctgtagactctccaactgggg

SEQ ID NO: 43297 - DNA, 394 bp, Mus musculus
  source 1..394: mol_type = other DNA
aagttaatatgttgtctcatatacctccagtataaaatatgaaattaacttaaaagatttcttttccttcctgtaaagtctggcagaacacaagcatttctagctagctgacattcccttcagggtgctttgcaactcatagcacatattttcaaacactgttttttaagtgtctgttaatgaggggacaaaaactgagaacttaggtccagcagtacatactaagttcatttttttttagcttcataaataaaacgtaatagtacaaaaatactaatgagattattctcagattgtttgtatccgaagcttgttgacgtctgccgtgagacatgccgtgaagcatgcgtgaagcatgcgtgaagcatgccgtgaggcatgccgggagttgtag

SEQ ID NO: 43298 - DNA, 352 bp, Mus musculus
  source 1..352: mol_type = other DNA
aaacttaatgggtattcattatttttttcacaaataataaacagtctggtgcaatgcttcaagttctgcacactagaatcctggagcttccaacacagcacttacctacctttatctcctaaattttgagattactaggaatggcactgcctttgatgtgacaatatggccacatctggtctcattttggccttggctgtcctggaactcactttgtagaccaggctggccttgaatccatagctaaacagtgttttagagctttatagtttagactagagatcatgtatacagttcatatcgaaaaaaaaaactttagctccaaaatttcattcttaatgaaggggaagtt

SEQ ID NO: 43299 - DNA, 278 bp, Mus musculus
  source 1..278: mol_type = other DNA
gggctctgcactcatgtgaccatgtctggccagtgcagtcctgactgtcctggaactcactaggaagaccaggctgtcctggagctcacagaaatgtttaatgctgattattaaaagcatacacgcctgtattgtgctctctcgtgccagatatcatgagagaagaaataacttagatatagatctccaaagagaggggatgcctctggaggttccaatctttagaagggggaggctcctagtgtagtgcttcatacaccattcttgtcattctgaaa

SEQ ID NO: 43300 - DNA, 248 bp, Mus musculus
  source 1..248: mol_type = other DNA
catgcagtgggctctgcactcatgtgaccatgtctggccagtgcagtcctgactgtcctggaactcactaggaagaccaggctgtcctggagctcacagaaatgtttaatgctgattattaaaagcatacacgcctgtattgtgctctctcgtgccagatatcatgagagaagaaataacttagatatagatctccaaagagaggggatgcctctggaggttccaatctttagaagggggaggctcct

SEQ ID NO: 43301 - DNA, 396 bp, Mus musculus
  source 1..396: mol_type = other DNA
aatgtaaatgagctaaataaatggaaaaggaaaaaaaagaattaagttcttctcctatttctactctttttctgaatagctaacaagaacttggtaaattcattgacctgtacaattagaaagaatatcagagattataccatatatttgtcactattcccagttaaatgcgtctagtgtccattagcacataggcaagatatgttcctagccttgggatgctatgtcacggtacaattcaacctacactttacattggttgagatctgataattgacttcatgacaactgtaggaaataaatatctgttacaaggctggctcagtggttaccctgagatgtggaaatgcaaacacatgtctttgtgaattatcaaaacctttacaaacaatgatt

SEQ ID NO: 43302 - DNA, 433 bp, Mus musculus
  source 1..433: mol_type = other DNA
cacataggcaagatatgttcctagccttgggatgctatgtcacggtacaattcaacctacactttacattggttgagatctgataattgacttcatgacaactgtaggaaataaatatctgttacaaggctggctcagtggttaccctgagatgtggaaatgcaaacacatgtctttgtgaattatcaaaacctttacaaacaatgattacaagttggtatctctctgaaaacttgcaaaacctgagaagctagcctttttaaaacaggaagctatgatgtttacatctctgtttcattagcagtgaaacttaagttactacttttattctcttttggacaaggacatatttaaattcaagagatgtttcttaggatagctttcatcttgattcctgtatagtatttaaagataacataaggtagacttagaa

SEQ ID NO: 43303 - DNA, 284 bp, Mus musculus
  source 1..284: mol_type = other DNA
cagtccactggaatagcaggtatacctttctgttttccttatgcagataaagattttaaggtgtaaattctcaaaattttgaccatttgtatagtgtaaatctttccttcattagaaagctttatttaagcgagatttgtaaccagattccaattcacagtgaaactctctgcgcattttattcattatgacctaaggcctcattagataggttctattgcacttgggttatgccaaataagcaagatttcaaaatttaaaagaagaactgtagatctttgggg

SEQ ID NO: 43304 - DNA, 342 bp, Mus musculus
  source 1..342: mol_type = other DNA
ggccagtactttccactagaatttccataacagctggaacagatctagtgataagactcagtgatgtgacatgcaagcttcatttggctatcacttaagggataaaacaaatttatagctgatatcaggaaaaagtagtcttaacaatcaaatctaatgatgttacattttatatcttataattattatagactttactgtttactcttttagccaggtgaaattataagagtcagagattaacaacattgccactccttaacctcagcggggtgcatggtatgtagaagataccatgataagtggttactgtgaagtcccaccacatccaagtcatgtggc

SEQ ID NO: 43305 - DNA, 483 bp, Mus musculus
  source 1..483: mol_type = other DNA
tcttgatgtttttaaaaattccaccaagatatagtcacatatatggcattattatattatcctaaattttatcatgcttgttccatgaaaaatccttagaatagatactcataagtgcctatgcaaaatgtgtaattttgtatgtcacttgttaccagatacatgagggaaaaaaagaaatatgtttagttttcaggaaaacatatggtaaacctgttgttttagtttacactgaagagtcacacagagcagtaaaaattatgtgcatctcactttaaattggctggaacttactttaatcaagagcaactacgagaagaataaattctcttgccatcagagatattgcatgcactacttgtctcttagacagtgactcttaattaatggatataagtgttcttctgtcattaataaggaaactcctcaaaaaactttcacttctattttctactctaagtgcaactttaaagaaaaaaaaag

SEQ ID NO: 43306 - DNA, 436 bp, Mus musculus
  source 1..436: mol_type = other DNA
ctgcgcatgcgcgcacggcctccacgcggcgacctgacttgctgatgccatcagcctgcgcccggggcgtttgcggatgcaaccacgccccttccgttgtcgcgtgtggaacccacggccgactgttgccatggcgccgctgacgccgcggctacagctgaaggtggacgagctcttccggcgctggctcggcgatcctcacacgcagcgcgcgctcagccacgccctccgccgcatccgggacccagggacgacctctgaccccgccgccgccgcgacccccgatgcgggcctcccgaccgctgccgcggcccgcgctgagaacgacgggacccaggacggtcacgtccgaaggagagggacgcgggacttccgactgcagaccgaaagtctcttgtcaatcattctgtgggggccccaccgcggacagctgtcc

SEQ ID NO: 43307 - DNA, 451 bp, Mus musculus
  source 1..451: mol_type = other DNA
acttcctgttttttaataattcataaactcacaaatctttggcttgtctgcatgcaaatgtggtaatgaatattcaaatgaaatgcaaatactcggtgggtaacaacagggtgacgtcatcattcatgaatatgcaaatgataagtaaataaatgacaattaggcaccaatgagattattttttaaacacgcatgtgcagccaacttggaagtaaacgcaatgcgcatgtgcgctgcctgcaacagaaacccaacgcgcatacgcatcgggaccccaagccggcgcacacccccagcgcatgcgagcccgtggccgggggaagtcactgcgcatgcgcgcacggcctccacgcggcgacctgacttgctgatgccatcagcctgcgcccggggcgtttgcggatgcaaccacgccccttccgttgtcgcgtgtggaacccacggccgactg

SEQ ID NO: 43308 - DNA, 266 bp, Mus musculus
  source 1..266: mol_type = other DNA
atcttctttatggttattgccaaattccgaagcaaccttcctgcaaaggccgttggacacagaatccgtgtacccatccaggatttaaactaatggctgactggcagcttaccttagtcggcaggtaccacggaacacttttcctaaggtcttggcttttccaagtcacggtgtatactgggaatgcacagccttctgggcttttaaaaaactgaaaatagtctttcttctgggtggggagacagacacacctatttctcccccac

SEQ ID NO: 43309 - DNA, 340 bp, Mus musculus
  source 1..340: mol_type = other DNA
gccagcgggtgatgcgggggccctatcccagtggagaatcccactagaacattctctccgctgtagaaaaagctcagaggaagctcacttgaagctctctttttctctgagagcttcagtctgaacttaaatgaattgttatgtacaacaggaatatgttagtgtctccctgtaattttacacacacacacacacacacttggttgcatgatgtttttcaagtaagcaaacgccaaaatgctccaggtcttgatgactttagcccctttcctgaggcacggtgactgcctgattacacaaacattgtctcactcccagctgtcctaggagagctgaggcg

SEQ ID NO: 43310 - DNA, 322 bp, Mus musculus
  source 1..322: mol_type = other DNA
aatatgttagtgtctccctgtaattttacacacacacacacacacacttggttgcatgatgtttttcaagtaagcaaacgccaaaatgctccaggtcttgatgactttagcccctttcctgaggcacggtgactgcctgattacacaaacattgtctcactcccagctgtcctaggagagctgaggcgagaggacctcccaccatatttcgtgcgccccaagattgctcgagaagcgcagttcgacagcccctcgaggccctgtcgctgggcacagatctccacctcggacgacttcctagccgggggcggtctctggggcc

SEQ ID NO: 43311 - DNA, 479 bp, Mus musculus
  source 1..479: mol_type = other DNA
gacctattcatgcctcattcatatgagtgaaaagcgaggaggaacaaaacctgctggtccccggggcttggactgtgagacacgtgtttctgttatttatgtcactcaaccaatgacatttgtgttctgacagccaagcttagatatagtcatttcaaactgtttgcatcactttttccagattaaaatctttctttaatgtaaaacatagcctttcttcgcagtgcctcttacatatgttgttaaaaatgcacgttgtctggaaattatctttcaggatatcagaacctacatttataaatctgcccttttaaaaaattagcgttgaagatgctttgagaaatagttaaataggagaaaggtcaaatgctttttttctttaaaaccaaccagcaatgtagcacattacagtgcttaatgcaccccatggtcattgatactgatcaagtgcacagttttaaaattgcatcctttgcaaa

SEQ ID NO: 43312 - DNA, 300 bp, Mus musculus
  source 1..300: mol_type = other DNA
tagctgtgtcttactacgcctggtgaaacacaggcatatctgacacacctgtttgaaaggtaaggcacctgtgatagaggtcctatttttgatgcctgaacccggccatgtccaaggcggagtttttttttttttttaaagaagagagaagagagaaaagaaaaacaaatttgactgctgtctttggcaaagctccagagagcaagcttaatctctttctctttcctcccgcagggccccgtggaggcgggcggggaccgcaacccgctgcagcggaccgaggagcggggcggggcggga

SEQ ID NO: 43313 - DNA, 364 bp, Mus musculus
  source 1..364: mol_type = other DNA
ggccatgtccaaggcggagtttttttttttttttaaagaagagagaagagagaaaagaaaaacaaatttgactgctgtctttggcaaagctccagagagcaagcttaatctctttctctttcctcccgcagggccccgtggaggcgggcggggaccgcaacccgctgcagcggaccgaggagcggggcggggcgggacaggcgagctgcagggctcggggccgccggagccggcgctggagcgcagcgcaccgcggagccagcgctcgggagccgcccctctcccgtaagctccgccgagactattccagggaccagacaagggaagccggggacctcggccacgcgccccgaatctgcaggtg

SEQ ID NO: 43314 - DNA, 423 bp, Mus musculus
  source 1..423: mol_type = other DNA
actaattctgctttgacagctgagaaaaaacatctggattcttgcatgtttcataagaataatttcggaatgtcgaagttcatggagctattccagtagctcttggatacttggatcacttgaaagatacgacaagaccttgtctctttgtcaatgacacgattgattgattgattgattgattgattgatttttaaccaccgggtgatcattaccagctagcaagagtttggtttttgtgccttcctattagggaaaaaaaaaaaaaaaagagccaccaaatctctattttcagtgttgtgctggagtgaaatgtgtcactcaaaccaagtctgtggaattatgatggaacaattaaaatttaaaacaacctttctcaaaattctgagtcggtaagcctggactcacctgcttatataagtc

SEQ ID NO: 43315 - DNA, 530 bp, Mus musculus
  source 1..530: mol_type = other DNA
ttcccacttgggtaatgtcctgtcagaacaagtttcacctgaaactaatagctcaaatttggattgacctgatgaatgaaagaattgaattttcaatgtgtattttcagaaatgtacattcccagtgaattacaggaaatctttgtaactggggaagattatagcatccattatgctccactgattttgaagaaaaacaatccatttaatcacacttgtttttgtggtggccttcagaagaattaagagacttcctttaagggaaaaaaaaaaagtttgtgttaaaacagtacttttatcacaccagaactgttgttgcttccggaatttcaaaatgtgatgttcaagtgaaatttaaaagcaatcaaggactagttaaccagttaattgcttgcccggcaaaattgacttcagatgtacctcaaactctatacagaataatttcccatagaaatcaggaaggcataggttatttctttctgagctgcctaaggaagttacaaatgtcagtgtggatggtgagctctgaa

SEQ ID NO: 43316 - DNA, 372 bp, Mus musculus
  source 1..372: mol_type = other DNA
gcttgtccatgcatttcaaaaacatggccccgagaactgctatcctttacttgctgcaagctcacagctctgccagcaaaccaaatgagaaatcagacgaatggcgttccatttcttacatctgttggggttaataaatatatctttccagcacacaagactgtggtctacaaagttactatgttattcccactagccttggaaattataaacttggaagactcagtcctaaaaccattgacgttaatctgcttaaggctacacttaggaccactacctcctgaggaaagtgcagaagggctggccatacaatctcagggcaagggctcagcacgatggccactggtacagtgccccctaggggcctcagtt

SEQ ID NO: 43317 - DNA, 402 bp, Mus musculus
  source 1..402: mol_type = other DNA
gagaactgctatcctttacttgctgcaagctcacagctctgccagcaaaccaaatgagaaatcagacgaatggcgttccatttcttacatctgttggggttaataaatatatctttccagcacacaagactgtggtctacaaagttactatgttattcccactagccttggaaattataaacttggaagactcagtcctaaaaccattgacgttaatctgcttaaggctacacttaggaccactacctcctgaggaaagtgcagaagggctggccatacaatctcagggcaagggctcagcacgatggccactggtacagtgccccctaggggcctcagttcctcccacgaggaagagtctagtctttctcccacgccagcccggggaagaacttgcagccg

SEQ ID NO: 43318 - DNA, 357 bp, Mus musculus
  source 1..357: mol_type = other DNA
aacaaaatttcaatttaagacttattggctgccatgttaatacaatgagtatttaatgaagaaaacagacaggccctttctttgctagtacgttcatttccccgcgcgttccccggggaaagagggcggcgagttctgttgatggcatcagctgacatcactggctgggatcatggggacgctgggcccacctcagcggtggcctgactgcaccgtgagccgccctaatatggccaggctcaggagcagcccaggagggcttcctttctccggctgaaggagagatttcaaccttgggttatcaagagaagccctgggggccggagcctctggtcctagcagcctagggggagatgc

SEQ ID NO: 43319 - DNA, 836 bp, Mus musculus
  source 1..836: mol_type = other DNA
accgtctgcagcggcaggactgacaagggggccgggccgccagcctccgggcccggccgctgagaagtttcctcgcctcagctgcacatggcttgcagaactttggctggggccgcgagcccaggctgggtggaagccgcagcgccgagctgcaggcggcggcagcagcggcggcggcggcggcgacggcggcagagcagcaggaggcgagcggctgggggggcggaggggctcttgccgccactgctctctcgccgcctctcccccccggcgggagccgctctcagctcggtcatgtgaccttaacgtaaccggacaggaaaagccccgccgccgccgcccgccgccgcgccggagacaccgaccgcggcggcagcagcaagcagcagcagcagcagcaacgcggggcagaggcggcggcggggacagttaggccaggccgcccggctctgcctcccctctcacgccccgccgcggccgcccgcaccggcgacaggtaagcgcgcaccgccaccgcgtcccggggcccacgtgccgcccccggcccgggctccgggaagcagcagggaggggcgggagccgccggagctcgcaaacggttccggcagcggccgtggctcccggtcccggggctcccggcgaaggcaggcggcgggccctagcgcgcggggcgccggggcgggggcggccccggcggggcgggggcggcgacggcgccaggcgccggggccctagccgcctgacaaaaccatccaggcagccgggcggcggcgagtcgcggccgctccatccggggcttcgcaggagggggaggggacggggcgcaaggggagggg

SEQ ID NO: 43320 - DNA, 167 bp, Mus musculus
  source 1..167: mol_type = other DNA
tcctgagcagtgtagacgacccagtgggtgaaccctacagaaaaaactgggtaaattttacattaatatcctttaggcacttctgacagggctttacgggtagcaacagggaaagccagggttgctttcttgctcatttagaatgtagaaggtactagaacatcaca

SEQ ID NO: 43321 - DNA, 479 bp, Mus musculus
  source 1..479: mol_type = other DNA
accgagttctcgttgaacaataatggcatgtgcgcgcacacgcaaaattaggacgtttttaaatatagagttattagtttgacccataccattaatacagtaggtatgagtccagagacaaccacagtgagctcgaactcactacgagctcaagctggctttaaaactagctaggtcctgacgccggccagcacagcgagccggctctctcccaccgaggtgggactcgaactctcagcttgaggatccggcgctcccgacggttttttctcccaagagcgcaagaaaaaaaaaccactcaactggcgtcgcccggggttcaacggccgcggttccagaaaggaagccgcttttgaacacaagggccttccggctacgcgagcggaagccctggaggaccggaggcgcacgtgttcggacggtcacgtgtcccagcttgccggcctggggcttgcagtgcgcctgcgccgcagcggggc

SEQ ID NO: 43322 - DNA, 401 bp, Mus musculus
  source 1..401: mol_type = other DNA
atatatattaaagcaataaaggagattagtagtgtcaaatttttaaaatgaaacctgcagtttttgagcattatccttaagcataatatgtccataccaaaatatattgtacatgagatgcagaataccactaagttcaaggtgatttcatgcaccttggcaccagcttctccggctggggaagcgcgaagcactgacctgtgcgcggagaggacgaccgcgacgcccacgcgcacgctcccgccgcaggaacctctgcgccccgccccgccccgctgcggcgcaggcgcactgcaagccccaggccggcaagctgggacacgtgaccgtccgaacacgtgcgcctccggtcctccagggcttccgctcgcgtagccggaaggcccttgtgttcaaaagcg

SEQ ID NO: 43323 - DNA, 460 bp, Mus musculus
  source 1..460: mol_type = other DNA
gttacatagaacacaacagattttatgagctattaaaattccaaaaggtctgaaaaaatttttgtttatccctagtaccaaaaaggaaaataaatttaaaatgctttttatctcatattattgcttcagcgtgtttgtctctgagttaaaaaaaaaaaagaaagaataacaaacaaaataagtttttaaaaagccagtcatgttggcttaaaggctttcagagtcagctcaggctaagctgttcaggtttccaaaatcaggaaccccattcattaatcagtgaggacttagctggttgagtcaatgagtgaaagagcgaggaaaatctgtgtgcagaaagttcgtctagacttcaaggaaagagaaagtgggttggatcactttttttttttttttgtccttctgcaaacatctatctgtaggcaagagagagaggaaggccaccccctcccctattatc

SEQ ID NO: 43324 - DNA, 229 bp, Mus musculus
  source 1..229: mol_type = other DNA
tggataactatagaaggcatacgtcagacccagagtctgcactgggcagggggggaaccaagatggcggccatgctttccgccacaacccctgtccctgggagacagagtttactaagaggagtctgaaagctattcctggaaatgcctatcttgagatagctcaggctgcagatctccagatgtccagatctctctctctgggcccaacaaagggttagcaatctttt

SEQ ID NO: 43325 - DNA, 469 bp, Mus musculus
  source 1..469: mol_type = other DNA
ctgcctagggtcctagggctgggtcacttaatacctaaagtagttactaaaccaggcctcctgtgtcctgggacccagggtgaggacacagtcagagtaccttgttaatctgtgttcgctttaacgcaaagctattttatggttccaactttaatttgtttacagacagtagtcagtaggatccctggaatgccaaaaatatttattgcgaagtctgacttttcactgaagaaggcttttcttgttaaatgacatcgtttaggaagaagatatcctggcatagtttataaacttgatctctgcacactttgactggcattctagtttatctgtgagcctgtgagcaccgggacatttctggctactgctgtccctcagcagacagcaaggctcccggactcccgctgccccagctcgtgcaggagcccagctgccttgtctgccgggaggggctgccaagtgccctgtg

SEQ ID NO: 43326 - DNA, 511 bp, Mus musculus
  source 1..511: mol_type = other DNA
ctcttattctaggaccttgaatcccagtcacagaatgtgtcctatatacataactgacagcttgccaggcagataggcaaaagaaagaaggatgcctctgcatctttatgtcaccgtctcaggacatatatctccaacctgttaaagatatgaggaattattacttcaacatcttatcattgtagtggtttctctttaatgtcagcaagaaagtatagctgtaagtctcaaaataatgttttttttgtccctcccccgcaagagcaaaataaaatgaatttgcaacagcagttcagagatctgctttgaaattcaaactattggccacatagatagtatatttaggaggtcagtcacatacaaattaaggattaagatatcatagacttcatacatactattctgtcaggaaccagcaaacagtttgctttgtgcttactaagtgactgccacctcttagtttccatggcatgaaccatctggtaaatttcagagacttcaggggctggag

SEQ ID NO: 43327 - DNA, 425 bp, Mus musculus
  source 1..425: mol_type = other DNA
aaacaaaaaaggccatgtttgactttgcctggctccggggcaacatgggctctcttgcaccaggaaaaaggttttgagaatctaagagtgctctcaaaaacattattgtgaataatcaagaaggcgtcttttcaagaaatctaagttttatatatcgaacaaaaaagtagaaagcctgcctagtctctcatcgttcccaaggccgacttgacagcccaggaaacatcaagtctttcctgggagcatcaggaaactccaggccattccatgctttggcagaaacactggctgccagcccgcccctagctctgtgtggtgacctgctcagaggcagaatctgctggggcgacctccgctggcggcaggagcagcagctgcagggggcgggaggggggaggcctaaccccctggtgtgcagcctggag

SEQ ID NO: 43328 - DNA, 438 bp, Mus musculus
  source 1..438: mol_type = other DNA
gactggtcaggtcccacccttctcaggaatttgtcaacagacttctgaagggtgacagttacctcagctgacaacacttcagcaccccagagttcttgcaagggttctcaagagtgcacacttactgggtggaagtgacatttggcatctccaacacatttaaatatgtatgaataaatggaatggatacacatttcaaaattatattacctaggaattttattgtctgtaatttataaacaaaaaatattaggtaaagatctgaaaatccctctctgacatgacatggttttcaacataagctaagtgcagcagccagggtcttgctttctgcctctgcatgtagatagagaactccccagacaggaaacatgatacacttacttccttttatgtaaacacaagtatacgtggggttgcgtgaaaattatttttctc

SEQ ID NO: 43329 - DNA, 511 bp, Mus musculus
  source 1..511: mol_type = other DNA
ttgacattaagtcccaattaaatgtatgtctactttgaggttaaaatcaatcctttgaaatcacattacagtctgatcattatttatttttggaatatttgatatattttacgtgtatactatagcataatagaaagatgcaaaatcatttatgactgctttttaaattagagtaggtttctagaaaactttaattcagatatgcataagcagcataaagttttttaaaaggcattaaagcaattgacactttgtgcacaacacaagttttctgcatttgttcctgaagaaagtccttattttctaaggtacctgtctataacattataatcatcttctagttcatctaaagattaaagcattgcacatccagctaagtacttttctttttttaaaaaagagttcatttcctctctcttgaacttgtttgctataaatgtatataaatcaggcatgatgacaatttaataagaacttttcggggagccttctgattgctcagcccgaagca

SEQ ID NO: 43330 - DNA, 434 bp, Mus musculus
  source 1..434: mol_type = other DNA
aacacttttaagaattcgtgtatgagaaaccctgttaggccgcgccctcagccttcggaaggcgccaagcaaagggacgccggggtcctgctgcgcgccatccccagggcaagggccccccagctagtccgccccgcccggagggaaccgccaggctcctcgcgcgcaagcgccaacccgccaactccgtagtggcggccgcgcaatacgagtggcagccgatggaggaagactgggggcccgcctgtgtccatcacagactttcccgtttgcgcagaggaccagccgccttggcgtgtgggaggagcccaggctccagggctggctccgcccccgcgccctcctattgggcgagcgagggcgtcctctcatgccgcctgcctattggcacgcttgtgctttgggcaccaaattcaaagattttaaaagtacca

SEQ ID NO: 43331 - DNA, 406 bp, Mus musculus
  source 1..406: mol_type = other DNA
atatgcctgtccttgaaaggttagagactggaagtctcacagccttgagaagcaagactgcagacacctgctgttcactccagcctggctcgctggggaacaggtcttgccaaactcggcctgagagttcagcctgtaggcggaactaggtggagctccaccctgagagacgaggcggaggaagcgcttcctccaggagccgacccgaccctgaggcgtgggtggtttccacgcccccgtggaggcggggctgagacggtggagctccgccctgaggggggcgggctgaggccccagacctgtcccatttggaggaggagctgagaatccggagcccctcccctggggtagggcggagacttggaggcggggcaaacgcgtccagacctccctgcccgcctccagg

SEQ ID NO: 43332 - DNA, 508 bp, Mus musculus
  source 1..508: mol_type = other DNA
ttcaccaccaagctgcgctctgctggtgagcagaaagattgacaatatggtccaataaggacgctttaggccccaggtttccaaaccgggtaattagatatttcctttattaacatttcaaatctggggcataaagaccaagggcaggctaagagttcttgacccctgctctgccctggagggattcctgggtatttctgggtaagccatcaataacgcagagtcttcccccaggcaagagggttgaagcaagcccgaggctaagggagcctgagtgcctgagaggcttgcaagcatggtcccagggactaggtgaggaggttccttcccacaaggccgcctgggcacagagacactgacactgtgagctctgtcgccgggcgggcacgccgggaagggacgcgacagtgactcacgcatccgagcgcccgcgggaggggaggacgcctcacctccggctgcgcggggcgaggggctgcgcctgtctcccggacgcatgcgctgcaag

SEQ ID NO: 43333 - DNA, 260 bp, Mus musculus
  source 1..260: mol_type = other DNA
tcctattttgggctcccattgctattcctctttcttatagaaccaagttaagaaaacaggtttgccaacagccctgtttgtttgtttagggtttctaggtgtagccctggctgtcctggaactcctctgtagaccaggctggcctgtgtgaagacctgagttcagttcagggccagccagtctgctgtatgcagcagtgggtaggcatgatgtgcatgcaatgatatgtgtatccatatctgcatgaacacacacacagt

SEQ ID NO: 43334 - DNA, 447 bp, Mus musculus
  source 1..447: mol_type = other DNA
tgggtatgcgcatggcatgcatatgcatacacagtgttgagacgaactgtattccttcagaagcacttgtgaacttagacatgagatctaacattttttaaatgcattcttgctcctcaaggatactcaaaagagctgtggagtttcttttggattctctatagtgggaagaaaaaacatttctgcttgattccccagcaaatcttcctaagcaggtccattcttatgcttcttcttcactaggaaaaaaatcagatgcaggcttctttcacaaaaattttctcttttagaaaaagacaattgtttctttgaaccctccagtcctaattaattgcatatggttagttgatcattgagattttaacagaccataatgcatggttgttacaaagaaacttagagtctctgaagtgcatagagactgaggattctgagttgctttgcgca

SEQ ID NO: 43335 - DNA, 584 bp, Mus musculus
  source 1..584: mol_type = other DNA
tcaggtttgtactctgaagaccgatgaatgtgagcacacagatttcagctcagccatatgactgagaatatatttaaaggtattttagcagcctctagaaaaccttatctacattctgaaatgacaccctttaacgcaaaaggggacaaataatactgaacgttggccaaaagtctacaatagttgatgtgttatctttttttcagaatgattgcttaaaagtaaaaatatatgttccttctaagcttgcttccccacagtctgtgagaattcagttaaactttctacaaccaaacatttatttccagtatttatagttaaaactatgggtatgcgcatggcatgcatatgcatacacagtgttgagacgaactgtattccttcagaagcacttgtgaacttagacatgagatctaacattttttaaatgcattcttgctcctcaaggatactcaaaagagctgtggagtttcttttggattctctatagtgggaagaaaaaacatttctgcttgattccccagcaaatcttcctaagcaggtccattcttatgcttcttcttcactaggaaaaaaatcagatg

SEQ ID NO: 43336 - DNA, 594 bp, Mus musculus
  source 1..594: mol_type = other DNA
atacatacatatttatttaaaaaaattcctattttcagtataaagttacctaccaacttttagaacattttaattgaatgcttaaaaattaaaaaaaaatctctgcttgttaacataaatgaaatctatttaaacctgaaggattttagtggaagaaaaatgaagttttctaaagctaaaattctgtctaatgtttgtatacatacatgtacacagacagattgggattcccttttttggaatctgatttcatatgacttgatgtttgtataaatcctcatgtctgatttgaatatttgaatatttatcttctataagacatgtgagaaatattcagagataaagatagaatgagatatgtatattaggctgcaaataagaaattctcaatcgaggggctttagagtctctgaagagtccaagaagagataaataatttttcctgcatatatggaaacaattattctccagttttacttaaaatagttgatatgatttagagaaaagataattgtttcttgaaatgtatttcatgatgttttcaaacttcaacaaagagctgctggaaacaggaagcggtgcatacatgcctgt

SEQ ID NO: 43337 - DNA, 552 bp, Mus musculus
  source 1..552: mol_type = other DNA
aagttacctaccaacttttagaacattttaattgaatgcttaaaaattaaaaaaaaatctctgcttgttaacataaatgaaatctatttaaacctgaaggattttagtggaagaaaaatgaagttttctaaagctaaaattctgtctaatgtttgtatacatacatgtacacagacagattgggattcccttttttggaatctgatttcatatgacttgatgtttgtataaatcctcatgtctgatttgaatatttgaatatttatcttctataagacatgtgagaaatattcagagataaagatagaatgagatatgtatattaggctgcaaataagaaattctcaatcgaggggctttagagtctctgaagagtccaagaagagataaataatttttcctgcatatatggaaacaattattctccagttttacttaaaatagttgatatgatttagagaaaagataattgtttcttgaaatgtatttcatgatgttttcaaacttcaacaaagagctgctggaaacaggaagcggtgcatacatgcctgt

SEQ ID NO: 43338 - DNA, 306 bp, Mus musculus
  source 1..306: mol_type = other DNA
gcaaatcttcctaagcaggtccattcttatgcttcttcttcactaggaaaaaaatcagatgcaggcttctttcacaaaaattttctcttttagaaaaagacaattgtttctttgaaccctccagtcctaattaattgcatatggttagttgatcattgagattttaacagaccataatgcatggttgttacaaagaaacttagagtctctgaagtgcatagagactgaggattctgagttgctttgcgcattccactcagagagtggcgctttggggatgctaaggagaatatcggacgctcagac

SEQ ID NO: 43339 - DNA, 327 bp, Mus musculus
  source 1..327: mol_type = other DNA
gcgggtatttactgaatcaataaacactagccactcccttacttcagaagataagtagttgtataccccaataacaagcagcttcctccttggatagggttaataggaggtaaacaccggttatagggttttccccagacccgcagaaagggctttcctctccctgtcagaggctgaataggtcattttgaaaatatgactattacattatgtcaaaacacaactcaaagagctgccattctggtgttattaattaggcagctgccactaagctgggacctcttcggagccaagcggcttcaggctgcagctccagccccggcagcg

SEQ ID NO: 43340 - DNA, 436 bp, Mus musculus
  source 1..436: mol_type = other DNA
ataagccctactccagaggaggccccatgttcaagaggtaatgttgtttttgggttttaaaagtgaaacaagaattctcaaagagcatttaaagtgacttcaaaattagtaataatgagcttgtgtctaagtaacattcattttagaaatgaatacgatgatatcttgatcttgaacttctggtgtttaagttctgtaaatgtgtttcctttattacctaccatagtccaaatctctttaataataaataatgcaacgaagttggattccaaaagggcctgatgggcccaaacacccacgctgcttagggtgtgatcaagccgcggagcagccaggcaactccggggagtcccctcctcctccccaccgggcgccggagaccgacagacctgcggaagtcccgccccggagccgccccagcacgccaggctccgcc

SEQ ID NO: 43341 - DNA, 374 bp, Mus musculus
  source 1..374: mol_type = other DNA
gaccacttcacctaagctgaggttgagtctcatcagatgtaaacatcatgagagattctaatgaacttttacactcagactttactcttaatgttgaacaacactgacatttatagttagttacaggagtagaactgtaatttggaaattgctcctgaaagatgagcttaagctgaaactcatctgaagaataacacttcccggtattcttccaccttgaatttatgccttcagagctgaaaacaaaccagagcctctgcttcatcaggaccgtgctgagacataggctaaaatgattattttggccccatccagaagccttaggttagtgcaccgggttggacgagcagaccggccgctcgcaacagctgacg

SEQ ID NO: 43342 - DNA, 526 bp, Mus musculus
  source 1..526: mol_type = other DNA
ggacctgaggtgtgtaactcaagttatagggacttcagtcctacacataaaataagattttagaatctcttctaaaaaattaaaaataatttttaaaaaaattagttatcaaagaatattaaaggtaattgtttcctgagttctaaatctgtaatgattttagttgataattgcataaaatatatttgatgataaaataaatatatactagatagtaaaagtataaaatccaatactaaaagtacaaaagtacattgggctgtttattgttgttgtttgcaacattttataataaagttcatttaaaagaacaaaaaccctaattttgtaaagaaaattcttctagaattacatacacagctattgcacaaatatattttcagtttctctgcctggaactcaccaggttggcttcgaactcagaagcctgcctcgttcagagctgccgacatgaaagaacatctcaaattctttcagcggaattggctgtctgcagcccagaactgcgcaggaaggggcgggcctg

SEQ ID NO: 43343 - DNA, 471 bp, Mus musculus
  source 1..471: mol_type = other DNA
tgaggtataatttacataaactcaaattacaactttcatttcatgtgtaaaactgtacacctgggaagacatctccattcatcctgtaggttctaggatttcctatatatttaagtataccatatacattcattttgcacctttgagaagcttttaaattataatccggttttataaattaacaggcctttgcatttgtatagattataaatccatctcttggagtaattgatctatatctctactaacgttcacatctactagagcagaaaatatattttctatttttggtgaaaaatttagaagactttaaaccctgtaaaacattatttcatatatgcagtggcttgcctgcatgcatgtatgtgtaccctgacacatgggtcccaggcttcataatcctaagccgcggcgcacagtgcgcagaagcaccccgagctcggccacgcccctccgcaggttccgcctgcg

SEQ ID NO: 43344 - DNA, 458 bp, Mus musculus
  source 1..458: mol_type = other DNA
aagactgaggctgtctcaatgatcagtggtagagcactggcatagcatggttcaattcccgtttttacttttttggtctaacacaaaatagagtatctgaaaaaaaaaataattgcatgtattacctacacttctctagagaaacagaacttctgacagcccacaggtccagatctgctctggaagactcgagttttattcaagctctagacatcttgcggtctcggagcgcgtgcgacccacgctcgccgcgacgcgcccgcgtctccgtgcggagccagaacgtggtggtacactctctgggccacactcaccccggctcggggaagcgggcgagcgagtctcggtcgggaggccaacggagcgctagctccggggcccagcggggcggcctgaagcccccagtcctcggcccccgcgcaagcgacgccgggaaatgcccacatccgggaaacccg

SEQ ID NO: 43345 - DNA, 391 bp, Mus musculus
  source 1..391: mol_type = other DNA
tacattgatttggatgccattctacaaaacaaaggtagatactcactttacatattgaaaataaactgactgtgcgggcaagttcaaatatttcttggatgatgaagaatctccaaaattctaaaagagaggaaataagtccatatctctataatattttacccagaagaaattgcggctcaactacaatttcatatacaagtggagagttgttcaaaagaagagttctagcataattctaaaacattattaaacactgaatccacaaggttatcctgtgacctccacaagtaaagttttaaacataaaaagtgacatttatcatgacagtcacttctgtctttgggaaaactcgaattttataatctctaaactttctccttttgcggca

SEQ ID NO: 43346 - DNA, 341 bp, Mus musculus
  source 1..341: mol_type = other DNA
ggtaagggccaggtcctcagccctgacggcccagtacttcataaactttttaaagtctcacctggccgggcaccagcctggacagccagggctatacagagctaaatttttatttatcattcctgacattttataagacactatttcatttttttgtaagtatatcgacatattgatactaatgaaaaagtaccactagcctaggctactgtttcgagatcctgtttcgaaagagaaaaagacgtcaaaggcctgcgcagccccagcagctcggtcgacccgccccatttgggaggggtcggtcccgccccccagcccctcccccggaccgccacgccctc

SEQ ID NO: 43347 - DNA, 313 bp, Mus musculus
  source 1..313: mol_type = other DNA
gagaaggacaagattgtacctaccagtatttggcctgactggaagtcagtggcatcatttctttctattaccagaaatcttcgaaaagctttcatcatgacaaatgatgtcaattctttacctttcacgagtaaagaaagcatcgggctcacggccccgccaggtcgcgaaggcctccagcaccccggggagtggtctccaagagaaccgccatggcgccggctcctggcgcatgcgcaaccagcgcgcgcctacgtcttacgtcacgacgtgtgcgacggcttctggcgtcagccgcgggcgccgtcgccca

SEQ ID NO: 43348 - DNA, 341 bp, Mus musculus
  source 1..341: mol_type = other DNA
caaaaaacagcagtaaagagagccgccgagccctttttcctcctgattagaaatcaggaggacctgtttttttttgcattgctatgaaagaccccaaattcaggaaacagaattctgagtctgctctctgtactttcaaagagagccgctgagccctttttccacaggcccgcacatcttcaagcagatgggcttcccagccaccaggagtgggaacttagcagctcttaacacaaagtgtaagtacctttgcagctgaacgtgccttgcgcaggaagtggagcgcaggcttggcttctagcaggggtgtggcctgggcgctggccctcctctgactccag

SEQ ID NO: 43349 - DNA, 458 bp, Mus musculus
  source 1..458: mol_type = other DNA
ttgcttcaaatactatttttcttaaaaaaaaaaatgtttacttttaaaaagtcctttctatctgtcatatctctgattttcacaagtacacattaaaatgactatctggagtgtctgaaacagtatgcttacatataataaataaataaatcttaaaaaatattttaaaaaagtaaagagtgtactaaaatgttatcagcataaaaaaaccggtagtttttattacatatctccaatgtaagactgaagcctttgtattctaatttgttgcacaaaacctctgtgctcccagggcaacctcttccaaaggcaaggggaggagccagctgccgggccgaacgagccggccattaggccgcgggaaatcgcgcctccgaggtgggcgacggcgcccgcggctgacgccagaagccgtcgcacacgtcgtgacgtaagacgtaggcgcgcgctggttgcgc

SEQ ID NO: 43350 - DNA, 319 bp, Mus musculus
  source 1..319: mol_type = other DNA
gttcttcctttatcttgaaataagtgcaggggtgtttggtctaaaattggaccctagtcctaggtcctaagagaactgctcactctttgtgtcggtggataaggactgtccagcatatttttcattttctttctatcacatatatatgatttatttgtgtatgagtattttgtctgcatgtatatatgtgcaccaagtatgtgcctggtgcccttagaggtgttgtgaaccaccatgtacctgctgggaacagaactcagagctcttaaatgttgaggcatctgctccagagagcacggttttataaccaattgttctg

SEQ ID NO: 43351 - DNA, 678 bp, Mus musculus
  source 1..678: mol_type = other DNA
aaaaaagccttttttttttttgccatatgaaaccgccaagattttaaaatattttacattgtgagaaacatctgccgagccaaactccgctcgggtcccgcggcttccaggacgcgtcccgcaccgcccggccgacccgccgtccctcccgggtcacccggtagctcgcggcctgggcgcggcccggctccaagggggtgtgtccggctcgcggccccgcagccccgcaggcccggcgctcgcctccgcctcaggcccacctgccccgcggcccgtcagggcctgcagggtcccgcccgtctccccgagctgggccgccggctcgcacggctcgccctgctcgcacagcccgccacccgcttccggagccgcgaggccctcggcggcgcgcgcaccgctcggctcctctctctctccctccctccctccccgtccgagcgtgagggacccgcgtgctcctcctcagcccgcgccgggacgcgtcccctccggccacggcgagccgggagtggggacggcggctggcggaggtggggcgtggacagagcatccccgccacccggcggagggaggcctcgtcacggccgccgcctcagatctcgcggtgtttgccggccgccgcgccgccatatgggctggcggagccgcggcgcgagcgggcgagcgagcgagagctgg

SEQ ID NO: 43352 - DNA, 253 bp, Mus musculus
  source 1..253: mol_type = other DNA
taagccaaacaaattcttttttcatgatgtttatcacagcaacagaaaacacttgtgtatctggtgatttgtaaaaacaaaaacgattaagtgtgtttagagcagccctgttctcggataggtctctgggaagctccgtgggctctttcagttctagaaacttcccagcgtctgtgaaggcacagagccttctcctttttgtcgctgccagcgtcgagcgccgtctcgcgcggagcgagagggtggtgtccgc

SEQ ID NO: 43353 - DNA, 403 bp, Mus musculus
  source 1..403: mol_type = other DNA
ataaagtatagactcatatttaaagcttcgagtgaaaactccaactgagtggcaggtttcaaagtcttatccatactatgactatgaaggtttcatatgcctcaggagcgcttagacagaataagagtcattatagtccctaggaataatgcttcctttttattttgacagaagagttaacatgagtctgtaattccatttttccagggcagaaaatggatgttacattattctttaaaatggtattcctttagtctcaggcaactgaggcaaatcgatttaaataatttctgaaaaacacattaccctattcgtaataacttgtttgcactattcggcaactgtaacggcatcggcttgaaaagctcactgagccttaactgctgggagcactcgcgtcacg

SEQ ID NO: 43354 - DNA, 788 bp, Mus musculus
  source 1..788: mol_type = other DNA
ggtggctcagaaccatctgtaatgggatccgatgccctcttctggtgagtcaacaatggtgtactaacaaataaataaataaataaataaatagtattaaaactatattttcataatagttttttctggagaacaaaaaattcagattttacaaacataaaaatcttactagtcttaaaattaatttttatactttaggaagtttacattaaattgctaataattagatgtccaaacttatctaaggataaagtctaattataccattaaactttactacattcctactttatttcataaatccaataatatcatttatagtcttatttgcttcattttgtaaggaaaaattagatactaggcatgtgagaattatttgaaatttttattagtttaaaatatttcccattgtaattattcctcacttcatcattaattaagttttcttaataaaagttaaaaatttaggcctgggtatatacatatcctcgggataaggctctgcctgctaattatttttaatattttttaataatttttaaataatttttaaatggttcccatatcttgagaatatttgtgcctctaatcccaaaaaagtcttacttatttttcatataaaattaactgtacattaacttgtattaacattcttttattgtgaggcatgaggatgtgctcagggttagcctagtgagtggaggagtacacctgcctaccaggcacctgcacccgcacctgcacctgcacctgcacctgcacctgcacctgcacctgcacctgcacac

SEQ ID NO: 43355 - DNA, 461 bp, Mus musculus
  source 1..461: mol_type = other DNA
gtcatctcttagaaaaaattttttgattggtttttaaaaggaaaaaggacctcttcagggatatttccctctggataaaattaacttttattttgaaccacccttacagctcagagagggtctccgccgaaacgcccggatggctcgtgaccaggcgagctttgtcacagcctgacagacagttaaagtggcgcgattggggacttgtgcagggccccgggcccgtggcgcggtggcgctttcaaatgcaaagcgcctgacatcagatccaggactaattagcccgggtccacaggcgtcactgtcccctgcccccagtagaggcgagtggtgtgccacccggagccggtccccgaagcaggacgcagcacccgtgcggtgtggctcttgtctccctggtcccgtgaactccccgccgcagccagtgttggctaccctgttgctgcgcggggccgggctag

SEQ ID NO: 43356 - DNA, 519 bp, Mus musculus
  source 1..519: mol_type = other DNA
tcttgtccctgggcagggagggagaggcaatcgggagcagtcgtgcccctcccgacacccacccggtgtgactagttatagcgaggaggggcctcgcgcccatcaggctggacagtccccacgtcgctcccaccctgctgccaaaacgcagctgcttggggcacaggaaaggacattctaaccagtgaccgggtcctccccttggacacccaggcgagagtacccactggccggagtccggaagcttaatagccaccgggtcaccgtgaccccgggaacgacagtgactgacaagcgcacagaccaggcgctcgcaccggtctgcccgccggagccgcctccacggcgtgggacccggttgcagacgtccacgggcgagcactccccagactgccccagctggggaacctcctgggcggcgcagcgcgacggtgacccgcgcgggtgcgaggggtgtgcccggccccgcctgcgcgcccctccccgcggtggccgcgcatccaggggcggcgcggagcc

SEQ ID NO: 43357 - DNA, 453 bp, Mus musculus
  source 1..453: mol_type = other DNA
tgattttacatataaaatatgaagtagttatgtggttgtttgtacatatgtaactctaaataatattaagattacaatcaaggtttaaagatttaattttaagaagcggcttttcaactggatgatagacttatcatgttcttattctcaagaacagaattactttacttaaggaggctaaggtcacctatatgttctaaacttcaggaccataggtcaaatttgactagaagttacctgaaaacaataatttgttttgtttagcagatggtgcataaagagttttacatcttgtgctgaacactttatatccattttatcctcagagtagataaatggtagatcttggctttactgtctgtattctcttagttgaaaagcggagagagtctgtgtcagcaggccctccagccagctggcctgggaggagccttccggttgtcagaactcgct

SEQ ID NO: 43358 - DNA, 232 bp, Mus musculus
  source 1..232: mol_type = other DNA
aacaggaagatggtctgttcttgactacttccagttttcatgcagagataggtagatatacacatacattgtttttctcattgtgttccttatttttagagagagaaaaaaaatccctctcagagatagtatagtagttgacaaatgccagctcctatttcctctatcaaatgactttttaaataaattagatattagacaaaccttgggtgaccttgcggtataatagtgt

SEQ ID NO: 43359 - DNA, 345 bp, Mus musculus
  source 1..345: mol_type = other DNA
agattatttaccatctactaggtggtaagacacagtattttcaaattagctctggtgattaagagacttttatgtctactgaagatagaattctccctttggaaaagaatagctgtataattttttttctcttaaaacgtttaaacatttaaagccttagtaattttcttggcaagaataaatttctcaaagagccccgccctctctggcaagaggtcccgccccccgcccatcctgcatttgctaaagccacgggggtcctgcgcgttcgcctggagcgagcgctcctgctggcctcctcagctggcgctggcggcttccggcctgggtgccaggcttcaccca

SEQ ID NO: 43360 - DNA, 422 bp, Mus musculus
  source 1..422: mol_type = other DNA
tctatcatgtttaatattccaaatatattttaaaaactggttgagagcagatgatgtcatgtatattttaaaggcatttataatatatgtagtgtattattatatatactatatatttataataataaataattttgatgattaaaaatttgtcaatagtgagttttgtattttaaaataaaatatactagtttaaaaaataaaaaaggagttcactaactagaaatttctttggccaccgaagcaaaataaatatatgtaggaacatttttctaaagagaatatacagatggccaacgtgtgcagcatgaagcttcctctaaagttaaactagatttattccaggctccccttgtctaaggccagcagggggcgcgaggaagtgccgggaccaggctcgccctgtgcagggtgcacccaga

SEQ ID NO: 43361 - DNA, 519 bp, Mus musculus
  source 1..519: mol_type = other DNA
ggaccttgggaaggtctgcggagttcgtgcccaaggtggcctggggctcgcttctttattcatattaataacaagttgaagcacagttgtttcttgacctaaagtgctaatatttgcaagaagcaacttttatttatttttctgttttttttccccaagaagaaaatttaaataggttttcaggagaatctcaagagtttgttttgtcatctcacaaacaaggttttctcttttttttgatcttgagatcaacttatacacgctaaaaagaggattctctaaagaacattattcatatgtattattcccacgttataacaacttcactgaggctggaggttttgacttagtaaaagtgatttcctgggaagacgacaggacaatgtcggggtgtcgttttcagtgtgggtctcagcctctcgcgagccccgaatgcccgcttcctgcggctgcagctccacggcgcctgggaaccctgatcccacggccgcgtgaccgggccacaaacgcgcggcgctg

SEQ ID NO: 43362 - DNA, 755 bp, Mus musculus
  source 1..755: mol_type = other DNA
acgggaaagctccggccctaagacgtttcccagaagccgcgccgcgccctctggaggccgcgtggctcgccccaccgaagccgcccgccgcgggctgacgagccaccgagtcaccgggcacgtgaggtggtggcagttaccaccgagagtgcgcgctaggaggacgggtcgcgctcctgggcctgcgtcctccacagtgccacaggggcggcagggagcaccaagggagaggctgccccgtgggttctctgcgctcggcctgaccggcacaggacagcgtgcgcatcctcgcccgctgtgcgtgcgcgtgcccgctcacccgctgccgggccggggggcggggcgcagcggggcggggcggggcgcgcattgggacgggacgggccccgtgcgtggtccggtccggtgcggggacgctgcggagccgccgggcgctaaggccagagaagccagggtttgagcggcgcttcggcccgcgcgggctggtgagtgtggcgaggccgcgggaggctggcgcggggacgcgggcgggcgggcgggcagcggcccggacggcgcgggccccgggggcggcggggccggtggagtcggcgcagttcagaggcttccgtccggctggccccgtccgggtcgcgcccggccgcccgtgtggcctgcccttgaggctcccggcaaatggcgccccgacccccggggacgcggaaccgggtgagacccccacctccgcccccacccccactgagcgcagaggagcc

SEQ ID NO: 43363 - DNA, 527 bp, Mus musculus
  source 1..527: mol_type = other DNA
ctaaatatttcaaaaatctgaatgtcttggtgaaggacggtgactctcgtgagccaccgcagccagggccaaggctccttcacggtgacggggtgggcgtcggtgacatcaccgtccctcagcctcacgcccgggcctggcggtagtaacggggaggccacgggaaagctccggccctaagacgtttcccagaagccgcgccgcgccctctggaggccgcgtggctcgccccaccgaagccgcccgccgcgggctgacgagccaccgagtcaccgggcacgtgaggtggtggcagttaccaccgagagtgcgcgctaggaggacgggtcgcgctcctgggcctgcgtcctccacagtgccacaggggcggcagggagcaccaagggagaggctgccccgtgggttctctgcgctcggcctgaccggcacaggacagcgtgcgcatcctcgcccgctgtgcgtgcgcgtgcccgctcacccgctgccgggccggggggcggggcgcagcggggcggggcggggcgcgc

SEQ ID NO: 43364 - DNA, 555 bp, Mus musculus
  source 1..555: mol_type = other DNA
cgagcagctctggagtcgcccttcccccgaggaggggagcgggcagcgccgggcgcgggatttctcccgcccagggccgaggaggagccctgggctcctcagccgatcgggccacctcggggagcggcgccccctgcgtgcgcctgcccccaggctagcgacgtttcacttaaaaaaaattcttgtaacgtccacgcccagaggaaccttggggcctctgggagtgaccgcagtcccctagggaatggggcgggggttgaaaggaggtgggacctttctgcagttccaccgcccgggccgaagtagctgtagtctgcactttccctggaagctcagcgtcccctgcctgggcgggactggtcgccaaggtctcagattccagaggagaggctgtctgtcgcctgtccgtttaccgccccgagccgggcagcaggaagaggggacgtggcctcttctgagagtgtcacacacctccggtcccgggaaggcggggcccgggcggtgtccggggagagcttcctagccggcctccaggctgggggcgtgctcgacctc

SEQ ID NO: 43365 - DNA, 727 bp, Mus musculus
  source 1..727: mol_type = other DNA
agtctgaagacctgagtctgattcctgttctaaagttgagacagagagaatttagataggtatgatatttgtgtctactgtcaccagcaccccaaataaaaattttaaaggtcagcaccaacactatttgtgtatatgaacatataaggacacttgggattgtttagacagcatttaaaatgatgcaaaagaaatttccataatttatgtaagataataataaaaaaaattaaaagtactgttgatggggtgtgacacacattttcggacagcacggtgcgtgcgcgcggtgactattccattctggcttccagcacgcacgactggttccgggattctcgcaccgcgcaccgcacggagccggctgctgcgggctgggagggcgccgctgattgaccgggcgcgcggtcaggtgacccgaagcgccacgttctgggagcccggcccgcggtggcttcccaggccggggcaggaccgaacccggagccgagggggactggtctccccgggagaacaaagttgcccggcctggggccccggggcgcgcgagcggcgagacggcgggtccgacctgcgggatccacggctccgaggctgggcgattcgtgctgggagacgcgagcccctacccggggtggcgggcggacccagcagcgccccaccctcgcttcaggggccggcggcagccggaggaggacctggaggaggagccggagcggcgagcagc

SEQ ID NO: 43366 - DNA, 312 bp, Mus musculus
  source 1..312: mol_type = other DNA
atgggagcttctcccagggtctcctgaaaggaccttttcaattttgctataaagctgaggcccaacagctatatattcattatacaaaagtgatcatttatactctctcggacaagatgcttgcttcctgcttcagcaatagctggatgctacctaaacgtgtagttaacgttcatactgaaagggtgtcagacaacttgtcctgaaaactataagtgtacttaaaatattatgagttactttttataacccaatagatggtaatatcatatcacagtgggaaatgccctggcactggaaacttacacctca

SEQ ID NO: 43367 - DNA, 358 bp, Mus musculus
  source 1..358: mol_type = other DNA
gcacatgttctcatgttctcatttgtgatcacctggtgaggtaatcaccccatctgcctccagactctagcacagtgtccgcacagagaacaaggcctgaggacctaggctctctggcccgctgtccttcgtaaggagtccggtggtcacagatctgaaacagtggggcactttgtgaaacagtgcatcctaggttcagagcaaggctcagccaccagctccctgcctgcagctgcagaaacacctagcctgaaccctggggtagagccaaggttttgagaaaccgctgtctttttgttgtgggtgttttgtcccaacaacaaaagggggtgggggattgggccacactgccctgacc

SEQ ID NO: 43368 - DNA, 307 bp, Mus musculus
  source 1..307: mol_type = other DNA
tgtgagctcagggccagatccaatggtttttggctatacatgtatccttaagggataccataaaagaagtacaattatcttttctgagttgtttgaggtgactagaaagagaggtgttctttctatctatctatctatctatctatctatctatctatctatctatctatctatctatctatctatctatctatctatctagtctactgggggaccgcgggggaaccatgctgccacgttagcttctaggtaagccgtgggataactctcagaggccgtttgccatcgtcctggactacttgttcca

SEQ ID NO: 43369 - DNA, 365 bp, Mus musculus
  source 1..365: mol_type = other DNA
ttaccgtaacactttttttaagatttattaaatattatttattattatatgtaagtacactgtagctgtgtctttcagccactgtgagccaccatgtggtttcagcgctgagggtgccaggctcccactgacagcagtccactaggcagtcgtgcgggtccccgctggcgcagccacaccatccgcgctgaggggttttcccgcggaaagtccgatggaccacaccgtcgcccgcagcaggtgcggcttaggttcccagcaacccgcagcgtggcgaccccagtcgggacgggaagctgcgcgcctagccgagggcgtccccggggcggggccctggtccccagctgtgcagcctcagcgcggca

SEQ ID NO: 43370 - DNA, 397 bp, Mus musculus
  source 1..397: mol_type = other DNA
aatctaggaaaggcttcgacattcgttaaatctggagttaagatcgcactagcttcaaaactcaaaacactataacatattttaaatgcctttaaagtattggaaaaattgctttttttttctcaaagctgttagagccgcccatgccaaattacctaggagaccttggctttgcgcatacagccgatgagtcaccgctgggctgcgtggctgtccccgacccccggagccacggggcctcctcctcacacgtgacactggagggggggggagcagctcctctcgggctgccccgcccgcagcctcgtccatgcagccatccccttggctggcgtgttgcgcggcaaagcccacggcatctcagcttgggctgggaccgccccgagccttgatttag

SEQ ID NO: 43371 - DNA, 431 bp, Mus musculus
  source 1..431: mol_type = other DNA
acattgaaggtctaaagctgtaggtgtgggacattcatataagttatatttccatgtctgccatttttatatgcaaatagctgagaaaaatagactatttgtattttcatacaagcggttcttgtcagctaacttgtaaatactataatgttgtaagtttaatattacacgcttatatttcccctgaaataaatgatttcatgaaagtcaaatgtttcatagttttgaaatgctgagtcaaaaggactggagatgagctctgcagttgtcatggctgggctcgccctgagagcactctttccaacactgtctaatgtttggaagcatccactgtttattaaaatatacactcaagagtttctaggttttgatgagatgttcttgtcttcacatctagagactgattcaaggtctaggctaatattcattat

SEQ ID NO: 43372 - DNA, 373 bp, Mus musculus
  source 1..373: mol_type = other DNA
ttagatgaaatactccatacaaatcgaacctgaggttaaagctgagatttcaattggcaaaaccaacgtcccctttgccaggcagcccttaaaagactgatctttttaaaaaccacgacctttgcggtgttttgcacctgtaaactacatatgacagtcattgggtcctagtcctattatattacaagacagccaggtgtgtgcacgcctgtctgcagctgaactttgggtcagaggcgacagacccctgtcttacaatacaggagccgcgccagccggagcagccggagcaggttctagggcaccgagcgtggcaggctcggaggccggtggctgtcgcccgcgggagcgaaagccggctgtaggcggctcc

SEQ ID NO: 43373 - DNA, 273 bp, Mus musculus
  source 1..273: mol_type = other DNA
agcagccccttttatagggccaggtctacctggctgttgccaggtaaccgtggggcagcgaatacctggcaattgccaggtatctgtgggggtggagtccagacagaataccaacacttagtttgaggccagcctggtctacaggttccaggacagcctagggctacagagaaaccggaacctgatgctagccccacctcccggaagtccccgggaaggttctgtcaccgcgggctcacgcaacttccggctacagcctagcggctcgccggc

SEQ ID NO: 43374 - DNA, 216 bp, Mus musculus
  source 1..216: mol_type = other DNA
ctctctctctctctcacacacacacacacacagctgaacccaaactttggcctgggtcaaagaccatcctttaggtttttgtctcacagcagacaaaccgggcgtcttggctaagtagatcagatctgacttgtgcacctgagtaatgcaaccttcttggggtccttaagtaaccagagcagtagtcatctgaccaaaccggtctgggtcaggtga

SEQ ID NO: 43375 - DNA, 342 bp, Mus musculus
  source 1..342: mol_type = other DNA
taacagttcttaaaactcaagttttaaaaattcttttaaactccctttttgtgttgttcaaaagattcccttcttaaaatcccataattattaacattccagcatcaagatttttatcctgttagtcctgacaacactgcagaataagcactgtgttgatatatagtttgtactttacaattggagaacagaaattatctgctgtatattttacagcaacatgctgttttcggtttacctttaaacaccagagaatagtgctttgaaaagaaacttcattggggtagactctaactttagaggttcttcttttgtgacgtttcagaaaattcggggagaggg

SEQ ID NO: 43376 - DNA, 360 bp, Mus musculus
  source 1..360: mol_type = other DNA
ttagaataaaaaggtgagatattttaattttgtaaaagaataaacaaaaataatatctcagttttaaggcctttacaatgctgtaaacaaattggtgttccatgttcacagaatgaaaacccagcatcaaactgtgtatacatacatagtttgtatgtatatccctgccacaaacgtctatccctgccacacatcgatatgattatatgggagcaagccataaaataatgtggcttttaaacaagttgctgcttcaggtatttcggggatatggcgacacacgcacgggccgtctggagtagtggtggactccaccttctcctccatacctccgccgctcagagactccgggccgaggga

SEQ ID NO: 43377 - DNA, 345 bp, Mus musculus
  source 1..345: mol_type = other DNA
agtcctgacaacactgcagaataagcactgtgttgatatatagtttgtactttacaattggagaacagaaattatctgctgtatattttacagcaacatgctgttttcggtttacctttaaacaccagagaatagtgctttgaaaagaaacttcattggggtagactctaactttagaggttcttcttttgtgacgtttcagaaaattcggggagaggggctggcaccgtgtcttccgtccacctggcctggacctccggcagcagcgcggtggcggcgctaggtgcacagagcgacgctttcggtcccccagccgccgcttactgatccgggacgcctgggtcc

SEQ ID NO: 43378 - DNA, 574 bp, Mus musculus
  source 1..574: mol_type = other DNA
tgacaacatttactggaaggctgagggaatccagtttatatttactttcctccttttaactccgaaagatttgtattaaatcacacatgcgtgggtgaggtttcatggcaatcagcacagatttctatttataaaacttgccctcgtaataaaaagtttaaaaaagaatttgttcaaagctcgtgctgataaattattaaagccttgtgaaatttataaggggcttcacagtcataaatgctcattaacattaaaccctcaaccacgttctgaccccatctggtgccatggcagccagcaccagctgcccggggatgccgggtccggaccggttcggtcaggtccttcccgtctggaaccgtggttgcccgaaaggcgctcccaccttggaggccggggggggggggggggggtggacctcgcggaccgcctagggggcgcccggccggtacgacgaaccaggccgccagctcgcgtaggctgcactgccgccccgcccgcgcaggtctccggtgcgctcggcgccgccactgtccccggggacgcgccccgcctcctgcgctccgcccctcgc

SEQ ID NO: 43379 - DNA, 495 bp, Mus musculus
  source 1..495: mol_type = other DNA
gacgagggcgggcggcttcctgagcagggtgcacccggggcgccctggggagtgaccccggggaaagccccggcacggaaaatgctagtgaaacacactgtgagctccaggggccacccgaattgttaacaaaatcggcgtggcaagccgatacccgctctcagcggagatctcggctccgaggcaagagagcgcgaccgcgaccttccctccccgcgcgcccgcatcagggccagtccgggtcgcctccctcccagggacgcgctgggggatccgatgactcctagtaacttctgttcggggaggcgctgccaggaataacccggtgcgtccacagcccggaggggaggtggccgctgcggctcccgcacgccgacaaactgcggcccgggtcctgcggctcaagccccagcctagcggccctggcccccgccctgaataaataaatatataaatctgggctggcggtggggatcgcctccctccctcctccct

SEQ ID NO: 43380 - DNA, 390 bp, Mus musculus
  source 1..390: mol_type = other DNA
ctttctactagagtctcttagccctaatgggactcattcatttaaacatgtgcatttatatacatatatgtaaacatatacacatataaccatgtatacttataaaactatttacttttaattttttgaggtttgagtgtataaaacagcaccaaacccacataggaatttaaataataatacttctgtgttgttaggcctggcaagagaataaaacacattttttaaaaattttcaaatgacacatcagtttgtattataaatgcatttgtgggtatgctgacacaaagattgcatttggaatttgtattttaatcttattcaaatgttaaagtttgtaacctgccgaccatggtggttttcagtggtcaaaaacctcttgaagacatg

SEQ ID NO: 43381 - DNA, 397 bp, Mus musculus
  source 1..397: mol_type = other DNA
ttcaattcttatttttcaagtttgaaaaggactgtctattcagtccagtatttggacatgcaaattttaatctagtatttaaacatagtgtttctcatataagaatttaaaacttctaaactaaaagcaatggtttaagtgttttcagtatctctttacagtttctagaaaggctataaaaatttttagatttcaagtccaaagcttagcttagtagtatatacgcttgccagaagggaagttttccttcttctctttcattcattccatgcaaacaaacaaacaaaaacaaaagttaaatttaaaacctctatctccgcttgcagagagcgctgggtgtgcgacacaggagactcttgcgtcgcggacaagcgtctcagcaacggatgcgtgggtg

SEQ ID NO: 43382 - DNA, 483 bp, Mus musculus
  source 1..483: mol_type = other DNA
atgcacatttgagaaatgaggtacatacatgtccacaagaaggcttgacttggtccagatttttgctaacaatgtccacaacagaggacacatcatttctgtattctgaaagttctttagaaactcagagtacagtcatttcttgcaacaaagataggagtataatattcaaatcatagtttacataaaactactagtcccggagttcaaactgtgtcctcttcagtagtatatacatctcaaactaggaatattggcattaaacttcttaactttcaggatatactggtggtaaagaacagtcaaattcaaattttcagtagtagccactgtacttggggtcctcctggccgagccagaggtcaaggctcaggtctgacgggcggagggactcacagtagtaggccaccacggggtcccgcttgtgcgcgggcagcggcggcagaggggccagcgcggccatctccactcccggcacccacg

SEQ ID NO: 43383 - DNA, 519 bp, Mus musculus
  source 1..519: mol_type = other DNA
tttctttctttctggaggaaaattcagaacacatgcccactggcgcgcctgcgttcggagctctcgcggcccgcgggtgacctcggggtcagcggggtcccctccccggagccccgccgcccgcgccggtcccgccccgcgtggcgactgccctcgggtggccggccctgggtggggcagctgcgcctgcaggacggtcctctgtcctctgcctagagctggggccacccggggggcgcgccgagccgcacctgagcctcagggggaaacggacgccagcgctgcgccgcgactggccgcaggctcaggagcctggtgatctcagcctctccaagccccgcaggccgggatcggacgccacccgctcgccggagcccttcgtccttcgcccgggcggcagaacctgccgcggtcagccgctcccccgcgcgccggacctgatcttgaactccacggcgcgcgccccgggtccaccttgcgccgccccttgcgcaggcgacgaacgaagggtcctgcggg

SEQ ID NO: 43384 - DNA, 372 bp, Mus musculus
  source 1..372: mol_type = other DNA
gaccagcactgttatataatgtcatttctccattagttgtgcattgctcctgctctggagaaaataacatacttgttccgtgctgtactccagcaccaataacaatagctagtatgatttaagctagaccctagtcttatcttgattatcaccctacatatgactctttagaatagagaccctgctaatattcagcattggaataattatcataagcctgtatttacaaattcttagacctcctagaaaaaaaatatcagaactattatgttaacactttagagtacacggtactgcagggcccctgggtgctcagagcatctgtctgctggcctgctttgctagcactcctggctgactgcaagtcaaggg

SEQ ID NO: 43385 - DNA, 312 bp, Mus musculus
  source 1..312: mol_type = other DNA
tccagaaccccgggagtggagccgccccggcctgtgagcgcgctcggtccacctgcagccgctgccgctccccgcccccaacccctgtccttgaaaagagtggaggtgcggagagttaggtgtacgtgctgcctgtatagccattcttcgtaggttgggaagagttccagaaggaggtggggagtgctccttgctctgtccctgaggtggcaggcacttcggtccggagacctgctgggcggcgccggggcgcgcagccgctgcgcacgtgcagcgcggactcgcggacgcggcagaggacccgatccaggg

SEQ ID NO: 43386 - DNA, 194 bp, Mus musculus
  source 1..194: mol_type = other DNA
taaatctgttttggtaaaacatggccaggctggccttgaagtcacagagagccacctacctctgcctctaggccctaggaagtgtcagctaaatgtgcatttcaaactttaattagtgtctctgccacttctcctgtgctgtgccacaccgcattgatgtgttcttaggcttttctttcaaaggatactcccct

SEQ ID NO: 43387 - DNA, 463 bp, Mus musculus
  source 1..463: mol_type = other DNA
ttcttagaaaacaaatatgcatctaaataataataaaatagatatagatgtattcgttcagtgaggaattccacaaaaccatatgtctatacaaaagacctaaaaagattacacatatatatatatatatccctgacaaaacaacaaagaacctcttaagattcaactgagtctcccagacaactcagtcttctttgtgcagcctggctcctcctggctggctctgcttctgacagaaccgacagaacccttgggtctctggtctggctcccagtcgtggctgtcagcacacgcgggaagcccgccagcctccctcaaggcgcctggatgacgtcacccagagccgagggctgagcgccgagcgtgacgtcacgggggcggagcgaccgtgaggtcactgggtgggcggggccgggctcaagccccagtgtcgtcacgggcgggggcgggcctggagcgtgtc

SEQ ID NO: 43388 - DNA, 309 bp, Mus musculus
  source 1..309: mol_type = other DNA
actttcttgctcaatgaaagtccattttatttgattggtccaaatgatcagtttcaccattgttcacagagatcttcctgcctccacggaggacgtcaccaatgaagagaaatttccctcatgattacatttacaattcctatacaataatttaagttgagtttctttttcaagatggaaataaaaagaatttgaatgatttgaatggtcaatgatgtattccgtctcaagatctagaatcaaaatcggtattattattttgagcctaatgctctgcatacagagtgtcccgggagaatgggcggcccc

SEQ ID NO: 43389 - DNA, 703 bp, Mus musculus
  source 1..703: mol_type = other DNA
acttttaaaagattaaaggctcgttaagggtctatgcccccccccccaccccccagaggaaggaagggatggtgctgaaggcctactatttggttctcggtgaaaaaaaaaaaaaaaaaaggtgactttttttttctttatttctattttttcaaacttggttttacagaagacccggcttcacctgagcaagcttccctgcttcagtggacggcgcaaagcgatgcacttatcctcgttaagtgcatgccgcaccccagcccgcagtgcgacctgaaccctccgcgtcgctgggacgccggtcggtccccaagtgcccccagcctggggtcctcgcggagggcgcccagggccactcgccgcgccccgccgtgccgcggggctccggccagcagggggcgctgcggcccgctctcccgggagcggccgagccagcccggtgggtgccggcctcacatccgggtctggagcgcggccgccgctgtcagtgccgggccggggcgcagtcaatggcggccgagggaggcggagcggcggccacgcgcagccccgagcccccgaaactttagacttcggggaagcccgagggacgcggccgagcccggagccgccgcctccttttccccacgccgagcttgcggccgcgcacagccgcgcgccaccgccgccggctgccccgggccacacgagctcgcggccccgc

SEQ ID NO: 43390 - DNA, 344 bp, Mus musculus
  source 1..344: mol_type = other DNA
ttcctaatcccggggatgaagtggggagtcaggcagcaagtctgattagcctttctgaatctcagacctggctgtcctggaactcactttgtagaccaggctggcctcgaactcagaaacccgcccgacctcagaatcacttctaaaacggggattttgacattaccttaaaggacaagtgacacatacccgtatgatgcccttcaccgaggtggctggccgcttccggtgaagtggagtggccaacaacaactcctctttcccgcacctgggagaggcggggcttttcgcctctcggagggccccgcccagattacgtcacttccgtaaacaaagggcgcttg

SEQ ID NO: 43391 - DNA, 566 bp, Mus musculus
  source 1..566: mol_type = other DNA
tatggatttccatagtggctgcagcagtttatattcccactaacagtgggtagccattgcccttcttaggctgctcagcatgtagagattctgattaaggtaagacagaatctcaattttaattttccttcatgccatagatgttgcaaaatcattgtattttattgagttatagatgacctcataaaatctactgttagacaaggatttttaactttcccatgcttgaagtattgtgaaatctttctgttaaattcaaaagaattctgactcctgtattaactaatactgtttaaaaaaaaaaactttaaaattttttgaggatttgctaaagatgaacatgagaaagggtaagaaacgttacctttgccatctcagtgctttaaaattgctggctagtgtaaagctaagcagaggcagacagcagctgtgcacccagcaacttgaaggccctcgagatccagctgcaactgcctggtcccactggagtgcagcaccgagcaagggacaccggacctgtggctatggagatgggggcacacgtgccccacctgcctccctaggct

SEQ ID NO: 43392 - DNA, 459 bp, Mus musculus
  source 1..459: mol_type = other DNA
tggtcagtgtagacacatcactccatccctgaccactgctctggcatggggtatgtaggcatcatggtctcttgacagcgaacgccccagccctggcatgcttgaagaactccgtcattccgtctcagagagtcagggtagcttgagacacaaagtttgccttccctgtgtagctagccctggctctccaaggctgcccttgactaggacccatattctgcctgctggctgcagaaggggaggcagaaacaggtgcacacatggctgcgtttcacctttgctgaaagcaggaagtgaagtgaaaattcgggactagaaacacattaaaagcgcttctggtgatcaccctttttcagaagtgggtccagtagtcagcaatcaaaatcttttttgtgatctgcagagagacgtctacgttctgcaagctttgcaggagttcagaagtttgagctaccactg

SEQ ID NO: 43393 - DNA, 300 bp, Mus musculus
  source 1..300: mol_type = other DNA
attgagctaaagagtaatctaagtaatgtttatttaaaactacaattactgcatttaaaagagattaaagtaattcctgtaatgtacctaatttctcctttgcagctagatgcaaatgagatcacacttcccagtgactagctgagggtgagaggacccggcaccctcaagctccctgggggtttgacttctagaaagcaaaatctgctatttgtctgtttgtggactccagacaggagaaactgggtgcaggctcatgcaaatgatggtaaccacctgactgtaaacttgacctcagag

SEQ ID NO: 43394 - DNA, 422 bp, Mus musculus
  source 1..422: mol_type = other DNA
tgtgagttgaactagctgaatccagtgagctaaataaatactcatcaagataaattgtatatcggtataacattttaaaagaaaaaagagatgaattatatataaatttatttcaataaatcttttggaaaaagtatgaagctagtgtgtgctctggcccgtcctccagggctgactggaggactcagctgcggatcccaatttggactccaggatctaagggcagcaggagtcagagtcctgagtgctagctgctagaggtcttggagctccgggagaggctccctggagctaggagctgtagaggacctagatgacccagggccagccggccgatcctgatcagtctgatcagctagctgatcctgaccttatccctgcagaggggtgtggccagggctggcgcaagcctgaggttggtc

SEQ ID NO: 43395 - DNA, 522 bp, Mus musculus
  source 1..522: mol_type = other DNA
tgggaagagattcttttattattattattattattactattattactttgacagtcacctgctggtactgaaggttttaaaaaaatactgggccattaattactactggtctatttatagattttaagttgtcagttaaatctattgataattttcacatcgaattctctaattattagagagaactgtattagagtctaatgtatgcgtgtaatacattgtaagctcccagcaggcaggcatatgacgtagttctcgctggatggctccaacccagctgtttactatttactatttattactatctaccccctagtgtagcaggtctcagagatgcctgatgcgccggcccagcaggtgattggcacgatctcggtgatttccctagggcagagactggccggcagccagccacagaggtaccccaggtcctaggtagacggccggggcctcccgggttcccctgctggtgagcgcacctgacccggcgggcgtggcaacaggcgtggcggcggggctgac

SEQ ID NO: 43396 - DNA, 396 bp, Mus musculus
  source 1..396: mol_type = other DNA
tttattaaatagtagaggtatgttaaaacatatacatgtaattaaaaataaaatactcctgagaattctttatcagtaacgggttgctgggacctgtgagttgaactagctgaatccagtgagctaaataaatactcatcaagataaattgtatatcggtataacattttaaaagaaaaaagagatgaattatatataaatttatttcaataaatcttttggaaaaagtatgaagctagtgtgtgctctggcccgtcctccagggctgactggaggactcagctgcggatcccaatttggactccaggatctaagggcagcaggagtcagagtcctgagtgctagctgctagaggtcttggagctccgggagaggctccctggagctaggagctgt

SEQ ID NO: 43397 - DNA, 371 bp, Mus musculus
  source 1..371: mol_type = other DNA
aataaataaataaataaataaataaataaataaataaataaatcatttttaattagatattttggggcatatgatctttgcctgaccaagggcctctcctcccattaatgctgactagcccatcttctgctacatatgtagctagagacacaatagatgtctatatttgccaggtactgccatagcttcacaagagacagatatatcagggtcctgtcagcaaaatctttctggcatattttgaaggccttttggatcctaggagtttgcacaactatgatctgcctaattggatgtagatttaattaatatatcctactgtgacctcatgaggacccattgtgagatataaggtaaggcctgccctgcat

SEQ ID NO: 43398 - DNA, 339 bp, Mus musculus
  source 1..339: mol_type = other DNA
aaggaaataccactgagtgtgcttatatttgaaaaaacaaagagccactgggacctgctggtcacccagcctgaaccacctgcctgtggaagccagggacagacgctcccaggcagagcacaggctggcgctggagtgtccacaggtgtgggcggcaatctggtgggactgcaggcggctggaggcacaggcacgcccaccctggcgacgagcccggggcgagcctgagctctgccgcccgggtgacccagcaggtcggggcggtgccaggtgtggctggagcgccgctcccccgccgccagcccgggggccgcgtcttcgggggagccgcctcttccg

SEQ ID NO: 43399 - DNA, 339 bp, Mus musculus
  source 1..339: mol_type = other DNA
ttactgaaaaccttcaatcattaatatcagtctgtctgaaatacagctgacatttatttgtttttaaaattgcaaagcacctaagctttgttttattgttggttataaaacaatttggtgttgactctttacaaatatcctaaactctctgaaccaagtatttatacatttctttggggccaataagaaagaggaaataccaagcagcagctagatgccacatgggatttccaaaaactatttgctgccttgtagcatgacagtctagactcgggactctgctgagtgacatcagctgtcgctgagagagagacattgtttagactaatctttaaaagt

SEQ ID NO: 43400 - DNA, 614 bp, Mus musculus
  source 1..614: mol_type = other DNA
gcccaggtgactcacgcggggacaccccggggcgggacctaggagtttctccgggcggggcgggcacggcttagagcgccctctgccggtcggcggcgcgccacgcgggtcacgtgactggaatttccatcggaaatcccctgcccagtctgtagtcttcggagccggcggagcggtgagccaggccgccgaaagacgtgcacaccccctcagccagcgagcccgatcgggtgtccatggggctccgcctcggcccgacccccaccacgacccggaccacgatcccgggctgcggcgcgcgccagtgacggccggccggccacttgggctctgcgagggctccgcgcggccccaagaggtgagcgatgctccggctgcggggtgcacggctgtggggtgcactgccagccagattcggggtgcacggccagctcagtgtggagctgccttgctagttagctagcgcagctggctgatgaatagtcatggtcgtgggtgacaccccccccccacttagtgcagcgtgttttcccatattgtgcacaactggcccaacagggcagaggccaccaaatccaacttggagacttcggtcagctaacctttcagtgatc

SEQ ID NO: 43401 - DNA, 417 bp, Mus musculus
  source 1..417: mol_type = other DNA
ttctccagaaaggtaaaagcattttcgcttctttctgaaggctatcctccattggcttaaacttgaagaaatttctaaactttaaaacgctccttggcgaatctaattctctctgaaattgaccttgccaccctgcggagggctctttctgaagtgctcatcacgtgcacagcccagaccaagcttcaagcctgttttcacagctgattttcttcagaaaagaagctataaaaaagtcccatcaccgcgatttccacatggatgtgacgtggaagtgcccaggtgactcacgcggggacaccccggggcgggacctaggagtttctccgggcggggcgggcacggcttagagcgccctctgccggtcggcggcgcgccacgcgggtcacgtgactggaatttccatcggaaatcccc

SEQ ID NO: 43402 - DNA, 397 bp, Mus musculus
  source 1..397: mol_type = other DNA
aaattgattttcatataacattgggctcctccctcagttctatagctaagaagttaaagaaatgtacaaaaccaaaattatttcaattcgctatttttaacgcaaaaacgcattgccaaatgggcacatgttttttttttttttttaatttaccggaaagggcaaataaacaaaattaactgaatttagcttcccttcattttaagtgtaagatttggttaaaagaaactccttgtggttccaagcagaggtgtcccagggcggcatggcacgtcatcttacccaggatagataggagggctccttttgtctcttttctccactgcagcgctataaaagcccctcttttactgcaagaggttaggcggggcaaggcagggccttgacttttcttctc

SEQ ID NO: 43403 - DNA, 241 bp, Mus musculus
  source 1..241: mol_type = other DNA
ggtcactaaagtgaatttaactacttagtgatccgccctttgacatttcatcattaaaatgggcatgtgctttttgtggtggtagtttgtttttgctaagaataaagtgctagccaagcacattggagagtctgaacaaactgtcttgaaaaccagaagtttaagttccctcaggctccaacacgcctcatgctgagggatgagagtcccaggctggtccccacccagctccccggcaggc

SEQ ID NO: 43404 - DNA, 237 bp, Mus musculus
  source 1..237: mol_type = other DNA
aacaaacaaaaaccctctgactttgttgtgcttatatgagtaatttttagtacctctaaaaacacaggagaaattccttggtaaagcaatataatgaatctttgacaaagagcgaaggtcttcttggcaacttcgaagaacttccttgagtcaattgcttgaaatctgccaggtgttctatattctctaatggtaaaataatgtaataagataaatttaaggaaacatttgccagga

SEQ ID NO: 43405 - DNA, 149 bp, Mus musculus
  source 1..149: mol_type = other DNA
ctaacaggtagactcttaggaaacgcctgccctctccctacctatttcacccttgatgaaacctgacatttcatgagtcagagctgcctgtgccaccctcgcgtggactccctgcagggggagctggttgtgcacagcagactctgggc

SEQ ID NO: 43406 - DNA, 254 bp, Mus musculus
  source 1..254: mol_type = other DNA
acagaagccaagctagtggctctgcgcgctagaacgtaacttgcctgcaagtgaattcagacttttcagctcctgcagcgcccaggatctcaggaccttcggggctccaaagcactccccagcagctggttaggccctgggatctaatgtcagggggcccgccgccctccagcagcgctgagagagaccgctgcaactcgcgggccaccgggctgggggcgccgtcacttgttgcgaccaatgaacggtgctca

SEQ ID NO: 43407 - DNA, 449 bp, Mus musculus
  source 1..449: mol_type = other DNA
ctatcaggctagactgagtcctggcaggttagagaaagtcatttgtatgaattcaccacacttgacagctttcaagtcttgtaatctcttgacaaaagtctagcaccaagcttggtacatgacttggcaaactgcacattcatctaccacattgcatatgcttggcaaacatttgaatgaagaaattaatgagcccaagtcttccttaattactggaatatatctgcatagtgcaactaactacattttatttcgtaaccatcaggaaaatgtcagaatagcaaagttttaaagttcaagcaattaataaaaacacaaggtttttatttaaaaaaaaaacatggaggttgggtctagaataatctctgaaagaccagttgattttagttagagcaaatcattggatttttgcccaaaagaaaaatggtcctcgcggcgtcagttccctt

SEQ ID NO: 43408 - DNA, 338 bp, Mus musculus
  source 1..338: mol_type = other DNA
gctcctgcagcgcccaggatctcaggaccttcggggctccaaagcactccccagcagctggttaggccctgggatctaatgtcagggggcccgccgccctccagcagcgctgagagagaccgctgcaactcgcgggccaccgggctgggggcgccgtcacttgttgcgaccaatgaacggtgctcagcaggggatcccccagcacgcaccccgctgctctgccactgtgggaagggaggaggtgccgcgcccggagagccgaccccggtgggcgctggatgccccagggaagcaggctccacccgccccgcggcagccgcctcagcaccccgcccccg

SEQ ID NO: 43409 - DNA, 839 bp, Mus musculus
  source 1..839: mol_type = other DNA
cgcctctcggcacgcgtgttgccacggtgcatccagcgccacgcgctgcccacgagcggaccagaacgagcgaggcgcggtggctgcgcccagcgctgcaaacgcctggcgggctgaccgggacagtgcccgcagcgaggcgcgcacagggtttcagccctctttcccagttctctgaggtcccggagcagtgggttcggtccaggctgcagcttcccagcagcgccctcctcaggggcgggccctggctctctgtgctgcaacgagtgggcggccacaggcgggtagccgagaggacgggcggctgcgagacggtcgctgggactcggagggcgcggcgacagagaggcggatcctttcgggagcggccacggaggttccgggacgcggctcggggtagcccgcccaccgcgcgtaaggtgttctccaggtagcgccggcacccagagggcgccctcgcccggcccgcgctcggcaggcgacagctcgcggctccccgagcgcggcgcccttgagccgggctgcgcaggttggccgccgactcgtccgcccgccaagaggaggaagctctgtcccttcccgctcgccgcggccggcgtccccaccccgtggactctccaccctgcagcgggcgagcggcgtggccacggaggcgccgaggaggggcgagccgccgccgggcagcggcgtggccccgggggacagggcgcccgagcggaggcggcggcggggcggtgaaggcgcggcgcgcgatggcagctgcctagcccggcgcgcgcggagcagcccggagctgtggctagccagacggtgcgtctgggctggggactccggggtcg

SEQ ID NO: 43410 - DNA, 501 bp, Mus musculus
  source 1..501: mol_type = other DNA
aagtgatacactccaatcctgggcttaggataaagagctcctttggatctgttgcaggcggaatcagcaggctgctctcttcttctagaggattcactaacgtgcgtgctggcggagttgggatcgcggcgcggagctcagccggtgtacttcagctctccacgtggcgactgtctccagtccgcacggtgacctggcggcttcagagagcgctcgaacgccgccgccgccgccgcaccggggctgcgggtggccgctcgtcgcgctcgctcgctcgggcgcggcggtggctaggacccgccgcctgggacactagctccgacctcgtccgtcggggcgcctgcgacgccgcacctgcccgccagggggcgcgccgagccccggcggcgtcgggccagcgctcgccgtccccgccccacgcccgcgcaggccgccgctcacctgtctgggccgcgggccccgggggcgggggcccggcgggagcgaagccgagggagagag

SEQ ID NO: 43411 - DNA, 536 bp, Mus musculus
  source 1..536: mol_type = other DNA
gaatcaaactctaatgctgaacttaactgacaggctgccaattacagctttgaaatccttcaaggaatttaacgttgtcctaaaatatcacaccgtaataacggctatctgattctggcagatccagtttccggatccaagcctcaggggccaggctccggcgcccgggaagttaagtcgcccagccgatccaagtctcacgatcggcccgggagggggcggggggcgagttcacccgaagccactcggcagagactgccgagggacggcgcttccgggcagacgcagccctgcgtcgtcgccgcctcagaaggagccaggctcgctaacagcggctcggaagtcaggggacatcagtctcgactgttcttcgaacaaagccgagccgcctgcggagaagccagccagcccttcagggcccgtcaaccgcggttcgccagtcgcgcctgggcgggacggtgggaggggcctgcctagcgatttagcggcctggaaggccacgccccaagtcggaagtgacggagccgagctagcgc

SEQ ID NO: 43412 - DNA, 515 bp, Mus musculus
  source 1..515: mol_type = other DNA
aacaggcatcccattacataaaatatacatttaaataaatgaacttagtttccagtttctcctaccctctttaagggctgggaaacaaggttcttattttttaattttactgtaagaaatgaacctttgctaaacaagtactctattgcagagcggtttgaacttgagctaaatttttttttagcagtttgaaataatttatagaccataagaaataatttgagtccagcctggtaaaattaaaaagtcacttgtatgaaaatacataaatactttatcaccataaaatatatactagttaaattatatacgttactggtttatttgctatatatagaaaaattaaaatcatccagagaagatgctgcattaaatagtgacttcattaactttagtacatactataattcacaattactttctattgctattataattttcatgtgtactgagtagccacataacagtgtaatgctgataatcttcatgtgagcagttttcattaataatttttg

SEQ ID NO: 43413 - DNA, 549 bp, Mus musculus
  source 1..549: mol_type = other DNA
atatatttatatatatgttttctctgtatagccctggctgtctaggctggcctcagtcccagcaattgttaagattattaaaacattcctaagaaaggaaaagaaaatgtaagaatttcaaaacttaatgctcatgtcctcatgacatgccaaatctttagttatttaactgaggttttgtaattaaatacattactacaattaaatatcaatttgtgaattgggttggaccagtgtatataactctgctttccataatctcttactgtcaatacaaaacaagggttttttggttttgttttaaagcttttttgcttttcattagctttcaaaagtttgaaaggtaaagcaagcagcctgctaccaaacctgaggtctcaagttctatccgtggatccacacaaatcatgtgcatgtgtagcgtgcacacacatttagcataacggctagatattttcgaaataggcttgacaccttaggcacggtgcgcatgcgcctttcgaatgcgcctataccggcggcgtcctccggcggcgtccaataggagct

SEQ ID NO: 43414 - DNA, 434 bp, Mus musculus
  source 1..434: mol_type = other DNA
ggggcccctggcagagggaccgtccctacctcattagctcaggcaagcctgcatggatgcactgtgtcttgccagagccacgtggatttcctttttccctgcacctcctaaggtgctctatgttaacaattagttttctagttaaagataaaaatcagtaatgttttttttatcattttcaaacacctaacaaactcttaaagagtggggcacctcagctaatcccatagtacagtactttaaaattaatagcacatgtaagctgctggcgcagaagccgattcctgcctgtggcaactgacaggctcagccagcctcccaggccggctgcctgctcacccagccagtcgctagctctgggcactgcagcaggctcggctctgtcccagcgctctgggagaaaagtggtgtcctcgcccagagagcctctctct

SEQ ID NO: 43415 - DNA, 359 bp, Mus musculus
  source 1..359: mol_type = other DNA
ggtctgtcattgctgtgggattaacaggacaggggcccctggcagagggaccgtccctagtacctcattagctcaggcaagcctgcatggatgcactgtgtcttgccagagccacgtggatttcctttttccctgcacctcctaaggtgctctatgttaacaattagttttctagttaaagataaaaatcagtaatgttttttttatcattttcaaacacctaacaaactcttaaagagtggggcacctcagctaatcccatagtacagtactttaaaattaatagcacatgtaagctgctggcgcagaagccgattcctgcctgtggcaactgacaggctcagccagcctcccaggcc

SEQ ID NO: 43416 - DNA, 431 bp, Mus musculus
  source 1..431: mol_type = other DNA
gcgttaccagctttacattggtaatgttactctggtagtgttgtgaaggaaaatttgtagtcaaaactggagtcaggacacaagtaatgaggccagttccctgtaagacattctggcagcttgccttaggtaatgctgaaaagctcagcagctcaacatggccatctttagttaggtctggtaccagacaaaacccgggttgtgtgggagggcagctggcgcaattcttgtttccattcattcattcattcactcattcactcactgcacccgggactcgcttccggctgcaggggcggaacctcagctccccgcccggtgcgcgcgcgcgcgaccccacccccacccccgccagatcccggaagcgcgccgggtagagggcgtggccgtggtccggccgggatctacagcggcagaggcgggcctgacgt

SEQ ID NO: 43417 - DNA, 334 bp, Mus musculus
  source 1..334: mol_type = other DNA
cctaaaccgtgttttgtgaaatcatttctgcaagatagatgtctcagggaaaatggcgccctggcttctgagtgactgactgcaggcagcagccactgctcctggcttgggagcgtcaggatgctaagaaaaagaagataacctttttaatgttgatcaagagcacatatcattctcttaagtgacaaatgtcatttacagagaagattttctttgaattttgcaaggtttgaagctttgaccctttagatgtgccaacactgaaagattgttaacgttgtcctgcatgatcacagactcattatttaatcagtttttcttcttgaacacttcc

SEQ ID NO: 43418 - DNA, 464 bp, Mus musculus
  source 1..464: mol_type = other DNA
gggacccacaggtaaccagtggtatgggtttggtttaaaaaaaaaggtaggcacctagcccggggctcgatctgtcaaaggctccattaaagatgtccctttaaaattaaaatcacccaaccccatcgaggtgcccttgaatggaagcgctgctgattcgggctcgggagccccggagcctacggagaggagcgaccgcgtagccccgaaagcggtaacagcgggacccggtgtgagccggcgccacccggccacggagcggggtttgcgcaggaaaaggcgccaccgcggccccggccgcccctccccagcccgggctccccgcccgcccgccgtcccggccgcgctgcgcgccaggagcagctccgcggcgcgagaggcgaatgggagcggcggccaggcgggctgcagctcgggcgaccgcggaggcggcgggcagggcgcgtgcgcactgcaggggcgcc

SEQ ID NO: 43419 - DNA, 650 bp, Mus musculus
  source 1..650: mol_type = other DNA
tagtcagtcagaactcaaatctgagccctttacaaatatggatttaatttgtgttatcctcattgttttgattccaggtcttggcattgaaagcacaagctacaataaaatggtttgttcagtgtgataataaggttgatgttttttacacagcattattagccttatgttgtatgaaacaaggatgtttaataacaggttatagatttatgtgttattattacatcataagcacccaattagcaagttcacatatttatgtattcaatcaatgtctaaggcttccttcttaattaattcgtgctaatgaaatattttacaaagctaaggtcagacagttgtttaccagagctgttaatgaatttaataagcccatacctgaagccatgaacccagtgtggctacatttcaaagctaaaattactcattcaaaaagttggactaattattatgccaaatttacacgtttatttactaaggcttaaaagctgaaacaaagtccttgtttttacttttgatgatcaaaaacgcttgtgggcgggacctcgccccccccccccccccgccagttcgcgagcgcgcacgcgttcccgggaggcccgcagtgaccccgagagcttgccgtcgccaagtgcgcaggtatgacgtcg

SEQ ID NO: 43420 - DNA, 336 bp, Mus musculus
  source 1..336: mol_type = other DNA
tgttcagctgtgacagaataactgaaaatcgatcacttgagagaacctgaattccttcctcaccaggcagggcagctgtgctcctgcggcagaagactggagggttaaacgtgcccgaattctgagcgttcaaaccacggcattgggccagtccctacagggacatggatgcatcctcctgagatggactcaatgtagctaaagtttcttctcatttacaatatgtgggcatctgaagacattgtacatatgtaacttgatgttagtttatgtcaggaaagttctgaagcgcagcgggtctcctcctcccaggttcggatatgcaaatgaggacac

SEQ ID NO: 43421 - DNA, 379 bp, Mus musculus
  source 1..379: mol_type = other DNA
agccaatggaatcccatttgcttggcttctcaaatgattatcctaaactaatttaccaatttcaactagggtgagttataagttctttctttccttatagaggagagacaagccttgctggcatcccttgccccgggatgtcattgagcagcaaggcgagcccagggcctagaagtctgtttaatatacccgttgaacattggaaactcattatttacctaccaaatacttcctgatgaacatcaggtagaaatacccagaaagagcccactgactgtatcagtcaggctgtttcccaccccgagtggaggttgaaccacatcagaggctgccatcctgaacttccgcttcacgctgcaggcacactgtgaacttcact

SEQ ID NO: 43422 - DNA, 526 bp, Mus musculus
  source 1..526: mol_type = other DNA
tctaattaaacactttctcttgtaagagtttctgtagtcatggtgtctcttcacagcaagagtcagggatatgtttaaaatatatcacaacatatacatgtatgattattcgagacattcaactaaaataacgcctaaaataaaattagaccgaccaaattggtgtcgaccaattagcagtatcaggtaactaattatcactttattgcttagaagtactccccaaatgtaattttcataagcataacagatacctatagtatcacacttagtcccattcacttatagaatcaatgagagtatattaatgaacaatatcctagccaagggtctagccaaggcaatcggcgttttctaaaaagtggatagtttctgatatcgcagtgtatgaaatattgcttccaaaattagtatgattatacgtatcactggacttgaagctgagacttcggctttccctaaagcctcatgcaaacatggctgttccagggcggaattttcggtgacatcaccacagaaagttcgt

SEQ ID NO: 43423 - DNA, 273 bp, Mus musculus
  source 1..273: mol_type = other DNA
agtgattgagtggctgaattaatgaatgagtgaatgaatgagtgagtgagtgagtgatcgtgtatgtctatctcatatttttgctataaatcctatttaaaaaacaaaacaattaaatgtttttgttaaatgaattcactttgcattgaatggattcagcatgccccccaccccctgcctccggggcttggtatcagaaccggaatctgaagaacttcattaatggttaccacattgttcccaagggaatccgttgtatgcatgcatgcatcc

SEQ ID NO: 43424 - DNA, 459 bp, Mus musculus
  source 1..459: mol_type = other DNA
atggagcaagatctgttctaaaattcactgaaaatgtttttatacagtacaggtattattctacttaacctaccatacattattatttggtttgcctgctctaccaatatttatgttagatacattgctggccaggaaaacatcacgtttttttttttttataaaatgtaatttctattgaagacatatcaatctagtcaaaatactccaatcatgacgtgtgttcacagatgactcagtgggtaaggttgtcctcagagttccacattcacactgtgtaaacaaaaccactgaaatgcttttttaaaaacttgtaagttgaacaattataagtcagaataattcacttcacacctaagagctttgatgtttcaaagtctctttctgtctgtctgtccgccagtctgtttgaaacagtttatactggccatgaaccgggctgaccttgaacttttgaag

SEQ ID NO: 43425 - DNA, 369 bp, Mus musculus
  source 1..369: mol_type = other DNA
gtttgcccatactccactggctaggggagtttggactagttagtaagaattgcagggctatgctctgggacacattagagctccagggcaatccagtcttctggagttctctcagagaacgcacatccactgagtcgtcaggcaagttcagcccttcctggtagcagggttaacgggggcgcctgctccacccatcaggtatccgatgataaggttagcagaccatgtctccaatcgctgaccataggcatggggaggaaggggcacatgcaaattggtccttttctattccaaccacaaatatatgctcggacttgaattccggaatgcatgcaagagaagtatgtaaatttcctttagatataaagt

SEQ ID NO: 43426 - DNA, 432 bp, Mus musculus
  source 1..432: mol_type = other DNA
cctgggtcatggcagggcagtcaccgcagaaagcacggcgagcgccaggtactggcccaagtagccgccttcccggccctggcccagacccggtgctctgggcttcccagccagcgctggcgcgcgtccccacgttggcggtcaagctgcagcgccaggcggcgagggagatgagtctcttactaatatttaaagagttaaagggtttcagttatgtgaacacccgggctagggtactgaccacgcaagggtcactccaggtcggtccaggattaaaatttgcaaggctcaaaatttatgttggaaaaaaaagtgaaatgaagattgtactttttttttttgtacttagttttggccaaaagcacaaaaaaggcgttttcggaagcgactcggccgtgcacaagggcaggaaatcttgccggcctgagtcac

SEQ ID NO: 43427 - DNA, 428 bp, Mus musculus
  source 1..428: mol_type = other DNA
gtggtgctatgctcgcacccagtgggggtcgcgctccaggatgggacgcccgaccgcgcctgggacctagcctccagcccacccccaccgtcgtaagggcggttgcttttgcacgggttgaaaacttaaggaccagtccttagctagcaaagtcccgaagttacttttcaggacaggacaagcaaaagtgtgacggacctgcctttcccatacctgtgtgtgtgcacgcgcgcgcgcgggaaagggagcaggacacttctccccttccagggccccggaggcagaataccgtttgtgagagcgagtctctttcaaatgtctccctgtagaaaaactgaaagtagaatctccgagcagatgtctcagcattgggttacagggtcctaggagccccaacccccacatgggtgaacccccggtgctttcac

SEQ ID NO: 43428 - DNA, 666 bp, Mus musculus
  source 1..666: mol_type = other DNA
ttggaaaaaaaagtgaaatgaagattgtactttttttttttgtacttagttttggccaaaagcacaaaaaaggcgttttcggaagcgactcggccgtgcacaagggcaggaaatcttgccggcctgagtcacggcggctccttcaaggaaacgtcagtgctcgccggtcgccgtcgcccgctgtgcgcccctcggtccgcagctatgggcgagatgcagggcgcgctggctcgggctcggctcgagtccctgctccggccccgccacagcgagtccgtcctgctgagcggactgggtaagtgtcgccgcccggctcttaggaacctggaggctgcgcgttgacaccgaggaggggagaggtcggcggtgaccgtgcactgcggtgtccactcggtgccctcctccggcccaggcagacagaggcagagtgcatcccggtgcggggtcctgctcacgcagcccgcggaagcctcggtcctgcccagggcggctcgcctggctcactcaggacacggtggccagtcgcccatcttctcgcaactcagtctacagcctgctaggcggctgggctggggggtggagcgggcggagcctggagatgggcggctctgagccgcttcctccttctgccggccccgccctttcgcggcgcagggcttataaagc

SEQ ID NO: 43429 - DNA, 338 bp, Mus musculus
  source 1..338: mol_type = other DNA
gatgcatggcttatctatataaaacttcactaatacttagttacaaaagttatggtttaaagcacttaaattaagcactcttctttatgcatttttaatactgaaattgaatctttttagctctccagaaataccttggtgagccctcaacagaaaaggtgggttttgctaactctgggggaccttaggtgttgaaaccccccccagttctgagccgatcactggggagcacagccagggcctggcccggcctcgcttgcttccgggtggttctccagccaggaggctcgcaggtccacgccccttggcaccggagcctcctccgcttccccgcgggc

SEQ ID NO: 43430 - DNA, 339 bp, Mus musculus
  source 1..339: mol_type = other DNA
caaattataatgcttcattaaagagacattgtttttaatcttatctcttgtaagtctactttctaggataagaatcacattaaatgttatctcagtttagaagtatccttacaactctgagtttaaagctaactttcttgttacgaacgttactacatttcaatttttttctttaaaaggagtagaaaaaaactgcactagaaccatcttatcaatggataagccaggatgctcgcctttgattttggggcgcaagaagaaggcctaaggaggcctcttgggtgtctctgagcacttcttggagaactctgagaagttgacagaagcatccgggtgctt

SEQ ID NO: 43431 - DNA, 437 bp, Mus musculus
  source 1..437: mol_type = other DNA
cattttcttagtatgctcaaggcggattcaccttactatttactattgttattattaataataataatactttatttaatgtatataagtacactgtagctatcttcagtcgcaccagaagagggcatcagatcccagattggggaaaaaacaatttttaccagaaatagactcattccctggataaggatccaggttacacagatattgtttgccataatccctttacatcaaggatgcaggacaaatctttaagggcatctttgatgtacaaatcaacttcatgttgtctttaaaatgtcaccactgagatatttgctgtgtaagcaaagtaagccaggaggcgcgcaggtccacgccccttggcaccggctccccgcgggcggcgccttccgccctgcgccgctgtgcccatcccctgcccacagagcgccgct

SEQ ID NO: 43432 - DNA, 353 bp, Mus musculus
  source 1..353: mol_type = other DNA
tgattcacacatgttctgtcaaggattgtttctccggcagaagactgttctgcaacagaaagaaaaatttccttcatttttgactgatgtacatgagtgttgaatctaattccctggagctacagttacagacagttatacacaggcagtgaatctctggtttcttggccagcctgatctacagtacctgaaaggagttgcaggtcctctcaacctctgagtatctcttcaggccccagaagacaatttaagtgcaaaaaagtttttgattgcagaactttctacaaggtctatggtagtaattgtcttcaagagagacgatgagctcatgctaagtgaggacctccgcctgg

SEQ ID NO: 43433 - DNA, 343 bp, Mus musculus
  source 1..343: mol_type = other DNA
tcacacaaccagcattgatttctgtcttataaagtacttcatacgaaaatatgtcagtctgtctgattgtttatgtaagtacacattcatagagatcctctgtttcaggtcaactgtgcatttttaaaaggactatcttgctataaactcaggctagaaagtgtctaaagccttgatccgtaccacgggaacaacttttacgctttgtttaagctgggtggcttttagggcaataggcttgcccacaaaagaaatattaatacttttccttctggtatgtaactgataccatctgtgagtacatttaaatctgcatgcttcgaaacaaagttggttacaaatc

SEQ ID NO: 43434 - DNA, 374 bp, Mus musculus
  source 1..374: mol_type = other DNA
tcagatcacctggatcgttccaacaaaagtagaattctgtggctgaagagactcttaatcctagcagaaactggtcccatgtagtagaccaggctagccaatggtttccaagcaaggcaacttgtttacaactgtcctccttataaactagttttatgtgcaacatacctagcttgtattcatctagagaagggttctcaacctgtaggtggtattaaattctatctcctaacagtagaaaattacagttatgaagtagcaatggaataattttatgcttaaacactgccctagagcagaatgtgtactctcagatttgaatgtctgaagctctcaggttattctggaaaccacacatgacttctgagtgacat

SEQ ID NO: 43435 - DNA, 155 bp, Mus musculus
  source 1..155: mol_type = other DNA
catctggcagccaggagaaatctcctttctgcaggcagttaggaggaaggtctcatttcactgggattggccttagggtgcccaagtctcattctaggcgcaggctgctgcgccacctactggacgtttgtgggcgggagcactgcccaaagaat

SEQ ID NO: 43436 - DNA, 549 bp, Mus musculus
  source 1..549: mol_type = other DNA
tgtccttcagggctttaaggagagataaagaggcatcctggtgcacctaaggaaacggctcacgtgacctttaccggccagagcgagcccacaagggcaagagctgggtcgcgcgggcggctgcgctccggccgttatgagcctcgctcctcgggcagcacggcccaagccatcccgagggcgcactccgcccggtgcggccgttcaagccagcgagcgtcgccagcgtgccctgttgctcccgccacgccgccgggggccctcgatgagtaaggccgggatccccgtcaccccggggtcacgactaagggcccagtggctgctagctgagctgtcatgctgctcgccaacgaggagctggaccaccccgggcgggcgagctcagggaagcgcagcccgggtacccagcgccctccggccacttccgcctcgcccagcccgcgggcaggaggaggacttcgccagcggcttcgggggctagccgggatccccggagctcctgggtccggcggcgctctagccgcctcgtgccgcctctatgcccccgtg

SEQ ID NO: 43437 - DNA, 312 bp, Mus musculus
  source 1..312: mol_type = other DNA
ttgtatatgtacttacacaaatttgcctctttggaaatgcctccagagggaagatctgggtctctgacatggttaccaacacagtgtgtcttaaagcaacatgcattgtggcaaatatacagtgcagctgtaagccagggacctggactttccctatgcagaagcctgttctacaacagaaagaaaaagattcagttatttttatctccattctacaccatgtgtatgcagtgtgtgcagaggtcgcatcttttcaggccccagaagaagcttctaattggaagaaaactgcggcagaacttttcacgggtc

SEQ ID NO: 43438 - DNA, 230 bp, Mus musculus
  source 1..230: mol_type = other DNA
aaaagtgcactttatccaattctataaggaaggctccttggctccttgaaaattgcctagcccctaaaaatagagctttttctgaatccaaactcctgtctgcaaggtgcagatgagtcctatttaatattgctcaaaaaaataaataaataaaagttgtccttcagggctttaaggagagataaagaggcatcctggtgcacctaaggaaacggctcacgtgaccttta

SEQ ID NO: 43439 - DNA, 273 bp, Mus musculus
  source 1..273: mol_type = other DNA
gaagtgagttgcatctcactggaaagatagagtttacctcaggtaaattttaaacagtaaaatgcatctggaaaaaaaaatcgtcccagcgatcagcattttcctttcaaacatttggttcaaatagcctatgacttctgtggcagtcttggtaaagccctgtggtcttagccggtattaactaagggccacttagagcaaagggtctggccctttctctgagttctcagagcaacgtacaggcatgttgcgttgggcctagcaggcccctcc

SEQ ID NO: 43440 - DNA, 464 bp, Mus musculus
  source 1..464: mol_type = other DNA
gaatgcactctgggtaatgctcccaagggggaagttaggcctggcctggctcaagctccctgttatagacaatgccccgctcattaaaaacaaatattcagcatggattttccttttaaactagagttcagggctcctgttagtaacataaaaaaggatgaaatttgtttctgaaaaaagtccagaatatcatttagttgataaaaatattaaaactagattttcttcgaagtggaccatatctaaggcagcgttgttgctagagatgaggaaaaattattcttttatacagctttaataactattaggaaattaattaaacacaataaattcaaaatgagttgatacacattatcaaagtatatatttatatttgtctgtgaaatatgaaatccaatggccatttcagcagtgtgccctgagcagttctgactggggcgcctgggaggggcgcctatagctgc

SEQ ID NO: 43441 - DNA, 336 bp, Mus musculus
  source 1..336: mol_type = other DNA
tattaaatacttttttaagcatgaggctttaggggtgaaacccaaacgtttattgtcctcatgaaattcatatcagaagctctggttctttggaagtagaagagcgagtgattccttcgaaattaaaatgcatttgtcggcggtcattacctaaaattcagaaccggttgcattcagaccgggatctgacctggccgcaaggtctggtggggtttgtgatcatacacaaatcacagtagtttggctcctctcgtgttccgtagggcggatcgtgggacctctgtggtccacgccccctggctgctagaaatccagccgcgttcttaccacggacgc

SEQ ID NO: 43442 - DNA, 218 bp, Mus musculus
  source 1..218: mol_type = other DNA
gcgaagctgccaaagccttagacaagtacgtgtctcagtctctgttgcagccgttcatgctgttagcacgcattatttagtttgcaaatacttaaacgacaatattgtggtgtcggggaaatctagctatatccgggagacttatgcacgtgtacttgaaggtttcacctagcccatctgtgtgtgctcgcatccaactgtgatttagtgataactaa

SEQ ID NO: 43443 - DNA, 388 bp, Mus musculus
  source 1..388: mol_type = other DNA
ggccaggtagaccagtggttagcacttactgctcatccagaggacccaggttcaggtcctggcacccgtgctaattgggcatacacatacgtttttaaaattatttgtaaaggtttttagtaagattctggaatttctatataatcttcaatatctacagtaatagagactgtgcaagattcactttgctgaagtacagtcaattctattgtagaccctaatgcattagagtaaaatattaatctgcaaagtaaaagccaggcttgtgctggatacttctgtgtagagagaaaggggcacttgtaatccgactgactaggtcatataagccttagtaagccagacatagcaagtgagcagcatgggcggagaccactgctccgtgggt

SEQ ID NO: 43444 - DNA, 298 bp, Mus musculus
  source 1..298: mol_type = other DNA
cacacacacacacacacagagagagagagagagaggccaacagaaccttaagatggctttggagcaactgccctctcagcataatattttcgtggcttaaaaagaatccacctttctgaggggcagtgccttggctaggtgattgaccttcccacgctaggtattccccaagccaaagaaatagcttttctctgttcttgtctgcattcctgaccagagaactaaggacatttctgaaactgttgctttcagggacaaagttttcttaactttgaaaaaaaattttttgaagctacca

SEQ ID NO: 43445 - DNA, 294 bp, Mus musculus
  source 1..294: mol_type = other DNA
atgaaaagcatttttatccagcttgtctgctgactcaggagccagctgaccactgagtttggtaatacaatagtaatagagtattgatggaaaaatgtctcccaggaaacacttaaaggcttttttaaacagacaaagtctattcccttgatggaaatacagaattgtctttatgctgagctttatattttagcagaatgtccagctccaactaggtattaaacatggtttaaactgaagcattacacggaccttgtaagtcaaaagactgagttagttgctgactagggacag

SEQ ID NO: 43446 - DNA, 395 bp, Mus musculus
  source 1..395: mol_type = other DNA
gagcctctcagaggaatttggacctgatatatatatatatatatatatatatatatatatatatatatatatatatatatatatagagagagagagagagagagtttgtgtgtttgactaaaacacattatagacctgtatgaaattctcaaatgatgttcttcacggggaaattctaattaaaataaaaccctcaggcttttcttagactgttttataagtataaatcctcaacaaattgttgatgtgatagctgtcttctagaacaccacagtatttactgtactaatgggaatattggtgtgctagtaaaatacctttaatttaaaaatacaccaattaagaacttgaccagtacgtttagtatggactcaactggttggttcacaacaatt

SEQ ID NO: 43447 - DNA, 538 bp, Mus musculus
  source 1..538: mol_type = other DNA
aatcccagactagttttgaacttgctgaggctccaaagatggtcctggactcaggattctcgtctcttcaagtcccgagtgctgagatcacaggtgcagattcggctatagcctcagttcagtgtgtaacacacatttcatagactgcagggtgttacatctaaaaaggtgcaatgcaaaacaaagcactaaggagaattttgtcttttaatttatttgctgaattgataaaacttaaaactttaacctcctacctttttgtcaatttacttaattattgaaggagatgatcagctattctctctcaagaatcaacttgttcacaatagttaatttgttgtcatttgggttcagactcagagcttcaaatctcactttgaatttggcaagagtcttatcaagaaggagaatgctttatggtttttataccaatttcaggatctatttgatccagtactccttctatctcattgtgtgattgataaaaaagaaatattattaatatcaatattattatgattcttgttgttgttgttgt

SEQ ID NO: 43448 - DNA, 410 bp, Mus musculus
  source 1..410: mol_type = other DNA
tttgtttcaaaaaccttggttcaatttccagtgctggacaaaaggtacatgttcttgtaaaaccaaccaacatacagtttgctctgtggttctgattcgctctttccagaaataacaccatcttaatcaaatccaaggcaatctattctaattaatttggcaaagtatttctttcacatgaacaactgatgtttctcatccgagaggtcacatgcttgaagtggaacagtgtgctcttaaagcctgggaaaaccacatcctgtatttcaaggatgcgatttttgcagtgacattttaaaaatggagttgtcaagtctaccataggaaacagaacctttaaaagctgagagtgctccctcagtcctggccaatgcttcctggggctgtgccccgagcatgcgcagtgggcg

SEQ ID NO: 43449 - DNA, 176 bp, Mus musculus
  source 1..176: mol_type = other DNA
ttgttttttttttaaatcagacaagagtttgcttctgaaatataggcagaaatcattatgcaaactgcgcagtttccagacttcagggaggggagtctcctggccagcgggggcggggacagcgggcgggcgcggccagccccggggcggtcccaagttgggctccctggtcttcg

SEQ ID NO: 43450 - DNA, 302 bp, Mus musculus
  source 1..302: mol_type = other DNA
tttgctgttatgtaaacaagtgctttacttcaaaacagaacaaaccccaacaacatcgttagattatgggttttaggataagttaaaaaaaaaaaatccaacagtacagccatgtttaaatctgaactcatatgcctgtatttcagatacaaaaggcatttcaaatggctataagcacccttctccaaaaaaaaaaatccaaaacaaagaaaaatattttttttaatttctaggggcccatagaagaaaagatcagagaaataatcgtttatttctaagttatattgccggctcccgggagc

SEQ ID NO: 43451 - DNA, 467 bp, Mus musculus
  source 1..467: mol_type = other DNA
cggataggacaatttccccttaatttggtggacttgggcattggcctacagtaactttgaaggtgacaactcaccagctagggcagggccaactgctgtgcggtccttgcagcttgacccttctcgggaaggggggctgggcaggcgcacgtccatgctgcacaggggcacgcagcccacggccccatccaggcaaggcctgctgcggtacaccgacccaccgaagacacagggtgcaccatctttggctgcgggaacagctagctatatcactgtaccagaagaggcccttgtgtggggctgcttggcgcagacgcggcagcagccgcagccgtccagcaccaggctcacgccggcggggcagtgcggcgctgcttcggctgcgcactgacattgcgcgctgcagtcctggcccatagcaggctgaaggggagggaggtcagtctgtgatcgcagctcactctgcc

SEQ ID NO: 43452 - DNA, 343 bp, Mus musculus
  source 1..343: mol_type = other DNA
caatttacacccgttaaacttcaaaagtgaatgtgatataatgttataaaccacgttctgttttaaaaataagctcatttgattctgctcatcaattaaagtgctgactagctaatatgtaaatataatagacatcccatatgtgtgtttgtgcaaacccatcagtgttgtgtaaaaagcaggtctgctcccggccaccggtgtccggcctttgagacctcgggggtccacacagcgacccggggcgttgagcggctcgggccggagcgctggccgagggctgggagccaagggtctggcgggggcggcgcggggcggggcggggctgcgagcctattaaagc

SEQ ID NO: 43453 - DNA, 277 bp, Mus musculus
  source 1..277: mol_type = other DNA
gctggctggctggccatccctgggattagaatctcatgctcaatttacacccgttaaacttcaaaagtgaatgtgatataatgttataaaccacgttctgttttaaaaataagctcatttgattctgctcatcaattaaagtgctgactagctaatatgtaaatataatagacatcccatatgtgtgtttgtgcaaacccatcagtgttgtgtaaaaagcaggtctgctcccggccaccggtgtccggcctttgagacctcgggggtccacacagcg

SEQ ID NO: 43454 - DNA, 427 bp, Mus musculus
  source 1..427: mol_type = other DNA
cacatactattttgtcgtttgctttaaaataattcttaaactgtagacattctaaaatgtaagatacactcctctcataattaaaaaaatctttatagtagtttcagaatttctattataatcaaacacattttattttgttttaattacttaatgtatattgctgaactttctctgcagaagcaagcaagagctcatgactgctgagctgtctctccagtcctccagtcctttaataatgacatctatatggatgtacaaactccctgtacaggccgagctggggtggagctcagctggtatgcaaacaaaaacaaaacaaatgagtagctttttataagtgtgattaatattctattcttgctatctacatatcccgattagtatgcattattacttctaaagctgtaaagaaggatttaaaagt

SEQ ID NO: 43455 - DNA, 334 bp, Mus musculus
  source 1..334: mol_type = other DNA
tcagggggccctgctgacgcaaaacagcataagaatgattctcagtctgaagtaagacaactcatattagctagtttgctttccctatcttgggatatcatgattccaaaaatgagattttcctggagactgtatttcaaaatgccttcctgtaaataataataataataacaacaacaacctggtgacacatgaaatgtgtccttgcaagtccccagtggacttaaagcaccctgccctgaggtgcccaggccacacataattgtcaattgtctgaggagagattaatgtcatccagctggctttataaacagatccaacctgattataaggg

SEQ ID NO: 43456 - DNA, 457 bp, Mus musculus
  source 1..457: mol_type = other DNA
cgagtcacgtgcttctataagaaactataataagctcattgttttaccaagagccttggctgtcctggacactttgtagaccaggctggcctctctatttagggtttataaacatttatttacatctccccaaagagaatagcctttggatagacaaaaatttcttcatactaagacaataaaaaaaaaagttttcagaaatttaccaggatgatgggaaaattgttttaaaatgatgtacttagtaccgccacttatttgcgaattaacaataaagggtttattctttttttttttttcaacattcaataaacgatgacgttgcggatctgcaaatgaaactccaaacaggtcgcagttccggctccagccaggagagggtggccttgcccgggatcaagcagcgctgtcagcttacggggtcacctctcaagagagagcggcggcttcctgctgg

SEQ ID NO: 43457 - DNA, 348 bp, Mus musculus
  source 1..348: mol_type = other DNA
actgggaaatttccagcagtgaatctcagatgatatcatgagtctgatgttggatgctacaatttcaaatgtcatcatgttgactaatgatttaataagagaacgagggagtattaaaaaaagatccggaacttatggacaatatgtgtaaagtgcaggtaacagtgacaagtagaatttattgtctctgtatacaaggcgacaaacaaaacctgtttctttaaaaaaaaaaaatcctggtttgaatttccatgtaattctcctcatctgctgggagaattgggcgagcatatggccacttccctcgccagtgcgtcccggagcagtcgctggaactggagggccagg

SEQ ID NO: 43458 - DNA, 196 bp, Mus musculus
  source 1..196: mol_type = other DNA
ccatcaatcactgatttagagaatgccctacaagtttgcatgtcaagttgaggcaagctttaaatactggcagctgctgcaatcatgcttttcgagagtcacagggcttgcttagactttggccagtaactgaaaaataaaagtgcaagggggcttagcgccggcccttgaatctaagttcagggaggcttgagta

SEQ ID NO: 43459 - DNA, 437 bp, Mus musculus
  source 1..437: mol_type = other DNA
tccttacgctcctttaaaaagaccgttttccgtgaagatccacaatttcttaaattaaaataaaaaacagtagcattcttttctacaagacatattcatattttaactattaaaaaaaatagttttctcttattttattcagatacgcaaaaaatttgtagatgatttcatttaacaattccaacttttagctcttaaactgcatctcattatagcgacgttcaaagcgggccaaggaatgctctctggatccctggctcgcccctccgagcgtgggacgggaagggccgcgccgagggcggccagaggtcggagcccgagcccagcacggccccggggaccgccccgatccgggtatccacgcctcgccgggccggccccttccggctcctcctgaagcggcgggtgccggggatgctgcgactcgcggggcgttg

SEQ ID NO: 43460 - DNA, 405 bp, Mus musculus
  source 1..405: mol_type = other DNA
gatcttgctaattttacaatgtttaggaatgccactctgacagcttaggtctaattgtactaatgtgtaaaacttaccactatctatctatctatctatatcattcatatatataatatatacatatcacgtgtgtgtatttttttattgatatcggaagaataaatggattcttttcaagcctatcctgtgaaagcactttttgtcgctccgagggcgaaacgcacccctgcggcggggcactgggcccgagagccgcgcgaacccctcgggaaggcccccctcccacgccagcaggcgccgggggcgtggctttggccgtggggcgtggcctgcccgcgggggtttccgcgcccggggcgtgccgggcgggggacgagggcggggcttccgccgttctctgac

SEQ ID NO: 43461 - DNA, 394 bp, Mus musculus
  source 1..394: mol_type = other DNA
attaatagctatgccctgaattaattgctaatggttcaggcgtgtcagccaactgtataattgcatggacgactatagaattgcaaggctacagagagcagcctgggaactgcagttttctttaccgggagctctgtagcacaagctactgcagatggttctgctgcaactgtagatgattcatacatagctggaacctaccttcaagacagcactgtctctagaggttcttaataagcaactgagcccagctgtggctgtgcacatgctaatgccagtcttacttaccaactagtgactcagtctactgttcagaaaaatgggaaagttgaaaaacagtccccagttgtccagttagctcacatctgaggtaccggtttcccaggctgaagtt

SEQ ID NO: 43462 - DNA, 148 bp, Mus musculus
  source 1..148: mol_type = other DNA
ccctccttagaagtgggtgccggggcctagcttcaaccctatagcccattggacacgcagactttgtgtgccccggtacaatgtaaatgagcatagctttttcttagctgtcatgccataaatatgaagttcaaataaatattcttaa

SEQ ID NO: 43463 - DNA, 338 bp, Mus musculus
  source 1..338: mol_type = other DNA
tcacgagtgcaggtaactccagttgcaggggtctgtctggcaccctcaaacagatatattgtgcagtcaagacactaatgtacataaatttcaaacttttccaaagtctctaaagatcctttgagttaggaaatgagtcttttagtcaaccttagtagtctagtagcttatcatgaaaagggcagggccctgccgttgtctggacccagactgtaccatgacaattccgacattttcagctctgaaatgtaggaagaggggtaaatgtccctgcctgggtttgaagtcagatatttttcggttcttctacaactgtagctgagttacagagtaacttg

SEQ ID NO: 43464 - DNA, 355 bp, Mus musculus
  source 1..355: mol_type = other DNA
aaatcatcgaggttctgaaggtttatcttgagaaccacccttaagtctctcagcggcactcagtgtcagtgggagcccagtgcacgtgtgactgacagtagtcctcacagttgactgtctacggggagagttgaaagtatcaaactttgccccgttcatcaagactccccgccggcttgggtgtgtttcaaggatgaaccaaaccctttacctgccatcagtttgatccccccaggaccaggacagggccggggagttcctgcatgccagcacggagctcatggtccccactgctcgggacaggccaagttactctgtaactcagctacagttgtagaagaaccgaaaaatatct

SEQ ID NO: 43465 - DNA, 410 bp, Mus musculus
  source 1..410: mol_type = other DNA
agaaggaaatagttcaatacaaattgcatttaccgattcttgaaatggtatctgctgtcaaccagttcagaaaaaaaaaaaccaggtaagccagggttacttagttttgaaacctttagctcatttatatctgcatatagttaacaaatggggaatgattctagttacttaactatatctacatatttggtaaaaaatgaatttaatgcatagtgttggcgtgaacacgcaattattgcaaaacaaccaggcgctctcagaagccggctgctcacagaccaagaagtctggaactgatgtcattcccccaaactttgggagtcattgtttcccctaactctgcgaaacccggggtacagctgcagggctcgcccacccacttgtcctgagcgcctggtctcggggctccg

SEQ ID NO: 43466 - DNA, 299 bp, Mus musculus
  source 1..299: mol_type = other DNA
tctttgttttttttttaagcatttggtcctgaaatttcagaaaaagtatttaacctccatactgaagcaagattttttttttaaaaccactattctagattttttccccacagatatttgcctcttgcctatgagttaaaaaaaaaatccaagaaactcatggatttacaaaaccatagctcagctacggttgctgtagagcttagcctcagactcatttcccagcagcttaaaccctctgagggctggggaccccgaccctcccaggctgcatcaggggaggggcctatggatccttc

SEQ ID NO: 43467 - DNA, 569 bp, Mus musculus
  source 1..569: mol_type = other DNA
tctcactttgtctttacaaaatagcaggtatcatacagaaaaatgataaatcatctggaataaaagtcaatgttgaaaataatgttgaagggttaaaataatttaagactgtttttgactttgtttctatcatagaagtctcctgggttgaattataaatgcagaaaaaaagcttcctcgaggaaattacaaatttagtgtttgccctgcacaactaactacatagatatagatatataaagatatatgcatacccatgtgtatgtatcctcatatttctatatcttcatatatgtatacacatgtatatatatgcatatatacatatatatgtataaatatgcatatgtgtgtatattatacatatttgtatatacatatatgtgtatatacatatatgttataaccgataaagctatagatagatagatagatagatagatagatagatagatagatagaccatactccagtatgtaggggtttcccctgagaaaagagtttgctgctggcccacctggtttacttacgtctctcagtcagtttcacacctttctgttctttgtgaa

SEQ ID NO: 43468 - DNA, 268 bp, Mus musculus
  source 1..268: mol_type = other DNA
ctttctgttctttgtgaagaaacaaaatccacctttaagcaacaatttgatttattagcaacttttacatgttgcattgtagaaacattttctttttaaagccatgtattgaaagggtgtattgacaagaatccagcaatggatgaggaacttcatctagcatcctctgaagagagtgttatttccagatgattgcaaactcttggaagttattataaaaatagctagacttctatttctgtaacaaacaaacgcagtttttattgtg

SEQ ID NO: 43469 - DNA, 434 bp, Mus musculus
  source 1..434: mol_type = other DNA
cgaagaagtgcaggttatcacaagtttaattactttgaattatttgcatgccaaacaataatggcttgattcaaaggcagggtttgctatttaagcagctcagccatcttgactgagtacattaagcgggcagtcctctcttagcctaggcactctaccagggatttctaagttgaggtagaagaacgcgcaagtttcagactttattatgcattcttccagtccagcccctggagcatttaagcagcacatggtggattcgctgctctgcaaattgctgaagaaatctataaccttctcgagctcggagcagtgcgggcggccgaggcggccgagccgctcaatcgcggctttccagcggcgaaggcgccagtgcgagcctcctcggcagcggcggcggcggcggcaccggcaccagcgcagtttcccctctc

SEQ ID NO: 43470 - DNA, 557 bp, Mus musculus
  source 1..557: mol_type = other DNA
ctctctctctctctctctgtgtgtgtgtgtgtgtggggcatacttcagcaaatgttggaacttcttattttgacagggtttctctgtatagccctggctgtcctaagaccaggctggcctcgctgggattaaaggcctgcgctaccaagcccagctgactgttaacttttaacaggcattaggtagacagtttaaagtttatttttcccaaatagtgtttgattaaaaaaaaaaaaaaaaaaaaatattgcagggcacacaataacacagtatattttgtagcggaaagcaaagcctttctggtgggccagagaaggggttaaggaatgccttcctggaaaagactctgtcctaaccacggtttcctcaggcccccttaacaactgctgctgctgcagcggcggctgctgcagcctgggattgccgggtttaaacaaagctgtgagtcacacacagcctgtaactgcacaggaagctctgcgggagaggccacgcctctctccctgtgaatcgctggcccggacaggggaggggctggcccttgctaatgagcaagt

SEQ ID NO: 43471 - DNA, 450 bp, Mus musculus
  source 1..450: mol_type = other DNA
caaacgaaactaattctaagaaggggcaaagtgtccatactttgcttacagattttctcacctttatgaaaatagaataatattctatattttgttttgtcttaatcctattgcatatacccaaagtttgttcaatttagttgcttagtaataacaatacattatatattctactggatcctgttaatttgtttctatgaacattagtgtgggagttagcagtatattcataaaacctaaattctaatttctcttaagcacagccaattctattttaatattaattatttagtttgttatctttatgcataacaatggtaggcattgggttgcttatttaatcaactgtttgccatttacatgcattctgttaagaatgtgttccatgaaaattaattataaaagctttgtgtattgtaaatatatgtttttttaacacacacacacaac

SEQ ID NO: 43472 - DNA, 396 bp, Mus musculus
  source 1..396: mol_type = other DNA
gcaggtgcatctctgaatctgagaccatagtgagatcctttaagatggagccaggcaaagggtatcctgggtgccagtggccttttcaataacaacctgttatggagtggccatgggaagccctgtgacagagtctcttttaataatgtcccttggttatagggacagcttccacctgtgaggttccccgtgggcaacttcagttcccttctgggatcacctggacccaggtagtttctagctttcttggcaataatgggtatcaattacttccttaatgctaaagaaccaaccaaggaccctttaaaggcccaggcctgggaaggggtggggactgccctttctcacccacccttgggcggtggcagggcagagctggggagcactgtctcctcc

SEQ ID NO: 43473 - DNA, 551 bp, Mus musculus
  source 1..551: mol_type = other DNA
attagcagttgatataaaattcaaaaaaaaagttaggcttattcagttttggtcatacttacatgtgtcataatttgcagacatgagtaaaagtaagagcaacccttttattaaatacttatttcttatatagctacaagacagtaaaaacttacccaacattttattttggtccaagttttatttatttcgtgaacaaacgagccttattccttatcctatcaataagggctctggtgggaccgccaccttggggacagaaccccaggacacctctcctcgcacagttctgcctctcagagttgaatctcagggatccggcagggagctgcgccaggtccccctttcccgctcgccgccagagagccgcgcggccaccgagcccaggtggcgaacaaaggcggcgcggggcgcagggcgcggggcgcgcggcccggctggcgcgcgtctccctagcaggaggcggcagtggcggcggcgcgcaccggagcccgcattcctccgaagctgccggagcccgcggggcgacgtcaccccaggctccgcccccg

SEQ ID NO: 43474 - DNA, 578 bp, Mus musculus
  source 1..578: mol_type = other DNA
aaaattttgtttaaaagaaacaaaaatcaaaataaacagaaagattggttttgatgtataaaaattagtttcacaaggtttctgttatttatttatttatttatttatttatttatttatatttttcaacttatgtttagatcataagagcaaatttatagagtttatttatttatgtttttaaatctacatttaaaaggagagcttcaaagaggaagcaaacatttaaatatatgtcttataagtagttctttctttttattttattttattaattaatttacttttgctttaaagaacatcaatttactctattaattctgagctttaaacttcagcaaaaattttaatgtgtaaagataaaaggtggtttctattgtctagagtatcagatttctaaaaacagctgacaacagcttcttttgtaaccaagtttatagtgccatatttaaggtaagacactgtgcctgcattctggccatgtccagtgttcatgccacattttgccactgctgtggttgggtagtgtcagttcagacaccccatgtgtttctacttcagtgtcagaaggaaatgca

SEQ ID NO: 43475 - DNA, 348 bp, Mus musculus
  source 1..348: mol_type = other DNA
gttggaagagttgattcaccttacctaaatggtagaattgtgtaagtcagttgtatataaactttgttcatttatagttacgataacatctgaggccttgaacttctaaaataagtcaccagtgctaaagccttcgcttttaactcagtttgacatacgtgtaaagggaatttcctattacctttttgtaatttggtttaatttgtcatcatagactattctgacacaattcttttaagcttttgatgaatctttttaaattgtaagttctgatcctctggaagagcattgacagcattgctgagtaactctgtgattcaactgataacctgtctagcactttgatcg

SEQ ID NO: 43476 - DNA, 813 bp, Mus musculus
  source 1..813: mol_type = other DNA
agtgctgggaatcacacagcaggcttcaagcacactaggaccagataactgtgttactctgttacccttaacttgttacaaataaaaatataataaaattacatgtatttctaatcaagaaatccattaggtatgatcatctttgcaatttgtaaaccttaaattagcactgtgggtttaaatttggccattgtgtgtataacaaaagtcacaatatgaactatacactttattcaaggacatatccgaaacttatttacatatcatcattattatacttattgttattactatgaaagttattttggcaaaagaaactataaatccaggaccttaggttgttagataacattctgaaaaaatgaataaatgcttttatgattttttaacaattttacttttttaattggaacaatttgatatagtctaagtattttacttgaaacagaaaggtgtactataactgtatcacatgtatttttagtatacttctagaaattattattattaaagtatcggcatttccaccaatgtggaaattattcaatattttccatgaattatgtaaacacatttttatacaagcattctaatttaatgtcattgataatgtaatttgtaattataatgtacactgtaaaaaaatagaagaatttcttcattaacaaacagcattatccaatatttgaacaaagttacttttggtaaaggcgacaaaacttctaagatgtacttctttactggcattctgcctggaaaatagccaagaggaaaagaaatcctggcttcctcctttcttctccaataaaagca

SEQ ID NO: 43477 - DNA, 414 bp, Mus musculus
  source 1..414: mol_type = other DNA
ttcccctcaaacattaggagtattattactgtgaatcaatatggataaatgtaaactggaaacgcatttttcttaattcattgtcagatcagacgattctgttctgactactattactcacgtgcacaacagtaaaaaaaaaaatggatctcagaaattaccagtttgttttcactgtggtgcccagtgctactgagatgcacttaaaacataagcacatatttattcagtttgacgagcattgtctattcgcggaaaagccatcccaggactccgcccgagctgggggtgggggcgcgcgccagcgcctctaagagctgcgtctagagactccgctgggtcaggctgagggtgcaggatgctccaaccggcttaagccaaggcatccggagccaggctgaataattctgcatg

SEQ ID NO: 43478 - DNA, 505 bp, Mus musculus
  source 1..505: mol_type = other DNA
ttcaatgttatatgctaattaattagtcagttgactaaattagataaatatatggttgccattatttagcttgaaattatggcatgcttcaaatgacacattgttatattgtacagtcggaaaactttagcttgacgataagagcttattacttaaaattcagtgtaactgatttgctatattggccctaaagactttattgactaaagtaatctatatatatatatgccccatttctattttgcataaaggcaaacattcaatatgtttcaacatacattttgactcatgcttgctatctcactgtagagagaggttcttgctcctaaaaaaagagtctactttccaaataaaagaaagctagcaagcagatctctcctggcaagtttgaaaatgctaggctccattataaaagttaaaaatgtcctggaactgctctggaagcagcagccttaaggccgcctccaagtccctgacgtcatagtagcccagctgctgttgtgac

SEQ ID NO: 43479 - DNA, 427 bp, Mus musculus
  source 1..427: mol_type = other DNA
gtcttttggaacagacaaactaatagcttccaccagtagaactgctaaatttgagagctacagattctgagacctaagatctgagacttaaaatctcgtgtatttggaaaataatttttgtgttaccctaacaacaaagaactggggataacccaaacctcacttatatttggctttagaataattttgaaaaatactagaattaaacacttctagtaacgatttcttcctaaacctaggcttattaattcttccttattaaacacacctttgtattataaactggtacatgtttttatttctttgatcattatgtatgataactacagccgtttttaaaaacaaaaacattttgcttcgagtctttaaagagcacatgacatagtcgtgtcacaaaacctgctaagtattttttgacaaacgtact

SEQ ID NO: 43480 - DNA, 329 bp, Mus musculus
  source 1..329: mol_type = other DNA
tctttaaaggattcaacttcagctttaaagatataacatttgtcaggtcctcatgattctgtgaaaaaagtcagtgcataaattaataatgccaatactcattcaataaccattcctctgcagtgcagtgaacatcattgggcattttataaactataaaagaggaagacttttaaacagaattatcaagagctttttgctacctaaagccttcgttttcctgaggaacaatgtattactcattagaatgccagagaagttagtaataatgtcttctcattttctctgaccattaagtggctaaggcatggaaactgaaatgacacatt

SEQ ID NO: 43481 - DNA, 178 bp, Mus musculus
  source 1..178: mol_type = other DNA
tcaccaaatggagacaatctttccacagagagagagagagagattaacactctttaacagtgactacttgagagctcctacagctactttccctggaaaaagggggggtcccagagcagttgctggagtgaggcagggtctctttgggtctggggtatttggtacagctgggacagaa

SEQ ID NO: 43482 - DNA, 495 bp, Mus musculus
  source 1..495: mol_type = other DNA
attgatgtacaacctttttcttcaggctataaaagttcatataatatttcctataacaactgaatgaataacccatgctctggatttacagctattaatgttaagcagatgagctcttcaggtgcacagtacatttttcagtcctgaattcaaagcaacattgttgagcacaatgcaaacaagaatgcggaaatactttcaaaggtgaaaaggttctctggtccattttgtgcaacttcaagtagagaaaactgttctgaaaaagatcatgtgccggttaaaatgaacaaggactagattttgatgtgtaacaccatatatgaaatttatcatatctggccatttgtgaggtgagaaacataggacttgacccaaggctgagttttggccagcgtggggaccgccagccagggccgccgcgcgcgggatcacggtgagggggcgtggcttccgccggcgcggccccgccccttgagcgccgggcggtcacgtgac

SEQ ID NO: 43483 - DNA, 284 bp, Mus musculus
  source 1..284: mol_type = other DNA
tttgaatattgtaacacctagtacttatagctattatctgtaggatgcaatactccttcttaaaagaatattgaagctcacagatgttacaaaattacaggatacttgtatatgctgtgcattatcagtacttctggaacaacatagcgctcttgaaaaatttttgcaaaatcactaaaagtacactcagtgttcaaatctcgaacgattaagagtctacacttaacagtgaagttttggtccagttttgtccaagtggagtatccctggggaaagggcgggcc

SEQ ID NO: 43484 - DNA, 345 bp, Mus musculus
  source 1..345: mol_type = other DNA
ccacagtattttaaagacaatatctgcagtagcctcattactatatgaatgaaaataaatataagattatatggcaaaaaagaatatataatattgcttctgcttttgtgcagaatacagcttatgaaaaagaaatctattttcaataaaagaaaaagaaagtatatttatgcaataatataaaaatatacattgcttattggtaatatcaaaaaatcgggctaagttcctaataaaacacaaacttctttcatttactttcttattcattgggttcgcaggacacacccttttcctgacgtcacagccgtgcgccgtccggcggccaattcaaatcgaccactc

SEQ ID NO: 43485 - DNA, 486 bp, Mus musculus
  source 1..486: mol_type = other DNA
attacaagataattcacttaaaatcactactgagtttaaagtcacactaagtgttattatgggttctagaactagacatttatttgaattttatcatttgggtaagtggtaagaaaataagtctgaatctgtctctttctaatatgctcagcaaatgccatgttgtaaaaaggtgagatcacatcatacttaagctctttcctaaatagccgggaataatttacattgtactataaacaaaagcaaacatgtagagaccaatttggccgggtttgtttgtacttaaaagaatcgaatttctatactctttttcttttgtaacgggagtgtaatacactatagggacgtgaaagcaaatcctttagccgggctctcccatacccagagtctggccctgcgcgtgcgcagactccgtgtcactaggcgggccaccctagggcggcgattccaggtgcatccgcccgaggcgggccttgcgcacctcag

SEQ ID NO: 43486 - DNA, 451 bp, Mus musculus
  source 1..451: mol_type = other DNA
aaaatgacatataaagtcatgttaagactcttaggtaattcacatcacacttagattatgttctttactatgaaaagcaaaggacaagtacacttgtttctgacttttaaacaggaaaagcatctgcattgaacatgtatctacaatgtatttacattgtaaaatgtatctgcactgtaataaatgatttatagatttacacttatcatcacttaaattttttttagcaaatctcaaacagctacaacttggggctttcttcaagagcattataattggcctaatcatcagaaactagaaatttctctctttctaacagatgagactatatatatacacatatgtatgagtgtgtgcatgtatgtgcatacatatgcacttgcaaacacacttaatttcatcaggaaatttctatctagaactggctaaaaaggaaggctttaagacccgc

SEQ ID NO: 43487 - DNA, 488 bp, Mus musculus
  source 1..488: mol_type = other DNA
tgaccatgtaacatcatctgctgctgaaatctgcagtaccaagaagctgtgtgtgttgatggcttaggacacacctgtcacacacaagagtgatcttcacgatcagatcctccgcagttatagccactggactgtaaagggaacagcgtccagccttggctatttagagctggaaggtgaagtaaaaggactttaaggctccagcaaggggcagaccgtactcggttcactgactgaaatggccggggcctgcggaggccgcgcgcgcagctctccggggcggagccgctgggcccagggttcgggggcccgagccacctcgaggctgtccagcctgcggctccgaggtcgcacggggcaggcaagatgtcgcagctgcagcccgcatcgctaaggcggtcggctgagctcccgggtcccagccgcagcagacgagtgcagcgcgcgccccgggtcgggcggagctagaggcgggcgccgggctggcg

SEQ ID NO: 43488 - DNA, 301 bp, Mus musculus
  source 1..301: mol_type = other DNA
tatccaggaaacacttaattaatgtgttctatcatgaaatccagccctgaaccttcagcagcccctgggactgagagtccaaacaggtgaaaattgatctcttgtagatctgtatatcagtcatcccataatgtgaaacgataaactgtaccttgccacttgttttgtcaaggcaagttactgccaacaaattctaaaagtcctgttgccggagtgagcctggctcagtttaaaatggaagttgaaccttagaaagtgtcattttacagactcccgctctgcctgacaggaagtgtgcctg

SEQ ID NO: 43489 - DNA, 389 bp, Mus musculus
  source 1..389: mol_type = other DNA
tttggataatccaaatccgagaactttgcagtttctgtgtccagagatacaaaggacacggggacaacctcctgcagttaggcacctaaagctttaggggtgggtcgccgagcctagcactcccaccccaggtgatggcccaaaacccaggagcccccgccccatgcgctctcgcgcctgcgcccgctcccgccgccggcggtcaaccccagcgctccactcccggctcccaggtgcgcggtggcattcccacgcctctgccaacgcctctcggcagccattggccagcgcgggtccaccgtcccagggaggcggggcctcgggcacacgaagaagcggaggggccccgcccgcgctggggggcgtggccagtaccgggtcttgcgccc

SEQ ID NO: 43490 - DNA, 376 bp, Mus musculus
  source 1..376: mol_type = other DNA
gaatcctggatgctgctcatggatgctgcctcagggttctgtagaatctactgagcaacattctataccaacattatgctatgatgactatacattttctagtatagttcccggtatagtataccttttagggccctgtaaataaataaacctactttgttacaaataaaattggaattcctttttatttctctatatccattaactgcatttaaaagtttgtaccatcaaattgtcaatggaaactagtcaggtagtcctggaagatcctgatcagtttcctgagctttgttaaactggttaagcgaagcttcttatagctagctcttcctgccgaaaggaccatccaaagtctgagcacagaccttagtacaga

SEQ ID NO: 43491 - DNA, 431 bp, Mus musculus
  source 1..431: mol_type = other DNA
ttatagagaaagagaataagaaaatgctagactgtttcatgaagtttggccttgacacaggactgaagttttagtcttctctgaaaaggactacacatgtcctattaatgtgtcacacaaactcagtttttcttctgcctgttggagtaaacaaaaataagtgcaatatagtgtgatgaactttatagaagaagtatacacattacataaccttaataaactgtgtttaaatgagccaattacattaagtaagggttctataaatgggcatataacaaagttatataatggtcagttgacaatggtactggggcgcccaggagaagcctcccactgggtgcgcagagcggccggcaggtggcgcccgacctggcgttctcggttgcgaggtaaccagcagcggccagtggtggccgccgccagtaccccgc

SEQ ID NO: 43492 - DNA, 524 bp, Mus musculus
  source 1..524: mol_type = other DNA
ctggtgtacctgagcttcaaccgcacctgattgaaaatttgccttggaaaatattttagaacaaatcaataacaacttcaaggttaaaaaataatctacacatttaacagatttttcctttgacatgaatgtgtaaattgaattccctccctattttaaaaaaataaaaatggttggcttcccaaaaatgttttcattggctttagaaaactaaatcacaccagtgtttgggtgactaatactaaaataaagatagatcaacacataattaagttctggctgagatataattgtaacagttatgaatatggttatgttaataagtttccctgattcctaatgatgatccagctgattaatcagggaagatccttcctatcgcagaagttctacttaaagcagagcactaaggggcgcctgcaagcgcttaagcatttggctggtgagagcacagctcagcttagatcaccctcactcctgtgtgcgtgcgactgtgtgcgtgggcgcccgcgcgcgtatgtgtg

SEQ ID NO: 43493 - DNA, 413 bp, Mus musculus
  source 1..413: mol_type = other DNA
ggcagcaacaggctccagagtgcgtgtccgcaggtaactgctgctgtcacaaccggatggtgcatgaggtctggttgcaacttcaagaggcccttgcctcgtgccaagcacaggactgttggttggtgtaatgcttctggcagggttgcctcagccaagcaagcaagcaagcacgcaagcaagcaagcaagccagccagccccgcaacggccagggctgctgcccgccacgacctctgaggcaaggggaagggcgccgcagggcgtccgcgcggcccccgcagccgccccgcccctgggccccgcacgcggagcgcagaacagaggcgcccggcgcgcatctcagccgccccgggagcccgcgcacccgtgcgtggggagggagtgcggggcgggcgagcgctcgtcgggcgt

SEQ ID NO: 43494 - DNA, 395 bp, Mus musculus
  source 1..395: mol_type = other DNA
attttttgaaaatactatcttttttccagtgttttcaaaggattactttgtagtacgattttgctactcaggatgaatttgaaaattgttctaactctgggaaaatttcactgaatctgtagattgcttttgcaagattgacatttttattatattaatcctgccaatgctgaagtctacaccaagatattttatattatttgtgatgtctagccaatttgctaaagttgtttatcagttacagtagttctgatttttttagggtagcttatatagtctatcatatcatctaaaaatagcttactgatttagctagaaattcgagtactatattaaatagtattgccttgattatacttaatagtattaaatataatgttattatatttaatata

SEQ ID NO: 43495 - DNA, 364 bp, Mus musculus
  source 1..364: mol_type = other DNA
tgataattctcagattggttaaagtttatgatcatcaatgattaacacctgtctagaagtgggaaggtgaaatggcaatttagctaattgtatttttcttcctttctttcaagttcggaaagggaaatggtgaaatccatttctaaaatgtgaacagtggattttgctgaaatgaattcagatattttgtttttaataaggtgttggaataaaaccctgagcttctcagagacattacatgcttcttattgactaatatttaaaaatattaattttttacaacatgactagcttaaaagaataagtgcctaagaataaatctgagctatctagggtaagattactttaattatatcagagacac

SEQ ID NO: 43496 - DNA, 454 bp, Mus musculus
  source 1..454: mol_type = other DNA
tctcctttgttttacaaattaaagtgggaagcagaattatgtcttctataacactgacctacactggagttcagtaaagagtcgtacttaaactcaggaccctttcttacagtttgagtaatgcgcactgtgctttgaaaattaaaaacattttttttaaaaatagatttccaggttttgtttattataatcccagtataaagatgcattacaaggaaatatctctagaagtaactggaaatacagtttattaggagttttcatcctcttcaaagggaatttaataggaatagtttactatttcttaaaattaaatatctctgagtacaacaaaagcaggaaaaggtttctcaaccttaattaagttgcaaaatcaacccgcactcccgggtcttgcacagctgttccactagatcagttatagctggacctggcgcttacaacgctagagctc

SEQ ID NO: 43497 - DNA, 275 bp, Mus musculus
  source 1..275: mol_type = other DNA
aggtacaggtcttaaattcctgatctttccaagacttttaacatgaaggtatgctgaattctttcaaatgcatttttaatttgaaccatttctgcatctctaaaaaagcctgcatgattgatgaaacttttgacatgttcttggattcattaggcaaaaattttatcgagtatttttgcatcaatgtaatttatctgatcctcttttactagaaaattgtccatttcatccaaattttccaattttggtgagtataaacctcaaagaaccagctc

SEQ ID NO: 43498 - DNA, 471 bp, Mus musculus
  source 1..471: mol_type = other DNA
aactcttagaacttaatttgaagcatgatggactttaatttgatccatgaatttagctaagcaaagctgcatattttgatagactaggtaatcattttagctacactctagtttaagtaccagaatagtatgccaagctcttccttgggtctttggaagcaaacatgggtgtgtttccaacagaaaactatagtttcgaataaaactatctttaaaaaatgtagaagtcctaatagggaacgtccctggaatgcatttgtttcagggaaaagagaatgaagaaatgctgtttgactttatgcatttattctcccattctttttatttaaatattttatttatttttatgtatatgagcactctatctgcatgtacagttacatgctggaataggacatcagatcacattatagatgattgagcagttagtgctcttaaaaacagggctgtttgatttttacacagagactg

SEQ ID NO: 43499 - DNA, 384 bp, Mus musculus
  source 1..384: mol_type = other DNA
ataccttaaacccctagatttaggggtcaaataaaaacgtctggggttcccgcaaactgggttaccatcttttttcgttaactaatactgtcttggacaaagttctgttttctgaacgtttttatacctctggagaaatgataatgtgctcatttttagcttgaaaatgttctgtaagagtactttcactcttacaatgacttcgaatttttttttttttttactaaaagaaggaattctactaaaggaaatagtatttcctcacgatacccaataatttaaaaatattatacttgtcagattatgtcatccttgtaatattgacaaaggcttaaatgtactcagaatctagttacggttttagcatatctggaggatctgcag

SEQ ID NO: 43500 - DNA, 503 bp, Mus musculus
  source 1..503: mol_type = other DNA
atgtttggggctagtacgtgttcctttattataaacaaatataaaccaagtaactatttagtgttcattaaaaaagaagacatatttatctgttttcttagtttttgaagctgtcaaatctattattttcggtatcttattgtagttttggcaaagtcaaatctggaaataacaactgaacaagtctttaggtcaatttttcttatttcacaactttaaagtgaggtgcaagatcctgggacagacctctggacgaaccccgatgagtccaagaagccgggctggctgtcgcccacaggctgcttccgcgccccgccctggtggcgatgcctctctgccaggcgtctgcccagcagcgggcagtagctgtccttcccgaacgccgggcgggctgcggtcaccccccagccaatcccgagccgtcgcagacaggcagcgaatcggcggccggcattccaggcgcgatgagtcgaactccgacgcggggatcgggcggcccgcgg

SEQ ID NO: 43501 - DNA, 511 bp, Mus musculus
  source 1..511: mol_type = other DNA
ttttatactgctcaaaacagcaaccttctatgtgaaagcttttttaaaagtgttgcttactctctcagttcactagaatgaagatttataaaacctatcaactcccatttacatagaaattgtatcataaggaatcactaattaagcagcaaaaatgacttccatgtttgatcatttcatttatttaaagctataaaactatttgaaatgtcacattttcatataaccaaaggatataaaaataagtttgcagttttacttttacatcaacatatagcaatactctactgacaaatatctctgttttcctgttttttgtttgtttgttaaaaaaaaaaaaccttttgggacctcctagaaaatttggatttctcttgagaggttcttctcaaagcaaactgtaaatttattagctcaggattcacaaagtagatgaaacgagtttaagtcctttaaacatacaaggatgtgttgggttacttgacacaaccagttaaaccagtgctatcct

SEQ ID NO: 43502 - DNA, 491 bp, Mus musculus
  source 1..491: mol_type = other DNA
tcaaatagttttatagctttaaataaatgaaatgatcaaacatggaagtcatttttgctgcttaattagtgattccttatgatacaatttctatgtaaatgggagttgataggttttataaatcttcattctagtgaactgagagagtaagcaacacttttaaaaaagctttcacatagaaggttgctgttttgagcagtataaaaatttgctcattgagatgagctcaaaatacttaaaaattctctttgttaggtgttgaggctattgtttctatttcaaaaacatagaactcgatattattgtaatatgtaatattatatctacctatttacatatatacatatattttatatatattatatgtatacatgtacatataatatgtaatgttataataatatatagcatattattataacacagcatcactacatataggaatgtcaaatccatttggaaaattgtgattttcttaaaagtttatctat

SEQ ID NO: 43503 - DNA, 431 bp, Mus musculus
  source 1..431: mol_type = other DNA
gaagcaattttcttaaatcatttataatgtgaagtacaaaaatgttcattcatgtgctcattggttacgttgcaaattcagtagctacctgcaaatcaaacttctgatcctagaaaacaacctggagtcagctagcatttgctaagtgatatcctaactcaggtttggcatctgttttagaaagattttctttgtgacttcatgaagagaaacgaggatgcctccttttctctaaactgtcactggctttggctaccagtcagtggctgaaacacatttctactatacttataatttgtatgagcattttcgatttggaatcaaaagcacgtgcaaagactattaaaaggaacttgcgtttacttttcaattcctggggaatgacattgtttccttatctggctcgatgcagactgagcaggattcacagt

SEQ ID NO: 43504 - DNA, 269 bp, Mus musculus
  source 1..269: mol_type = other DNA
aggaagttaacgcaaattagtgatttatctgagttagcatttaaaagcctaacagtagtatttcttttcttttattgcaaaatttgttagcaaacagggttgagtaaaaccgcccattcttacgaagccttttcatagaatctagtaggtttccaaccctagagtttgtattcattgaaagagataaagtttcctttgtgaactgcaaactctaaaggatttcccctttctctttgagagtaaaactgattcaggaaacttgaagctct

SEQ ID NO: 43505 - DNA, 338 bp, Mus musculus
  source 1..338: mol_type = other DNA
ttccagatatagatcaggctagctttgaactcacagagatccacctgtctgtctcctaggaactcagttttactgtggtttagcttatgaaagaaaaatgaaatgttcctgtttcctgctgctgcaatagagaaaaattcagaagttttccgagcttggtgttttcttgaaagcgtaggagaaggctgcaattgctagttttacatgcaccggtcaactggtgacctgtacgggtaatggctcctgcgaatttacatggaccaatcagtctcacaggctgaccaaaaaaagaaagtgaaacccggaagggtttcctttttgaaagttgcttcaaagca

SEQ ID NO: 43506 - DNA, 334 bp, Mus musculus
  source 1..334: mol_type = other DNA
gccttttcatagaatctagtaggtttccaaccctagagtttgtattcattgaaagagataaagtttcctttgtgaactgcaaactctaaaggatttcccctttctctttgagagtaaaactgattcaggaaacttgaagctctgtggggtccgggccgcagcgaccggaaggcagagcctcgagccgtgatctggggcgccggaggagagcccgtgcggaggtccggattgggctgggcgggggtcccgctctccccctccccatcctctgacgttgcggcttcctccgccccaggcagagccctgccgcggcccacctccgccgacggtctcc

SEQ ID NO: 43507 - DNA, 288 bp, Mus musculus
  source 1..288: mol_type = other DNA
gtgttcttaaatattaatctatttatatgtatcaacttgatatagactatgcatttatgcgaagagacccagtctctccttgtctcaataaaatggatatctttcattaatgatgtcttttctcagagcttagaatagaactgagtttttatttaatacaaacatttggctcctctttgtctacacataagtggaaaggggatgaactgcagcccggatgcgggcgaagggtccagaagccaggtccagaagttctcgcgagacttgcgggctgtggctctggcgtca

SEQ ID NO: 43508 - DNA, 583 bp, Mus musculus
  source 1..583: mol_type = other DNA
gaattctcagactttatgattaaatacataaatagcttttatttatttaaataaatgattgagtaaataaataaatacattttctaaattgacttgaatgaatgacccttcttttttaaagtagattattttaaagacacagttgcttaagtgtgtgaaaaatcacaaaggcaaatttgggcatatcgttttagaaattgaatcctctgaggttacattgcgcggtttactatttatttaaaagtgaagaaatatccaattgctttgtaaatgtcggccaatgtatacaaacatcaaaatctctgcagaaatcgaagtcttgtttgcttgaaagtaaaaacaacgattctgcgcagctcctcagtagccgctactattcctgggaagcatgaataaaatctgactttattagacaataggttctattttaaaatttattttgagacatggtttagatactgtcgaaattaattagagacttacgaatagacgtaaaatataattcgacatccatttatgtactcaatttatgagattaaatttaccagctggtatcctgacgtcacaggttgccatggtagca

SEQ ID NO: 43509 - DNA, 459 bp, Mus musculus
  source 1..459: mol_type = other DNA
gatccctataggaaagatttttaaaaggcaaagcttgaggattttttttccctttgaaatgaatgtagcaaacttatgtaagcacggaataggattattagttaacagtcttttcaattatatgggaaaatgaaagtgacaagtttaaaatatttaatatgactatacctgaaatatttaatgctatctttttcatgcaccagcttctaagagctttaatagcaaacacttaggtaagcgatttttacagaacttttttccctaatgatttagatctcatatttttgtatattaccaaatattttcagtcaaataacacaagaatgtattttaaaaataaaaagggtgaatcatcattccatcatattaatatataatggagacaaagagtttatttttcaatgagaataacaaggaaaaaagcctgattctgagaggaggagcttcggctcaggggaa

SEQ ID NO: 43510 - DNA, 425 bp, Mus musculus
  source 1..425: mol_type = other DNA
taatacaaccagccttggtgtttttggtaaggtggtcttccataatacgtaatatattttttaatgcattccaatggctgaaatgatgccaggaatgtctttcatgtcttattaccaaactatagagtaataaagctgttgattcaactttcaaagtccacttaccaaactgtatgctaaaggggtctgtattagtcagagttttactgcgagcatggcagcatccaggcaggcatggtgcaggcagagctgagcgttctatgtcttcatcctgctagtggaagagttatttgtgctcataattttcttcatttagtagtgtggcgcctgaaaaatgaacgagaattcccactaattattggctagcagggtcctagttgagcattttagctcctgctgcactgtactagctggaagcaagtgct

SEQ ID NO: 43511 - DNA, 505 bp, Mus musculus
  source 1..505: mol_type = other DNA
agaagttctttctaatgacaactgacaagggacatgggccatcagttaatccaggtaaccatttattggtaactcccataagttctgagttagcattgtccaagcactacttgtaggaagtacaagttgtaggtcaatcctgtcccaggtcacaagaacagagagatggaatgggcttaacccctcagatccatgtggattgtttttaagagagcaacactctgtttggttgtgggtctccacagaacccccccaagttgatttccacagtggctgtacaattttgcattcccaccatcaatggaggagtgttcctccaatggaggataacctatcttatatatgaatagtactattccatgggctatgcatcttaataaattaatttttttcttcattagtactatgtagtgaagtacttgaccatacctggaatgaactataatccagaattggaaggctcactagtggatcctaatctcgagaataggagatataagtttct

SEQ ID NO: 43512 - DNA, 379 bp, Mus musculus
  source 1..379: mol_type = other DNA
atttgttatgattcattggtatcatgatcactattttcatttctgtgtaaaataaggaattacacagtctgttttaggtctcatggtattaaaataaaacaaaatatgtctcagaattttatgggtgtacatatatgtggaagacaaagaacattgcggcctgctttgtcatttgcctgagttgttctgaggtctcaccacaaccccacgccttgaagagcatctaccagaaacttctgaggctattaaaatctattcctagtgattaaaaaaaaaaatggtagggactcaaaggctctttttcaattactcatatttgttgccttgcattctgtgtagggaatatagcaagacagatagccatctgggctagcctgtt

SEQ ID NO: 43513 - DNA, 285 bp, Mus musculus
  source 1..285: mol_type = other DNA
aaggataaaccatgtttgattatttgttcaggctacccccatgagagggggtagtaacaatttgaatccagcaaatcgactcagttccctggcctgccaagtgtgcctctgggttttggaactccagacccacatgaccccctgtgactctgaaggcacagattaattcaaagctgtgatcttagattgcccgggtgggacgtgttgtggcccagcctaaggccaggccctgcccctgcctattggagaggtccctctgctgcctttaggagcacaggagcggct

SEQ ID NO: 43514 - DNA, 278 bp, Mus musculus
  source 1..278: mol_type = other DNA
aaagtgatttgaagtttctatcaactaacacacagtttaaagtataatagaacacagttctctgttctgacttttcaacataaagctacaagttagtcaggctacatgcttggcctaaaaggttgccctttctataggccaccattatcacctgataaattaataactgcatagtctacactatactagtcagtatttaattgggtaatagttaattctgagtgtctatcatgagataggtactatctgtaatagaaaatatggacatgacaaaaatc

SEQ ID NO: 43515 - DNA, 595 bp, Mus musculus
  source 1..595: mol_type = other DNA
aattttaaataataacagttcaggtgtgtgagtattcagtcagcttccatcctttatgcatcctttaagcaggttgttaaatccaatatttaaaccaattcttttgaattgtctggctaggaaaagttcacttagcaattgagagcgagatggacatggcacgtacatcccagcacttttgacagctttaaatggtgtttattacgagcaggtatggatgctgaggagatacaaggagtctgcttaacctctctgtaactcaagagtagtggcagccctagggagctctcaagccgaggcccctcggggtccccgcggcacgtggcgggctcgggccggagcgtcgcggcggtgggggttgagcaggcgcggagtgcgcaggctcggcccaggcgcaaccagtgcgcgtaagaccgaggggtgaacctcactgctgcgcgtccggggggctaaagtccgcttgtgcgcacctccggactgtgtgtgactacccgtagccctggccggtggcgtccactccgtcccggtcgctccctcccgacggtgcccccctccgcgcagccgcagtggtcgctcccgcctcgcagccccgccg

SEQ ID NO: 43516 - DNA, 343 bp, Mus musculus
  source 1..343: mol_type = other DNA
cgtttcttacagtgataacatgctagcaagtttcgatcttctgaaaatggtcctcacaatgtttttgaggtgctccaaggaccaatttcaaaatattttatttcacgcctctaggagagaaaggaacgagcaagatcttgctagatgaaattcgatcttattgcagcagtttttttaaaaaaagaaacaactcgtatacacacttatacacgaattgatttatttatttggaagacattaatattttcaaaccgtttgcaaacgcccggagcgcaggccccgccccctgctttgtgtgcggcgcgcggattggccagcgcgcgcgggggccgcgtcagcgccc

SEQ ID NO: 43517 - DNA, 349 bp, Mus musculus
  source 1..349: mol_type = other DNA
acagagttgccttactgtgtaattataattcccaatacaaaactggcctgagtgtcattatatggctatctaaagttctatggaagccttggaaaggttgcatgattcagacaaatgttgtaggcatcttcacaaagcacctctttagggaaaacaagatgttctttgtaaataaaagttcatgcatttcaataatgaagtcattttctagtactgtagtgaaagatattctctccagccctctgggtgaggactccacagaggaagaggagtggcctcctgaggtcatctacctcactgtacactagtgggggccacatacaaatctatataaatatagatcagacat

SEQ ID NO: 43518 - DNA, 277 bp, Mus musculus
  source 1..277: mol_type = other DNA
gaccacttgccctcttctggtgtgtctgaagacagcaacagtgtaccttggaagaattccaagtaagatgagatctgtatgtgaaaatctcttctcaaccttttagctaatcaaattcagagacacagagaacttcagtctgagtatcaagactcgctttgtgaaaactgattagttctaggtcttcatcgattaagatacgtaatgttgaaaataaagcaataaacctctgaaacagtttaattgaacatttacattgttaccatgtcataaacat

SEQ ID NO: 43519 - DNA, 231 bp, Mus musculus
  source 1..231: mol_type = other DNA
gagccctgaatctgacactcacagtttcagctagactctgtggatggtgcttcagagacacctaaattcttaatttagttcttaattaaagcctcatttaatttgcccagtaaaaattcaatttctgaaaaataacctttttttccctgtagatgttttgaattatccagaaatcttaagtttgaagagtgctcagttaccagggcctccggagctgcagatgcacgtggc

SEQ ID NO: 43520 - DNA, 333 bp, Mus musculus
  source 1..333: mol_type = other DNA
gactcttccaattacatctaaaggtaaaatgctaggattatacagctggtactccggtactgattaaaaagcccaagtaatctggctgcccagctggcaggcccgggtgacaggcaggaggggcggaccgctgcgtgctccctcagcgccaggtcccagaagcagcagccgatctggtcccgcactgtccgactgcaaggcaaccaggtgactggctccgcagcgacccggtccccgcggacgggggtagctcaccctgtacgaccaccgactgggtcattccgccgggaggaccagcaggagcactcccgccgaggggcggccttgccacgt

SEQ ID NO: 43521 - DNA, 355 bp, Mus musculus
  source 1..355: mol_type = other DNA
tgtcttaaaacagagttctcagtaaacattgcctataaagaaaatcaggaaggcaaaatgtttctttttatgaagttacatcctgccgctcagaaaatgagactaacaagtcattaatttcttactatttgtttcaaaggcgaggctatctctttggagaaataggttagtggcaggtgccagtctccactggcaaagtggaaagcagctcatccctgtggccgtgcgcaccgcaggctgcccgccaccaaatggctgccggcgctcagccctcagcgggccctttgatagggcagaaagacctgacagtctcagggcgtgtcccgccccctctcgaacccctcgggatccggag

SEQ ID NO: 43522 - DNA, 386 bp, Mus musculus
  source 1..386: mol_type = other DNA
tggctgcagtacctgcctcaggctgcagatgctgccagtctgggaaggtccccaaactgctggggtgccctgtcctccagcactgctgctggctgaggcggcctgaaactgttatcctgcagtaaaactgtatcactgccgtaaaagcattatttaactggattatttaatactccaaggcattggatttccttaaatcaaagccttagagttctgattagttgattaaaagcacagaagtagatatttcttatgtctcctttaaatggatatcataggatatcagtgtgtacacagcatagggaactctgtagcctgtactcaggtggctgcggacagcactcgtgaggtccgagggcagcagcagcactctaggcgcagagccg

SEQ ID NO: 43523 - DNA, 385 bp, Mus musculus
  source 1..385: mol_type = other DNA
tctctctgtcactacatatatatatatatattgtcaagaataatgttttattaaataatttctcaaagccgtttgtacaaataatacaaatgaatacaaattttcattgttttaacagctaagtagtacttcattgtaagaacacaccacaatgtgtaccactttattataaagttttaaaaacaagccacattccctttgtttataataggacattttgggcaatgttccctatgcaactggctcagtctgagacctgtctgtgcaataaattctgtagtgtactgaataaacagcacatgcctttaatcccggctgtgtgtgtgatacagtcctgcacagggagcaaatctgttttggtgagttaaaaaacacagttaaaagt

SEQ ID NO: 43524 - DNA, 326 bp, Mus musculus
  source 1..326: mol_type = other DNA
ctgagaaaaaaaaaaaaaaaactttttttcaaagtttacgtgatatatgtgtagtaatcagtaaacaaaacaagttttacccattatggtagtacccttctgggactaccctggccttggtttcttagaaaagaatttagacataatcatgttagtgtgtgagtgcacacatatgtatacacacacacacacacacacatttgtgagtggagggagaactcgacacccttagaaaaagtctctagtctaagaggccactgtgaactaggaagtcacagagaaggcagcttccaagatcctccttggagaaacagtttaagagccag

SEQ ID NO: 43525 - DNA, 477 bp, Mus musculus
  source 1..477: mol_type = other DNA
agctctctgtctttaaagtcagggcagagggcgtgtgaacccggccgcgtgcctaactgtgccagtttaggcagctgctgtgtgcagctcaggcccagccccagcaggcaaagatgcagactctctccccagagataagccgaattctcctttcgagatgacatgtacacatataatcttaccatcacacagagccatgtggcactgtcacctaatacatttgctgttcattgtctagatacacaacacttcaaacccctttatagactccactgggaacagtgtgcacacttctctgtagaggagagtcttagaagtaaaattactctcccacttttacaatgctgatagtaatgtcattcctcctggcaaagcaaaggagagtctgtttacctgaggcaccggggccgggcatctgccctgggagtcccagccagaaccccacccactaggtttccttgtgggccaggactgaca

SEQ ID NO: 43526 - DNA, 779 bp, Mus musculus
  source 1..779: mol_type = other DNA
ggggtctccgccggggaccgacctctaaggacccgcgaactcgtccttggggacgaggcgcagccacccgacccaccgaggcaggggctccagcctgctcgccgctcgcaaaggagagaccgggcgcccgccgcctctctgccgcggaggggggcgcagcgctcacgctcttttgcgcctcctgtcacgcgcgcgagagagaaggcgaagactccgcagcgaccctgtagagggccgccggcggcggcgtgcgcgcgagtgcgcggagggagggcagccccgacgacccggcgcccgcgctcccgctcccgcccgctcccgcggggcggcaccttcttgacagggagctgggcaggtatccagccccggcagcgggctggccataccgcctcccctccactcagcgacctggcagcagcggcggcggcgggctccgcagaggcgcctcctccccttccttcccccccgcccctcgcacggacgccgggacgagcggcagcggcggcggcgcgcggaggctgcggaggctgtgtgctgccgccgcctcctcagacgctccgggcgagaggcagcgggagagaagccctcgcgcgttcgtcgggtcgggtggtaccgctgctgctgccgccacggccgccgccgccgggaatcacacgggctcctcggtcccaggctgcagctcttgttgccatgatgatgatgtcacggtgtgcgcgcgcgcgagcggcgacgggggggggggaggaggcgggcgggcgcgcgcccggggtgggagggga

SEQ ID NO: 43527 - DNA, 516 bp, Mus musculus
  source 1..516: mol_type = other DNA
ggctctccgagcagccggggaacccacagtccagcttgggcaaagctgggcagggaagtggccgggcgcagtcactgcagcaccgcagaagaggaggcgggcgaggcggggcgcgaggctcgcccggagctcgccagggcggcccttttataggccgaggcccgcgcgcccccgcccctcgagctggcccgggctccagctccgccgccgcgttacctgagaagggccggcacgtccaacgctccgcccgcccgctcgctcgcccgcccggcccgcgctcggccagggccgcccgaggtctgtgccgcgcctcccgcgctccccgggccccgccgcagtgacccggcccacaggccgaatcatcgattcctcggcgcgcggcccggcttcccgccagcttcttccccagccgcgcgctccgagcgggggagaaccccctcctcgtcccctcccaccccgggcgcgcgcccgcccgcctcctcccccccccccgtcgccgctcgcgcgcgcgcacac

SEQ ID NO: 43528 - DNA, 285 bp, Mus musculus
  source 1..285: mol_type = other DNA
agggtcaaactcccctgccctgcacggaggagggacatcgctaaaaaccttgaggtgctggccagctcatcccaggacttgagcggaggcccagatttatagataactaactgagatacttcacgtgtgagtttacacgtaaggatccatacgttcaacattcttgtacgaccttcgggtttccaggtgacccaggaggccctacattccccaggccggggaaactcacctaattgagacttctcacctgggccaggcgctctgctaccgtgagggacaccgcgc

SEQ ID NO: 43529 - DNA, 505 bp, Mus musculus
  source 1..505: mol_type = other DNA
gttcttgcacttgagtgaagaaaatcatttaagtatctaaaggcttgatttaaatagggccgtgtacagggtaagcaacatgtccttgatactatcattccatctgcgaaataaagcagttggttggatttggtcagccccctcaaagctgctttccacgttccctgcaggacgcttgctccagccgtggcctggagggtttgggcccagctctcaccagccccagcacggtggtgaaccagcgcagcacgctttgggcacggcctttcctctgcgcccgggccggctgggaggagccgctgccctcccgcccctccgaactccagctccaactccagtgtggcggctcccgtgctccgtgcaccaggcctccggtgtgcagggaggtgcccggccccgcccggcccgggagccaacaacgccaggacctgcccgcgcgagcgtgacctgggagcggagcctccccgccgcgcaggcgcggtgtccctcacggtagcagagcgcc

SEQ ID NO: 43530 - DNA, 183 bp, Mus musculus
  source 1..183: mol_type = other DNA
gagttgaccaaggtcaagatctgttagcacagctgcaggaaggttccctggacctgctggagagttccagggcaggacaacagttccttagcagaacatgcatcagtcagctgatgtctgaggttctgacttgtgcaagatggggcttgaacgtcttcctcttgcaacacaggcatgttcgaa

SEQ ID NO: 43531 - DNA, 190 bp, Mus musculus
  source 1..190: mol_type = other DNA
agaggctctggcagtgcctgacaaataatttgtaacagaggatggcctagttggtcatcaatgggaaatttgaaatgtaaataaagaaaatgtctaataaaaagaaaactttacaatctgcacgtattcaggacagggctttgggaagttcctgaaggccaaacctccttccctggtcccatggccaggc

SEQ ID NO: 43532 - DNA, 340 bp, Mus musculus
  source 1..340: mol_type = other DNA
ttttaaaaaagctcacagcccttccagtacctggaagtatctgcaggaattgtcagtcctagatacagaacccagcactcaagctctgagctacagccccagcccagcttttgttcatgagccccacaaggttcaaccctgacttaacctgaaggggagactcccccttgcaggtaggttgcaaactgcccagtgtgggtaccccagagcctcttggctgggtgcttccaggaaagcatccggtcttccaggcaaccacattcccttcccccaagaagctgggtccctgattgctgagaaagacctatttctgccaaattcccaaggtcctgactgagga

SEQ ID NO: 43533 - DNA, 406 bp, Mus musculus
  source 1..406: mol_type = other DNA
tatgtcaatatctactagattaaatgacatcacagattacaaacttttagcctttttaaaatgccattaaacataatgacttgttctgtaattaaaattaaaatttatcagataataagcaacctttaacttctccaagtggataatatggttgattttgtttgtttgttttaaacaaaacaaaacattcttccgaaagaatgtttagtgatcagtaagaaagagcatttttcagatagatgataaagttacattgttgtgtaacttgaatcccgacagctgtacagcctttcaggcattgcggaaatttgaactgccgtgcttttgaaaccacaaatttgaacccacacatgtgtcttggctccaggagcccactggcgtgttccctcaagagttagcagcacac

SEQ ID NO: 43534 - DNA, 206 bp, Mus musculus
  source 1..206: mol_type = other DNA
tggtcacagtgacacaaatgtgttatctgctggaaaataccagactcctaattatgtagaacaggcttgtctgacatgcagagatccacctgtctctgacaatggtcacattttaagcatgggttatgaattaagcttaaagtgaaggacagaactcaatttcaacctattctaagttaatcagtaatctgtgaaaggattcaatt

SEQ ID NO: 43535 - DNA, 642 bp, Mus musculus
  source 1..642: mol_type = other DNA
gactggcccagaactcagagatctgcctgcctctgcttccggagtactgggatacaaggcttgcttactagtttaggacagagagaagcaagaatgtgataatcacagttattgtataacccaccacactggtgcttaagtttggagtgagtaatctaaatatctgagaaattaagaagatacatcaaagtttaaaagtattgctttctagctgcccgtcaaaaatgtttgttagttgaaaaatttagaatcacagtctgtcttccaaaatgagcatcttcattgtgccaagtattcaaaacaaactgtatgttcgcggaattggagtaattaaacaaggtctctgattcctgaatttcttttatattataactagcacaaaagggacaacaaatatgaaatttaaactgtcatttgtgactctctattccagggtaagcattacctgatcttgatcaccttcgcaggtccccaagaacttctaaggttggcggcacgccttcaagcgcgcgcgcgcgggcggtcattggacacccctcacggggcggagcctccgcttgcggatgcccaatcacctgtgggctcagggtgtaaggccctctggtggccacgcccctaggcggtgcgggagggcggaggggc

SEQ ID NO: 43536 - DNA, 494 bp, Mus musculus
  source 1..494: mol_type = other DNA
gcaaatgactgtaatttttgtcactcaagtggcagaaacaacacagaaggtgatctatatagcagagaaagtgatgtagagaaaccctgtctcaaaacacactatgagattcaattcatactatgtacagtaataaaagtatattgcatgagataatatgagatgccaggactgcagcgtggagtggaggttgaatttttaattttcaattctgccctctgccttcacggctgtgctggcttcagtggctttgtgaaggcacccaaaccaatgaattgtacacattaccaggtgtattttatataactatatgcaagttatatgactgaggaaagtcacgatgagcagtattcttcgtgtatttaatcaagctgcttcaactgctctcccagtcgtttactttccggaggacggaacgccatgccttcccaaaatggccgccagcgcggacagccgggctgtccattgaatccggcgctcgcggcggcttcccg

SEQ ID NO: 43537 - DNA, 428 bp, Mus musculus
  source 1..428: mol_type = other DNA
gaaaggacacgttgcgcgccgcgagtacactttcgaagctgtgttcgtatattattttgcaaaaaaaaaaaacaaaaacaaaaactcattctgaatacttatgacttgtaaactaactcagaatcaagttcataattaacatattgaggataatagccaatcaacgccagtgtcttcagtcaatgttgggatgaaaagtggaggccaccattgatcctctagtctccggaggcagttgattacgctcatcctcagctacttactgagtgagctctatgagccacgttcttcaaagtggggctaaataccctaaattcccgaagctcggagcgtgtcgagtctccacgtgggacccacttacggaagcctggcgtcgccatcttgctttctggccggaagccggacgccgctgcccgtatccaaaatgg

SEQ ID NO: 43538 - DNA, 447 bp, Mus musculus
  source 1..447: mol_type = other DNA
tttaggcatttaggcaattttaggcaaatttgtaaatttgcctttcaattaatagaaaaatatcaaataacctcgtattatacttaataaagctagttcctaggaagttttgcaaactaaatatccaccagttgacctaatggagtacgggttgatgccaactcctaaggatagcgccggagccctccaaggctgggcgctcttttctcttttgaaataggaagacgacacgtgaaaaaatggtttaaaaaaattttttttaaaaagccaaaatgtgcagcgtgggacagcctcgcctgtctcccggagcggtctcccgctcaagggacagcggcagctccatctggcactccccgtgggcccaccgccagccagccggcgttcggcgacgtttgactgacacgagaggccctgagggcggggcgatggcgtcacttcctggcctgt

SEQ ID NO: 43539 - DNA, 165 bp, Mus musculus
  source 1..165: mol_type = other DNA
cttcatagcataatgcaaaatgcgtttagtccaactttcaaagtagtctatagtagtcgaaacaatgttctgagattcattcaatttaattaactgtaatctgatgtcaaagcagtcttcagatctccgcatctttaacatctttgagtctccaattctttgtgc

SEQ ID NO: 43540 - DNA, 299 bp, Mus musculus
  source 1..299: mol_type = other DNA
acccagcaaaaacgattgtttttaaaacgctgcatttttgcaatcttccaaggttacacggttcccctagcaagagctgggaaaccgctgaatcttcaggttttgaaatacggtttttgcatcgtaaagaagcaaggctctcgtgtcccgctgcaactttgcgccgcagcgcacatgccttgtggaggcgtggcccaaaaggccccaggaactctgggaactgtattccccgctcccgaggaggctcgcgaccttggggcgggacgagttcgagaaagccgcggcgcggcccaccaggt

SEQ ID NO: 43541 - DNA, 200 bp, Mus musculus
  source 1..200: mol_type = other DNA
ctcttcagtttagagccctgactgaggatgaatataatcaaaatacattttatgcatatataaaattctcaattaataaaaaaggtatatttttaaaagaagtgctgtttgaagaactgtgacaaagctacctgaatcattcctgatttcacttcaggaagtttagggagcgaagtccccagaccaagccaggggctgcc

SEQ ID NO: 43542 - DNA, 361 bp, Mus musculus
  source 1..361: mol_type = other DNA
ctataaggaggatacgtctcatttcacaagagaattcttattagtatattaacgtggttaatattattctattaaatattatctggcgattaacacatgtaatccagcaccttcatcaggtggcgcaccaccacctaggagtcctccatgggcactgcgcatttaaatgtaaaacaaatctttaagatatattatagctattgtgatacaaccaattacgtctctagaatcaaatgacgtcatcctaacttattttctgaataaatttggtcagacagaccacccatttatttgccatgcaaacaaatccgggtcacgtgcctctctcctggggagtcagaggcaaatcccctgtctctta

SEQ ID NO: 43543 - DNA, 350 bp, Mus musculus
  source 1..350: mol_type = other DNA
caaaagtgggataccaaccccatttgtgtctagatttctttaattaaggtcagagataaatatgtccctctgcatttctgccaggcttggagctaaattaatttgatttccagcacaatttagaaactgaataactaatttgattcttctctctctctctctctctccccttgagggagagaagttgtaaacctgagcataagtatgattatttttatatcatgctttgtgtctaatactaacaccaacaaatcggaggaagctagccagactttacaggctgtgggtgtcctgctgcggctgggcaggataaggttacgccggggcctccccggtcgcagggaagaagg

SEQ ID NO: 43544 - DNA, 777 bp, Mus musculus
  source 1..777: mol_type = other DNA
tcaccgcgaaaccgtggggggctcgcgccgtacccctttgcttcggcggctgccgccggtccggctccgcactggggcgccaccaggagcccctcgggagcgtcgggctgcgggatggaagccgcgccgggcactggctgaggcgccgggccgccgggaatgccgccgggggcgcccactgctcgcccgagccgcggtgcgctcgacgcgcgagcgaacaacaccgcgagcagccgctgccctgcgccgccccctccccgcgcgacgctccacaaccgggcgcggggacccgcgcctgcagcagggggagccgcggggcgctctccgcctggcctcacgacctttccccggagctgcaccggacgggtcccaggtactctcccctcgaaccctgcagggcgtacggcggcatggtgggagaatgagcatccacccacttacccgtccgtgggcaagaggacggcgcttccccctgtcctgaggctatccaattgaatgaagggggcggggtcgaaggcaggccccctctgccgggctccacctggtgccgcgagctcctcgccgcactgtacgccgggagtgaaggtcctcgagggggtctttaatcaacgaggtcctgaaagttacaatttagataaatgtttgtgaatctcaagttttgatacagttatctcaataataaagtttttttcgagaagttataaatgattttttttaaaggaggtaaatatcgagttccatgacaatctgacaggacctgggagacgctgcttcttc

SEQ ID NO: 43545 - DNA, 545 bp, Mus musculus
  source 1..545: mol_type = other DNA
agtgcctggccgtggctcacttcagtttgaaagtcttgatccaatattatctatgctctgaacttataactgatctaataaggcttcctgaactaattttatccgacggagataggccacggagagtccgcggctggcagcggacaccgactgccctcactgtccgaatccgattcggaccccgagcccgagccgctagagctgcaatcgcagccgacatgactgcaacagatactctctgctaaggccaggccaaggcggaagaagcagcgtctcccaggtcctgtcagattgtcatggaactcgatatttacctcctttaaaaaaaatcatttataacttctcgaaaaaaactttattattgagataactgtatcaaaacttgagattcacaaacatttatctaaattgtaactttcaggacctcgttgattaaagaccccctcgaggaccttcactcccggcgtacagtgcggcgaggagctcgcggcaccaggtggagcccggcagagggggcctgccttcgaccccgcccccttcattca

SEQ ID NO: 43546 - DNA, 679 bp, Mus musculus
  source 1..679: mol_type = other DNA
ccacggagagtccgcggctggcagcggacaccgactgccctcactgtccgaatccgattcggaccccgagcccgagccgctagagctgcaatcgcagccgacatgactgcaacagatactctctgctaaggccaggccaaggcggaagaagcagcgtctcccaggtcctgtcagattgtcatggaactcgatatttacctcctttaaaaaaaatcatttataacttctcgaaaaaaactttattattgagataactgtatcaaaacttgagattcacaaacatttatctaaattgtaactttcaggacctcgttgattaaagaccccctcgaggaccttcactcccggcgtacagtgcggcgaggagctcgcggcaccaggtggagcccggcagagggggcctgccttcgaccccgcccccttcattcaattggatagcctcaggacagggggaagcgccgtcctcttgcccacggacgggtaagtgggtggatgctcattctcccaccatgccgccgtacgccctgcagggttcgaggggagagtacctgggacccgtccggtgcagctccggggaaaggtcgtgaggccaggcggagagcgccccgcggctccccctgctgcaggcgcgggtccccgcgcccggttgtggagcgtcgcgcggggagggggcggcgca

SEQ ID NO: 43547 - DNA, 330 bp, Mus musculus
  source 1..330: mol_type = other DNA
tctcgttacaaaggaaagagacaaatacttgcatttttttgaaccaaaagggtgatttatctgggtggtcctataatttgttttataaggtagtaattagcagggcaaagtctgttgccaggaaagtaaatcacattttgctgttttcttcttttctaacaagacacagaccttgtcttcagttaaagaggaaaaagaaacggtttccagtcttgtccttttaccctggctatagccaagtggcacaaatacaaagagaacttctctctcatctggtggaccccgcctgtcaatctcgggcaggcgcgcagctcgcagctcgcagcctgc

SEQ ID NO: 43548 - DNA, 320 bp, Mus musculus
  source 1..320: mol_type = other DNA
agataaatacctgaactggttttgaaaagtcgatttatgaagagatcactggggtccccgccggaagtgtactttcctgatggcaaaatgcacccagaatgtggaacgcgacagcagctatcttcttaagcctgtgtttaaatgtagtcataattataaaacaccttacataaaatgtcgccacatttatgtaattaagaaagatttgtgggccatacagccacaatattaactttattgactttcgtgccaatcatctgatttcttttctttaaaggtcaacataagtagccccgcccctccggtttgggctgggctgg

SEQ ID NO: 43549 - DNA, 445 bp, Mus musculus
  source 1..445: mol_type = other DNA
tagagcgtttctccctggaaggtaaagccccataaaacctcttggctggccagctcatcccgggacttgagcggaggcccagacacttttaataaaaactagtaagaaagaaagagtggtaattccatctttagtttccaaattgtgggcaatatagatggcaaatttataatctggaagtggacgagtaggtccggaacgaatctgagcgggacttaggagcattggtccggaacacggtctcagaggtcctgagacaactgaaaccctcaatagttcattctaaccgtaccaggtaggttaacacctccattttatttcaggaggtaaatatctgctgattgaagccaccgccgtctttatgctcagcatctaatcagcggatgtggtgtaaatttccgcagattgcacagcaaagcccgccctcggggcggggctccggggt

SEQ ID NO: 43550 - DNA, 577 bp, Mus musculus
  source 1..577: mol_type = other DNA
aaaaagatagccactggaccttggcttttgttggtcctggggctgatagcatccatgccactggcgtgcagtcatgaagcctcattgacatttcagtaaaataggttttgttaatgctcatgcaataaatgagaactgctgttttattaactttaaagctgcttgattttgaacaattcctttcatgctacaatttcttaacaggaaatactaagaatttgattccagttgaaaacacacacacacacacacacctggttgtgtgtgtacctggttgaaagatgtggaccactgggagccagccgacctgtcccaggagagatggacccccgcaactggatcgcctgtggcgccaggggtggaggcctgcgcccgctcggccagctcttggaagtggcctacagcgtgggtaccaccggggcggactcaggcacggtcactcactctgctctccctgtccctgcctggccagaccgtttggaggcccccagcagcccctggtgtaggcagaaccacgccctacagcaccacccggcaggcgtgggcgggacccaggctgtccccagaggaggactgc

SEQ ID NO: 43551 - DNA, 463 bp, Mus musculus
  source 1..463: mol_type = other DNA
ataaaatatcattctacatgtttacaaattcatacttggattcttcaacttctgggacatctcttaaaaatctgaaaagtatctgattctgctaaaatgcagattataaaggaaaggcccttccaaaattaaagtactaaaaaaaatcacaagtgtttttttcttttcttttctttttttctggggcaccgggttacctttcccgtaattttgaattttgtaaatccataatccaataaaaaatttcacgtgaactgacccccgcccgccagcgcaggcgacaccgcggcagggggctgaggtgcgcacggcgaaagctggagcttttgaagagccccaccaccttcagcttcaggggcggctcgggcggcaaccgcacgtgacattggccatggccgccagggcaaccgcgtggctcctccccgaacgcccgcaaggggcgggacctgagtgagttcgtggg

SEQ ID NO: 43552 - DNA, 448 bp, Mus musculus
  source 1..448: mol_type = other DNA
gcttacaactgtctgtaactccagttccagagaatctggatcatttatgctgcatttgctgcaaccacccaagctggtctagctcggctgaagaagacctgcttccttcctggaaggtggctccgaggctgcagcccacgcctgaaaactctcagccgtaggcggattgcgcgcacaggcttattgccctgtcctgcgctgccccgacccaggaacgcgagctggttgggggtggggggctactgggacaaaggccgtccttccacccggaaagaaggtcggctgcaaatcccgggctggctgcgcgaggccgccggcagtcctggaaggaatctcgggtggctccaccagcaacaggcttgaagttgatgcgaggccccgcccacgaactcactcaggtcccgccccttgcgggcgttcggggaggagccacgcggttgccctggcg

SEQ ID NO: 43553 - DNA, 602 bp, Mus musculus
  source 1..602: mol_type = other DNA
cctactataagcatgtcaagcgttgattattttgtgagacccggcatcagatggcgctcacgaggcactgaaaatgcctgttctgccactatctagtgtgggataggaagaggcacgaaggcttttcatccctagccgtcgctgggacagatcgatccctactgcggatctctgagtgactccaaggaagcgtccgggacagatcactttcggtcccacccacagctacgggcactgaaccagtggcccggtcttggatcccgtggttccgtcattactgagtccccgagcgagcgcggtcagcagaactcaagctcagcggtctcagagcctccgggccgcagcgcgctaccgaggggtcacgtgacacctcgcggcccgcctcccaggcggcgcaggtggacgcccctcgctacgtcacgtgggcagttccatccttgccagggcggggcacaagaaggacggcttgcgacgcacggactgctgccctagaggtctccgcggccgcttcccgccccgccccgccgggctgctcacgtgaccggcgcgcgctcccgcggggcgggcttctcggggggcggcgccgcagggacgcagtgcta

SEQ ID NO: 43554 - DNA, 366 bp, Mus musculus
  source 1..366: mol_type = other DNA
ttacaagcaagtctcattattgacagtcttctgagtagtcatgatttttatcaacaataaacctatgccagtgtgttttgttttttccagtataaaggccctggtctgtaggccaggctggcctcaaatttctttaattttgtgccaaaatctgatttgtgaaatatattttacttgggtcagaagtcttcattttccaaattgtgtagaaactgacataattttttaagatacatatcagtcttcagaacttctggggactctagtagactccacttcatagcagacaatgtctgcccggtgtttgccaacctgcctcacttaggcaaatgaggtttctagaagctacagtagaaaattctagaa

SEQ ID NO: 43555 - DNA, 457 bp, Mus musculus
  source 1..457: mol_type = other DNA
cagggtggcaattctgaaatgcttcattttgcgtgaatgatggaagatgcattctttctgaatccattgtctgtgggaaacagaaagacagggtgtggtgttactgatcccatctgaaggacagatacctcacgtacatttacaaacttaactatctggttcctaaccacaaaaatttgagtctaggattttacgtatatactcagagaccatgagagccattaactctagtctttcatagtactactggacatggaagtctgcatatgtcagactccctgaggtaatatttgttaacaagtaactcccactttttataaacgtaactgaagaatgccattataaagatactatatatattttttttaatttctgcattgttaaaaaggcaaaatctggcaggagatgcttctagaattttctactgtagcttctagaaacctcatttgcctaagtg

SEQ ID NO: 43556 - DNA, 498 bp, Mus musculus
  source 1..498: mol_type = other DNA
gtagaaggttctccaggcccccctcggctcctcctagcgccgcggcagggcagcgggcgggtgctggcggggtaggcggtagaccctggcccttagctgctggggcccgaggctccggtgctccgggggagcagtgtccgccaatcacagtgtcagcggcgactaagggcggcgtccccaaccctgccggttcttgtcccccggggtacgcccagcagtcatcgagcccagggctgcacggctgaagcaaagggccccaggcacagagcccgccccttcgcccagccccgtcggtggggatcggcccagagggcgggagcagggaggggagacggggtcctcacccccagcccctcccctgtccccgcccgggaccgccgggagccgcccctgccccatgcctgcctctccgccccgccctcgggcagagtacctccggaccccgagtccagcgcgccgctgcgcatgcgcgacgccggccagggcgcatgcgctttc

SEQ ID NO: 43557 - DNA, 496 bp, Mus musculus
  source 1..496: mol_type = other DNA
agaaccgttggttcgaaagcgcatgcgccctggccggcgtcgcgcatgcgcagcggcgcgctggactcggggtccggaggtactctgcccgagggcggggcggagaggcaggcatggggcaggggcggctcccggcggtcccgggcggggacaggggaggggctgggggtgaggaccccgtctcccctccctgctcccgccctctgggccgatccccaccgacggggctgggcgaaggggcgggctctgtgcctggggccctttgcttcagccgtgcagccctgggctcgatgactgctgggcgtaccccgggggacaagaaccggcagggttggggacgccgcccttagtcgccgctgacactgtgattggcggacactgctcccccggagcaccggagcctcgggccccagcagctaagggccagggtctaccgcctaccccgccagcacccgcccgctgccctgccgcggcgctaggaggagccgaggggggc

SEQ ID NO: 43558 - DNA, 593 bp, Mus musculus
  source 1..593: mol_type = other DNA
catagaaaaaagagatctaatttaacaaggtttttgttgttttgggggtttctctgtatagccctggctccaggctggcctcggattcggaaatccgcctcgtgcgacaaggtttgttttattttctctgaagaaatcaataaagctaccttggcacaagatttagattctggacctaaaaatgtcaatgatttatgtcttaaactacacaggtatcttgccaaggaaaatatttatagtttctacatcgcttgccaagaataaatttcacattgcatatagaccatggtgcttctgcgcccactctgcctcatttgggcatcaaaaaggttgccagggcccggcatgcccggccctagcccaggagatgggaaactaggttgcctttccctgagtcccgggatgcacattgcatcttccagccagggttgttcccaaactgagtgtcagcttcaggctgggcgcgcacgctcccccaaccccagcgccaaggggtggggctacgagtccccgcgggccggcattggcgggcgcgcccgccgggcagtggagtgacgggcgtggggcggggcctcgcgtcttgtttgtcggag

SEQ ID NO: 43559 - DNA, 380 bp, Mus musculus
  source 1..380: mol_type = other DNA
aaaaataatatttagtttgggatcctaaacttcatcaatgattgagttttgttaagcacttggaaaacctttactcagtgttccaaaaggtattaactgtgcaaaatagatacaatttagttattcaatacggcattttcccagtgttgacaacgtttatataccgtagtgtaaatttttgaattagaaacatatacacaggactcttttttttttcttgattcaacagggatagcactctctgcctgaagtttaacagtcttggggtatgctcctgcccgcgctcccgcacgggccctcgccacgcctcgacgctgctacgcgtgcgtggctagaggctcagtggcggagagtggagcagggccgccccgccccgcccc

SEQ ID NO: 43560 - DNA, 530 bp, Mus musculus
  source 1..530: mol_type = other DNA
gcctggaggccggagttccggggtgcacgtaatcagctgctttagcataagaaaactgttgcccgcttatccgtgaaaagcgaagcacgactgtcgccgggtgtcccaggtgagggtccagtgacacaccgcccaggtaacccttgtcacctgcggctgccggcttaacccgggtgttccctggtgtcaacccgatactggggcgggctccgaccccacgcacccacgggcaggccacgggcccacgagccaaacgcagggcccaaggctgagagcgcggggcggcgcgcagtggtgtgctgacctggcctcccgtcccgggccagcgtggccgctgaggtccccaggagagcgcgggaccccaaccgggagggctgcggagccggccgagtcccgacccgcgcgcgcccgcccccattcccgcagccccgcgcaggcgcgagggcgcacacacgcgcactcccacacgcacggcccccgccccagccctccccctgggcggggacccgccccgccgtcatcctaggttg

SEQ ID NO: 43561 - DNA, 596 bp, Mus musculus
  source 1..596: mol_type = other DNA
ctccggcgggctgcggcggcggcccgagagtcccctcgtcgcggtgccctgggctcgcgcggacgccctcccgcctcgttcctgaagggaaggagccgaggtaggcgccggagctttgcaacggggcggccgcctttccagtgacctctcccgctagtgtctttaaaggacttgagggaaggattcctccttcccgtttctgacctggaagggggcggagggccccacgtccccaagaaaatacatctcagatcttcttacagacccccacgctctccctgctggtccgcgggcggagaggaaaagacgggagttgcccgcgccagccctagggggcctctcgcctgggaggggtgggcgggagaagagcccaggactctgctgacttgccctgcgcctccgcgggaggcacttgacctccgaccactgcggagctgttggggtccggaggccgcccacacttaatggcgcggccacccctacctgcggttctggcgacggcagcgggggagggggctgccccgcgcggggccgtcgattcgctcgcgtctcccgggcggccaggccagggggcggcgtctgctgcgccaggttcg

SEQ ID NO: 43562 - DNA, 373 bp, Mus musculus
  source 1..373: mol_type = other DNA
cagacagggttagcttatcaggtttaaaaaattccactcccttatttactgcttcgaatctatcagtgtagaacagggtgaccttgaaacttctgagtctcagccttctgagtgctggcattacattatgccgggattaatgtccttccctactgtgtagcccgtatagccctggctgtcctggaactcactttgtagaccaggctggcctcgaactcagaaacccgcctgcagcccaggctgtcaggttacagatgtgtactgattcatttgagacgtttattaaaggtttctagaaatgaatttccagggatcacagtgatgcactggattggctcggagtcctacgcctgcgcgtcactcggcggcggcg

SEQ ID NO: 43563 - DNA, 343 bp, Mus musculus
  source 1..343: mol_type = other DNA
tgaactgtttaaataatgtgtaacttatcagccagctctggggggatcaatgccataagcttcttcaaagcatgaaaacatgtgctatatagaagataatttctattactcaacggacgaggtataatatatacctcttggtcaccttcatattatgcggtctgagagttggttctagccgcctctcagcggggtggggcgcacccgcgactgtcaggacacgccccctcaaggcgcgaggcctctcgggacttgtagtcccaaggcccaccggaaggcgtgaagggcaggcgttgcagccttttggcctcctggagcgccacagcacccggctgctccgtcg

SEQ ID NO: 43564 - DNA, 418 bp, Mus musculus
  source 1..418: mol_type = other DNA
atgccgggattaatgccctactgtgtagcccgtatagccctggctgtcctggaactcactttgtagaccaggctggcctcgaactcagaaacccgcctgcagcccaggctgtcaggttacagatgtgtactgattcatttgagacgtttattaaaggtttctagaaatgaatttccagggatcacagtgatgcactggattggctcggagtcctacgcctgcgcgtcactcggcggcggcgcgctcgcccgaggcagtcccgtgacgccgccgcgcctcagccccaccccgcagtgtccctcggggccgccgcggggcctgcgaaccgggcgcggcgttcaggccagtcagctgtttctccctgggcagagggcggaagcccgagcagcctggggcggagcttcgcgcggaacgaacg

SEQ ID NO: 43565 - DNA, 438 bp, Mus musculus
  source 1..438: mol_type = other DNA
ttaaatagaattaatctcttagagatcggagatcaaggctccctcggcgcgcgctgtccccgcgccgcgccacgaccaagatgccagagagctctaggatttcggggtggcggagctctccagagtccccaggcctgcaggggtaagccagcgacgcccgctggggaccaaccgcaggagggaaggctttgaggctttgcctctcagctgagagggacgccgccagctccgggttggccggttttgtttgcaagaagctggcgaagccctccccgcggcggtgcccaaagccgtcacgccgaggcctgatgtcgaggggaaaagcgttttgagagagccccaccaccccccgtgaaatataaaaattcatattttttttattacaagagcttggaggttcattaatatcattgacgtcagagccctattcccctccgc

SEQ ID NO: 43566 - DNA, 513 bp, Mus musculus
  source 1..513: mol_type = other DNA
agagagtgactgcctctcgatctgggtttggatcctcaagccctgagcaaacccaaacctttgatttctcatcaatagagcatatatgacattggttctcaatatgtggaccctgttaagggggagttatcaaaagaccgttttagagggagtatatatatcatgcacatcatatatttacattacaattcgtaacagtagtaaaattacagttatgaactagaaatgaaaataattttacatattttgctttatttcatgttttactgacaaattgaagaccagctccaaataccaaggctttggaactctgaggagtttggcaacctcgcttaggttgcaaaagctcaggtcccaatcgcacctaccctggcaagaaagctcctggaatccgggaagggacccggggtccgtggctcaggggcggggccgcgggcggggtccaacagagtttctttgctgcgcgcgccacgtctccctcagtgagcgtgtggaggagacggcgcgtggggc

SEQ ID NO: 43567 - DNA, 575 bp, Mus musculus
  source 1..575: mol_type = other DNA
gaactagcctgagttacatgaggcttgtctccaagaagaaaaatacctatatgtattaatattatataatgtatacatatttattatcataacatatattatacattacataatatacaatataacatattacaacatatcataaaatgctacgtgtcacatattacatgttatatattaatattacatattatgttacaatatgttatgtaatatatggtataataatcgtataatatagaatatataataataacatagtggggtattgtcactagtcagatagttatatttaaattaagtgacattggacaattagttctatcatcgtagtagctacaattcaagggtgatagttagaattaaaatcaatcattatccactctccagaggagatgaagaaatttctggtttttctgggagctatctccctggagttccagcactgggatgcactggggttgcagcagctctacagacctccaagcggggcgcgctcacacccgcgcgcctccggaggcaggtgggcggggccgtgacgcactcacctcgtgactccactcagggcctgcgcc

SEQ ID NO: 43568 - DNA, 393 bp, Mus musculus
  source 1..393: mol_type = other DNA
ctttggacactgcattggacaaggcagaattcaaactgaaaagcagagttctgggcctgtcttgacctggggtctagcctcaggcaacattggtaacattatatttcttagttatccaagctgaacaccatagctttgtttatatttaaatgaaaatgagtgtatcagtataggctctagttaatcttggctaaattaattgaaacaaacaattaattaaagcaagcttttaaattcatggatatgaactgacccccctaaggtgggtatagtaaccttgaagatagtgttgtaagatgattataaacaacttcttttcaacaaaagcatggctgctgttttctggaccaaaccaacctggttagtctttacaggactggtccagtcagagag

SEQ ID NO: 43569 - DNA, 388 bp, Mus musculus
  source 1..388: mol_type = other DNA
ccgaccttggtccagggcgtggacagaggacagggcacggtgagccggtgcttacttcgaagtccttctcaggaaggcaaaagcttcctggcaaacagtctgacggcgccgtagtcttcggagcaggacactggtgcctgagcgctcccgggcgctgcaaccccggagccggcggggaggtggcggctccgagtagggccggtgcccgccgcccaggagcaggcggccgccagcagcccccggagccgcgcagcatccgcgtctacaacgaccgggaagccacgcccgctcgcgagcggggggctggccttgtcccccccacccccagccttccctccctccgcccgcggctcggctcgcgggaggcgctgggcgccggggctggcgc

SEQ ID NO: 43570 - DNA, 524 bp, Mus musculus
  source 1..524: mol_type = other DNA
caaatctgaggttggcagacttcggagcgtcccagggacccaggggagcggacggaataaagagctcggtctccccggcctccgagtccgatggctgctgccgccgccggcggtggtggtggtggcggtggcggtcgctggcggaggtagcggtgctagcttctagcggcggagaccgtcagtggccgtcacggggaagggtagcccggggagtctcggggatgccgccgccgccgctcctaccgtcgccgccgccgctcctgctgccgccgctgccggtgccgccgccgccgctcccgctcccgccgccgccgggctgcatcctcggggcccgaaggagtcgtaggagcgccggccacggcggagacagctgctctgggcgtgtgtgcgcccgggagagcgcgccagccccggcgcccagcgcctcccgcgagccgagccgcgggcggagggagggaaggctgggggtgggggggacaaggccagccccccgctcgcgagcgggcgtggcttcccggtcgttg

SEQ ID NO: 43571 - DNA, 473 bp, Mus musculus
  source 1..473: mol_type = other DNA
cgtcacactgacaattttactttagcaatgagaaagaatttttggtaacatattacttaatgttgtggttaagagtatgtattcaaataaccaaattgttaggctagcattactgcatgaggcctggcctctatcccgaccagatcctctaggttcacattttgcttaatgtgaatagtattatctttaaaactcaacaaaagattaaaatattcacagaaatcctggcacttcggccaggaagctgagggaagcagggctcagcctcacctgggggggccgcggaggagacgtcgtcgcccagctagcggggccgccctcccgggtccgcggcccccaccaagggcctaaggcgcccaggagcaaaaggcttccggacgagcctgcgccacgggcccactgagggtccgccccttagtggggaggtcccagctgtgccgtaaagtaaagagcactctttgccgctcatcagc

SEQ ID NO: 43572 - DNA, 745 bp, Mus musculus
  source 1..745: mol_type = other DNA
tagacattttttttccatcggcaaattaaaggattaaaaaaatttttttttccgttctcattgttaccccaagtccccgaaagttggagaactgcgaggggactggagtctcccagttttccgcgctgagccccgtggctctgagttggtggcatgagggtccccaagcggcttcgctccgcagcctcaagcggcaaaacttgggctctcggaactcaggctttacgggagagggcggccaccctgccgggggagtggccagggctcccccagagcccggggtcgctctcccatgcagaactggagggggggcgcaccccgaagtctttgtgcccggcgtggcacgggaaggtccgtgcgatggtgcggcgccacagccgagcgccccaaaagcggggggcgcgggcggaaaagacacggcgcgttgcctcccacccccaccccccggggttgccggggccacgctccagcccggagagcacgtagccgagaatgccgcggggcgctttcccgtgggtgagagccgccctggtccgccggcagccggcgcgggcccacgtggagccgcgctgtgcaggccgagcgcacccgccccgcagcgcgccccagctccccgccgcggtcgctcacgcccgagcgccgccgccgccgccgccgctggtcccgcgtgtgccccgctgagggggaggggcggcaggttccactgcagcgggggctcctgtgtccttgtgcggaaatgacacac

SEQ ID NO: 43573 - DNA, 238 bp, Mus musculus
  source 1..238: mol_type = other DNA
atcctgaacgcctgtcaagttacagatcgaaattacgactttagttacggtaggcaaacaagaattatttttgcatttttaaaaatctaaacttttatatatattctcatgttaacaaggctggccttggggcctactgggtctcactatgtatcccatactggagaccaggctgccctagaactcagggaatgaccatgtcagagatgctgttttagtgaagttaaacagtaaagtt

SEQ ID NO: 43574 - DNA, 402 bp, Mus musculus
  source 1..402: mol_type = other DNA
ctcatacacgtaaaagtatttacgttttaaaaacatgtactctagtgtaactgaacgaaaacggtgtgacttagtttttgggtttcatgtaacccaagctggtctcaagcttgaaagacaggtcaagtgacttaaatgtgactcttatattctgtgatgttaagacagttttctggagacaacatctataagctttggctattcgagagaaagaacttttgcttccaaaccaaattcttctggaactggctgccaagctcagcgggcctgggatgggcctcccacgtcccctctccaaggcgccgcgtccagcaggggacgctgtgaggccaccaccgtgctctgcgcctaggggtccactctctgcgtaggcggcgggcaggtgcggaggtggctcccgcc

SEQ ID NO: 43575 - DNA, 523 bp, Mus musculus
  source 1..523: mol_type = other DNA
ctaagttgttttaaagtttgctttgaagttttcacaaaagaaggtacagacggatgactaatctttctgaatcggtttgtcaaatctgtgcccgccccgtggccgagcgcagctggctgttgcctaggtccggttggatgctcccgccaggggcggccgcccagccgagcatactcacggctggggcccgggatcctggcgatccctgccgtgcagccgccaagggacagtgcgtggcgacgcccggtctcctcctcgccaaccccgcgcaccacggcccggggacctgccaagcctgtcccgttcccccctgagctccgcgcagtctgcgcggcgcccgcggcttcacttgggccggccggcgcgcctgcgcctgtgcatgcagcctgcccggggaaaccctagctgtgccagagcccggggcgcccgcccacctgccgcgctggccgccccgggacatcccaagtcaccccgggccggtgcaggcggcgggggaggggccgggcgggcgccgcacggtccc

SEQ ID NO: 43576 - DNA, 346 bp, Mus musculus
  source 1..346: mol_type = other DNA
gaaatagtaccaaccaccatcagggttttttttttttttttaattaaaaacattttaaatgtagatcgtgatgatcaaatcgtcccaaggctatgttggctttcagcttgttgcctgctaccaaatgctaaaagatcttagtcagatgggcttgtgacctatctcatttatttcttgctagggcagaaaaattcgttatgacttttctgtcaacgagcaatggatggtaagtgaaatagattactttcatactctattaccagggtagggcagacctctgctagtctattacttctccctgcccaggagactctgataaacaggtctgggtggagcccagtcctcc

SEQ ID NO: 43577 - DNA, 307 bp, Mus musculus
  source 1..307: mol_type = other DNA
gtggtatacaatgaattggaggccagcctggctgtgtgcccagtgaattttgatttaaaaccaaacaaaccggaattaacatcataggatttacactgtataatgtgaatcgaaggacttcattctagacgtagtactaatgcctcttctccagaagcagggggtacggaattaaaatagaattgctactgtgctccccaaatgtctccttccccttaaggaaaaaagcggattcctgacacgaccccggccgcggtctccttgcctgtccgcgcgcctccggtcgccggcgcgcgagccaatcgcc

SEQ ID NO: 43578 - DNA, 457 bp, Mus musculus
  source 1..457: mol_type = other DNA
aaaacgatttagtaaaatattaaaaggttttgctttctgaaattaaataattatgtttctacaagtttagaaaagttgctcatatgttaaatcttaataaacaatactctcgattctgagttgagatgtttccctgctgcagatcacagtttgatggttgcgacctacagcttaagtagatgttcaaacacgatgtggtagaaatcctgtttgtttcaaatgctaagcgagcacagcagcgacgggactgagatggcttgtctgagaaacctctccctaatcgcgcgggttgactgtcgtaatgacgttctgactccagcgtgtacggtaagagcttcccacttgggggggggcgtgccgtgcggcgtgacccggggcgaccttgaacttccgagtcgagtcagccggtagcaccgggtcccggaacaatgggcgcagacatcttggctcctcttgg

SEQ ID NO: 43579 - DNA, 236 bp, Mus musculus
  source 1..236: mol_type = other DNA
tttccaggggatcagacccctgggtctctgcatcacagacaacgtggccctgcctctgggaggagctggctcgaagcagcttcttcaccccaggatctgctggcgggccagtgaggtggctagagccggggacccgccaccaggaggagctgactgcacctctggctgccgaggggcctggcccatgcacgggacgtaaatctctcagagccgaaaagggaagcgcttgtcacaaa

SEQ ID NO: 43580 - DNA, 339 bp, Mus musculus
  source 1..339: mol_type = other DNA
gtgtagttaagagttaattgtgctcactgatctcgcaaaagctgcctgtaactgcagctcccggggctctctcctctttacgttttgttttattttcaaagcaataagagtaggaaaggttttaccaactgggttaaccacccttaaaagtaaggtttttacaatactgttttgtgaggaagagaaaaatgctgctaccacggcagccgatgtctcagagttcaggcgctccctgtgtgtctgcgcacgctcaggaggccgcgctcggagggcggagcgcttgccacgtggtcttggtgacgtcatctccgggcgccgagggtgactggacctacggtg

SEQ ID NO: 43581 - DNA, 278 bp, Mus musculus
  source 1..278: mol_type = other DNA
tgccatatcacaggatgtccttccttctccagaagacagactggggctgaaggaaaagccgggacaaaaccagtatatatgattataactttttcctgtttccctatttccaaatggtcgaaaggaggaagttaggtctacctaagctgaatgtattcagttagcaaatcctaaaatccatttgcaaaccggtggggggaagccctgaaccccacgctgcacggctgggctggccaggtgcggccacgcccccatcgcggcggctggtaggcactgct

SEQ ID NO: 43582 - DNA, 469 bp, Mus musculus
  source 1..469: mol_type = other DNA
aggagctagacctcctggcagcccctggcgactggagaattctcttatatatctttcccatggcaagtaggaaggaaggacacctctctttacaactcaggaacagtgttgcaaggaccctaggttaccaatccattgtcttggcaacacctctgaagaacctcttcagcctggaggccgagccaagggttaagggaggaagctgtacttccttcacgatcaccttgaagcatttcttctggcaaagttttccttcctgggcgcggcgtagcgcggggctgcgggaggccggtcgccgagcggcgtggcgcggcgtcgccagcgtgctcctccgtgcgcccgggcgcggctggtgctcctgcagagggagctgtgcgcccgttccggcgcccgcgcggcgactccgctccctcttgtcgccgcttgggcccgcccgccggggaggggctcccggccttgccgacagcgt

SEQ ID NO: 43583 - DNA, 243 bp, Mus musculus
  source 1..243: mol_type = other DNA
ggcactgaaatctttaagttgtgtgtccaaaggaaactcagagttaactgcggtgctattagcatatcaaagcactgtttgcaagtacctgctagcatcctggcatactcccgctagtatctacagtaagctggtgctcacctccagtagcccagggtctgggccgaagactggttaccagcgagttccgcaccctgctggcacccgctggctgcccgcctgcctcggagcgcgcgcccgagc

SEQ ID NO: 43584 - DNA, 463 bp, Mus musculus
  source 1..463: mol_type = other DNA
ttcccagggatgtccccatggatacactgggatagagccaactcctctttaaagattttaaaggttcaatacacaggggcctgtggggaatgccccagagccaactggagctctctactaggcagattggaccaatgtgcacctcaggactgcgttctctgtcacacagaggacacttggtggagtataaatactgattgaagaatatgtccatatcctattttttcttgaaatccagcctgctagcttgtaggtgagcgccctccgagcctcgggcaactctccgaggggtctgtctccagcggggggcgacccgcgtccgcgcgtgtccccactcatgcccaaacaaggaagcgcgggagcgggcgcgcgcacgcggtgggccaggcagcgggtctgcggggagcggggctccgcccgcgggggcgacctcgggcggcgcgtgcgccgtgcgccccagccg

SEQ ID NO: 43585 - DNA, 358 bp, Mus musculus
  source 1..358: mol_type = other DNA
tctagtaaagatgtaaccctttcactggagcatcctctcctggagcagagaaactcccccctcctgcagcccggagcagagctgtaacacttgtgaaggggaagtctttcccttcagggctgcagtatagtcattttagctacacatcgctactcaggacctaagtacagggatatatatgactgtccttgttcttagaaagaaaaaaaaacctacaattttgctttcgaacttgagttttattactgttcaaaatttaatttgtaagcaggatagttaaggcatttgtttatagaaaagtacatctgtttggaataactgaaattctcctccgtcggggcccagccagctcgaattc

SEQ ID NO: 43586 - DNA, 533 bp, Mus musculus
  source 1..533: mol_type = other DNA
tgttgtcattttcaaagttttacaactttaattttgaacaaaactggttttgtgaaatatttcatctgtttttcttaacagctcattggattcagatcagatgccacggttaggcaggctcgcccctgcgcagccgacccgaggcgccggctacgggggactgagccggagagtgcgcccgctgcctccatcgcgcgtgctccctgcgacccacggggcgcgcgacaggacgcggaaggccgcggctctggaagcttcccgaagaaccgcggagccgcgggccgtgagcgccccaggccctcggggacgcgcctgagcgggtcagggggggtcgggtgggagcgcgtgctcgcgcgcgctcggggcaggagtcccggggcggcggcgcgcgcacgcccggcccccggaatgaatggaaggttcaatctcgcgcgctgggcgcgggcagccaatgacgcggctcggagcggcggcgggcaggtgtgcgcgagcctcggcctgacgcagggctcgggtcgagccgctcgggcccc

SEQ ID NO: 43587 - DNA, 356 bp, Mus musculus
  source 1..356: mol_type = other DNA
atcgctcctccagagaagcctgaggagtctggtgtgctctctgcctcctgtccccacccctgactccaggaagcaacccttgggaagaccctaggaatctttcaatatctcatatttaagtacttctatattttggagacaaccagctgctccccagatgctggcaacatagctatgagtccttatactcagtgtagcttctcagagcaggcaaaaccggaagcactaggtggtcagtacccggaattctctccctggagtagtgcacgtgctctgggcctgggtgccctggagctagtaacagccccccgccaggaggcgtgtctgtctccagcgccaccgctgcggctccgcgg

SEQ ID NO: 43588 - DNA, 478 bp, Mus musculus
  source 1..478: mol_type = other DNA
ctcggaccatgggaaggtgaggcacactctgcgggctgcgggtgacagccgggaggctgccgctgaggctccgcaagcgcgcaggcttgaaagcagttagggggcgggagccttagcagcctccgcggctctcgacgaggctgtcgcgcgtgccacctgtcgctgcggtgccctgtgtgcaactgcgggagtccccgggggtttgatgcataagcagcacttctccaggaacccctcagacgtgaaccccgccggggagaggcagccggagtccggggcagtggaggaattctgcacggctggatagcctggcttggcgcgcacggccggccgagctctccgcagacgcgcagccgtcggtgctacatcccggccgcggcgagcggaagcccagcctgtcccgggaccgacctgccccccagggcggccctaaggacccgggttcttagcattttatacttagagtcccaaagggaaa

SEQ ID NO: 43589 - DNA, 395 bp, Mus musculus
  source 1..395: mol_type = other DNA
agcatctacttagaaaatgtacagtgcatttagttccttggattgtattagaagcaggtcataccagacaaaccagtgaatcttaccaagtttcattaatacttcatgattttattattcaaccaatgctgcttctataaaacattttaggactcaaacttaacaacaatgcagtttttttaggctagcttttctaaatttgccagtcgcacatcagatgttttgtttcgaaggtcagaaacaacttcagaaggtgactcactggtttatcgccacccgacgccaacccccgcatgggcggggccgagggcggccgggtgctgacgtggcgacgttggcgtcgcggtcggtgacgtatggccggcgcccgccccgcccctccgtcgctcggcgcg

SEQ ID NO: 43590 - DNA, 624 bp, Mus musculus
  source 1..624: mol_type = other DNA
tttaggaataaagatatgttattattgagattttttaatttcatttatttcaggcattaatgtcaaaacaacagactcagttttaatgtgtgtttttatcataattctaattattttacatatactaatattttgtttgttcttattgacttcattaacttcatataatcatcatatcaaattcatacatatatacatacatatatatatatatatatatatatatatatatatatatatatatactcatgaacagaaacctcatcatgtgtcaattactaatttgtgagtatataaaaactttctttgacaaaatatttatcctcttaattatatatattctcctcctctgtgtgcagaagactccaaccagcagcataaaaatgtaaaataagacttaaaatatatagtcacttttactttgtttcccatgagtcatactttctctttttctgatgaggaatggaactgtgaacacacacacacacacacacagagagagagagagagaaaataaatgtttaaaacataaagatctttaaccccaggatatcatctgctcttaggaaattacagaagtttcccttctcataatagctatgaatgacaactgcatatctgatg

SEQ ID NO: 43591 - DNA, 411 bp, Mus musculus
  source 1..411: mol_type = other DNA
ttgacttcattagcttcatataatcatcatatcaaattcatacacatatacacatatatacatactcatgaacaactcatcacgtgtcaattactaatttgtgagtatataaaaactttctttgacaaaatatttatcctcttaattatctctcctctgtgtgcagaaaacataaaaatgtaaaataagacttaaaatatatagtcacttttactttgttttcaagatatcacatgtgtcatactatctctttttctgctgaggaatggaacagaaactgagtctgtgtaaaataaatgtttaaaatataaaggtgtttaaccccagtcatctgctcttaggaaattacagaggtttcccttctcataatagctatgatgacaactgcatatctgatgttacagacagagt

SEQ ID NO: 43592 - DNA, 498 bp, Mus musculus
  source 1..498: mol_type = other DNA
cctgccggaggagtccagtgaggacttcttcagagggctggtttaatgttaaagaactttttctccccctttcagcagcagagcacattttgggagcctgtaatatggcgtttgctgccaagccttaggacctgggttcattccccagaacccacagggtagagagaatcaaatctgagagttaacctctgaactccgcagttgttccccacttgaatggggattcaagtattggaagtagagaaaaacagttgtaggaactaaggtctttttttttttttttttttttttttttttcttagaaaggcaataaattacagagtttacatttcctgcattcgaaagacagcaaaaggattagctttattctctaatgggatcaaagctgaaatcctgatgagaaccatatctcaataccaagaaatgtttgtaaatgatttgctgagcgtctgcgcccgaaaatttccctgggacccagcctgcccctaggaggtctgt

SEQ ID NO: 43593 - DNA, 311 bp, Mus musculus
  source 1..311: mol_type = other DNA
taatgttatttcatgctaaactcaaacaaggcaggatccctccttcttacttcgaaacaaacccaggttttgtcatttgggagtgagatattattaaatttcagaaaatatacatgcaagtttgaatggtatcttttcctccaacctcaatagtttagagggatgtgacagtgtctctgtcttccatctgggttttgttcacttccacctgatactcaagtcaaggctgaccaggcaggtgcctcgtcccactagaaaaagagctgagctttataggatccttcatttccatcgggggctctggagcctgc

SEQ ID NO: 43594 - DNA, 631 bp, Mus musculus
  source 1..631: mol_type = other DNA
attatataattttaatggttaataatgattaggagaattgtctttaagtttacactggtttttgcaaaagacagaggactgtcttctggcctctatgatagacagacatacatgcagccataaatatccatcacgtaacataaaaataaagagatcttttaaatattttcatttactcataaggtttttccaggctggattcaataaaaacaaagttaaaaatgtgatttttaaaaaaagacttgttttaaaaatctgtatatttgaataataccttagaaacacaaaaaggttattatagtaattgctcaacataatctttgagtaccatattgcttattaagacagtatgatatgagtgtccatttgagtctctgtgacaaaaatccatgttattataaagagcacatttacacaacttttagaaaaatgttagagcggttatgaagaattgcttatgacttgtagaaaaaaaaactaattttaacagtaaaatatcttaggggaaaattagtcacttgagttatgctacgattaatttgggtaggttagtggtgaataaccacaataaaatgtataagacacatacaaaactttagtataaagtgtttttgcttatctcaagtgttat

SEQ ID NO: 43595 - DNA, 322 bp, Mus musculus
  source 1..322: mol_type = other DNA
ctggtggtttttgccatgaaactgagccgagagtcattgctctaaatattgacactctgagcttggtcagccaggcaagttgcgtgtcttagccactgcggccacttcccggaggagtgggaactgtaggcagaggttctctacaagaactgctcgagagtctttgtcccacgtggaaacgagggaagaatccaggagggaagactgggctcccccacttccccctagatcctcagtctctggcacctaggacacagctttccgcgagggagtccgggaaaactctttgaccgcgtcgcagtccagcgcgccacgggctggc

SEQ ID NO: 43596 - DNA, 589 bp, Mus musculus
  source 1..589: mol_type = other DNA
ctgtgtttgcctgcatcagccaagataaactcacacagattaatctgatgaagataattgcttgagtaatactctattttcaggggattccagagagtatcaagttgacagttaatgctcctttccaggagatttgtgagttcaaatcctagacaggagactcctttggttaagttataacatactcatatgaagagactatataactgacaacaattttctgtcaagattatataactacataccaataagttcagagatatgttaaaatcatgtattataaaattgtgtacccaggctttatatatgaaggatgtgggattttctttcatttttattcataactatctttgctactgtaattgggaaaaaaacattctccatgttcaccaagaacattttaattacaaccctgatctatgatctcttagagagacaaatttaactcttaaaaggactaattctgttatgtgtacttactactacattgttcaatcagtgtatatgagtaaagttttaattttcaaacttatggcgtattttaaattgtaacttaaaaatagtatgaaaatggttttagatgctaacc

SEQ ID NO: 43597 - DNA, 348 bp, Mus musculus
  source 1..348: mol_type = other DNA
ctggcacacaggtgtgcatgtatacagagagacttgaagtcgaaactggagtcagtctatccagagtgactgaatcctgcaagttaaggcagtattttagttaatatgtagtcaaattctgagagttctttaacaaacttagcttcttttgctctttgaaaaaaaaaagtgtttggtttcaaagcattcctattttcttactaaagcttctaatttttaaaacagttatgagatacggtttgctaagcatgaccgacaggaagctaaactataaaatagccttgctgcgatgttctgggctatctacctcaatattctttttaaagagagaatgatattctaacattg

SEQ ID NO: 43598 - DNA, 335 bp, Mus musculus
  source 1..335: mol_type = other DNA
aaaagtcgtgagagcctcactgtcttactagttcggcatatgtattcaatgtttatgaacatatgaaaataacatgggaacgagcacaatactagtttaaagtggttgctttagataacactttcactttaccttaattgccaagtgaagtaaactttggaaaccttgttacccaagcaaggtaacaccactgaggtggggcagctagtatgtaataattgattcaacaaaacttgctcagtagcttccataggcagcttctggggaccggtgccggtcgtcaacgcctgctctgggctccgctacgcacgcgcggcgggggcgggccggcttgc

SEQ ID NO: 43599 - DNA, 325 bp, Mus musculus
  source 1..325: mol_type = other DNA
gtccttaaaacgagtattaaccgttttcaatttgacgatgctcagtctgaagttttccagactgctctggggactctgttacagactgcagtttgtagtgatggacttaactgccatcatcccatcagatttcagatgccttgcatagccttggcagaccagctctagggtagagctgcggagtctcggtgaacccccgggctctggcgagcctgcgtctgggcgccccccttgggagaccggtggtgcggctgatcaccccggggggcggggcggggcagggcggggaggacacgccctctcgcgggcgcgggccgcccagagg

SEQ ID NO: 43600 - DNA, 318 bp, Mus musculus
  source 1..318: mol_type = other DNA
atcatactgtaatccagtgtggatctccatgacaatggccaaaacattaaggcctgtagacatttcctaatgggaaaaggggctatacagtaaaaaatatgtctgtattacacagatccaactgtatctgggcactgattctcttctcagagtggccacattgaatcattgttagggaccctaacagtgtcagaccctaacagtctgtttaacacttctgcagatccttggcgcgtcgccctcctcatccccagggggcgccagcggcccggagcgctgcggtggcggctccagccacgactcccggtcgcgtcggag

SEQ ID NO: 43601 - DNA, 446 bp, Mus musculus
  source 1..446: mol_type = other DNA
caatcatatcatgttttctacagcaaaggtttgctcgcataacagagctcagttctctgttaaaagatcaaatagagtcaactaagtgttttgtttataatagacttaatatttttgaataagaaagatattttcccaaagcattatgtttggataagagtagataaactaagctccttatctaaatatttgcaacccattgtttcactagcaataaaatgtactaataattaatggggtcacagaaaatgcaaaggttttatggcccactataaaacagctctttgtttccactaattccttagtgtcacatttaacaaaactgaggaaacatagaagtgtttgcagtttagacttgcaagccataaataacacagggttttcaatcttcctctttgtaatgattgctaaaagattctgttatcagactccgtggtataaaaagt

SEQ ID NO: 43602 - DNA, 509 bp, Mus musculus
  source 1..509: mol_type = other DNA
tcaggatcttggtgttatcataacattagaaaacaaattagtaaatagagtcactaaataccaacatgaatatgtaacaaactgaagattcctctagcttgagagataagaatattgaatattaaatgaataggcaaaattcattgctggaagcgtctaagcaacaaccaatcattgaagttctttgcatgcacagttcatgtgctttcacattgttcctgaactgcctttgttagaggtggcagatgaagcagatgaagaaacaaatgatggattttgttccattcaaaagattaaactgtgcacacatgaagacatttatttataatcaggtgcagacatgtactatatgatatgatcctgttaaaacatatttcctacggggaccggagcccgggcgcagagtcgagtgtgcgcgcaggggcgtgttcgctccccatggcggccattgtcctcgtcgccatgatgagcactcttgggggcagcgccaccttcctgcccagcccccc

SEQ ID NO: 43603 - DNA, 414 bp, Mus musculus
  source 1..414: mol_type = other DNA
aacaaatatacctgttaaacttactaataggatcaattccctattctgcagtgaagtgggcaaaacttaaatgcatatcattcttgtggcaagatccttgcccaggcaatctagaaagaggcatctgaaaaaatttccagagtcaataactatttgaaatgcagatcctaacaaagttatttgtttgacagctggaggaccttgagggagccatcaggccctcttgatgggctttacaatgccatgggcaactcaggagtagccttgtcctagaatttaaaaaaaaaaaactttctaggatctctgttattttcactcaacaaacaatcctccaccaaggcacctccggagcgccctctggcggggagcagagcgttcatcccacccccacccccctctgccggcgcggcgccc

SEQ ID NO: 43604 - DNA, 555 bp, Mus musculus
  source 1..555: mol_type = other DNA
tctaaaatttttctcacatttcagacaaaaaaaaatgcgaaaaactttcagaaataaatactggacacttatttcctgcagctcatcttttctagaaaagctactcctgacactactaaaaacctatttggtttctgtggtaatacaatgtagctatagaaaactcttaaggccttaaacgtataaagtgcaatacatagctattgaaatacagattcatttcactgaagaaaatgtaagttgaatgtatttgctcctctaactataaatttctttttcaaaacacaaagtattgacctagttttcctgagaatgtttgctgctctgacaagcaaggctctgcgagggcagctccattacttataactctttaaggaaagctactataaagcagtatcttcaaacttactttattctcagttatctgttatacacatttttaagttaaaaactaaaagcaaagcattccaaacctaacataaaataagttctaaggtttggttgtgataagaacatggctaaccaatcacatgttagaattcctacgtgatgtca

SEQ ID NO: 43605 - DNA, 480 bp, Mus musculus
  source 1..480: mol_type = other DNA
aactgtcaataaataattagatacattttagatcagataaagagccatctcgttatattcatttgacggttgaccaacatctgaagatttggagaaatatctgcagatctacaggaaggagactagatgtataaccacggtttggtacatttcagcaaatgtggtgagttatagcacacatttttaaatgtaagcctcacaagctttaagtagtattttacttgaggatacatcaatattaagctttggtttagtttgtatctaaatattcaaatgattatattgccaacaagagtaattgcaagaggatgctgtgaatgacaacaattttaattctgatcccttgaagcggttgatcacccgcatgctgtccaggccccgccttgaggccccgccctctgggccccgcccccagccccatccaggccccgcctgtcctggcccggcccgctgcctaaggttctgccgggcggagggggc

SEQ ID NO: 43606 - DNA, 413 bp, Mus musculus
  source 1..413: mol_type = other DNA
agcaaatggcataaaaatacatttgtttgttttacatcttttcagttattaaatgggaagaaatccaacatgaccgcactgtcgtggccaagaacttgaattccaagctataaaaatgcaattgccagcagagccagcaaagccgccggcactggtgggggcggggccgcctcgccacgggtcccgccccctccgtcccgccgcggccacgcccgacgtgtggcgcggccccgccgggcgggggcggggcctgcgtcgcccctcccccgccgccggcggcctccgcgcgggcctccctggtccgcaccagcaggtggagccgcagtgaaagtttcccgtccgttctgcgagcgggagcccatcttgctcgccgccgcggccctcgctggaggaggagggttcgcgggcaacgc

SEQ ID NO: 43607 - DNA, 320 bp, Mus musculus
  source 1..320: mol_type = other DNA
cacaaacgtgtctgtatgcacacacaaacattttaatcaattattgtacagatgctagtagtacaggtggctcttcttttttagttaatctcctcagaacaacttaatgataggaggaaattgtttgtgtgtgcatacagacacgtttgtgtttcagcagatatataatgcataattttataagcatggtaattagactattttcaagataatttttgaagacagacttaaactagtgataactccagatcagattttaacaatattaatgccggtcatttcatcagacctgttgaccccctgctgaagcagaacctgga

SEQ ID NO: 43608 - DNA, 717 bp, Mus musculus
  source 1..717: mol_type = other DNA
tgtggaaatgctgttacatttcaaatggaaaacaccctttaatcatcacagtctattcagagactactatattttaatgtttagtcaatcttcaaaatatgtcccactcactaaatgtatgcacgttataatttacatacgtattaaaaacctgtgacttcctttttacaatttttaaaggtttattgcaatggtttttataattaaagttaacattctacatgaagtacattgaagagattataaacttttaaattaaaagagaaattcttttcgtcatgattaggataatacaaggcattttgtcgaaatactttcaactagttaactaaaatttaacaccaatgaagttaaactttttgtttcaaatgttgaaaatgaagcattgattttaataaaatctaagaaaagcgttaagaagccatattttagctttctaagttctgctatttcgcattttttaaaccgtaaaatgtacttcagaaagggacgtggatcttcacacgttctggagaaagtctttcagactttctaaacctggctctccgagaggtctctgtccccggggagaggcggcgcacagcatcccgggcgcccgcggagagcacggccgccccccgggagccaggcgccgaggggccgagcccagcgcccgccttccgcgctggttggtggagggagccggagagcggcgcgaggacagcctcggcggggctc

SEQ ID NO: 43609 - DNA, 400 bp, Mus musculus
  source 1..400: mol_type = other DNA
tggagccagtttccatgacattccatgagactgaatactgcaaggctgtgttgaaaacaatctctgttggaccaagtcttgccttcgctgggagttgtcgcatccaagacttaatttcaacagggttcaatttattgcttggaggaataagctcggaccaactccggctctggtcctccgggcgagtcttaacacggctcccgggcgcagttccagtcctcgggagcccaggggagccgcgacctccccgcctctgccgggtcccggagaggcagcgcttcccgtaaactccccgccccgccgcctcggctccacccccgcgggaccctgggaggcgtaagattggcccggacgcgctgtcactctccggacgcgtcaccgccctcgtttccgaccgctc

SEQ ID NO: 43610 - DNA, 794 bp, Mus musculus
  source 1..794: mol_type = other DNA
aagccccccgcccaggccactgcccaggccgccgcccccagggctactgggcggccccgggcacgctccggaggttgtagccgccggctgacagtctgtccaggggcccggcgccgagccgctcagcagccaaacttcgctgccgccggctgtcagcggctgcggggccggctcttgcgcatccaggccgcccagagcgcgtgtctgggctgcgggtctccccgcttgaagcggctcccctccggcgatcctcgccggggcggctcctttggcaaacaggcacgcgcggcaaaccgctggctgcagcccctgttccgccctcccctggacccgggatccgcaggaccgtatcccggcaggcaaccccggggtccagccgcgggcaccaccctcagagcccaacttgggcggaggcagggtgtcccgcgacatctgggtcagcacagcgggcacctcggtggcaagggcggcgcacctctgggcagcaagggcgccgcgtgctccagctgcccatctccgagcgcttcccggcgggtggtagcacgcgtacagccgggtggctctgaggccccgggacacggctcaggtgagcgagcgcaccgacctgccggcgtgagcactgccctccgtcgcggccccgccgtgcactaatagcactgccggtctcccgagcggtcggaaacgagggcggtgacgcgtccggagagtgacagcgcgtccgggccaatcttacgcctcccagggtcccgcgggggtggagccgaggcggcggggcggggagtttacgggaagcg

SEQ ID NO: 43611 - DNA, 388 bp, Mus musculus
  source 1..388: mol_type = other DNA
agtagacagtgtactttaaaatcccctcttttagatatccatggtcaaaagatcagtaacacttagtcatttttttcttctgtagctagagaaaatttcacataaactagagattacgctgcacatataattcatatgttcataaaatttattattttacaaaagtcactgcccccgctgtcttcaagaagcgagggagcagacagcagagatcatatgaagtactctgtaaactcggtattacaatacgtcttatcgcagtaagtctgcctgtcaggaagcagggcctacgaagaccactgtccttcctgctgcctcaaaggacaagcctgtcaagcattctggcagtgccactgtagccatttcctccaagttgaaacatcttctc

SEQ ID NO: 43612 - DNA, 291 bp, Mus musculus
  source 1..291: mol_type = other DNA
ttttaaaacgttgatcttaaaaattattttatgtgtatgagtcacttggatgttggggactctttacagttatccataagtaaaatacataactaccctgtaatgaattgttaagtttctggttgctgtatgaacctgttgatcccctgggcgcgtcagcgagctgacgtcaggcgcagccgagcccgttaggccctcccagcagatcctgtctgccggtaccaaaaccccgcccttggactcgcgctgtggtttcctagggaacgacgctgagcgtcggcggcgattggg

SEQ ID NO: 43613 - DNA, 341 bp, Mus musculus
  source 1..341: mol_type = other DNA
tgtgggcaggcagtcaccaggcccacatctcttccctgaaagtgcttccgagggacttgagacaggctgtgtctggcaacctgccgatttaaatgttaaattgtaggcataaaaaagactaagatatgagagttacatacatgatatattatttttattcatagtatagaacatgtatcttcttgttgttaattaaaagaataaggaaaactacgggtctggttgtgaaatgcttttatttattgtaatattattattattatcattattatttaggaaatgtgacctaactgaaggaatgacccatttgaccatcagtggcttgaaacttttaaaagctc

SEQ ID NO: 43614 - DNA, 383 bp, Mus musculus
  source 1..383: mol_type = other DNA
tttttttttaatgaggattgctgaaaataaaagtctgttccccggtgtgtgaaaactttgcacactcaatattccactgtctaaacacattatatatatatatatatatatatataatcttcaacattgggaaggctgcatttccttccgcataaggagaaggaatggcacatactctgcctttattacggtattgcagagaactgtagaaacaggcttatcctgctcactcgggagagagagaaaaataacgtctacattaagtgtagatactcccaagcttaaaagttcccagctgcttctaagtgggaagtaatttaccataaagagattcgcaaaatgccgtttgccaaaattcaacagtggttagttatttaggtaac

SEQ ID NO: 43615 - DNA, 331 bp, Mus musculus
  source 1..331: mol_type = other DNA
acaaaacaacaacaaaaaaagttttttaaaaaatctttttttcagagatccactgttccgaatcacattttgcctggttgagaaaagcatataagatgctcttaacagatgctgtcacaaatagggaactattattcatgcttcaggttttgataaaactatgagctatttttctccccatgaaaaatgtatagaaaagctcattgtctttaagatagtgagattggagcaaattaccatccgaagccttggattggactcgctgagaccgggcgccgtgcggccgcggggtctctccgccttcaccgcgcgccccgcggcgccgaggggg

SEQ ID NO: 43616 - DNA, 420 bp, Mus musculus
  source 1..420: mol_type = other DNA
tgtcaattttatgagacatctttattttaaaatatttatagtaatgggtatttcaaagtgataactcttctcatggaatgtttgcaaattacagaaaaataagaatcgacacttttctaaaacccctatactataataaatgtcttaactaagtgaaccctttttcaagtacatgttaaaatgtgtctcacacacacacacacgcgcgcatatatatatacggacacatatatatgtacacacagatatatattatatacatatatacatacatatatgtatatatatgatatataacatacatacacacacgccttccctaacacagtcttctttacttggcaaagtaggcccactcccggcagcagtcaccgggtccaggtctgcggtgacgcacgcgaagctgaggggcttgtgcgt

SEQ ID NO: 43617 - DNA, 435 bp, Mus musculus
  source 1..435: mol_type = other DNA
ttcagtgaatactgtgggacacactgcgacacagtagagcttctacaagaggccttgctagcacatgaccttgctacctctcaatatcaatttttaggaagacttagaaaaaaaaatcttagttgaaagacagtgagtttagatttttttcaggatatataataactgctacctcctatacaacaaatggtttctgaagagttgtcagagaagcattactactaaggactactgtaagtcattcctatgactagcaatgaactgtgtccactcaaaggcaaaaaatagggtttatttctaaagaataaggaaacgtgctttgttttttggtttcaggagtggccactccagtctgtcgcattggttgccaaaccccgggttggctgattctttcatagaaaaagcagaaaagtactattcagcaaatgctcacgt

SEQ ID NO: 43618 - DNA, 434 bp, Mus musculus
  source 1..434: mol_type = other DNA
ggcacacagtataatatttaggtagatgtgaggaaacaaaatatcctttaagtgatcctgtagccccctcgaggaggtgaaggaaaaaaatctcctctttgtttctctaactcattaatgaattttaagggcactctgttccttcattctgagaaacacactgtgtttgtgttgagagtccctagctacactgtctgtcacattgatgctctgagtagggacctaggaaatatattttccatttggctctctgtttaaatataaaagaaaactaaaacacacccagacgcctatgtctgaaaaattctttaaggaggccttcatttgtaaccaacaccaagccgctgacttcctttagagcatgggtgctggaaagagacaagttagtcattcaaatgattggctttttgcccgcttcttctctaaataagaag

SEQ ID NO: 43619 - DNA, 382 bp, Mus musculus
  source 1..382: mol_type = other DNA
agcttagtgacagagatactcttttaatcatgaaaatggtatgctagatacacaaatcatagtatttttcttttatgaggtcagcatctctcaaaggtttgctcacaccctacgttttataaattaaagttgttggctatattataaagagagcgcattctcataaattcaaagaatacatattacacacagtctgtgggttttggtgtctttgccaatacttataaaacttttggaatagaaaaatcaacagtctctatttgtatttaaacgttcagcctggtgaacctgggacatagtttgccgactccacctatctatcaccttgcatggccagcccagctaatctgttcatttttacatttctgtcataaatcccagg

SEQ ID NO: 43620 - DNA, 307 bp, Mus musculus
  source 1..307: mol_type = other DNA
gtaaatagtcaataattcaaggagtctaactacactttgtatggggtatcccagacctggacttcctggaagccagatctggtgactctcagaggccactgggacttccagcaaaagtcacctcctccagaatcagagtcttttttttttaaaggacatttgatgtctgctttttattgcacaaaaataaaaaaagaaagaatgataccagcggtgaacatgcacagaggctgtgtcccctgggcaggttctgcttaactgggcaggtcctgtggagcctagctcagctcgcgggggcgggaccgag

SEQ ID NO: 43621 - DNA, 563 bp, Mus musculus
  source 1..563: mol_type = other DNA
gccaggcttaactatagaaaaatatcaggcattatttttattagacaataacaacgaaaatctatattgtagtatcttccttctctaccacaagggagggccctcatcagactaggaatgctggaattcagtctgagttgtggaatgctgccacccacagttactgggggtctccatagctcaagtaatctaatctagataaatttcacatacatgtctagaggcttctagatcctttcaagttgacaatataaacaaccagcattttgaaactcctgagaaagtaacggattcagtaatttattccttattaaacatgacagaattaaagtcacctataaaactatttgtttcacatatgccgggatagttatatttgtaaagcacatctttaaaaattagaaaacgaatgccacagggtgcagggcgactcagcgcgttccggcaccggccaggggacctgcgcaaagacgacttcctcccggagtgccagctctgcgtagccttggagacgcggggaggcgtagtcgcctcgtaacgagacctttgacccgcgctcggca

SEQ ID NO: 43622 - DNA, 192 bp, Mus musculus
  source 1..192: mol_type = other DNA
ttaacataaggactggtcttgcagtttacaaatttaaaaattaacagggttattggtgtcgctgacttcaggcacaccagaagagggtggttgtgagccaccatgtggctctggaagagcagtcagtgctcttaaccgcgaaggggtcagtgcaggctgcagatttcccccctgctccaagtgcacttgccc

SEQ ID NO: 43623 - DNA, 309 bp, Mus musculus
  source 1..309: mol_type = other DNA
tggcagcaagattttttttttccttttggaagcaaaaatctttaaattctatttcgtagcatttatttaatatatctcctccctggaagacttgcaggacatcctcccttaggaccttggctcaagccaagggtactcttgcctctgctggagggtcttcgccgcgcgccctagtccggctttggcgggccttagccacgccccctcgcgagcctaggctggcgctcttcggggcgtggtcaacgccgccatttgcgggccactaccagctagtggccgcggggccgcctcgtcccgcccccttcctgc

SEQ ID NO: 43624 - DNA, 328 bp, Mus musculus
  source 1..328: mol_type = other DNA
cgacagtttattcacaatcttgagactattacttaaaaggtcagaacccggatttagatagatgccctggaaccggctgctgagaactgaacttcggtccttcagcgaagagattattacttttaatattctaatataatctgttctgcacaaaacaggcccctgttgctgacaggtgaggtgcatctcagttttagggcagccattaaatctataaagcctttcccggggaaagggagtgcgtggcggggtgacagcgagcaggcgctccaggccgcagcgcggcgcacagtgatgacgcgcgccgcacgccctgtgcccatccgtt

SEQ ID NO: 43625 - DNA, 370 bp, Mus musculus
  source 1..370: mol_type = other DNA
ggattcaaagtagggaggtgtgagtttcatagaggatatggtgatatgataggagacactatctgcagtgcttagaaccctgcaccctgtgttgcctcatgcttctctgttgctattatcatcatgacaaacacaattacaagacagtagtttaagctaaatctcctagctgggattaaattgaagaattacagttaaactctagtcttactatgctgttacttttatcaagaacaaagataatttctgaagcttatcaagcttttcaaaaatttctgtgtatacccaaatggagactcactcagacacaaattggagcttctagaagtcataatagatccagactgctgtgctgcagagctcttaacat

SEQ ID NO: 43626 - DNA, 421 bp, Mus musculus
  source 1..421: mol_type = other DNA
ttgctaaagtatcaacttctgtaagttaaaaagttatccagatactatttctcagtgttagtgtatctcaaagaaaaactgaactgtgataagttgaacacaccaagtactgttctgtgttttaaacgaacatttaggctggagtataatcagcagttaatgcgcttagcgctcagaaatcacttttctaattttatgtagtgcacagtaaaatttaccctgtacctggctgtcctggaactcactctgtagaccaggctggcctcgaactcagcactgcccggcagaactcacctttttcattatggcgggtaaccgagaactgggttgtagtgtatcctcctaccggcttccggcgtcctcggggggcggagccaggcgtcgtgacgtactgcccgccctgacgtgactgtgaacccgg

SEQ ID NO: 43627 - DNA, 424 bp, Mus musculus
  source 1..424: mol_type = other DNA
caacaacaacaacctgttgtttccactccttactgtcagataacttattttttgaaagagaattgatcaataccaaaaggtttgcatttaacgtttcctttcaaatatatagttatctatgtaaaggatacatatatttatatgaggcacatactgtagttacaagagttagatatgtttatccaggctgcatgaaggagcgtgaatggatacagcagtattcatcatacctataagttctgattaatgataacttaatgcaaatttcatctttcattattcaaaacctcaatgctttttacacattccagcttgtcccttaagccaggtgcactcagcggcagagcctgaggctgtgcccaggctcctgcactgccgatgcctggcgcggcctctaggtggcgcggcgaggggcctcctctcc

SEQ ID NO: 43628 - DNA, 622 bp, Mus musculus
  source 1..622: mol_type = other DNA
tcgctctgacgctcccagaaccccgggcatcgggaaggagcgcacattccttcagagctcaccagagcgggcgctggagtctttcaccgcgccgccaggggcgcggcgctcggccagggtgtgctggcgcgtgggcggcggcgtcagtcacacatcagtgattctggagagggcagccggcttcccgaaggagtagtcgcggccccggcagcccccgacccggcccacagctgtcacttgggcatgctggcaggagaggggacacaagcaagagtgctccctggagtcgtccagaaggatgcctgggggctgctctccagcgctggctaagaaagcattcgcggaggcgttgagaagaaacgaagcctgcgcaggggaagttctccggagccccggaggtgacctctgcgcgtcccccgcacatggtcccgcgacccagggacgagatccggctgagctagttgagcaaggcggcggtgctctggcagcccgagggcgcatggaggcgccgaggggggcggtgcggctcgcctgcggcgcgggggagcgtgcacgccgcgccccggtctccctggggacctggccggcctctccctgcactccccgctgctgggctcccggg

SEQ ID NO: 43629 - DNA, 773 bp, Mus musculus
  source 1..773: mol_type = other DNA
ggctaacgatgcggtatcggagtcgccccctcctctgctgcagttgcggggagctgcccaacaccaggtcccgaaagttctgacgggccgacctgggaactgcccccttcagcctccccctgtggagggagtttaaggttctcgctggacccgggacccgacgcccaggacacggcctcgacctcctgtggtggcgagtccttaccttgggccccaccttgagcaggggctggcctcctggagctggctgccctcgcaaggctccgctgcaaggtccgggacttgaggctcctcagtcacctcgatacgcgggggctctcgggggagcttggcctcaagcgggggggaatcccccgtacaaccatccgcgggatcggtgcgcacggtggccacggcattgaccagttccttgaagcgctcgcgggcgcgggtgcgctgttcgcgctggccacccaggacgtccctgaagtcattccgagtgtcccgcccggcccccacgctcggcgaggaagcgcaggatcgcctccgagctcagctgcggctcagcttctcagccccaggagcgctcagccagacaccatggccggacgcctggaggacccggagagcggcttgggtctcagtggctggcagcacgcgcgatcccagctttgaagagtctcgagtcccgcgagcgctgacaccgcctcactggggccgcgtcccagtggacacgcccctcgggactcaatctcggcgacagtccccggcccgaggccccgcccacttccggg

SEQ ID NO: 43630 - DNA, 794 bp, Mus musculus
  source 1..794: mol_type = other DNA
tgggccccaccttgagcaggggctggcctcctggagctggctgccctcgcaaggctccgctgcaaggtccgggacttgaggctcctcagtcacctcgatacgcgggggctctcgggggagcttggcctcaagcgggggggaatcccccgtacaaccatccgcgggatcggtgcgcacggtggccacggcattgaccagttccttgaagcgctcgcgggcgcgggtgcgctgttcgcgctggccacccaggacgtccctgaagtcattccgagtgtcccgcccggcccccacgctcggcgaggaagcgcaggatcgcctccgagctcagctgcggctcagcttctcagccccaggagcgctcagccagacaccatggccggacgcctggaggacccggagagcggcttgggtctcagtggctggcagcacgcgcgatcccagctttgaagagtctcgagtcccgcgagcgctgacaccgcctcactggggccgcgtcccagtggacacgcccctcgggactcaatctcggcgacagtccccggcccgaggccccgcccacttccgggctccgcgcgggctcgcagccactgtttccgccagtggcgggaggcgagggacccagagcttggcctccgaggctcacgaaacgcccggtggggcacacccgggagaagctcgccccgagcgcgggaaaccctggtagtccctggcgcgttcccgcagccctccgcctcggccccgccccagcctctcagcagaggccgccccgcccattaacggctgcggggcgccgg

SEQ ID NO: 43631 - DNA, 576 bp, Mus musculus
  source 1..576: mol_type = other DNA
taaacccgcgagctttggaagcctggaaaatagccctcgccctggggcaacagggagccccctctccacgacacgcggagtcccggagccgcacgctcgctggcccagaggcgaccgggcggggcggggcgggggctcggggaacccaagggcgcggggctcaccagctgctgtacctcgtcgcatgaggccatagccctggcgggacaaggggcgtgcccggcgccccgcagccgttaatgggcggggcggcctctgctgagaggctggggcggggccgaggcggagggctgcgggaacgcgccagggactaccagggtttcccgcgctcggggcgagcttctcccgggtgtgccccaccgggcgtttcgtgagcctcggaggccaagctctgggtccctcgcctcccgccactggcggaaacagtggctgcgagcccgcgcggagcccggaagtgggcggggcctcgggccggggactgtcgccgagattgagtcccgaggggcgtgtccactgggacgcggccccagtgaggcggtgtcagcgctcgcgggactcgagactcttcaaagctgg

SEQ ID NO: 43632 - DNA, 433 bp, Mus musculus
  source 1..433: mol_type = other DNA
tgtgagccaccacccagcacggtgctgggaactgaaatcttagcttgtgtctaaggccttttttttcagggaacagataatattgtattccttctttgcaagaggaagttaaaatctaactttatacagagtgggttaggatttaacctcagatgacactcaattgtcatctattattcacccataaagtatgcgaagaattcccgggcgcaccggtggcgtggcaggagctctgcgcaggcgcactgcgtcctcgcgtgggccagcctaggcttggaacaccccgggcctgggcgactcccgggtgggtgggaggctcgccgcaagcgcctgcgcagtggcgcgggagctggtgtgacagagcgcacgtagcgagggctgcggccgccccctctccggcgcgccggcgcggcaggggaatataaaagggacg

SEQ ID NO: 43633 - DNA, 677 bp, Mus musculus
  source 1..677: mol_type = other DNA
cccgggcgcaccggtggcgtggcaggagctctgcgcaggcgcactgcgtcctcgcgtgggccagcctaggcttggaacaccccgggcctgggcgactcccgggtgggtgggaggctcgccgcaagcgcctgcgcagtggcgcgggagctggtgtgacagagcgcacgtagcgagggctgcggccgccccctctccggcgcgccggcgcggcaggggaatataaaagggacgcctggctccctctactgcccagtcgcactgccagcaggctgagggcggcagggagctagctagcggggactgcaggcgacaggactgacccgagccgagctgtcgcctttgagctgagacggatgcggggtccccgcgggcagccggggtcccttcgctctggagtggggctcagcccttctcacagccgcccccgggtctccccgagaggacccggccccgcacccccgaagtcaggccgccccggcgcacccccgtcctgcctctggccggagcggcagcagcggcttgcgccccgccccagcacgtacctcgtccgccccactaagccgggggaaggcgagggcggacgggcgggggtctgggccgcccgagccgcagacgcttgcagctttccttttcacttttggaaagtaaagctgggaagtgggacctactcagaagtt

SEQ ID NO: 43634 - DNA, 271 bp, Mus musculus
  source 1..271: mol_type = other DNA
gattccagagagcaatctcaaagcttggaatctcaaacaggctttctgatagcagggccgaatgttcccagaagagacctggggccatcagtctcaggggatcccaggatataatctgttattagattcacctgtggtgaagatgaccccagtagggctaccagagtctcgctcttgggaagagctctgcagtagacctgaggtgctcaagtgtgctggagaatcctggggctcgcgcttcggggtccactgggaagtcccctcttccccg

SEQ ID NO: 43635 - DNA, 162 bp, Mus musculus
  source 1..162: mol_type = other DNA
cacccaggcctggtgacgtgggtagttccaaattttgggaagttcctgctatcattttcaccaggcatcactgctgggttggatcaggccatggcggggatgtccctaagtgagagttcccttctggatacccgtatcagtaaaaagtcaaggccagagcgt

SEQ ID NO: 43636 - DNA, 245 bp, Mus musculus
  source 1..245: mol_type = other DNA
acgtttgcacagttatccttctctccaacacagggtttgaaatcaagccttactttgttgcccaggcagtcctggctttaaaggcatgcactctgaaagatgctccttggaggggagctgccttgttacaagtgtcctggcagtaatactattgcaactggagtatacagccaaggctggcttccagctacctcagtccaagctggtcttatgcgatcctggatgagaattctagtctcaaaccc

SEQ ID NO: 43637 - DNA, 288 bp, Mus musculus
  source 1..288: mol_type = other DNA
tgtgatggtccatacctataacccccagcactggggatggccggtcaggctgggcttcaactgtgttctacttgctatcttagcaaaattatgaaacttggttcatcttattttaaaagggagaccaaggtttgaagctacaagttcgaacgccagagaccggtcccctacagaagcccgaagccgggattctcccgcctccgcctcagaggcttgactcaggactgcaattggcctagtgaggctgagtggcgggtcttggccacgcccctgccgtccgctgcgctg

SEQ ID NO: 43638 - DNA, 420 bp, Mus musculus
  source 1..420: mol_type = other DNA
attttattcaacaatttatatattgatgattttttttctcttttccttattcaaataaagagttaatttacgatgcaatgtgaaatttacaagtttcagagaagagaagacttttatcttcccttttttcatgtatgtatgtatgtatgtatgtatgtatgtatgtatgcatgcaggtatgacaacttgataatttgacacaggtctacactagcctctaagttccaagtgttgggagatacattatatcttacgaaactgtcaaagaatgggattttgcaaatctgccggcattcccgcctaagcaccgacgtgtgggcggggctgaggacagggcgggcccccaggcgagggcggagtcttgactcggggcggggggccccagagaagggcggggttgcctctccgccccgccccaga

SEQ ID NO: 43639 - DNA, 427 bp, Mus musculus
  source 1..427: mol_type = other DNA
tatgtttatgttatatatttatgctttatatatatgtatatgtgtgtgtatctgcaactcgatgaatatatattcaccgagtctcacttggagacagagtagaccaggttggccttgaactcagagtccttctgcttcccaagggctgggattgaaggcttacaccaccatcgcctaagttgctgtcacttaagtgggagggttcagagcctgtaaaatgagtttctgatatattaagctatcttaaattctgactaaacatctgtacgattcacagatagtcaacgtgcgcgcacactcaacttcagcatttgcgctctagagcgcccgcgcgttctagcgcctccgaaccgaacgcccctttcttaggagacatacggtagggcttccgcccgggttcaaccctcactcaaatcccgggaaggag

SEQ ID NO: 43640 - DNA, 397 bp, Mus musculus
  source 1..397: mol_type = other DNA
aggggttctaggacccggcggacgccaggggctctgccgcccttgttccctggccgtggaccaggcgctaagaatcggagtccgtgaactctaactctcccccggggctgcagagtaacaggaacacggggacgtgggagccgaggagtaacgtctgccgccgcgccacggtcccatggggcattagtgtccttggcccttgggctcccagaagctaggggtgagcgccctcagggaccttggcagctgctgaaagccgcctcggatcccttccagctccgtgggggcggggccaggccgctgtcaccaggcaggagagaacgttgcgaacgtgcgcccggtgcctattggctgacctggagggggcgtggcctcgccgggagagcccttataggct

SEQ ID NO: 43641 - DNA, 324 bp, Mus musculus
  source 1..324: mol_type = other DNA
tataaaaacccttgtcacagtggctcctggatgaatgatttataaattgagttcgaggccagcctggtctacagcgtgagttccagtacagccagggctgtacagagaaaccacagttccagtcatgactcttgctgctgccaagcagaggcgacagcgggatccaagtgaggtatgacacccgtaggtgtcggatcaccacccgcagcacctagctgcggtagctctttctgggagaggggaggagccagcaccctaatcctggctacctacccaactcggggaggaagggaaggcttgcggccggcccacggcgcaggcgcc

SEQ ID NO: 43642 - DNA, 447 bp, Mus musculus
  source 1..447: mol_type = other DNA
cgacagcgggatccaagtgaggtatgacacccgtaggtgtcggatcaccacccgcagcacctagctgcggtagctctttctgggagaggggaggagccagcaccctaatcctggctacctacccaactcggggaggaagggaaggcttgcggccggcccacggcgcaggcgccaacccgccccacgcatgctcagtcggatgacgctgcctttgcatacggccggcgcgggcgagcctccagggtctcttcctacgctcccagttagtcctggcaggtaggaggttctcggccacttaccagccccgccccttggacgaagccgtgcggcctcgctcgccacgacgtagacggcggcgtgcgcgcgcccgcctgagccgcgagggggcggagcccggctgggccagaccgagctttccgagaacacttccgggtcgctgtggctgcc

SEQ ID NO: 43643 - DNA, 278 bp, Mus musculus
  source 1..278: mol_type = other DNA
tttgtaatgtaaatttcagctgtgcccagctgccagccttcccagctggtaaggcctgggcccatgtgtcttttagggttgccctaggaaaagctaacctgcttgcggaagaggaggggagccagctgtcagagcggtggcacaggccactcttctttgctgtccacccttagatagacagcagggacatctcagggttctgcttccctggcttgcaatgcgcagccctgcgctgcggcttagttacagacacagcccccgctggcgcagcctctctg

SEQ ID NO: 43644 - DNA, 331 bp, Mus musculus
  source 1..331: mol_type = other DNA
tcaccctatccagtatgatattttatcgtatccagtttgataaatgctagaaataaataccttccaatcagatttatttccctatcacagtacaattaaaatatgacttactaacacagttctcggaccacacagtactgtcacgcttgaatcaataattcggaattaaagctttaacagtcttgtgccgcgccacccgttctgtcgaaaaggagcctttacaggtacctttcctgagcagctccaggcagagactgcgcaggcagccacagcgacccggaagtgttctcggaaagctcggtctggcccagccgggctccgccccctcgcg

SEQ ID NO: 43645 - DNA, 307 bp, Mus musculus
  source 1..307: mol_type = other DNA
ctgggcccatgtgtcttttagggttgccctaggaaaagctaacctgcttgcggaagaggaggggagccagctgtcagagcggtggcacaggccactcttctttgctgtccacccttagatagacagcagggacatctcagggttctgcttccctggcttgcaatgcgcagccctgcgctgcggcttagttacagacacagcccccgctggcgcagcctctctgttccgtcagtcactggagtcagacagcaggaggagggctgaggaggaccgcagcgcttcgccagtggcgcggtggaggcctgct

SEQ ID NO: 43646 - DNA, 337 bp, Mus musculus
  source 1..337: mol_type = other DNA
caactcccgatcgagcttggggctcaatctgccagctgaatagctgaatgcttaccaagttccagatgctaggcacgtgctctgcctatctttgtataacctagagattctggaaatacaagaccaataagcttgcccagcacagcatactgtgtcttgtgtagctaagggtgtagccatgaacttctgagctttacactagtatcattgcaacatgtgacactggtagctgtgatgtctgctccattttccattatctaaaagggcattcattcatttactcattcatgactagcattgaatttaaaaatagattcccgcctcatttttttttttt

SEQ ID NO: 43647 - DNA, 262 bp, Mus musculus
  source 1..262: mol_type = other DNA
cctttatagacaattgcttattttgtctaaaccttacccgtctcaggcctgaagttagcgccaagggggtccagctccctctgagctgggggctctgtgagctgccggggctcaagctggacaactctccgaagctcctcccagcctcgtcctcaagggtagggatggagcagccctggcgagtcccccgggacgcagcttcccaggggggatagggggggctgctgcccttcctcccggctcctccatcctcttcgagagg

SEQ ID NO: 43648 - DNA, 328 bp, Mus musculus
  source 1..328: mol_type = other DNA
gcagaatcaggcagatttctgagttcgagaccagcctggtctacaaagtgagttccaggacagccagggctagattggtgacaccctctttcaaaacttgatatcaagtacaacccccaaccattctccaaggggttgaggcagaaggttgagagttccaggtctgctgcgacactgaattgtcgattcagggcttggtaccagccctgggctggattcctcagttagataccgttaccctccctccccgcaggcgcgctgcgcgacgctgagtcaagctgcgcccagtttgggcggggcccgcgcctgcgcactggcgtctgcggct

SEQ ID NO: 43649 - DNA, 272 bp, Mus musculus
  source 1..272: mol_type = other DNA
cccagctggtctctgggactggcccacaccagcctttggtctagcgcaggacacaggtgatctgtaaggacaggtgcgggtggtaggtgacacctacacgtcccctgcagggcagcggaggaagtaagcccaaacttttctctctctctctcaaaaagaaaacaaaagtacaggagccatcttcagctctctctgcagatgtggcatccacctaggctgggaggccaacaattggactgcagttactgccgtaggcgacaagggcggagccc

SEQ ID NO: 43650 - DNA, 330 bp, Mus musculus
  source 1..330: mol_type = other DNA
tctttaaaagtgtgagttccaggctttttgaggacctgaggtcagagtccgggaatccagggtgcttgccagccagtctagcataagaacacataccacccatgtatatatgtgtgtgtaaaatgaggtccctgatacagtgggaccacatccctgtgtttgcagaaggatgagggccacccttggccctcagactggctttagcctaagcctgtcaaactgggaggctggaaccaaggctccggcctttggggtcttaggacccttggcacccctggggaagtttacctcccttcaaggaaggaagatccaagacttcctttcctcagg

SEQ ID NO: 43651 - DNA, 212 bp, Mus musculus
  source 1..212: mol_type = other DNA
tgcatccctgcaatcccagcagcctgagctacaaggcagcatcctgtctcagaagcatgcagccggtggacataactgtaccaggtgtatcagctccctgggctgctggagggaagtggctggttggacacttgccactttgggctctggagacgccgtaccgcccgccgcccctcgggggcgctgctgggcggggagcttgctcggccgcc

SEQ ID NO: 43652 - DNA, 311 bp, Mus musculus
  source 1..311: mol_type = other DNA
cctgtgagcttcctgtgagcaagcttatgtaagcagctccttcaaggtcacgcgcttaaggagcagaaccagaaccaagtttgtgctcggagctcctaggatgagccatccttccggagttctgtcctgggaagctaagaagtgtacgaatgtttatttcctttatttttggaaagaaaatccggtagactccgccgctttcagcggaccggttttccggcctacacagcggtagggtaccccccctcgctgggccccgtggctccgcccccgcgcgtgaggccccgccccggcccgctgactctagggcg

SEQ ID NO: 43653 - DNA, 354 bp, Mus musculus
  source 1..354: mol_type = other DNA
aatatacacgtggtggtggcagcggcggccacaaacctacgtgtggtgaagaactacaactcccagcattccaggaggttacctgctccttgtacatacccagcagtgggccaagataatgccttgcctcctggaactgcttgtgccaggcataaaggaactactgtacttgccactgtgagccagccagaacgctgctggggtcatatccaaccagacctggtagaccttctaaaatagtggttctcaacctccctaatggttccaccattagggttctttatgaatctcgatgtggatattgacctgctggttgagaaccactgttctagaatgttccatgtcttatggaag

SEQ ID NO: 43654 - DNA, 447 bp, Mus musculus
  source 1..447: mol_type = other DNA
aaagattttatttatttattatatataagtatactgtaggagattttctttcttacttagacaaaatataaatgctctgcatggctgctgggctgcaagctcacctgcacccgactgtgcggagactgttgagaagtccagggtctggtcaccaaagcagagccactgactaggtttagtttagcccatgatgccactgggttttcaggaacccagagggagccccttgagactctcaatggcttaaagacacatcgcggtctgcatctgcctgctgcctacactgctagattagcaaccagagcagttcacggctcttgagcaatggttctatagtggttgtcgacccctttggagggggtcaaatgagcctttcatcagatacttatttacattttgattcataacagtagcaaaatttcagttatgaaggttctagaagaacct

SEQ ID NO: 43655 - DNA, 283 bp, Mus musculus
  source 1..283: mol_type = other DNA
caggagggcccctgtcttcagacagctgtcctggaccctgttcccaacagctacctgtccgcagtccgtcacatgtgtcgcttaggcgccctgaggacatgccagcagctgaagctcctccagcatgagtgacagctccgctggacatcacctcctgctgctctgatccaggccaccctaaggaagggggctctgcatcaggtggggatgggaacgcagaagaactcagctctgaagccatgacgcccgcccgcccgcccgcacacgcgcacgtgcacacgat

SEQ ID NO: 43656 - DNA, 445 bp, Mus musculus
  source 1..445: mol_type = other DNA
aagtgggtgctgggacccagcctcactcagagtgagaccctgtctcaaacactaaccagcccctaaactgttgagtgtagtgattctaagtcagaacttggatcaaaacaaagaattgttaagagagaagcctttgaccccggccagcaggcggcgcgcacgcccacacggctctgggcgccccgaaccttggcgccgagcctctcaaccctggcgccattacttagtccgacaccacagcccggacccagcagtaggcgggcggagggctgcggggcgagccgagcccagcgcggcgtcggacgtgcgcgcgcccgacagcggcaagggcgcgcacggcccgggctcctggaggcgggcgggtaccccaaggccatttccgggaggggcggggccgggggcggcgcacctccaatctctgcggcggcggcggaagggggaaccc

SEQ ID NO: 43657 - DNA, 435 bp, Mus musculus
  source 1..435: mol_type = other DNA
tggcatctacatgcatacatcttaaaaattaaaacagtgattaaaaaggtgatttactcaatacagctttactgggaagagaagcctccaagtctgtccacctggcaaattgccagaatggtgtgaaatctttccagtagacaagtttcttcctttagaaagagcactggctgctcttcgtggttcacaaccatctgctgatgccctcttttggtgtgtctgaagacagctacagtgtacttatatataataaataaatcttttttaaaaaagtcttctgttctgttaagattaaaactgtgcactttatatatgtgcagtccagtgtatactgtaacacccagagtcctctggcagagagggagcagaggtcaaagcttttgatgctcacagagcacagggcatggaaagcccgcggccaccggatctctgccc

SEQ ID NO: 43658 - DNA, 182 bp, Mus musculus
  source 1..182: mol_type = other DNA
tggggaccccattgcaaaattttggaaaaaaaaatgcagatatgctagaaaactgtatataatgtatccactattcctatgagatcaggaacttggttttataaacatttatgtcattcctgtgttagcaggaactctgataggactatgattgggttggcaagctggcaagaccttggaca

SEQ ID NO: 43659 - DNA, 352 bp, Mus musculus
  source 1..352: mol_type = other DNA
gggaggcagagtgcaggctctccttcagggacagacctctgagacagctggtctccggtcccacccaagaagacaagagttggacgcttctcgtgtctcccgggaaggaccacgtgggcaaaggactcactaggaccaccctggtcttggctctagttctgacccctgggtgctgaaactgggtaacagcctgaagctggtttcttaccagcccctgcgctctctgacagatgggccccagcttccagacagaggctcactgggaccagatggcatgccatgaaggcagacctcagcctctggggctgggcttcatgataggcacttgagtccccaggcctggtgagccaga

SEQ ID NO: 43660 - DNA, 492 bp, Mus musculus
  source 1..492: mol_type = other DNA
ctcacaggtctttaagagaaagactcagctctctgagctgacttcagaaatgagctggccaccccatcctccctgctctaagtttccacctgtgagtagtttgaattcgagtctcattgcaaattattaaactgttctcagcgagctgccaagacagcatctgctcagcctgtggaccgtgctcagtactgtgacaggggtggacagatgaagaaactgagactcagcacgagcagttgggctgtaaagccttgcagcccctgacagtccacagcgctatcatctcccaatctgcgccttcgctctggagtagtcacagagctctggcgtctgaagggacgatcaccccgtacgccgggagcccctgcgcgggctccgcgtggcacttccgatccgggccgcatgccttagctcgccaggcccgcccccgcccccggcgcccgcgccccccgcccgagccgcgcgccccgccccgcccgtgtacccgccccg

SEQ ID NO: 43661 - DNA, 378 bp, Mus musculus
  source 1..378: mol_type = other DNA
gagctttggcatcgcagtcagaccacccaggcagagtgccaacgtgggcacagggcaactgcagtttctgcagtaacagaagtgtgaccatgtggcggggtgttgagaatgctcaaacctgaggttcagctgggatgtaggtatggaggaagtgggtaccagctttgagtatctctccccactcccagggaggagggaacaggagtaaagatcgtgtctagtcctaagcactgccatgggacactgttggcctgctggtcccccaactgctgctctgcttggcagatgagcccctggccttcacagctgacttcctgaaggctgtcggtgggaacctgtgaccacactctcgggatagatcgcagcattttaaaagcc

SEQ ID NO: 43662 - DNA, 307 bp, Mus musculus
  source 1..307: mol_type = other DNA
caccaagaacaaggtccctagggtttctctgtgtagccctggctgtcctggaattcactctgtagaccaggctgacctcgaactcagaagagcacccgactgctcttccgaaggtctggagctacagtgtacttacatataataaataaataaatcttaaaaaaaaagctcaataacccctagttacctaggggccttgctctggggttgaagccagccagggctccaacacgctgtctcagcagggaggcggtttagactcagagtctgtatgcacccaggggccccctgcttcttaacctatagg

SEQ ID NO: 43663 - DNA, 389 bp, Mus musculus
  source 1..389: mol_type = other DNA
ctctagctctgactggggccaagggcccaccaccacttggatgcgttgggtaggggtagtggggtctattcggagaggcgtcagtgtggcgccaccaaggaacttgcttctcccgcaggttccctctaccctagggttttcctccaggcgtaggggtggggtgagtgtactttaagtccgcaccccctccttgtgggcggaggccgaagctgtgaccgcgccctcccaggcgtgggaggggggatccggactcgaggcggggttctgggggtgatcctggcctcggtggccccgggctggccgggtctgcgccgcctggacacagcaggagctgcctccgcccccggatgggctgggagggtgggcggagcccgcgcgggtagtgcccg

SEQ ID NO: 43664 - DNA, 338 bp, Mus musculus
  source 1..338: mol_type = other DNA
aatgctctcaggctagcataatacaattgaggcaatcattttgacccctttggcctctgaggacaccagacaaaaaaagcacaaaataattcacaatttttatcaaactgttaccatgttgggacatggggataagccatctctgatcccgcgtcgcagcagcgctggatttactttagtctgaagagaagttccccgatctgctgaacccggctcatccgagggccccgccccccgagcgcgcaggaggagttgcgcgctgattggtgcgcgcgggcggagcgctggcccctccccgccctggggagcggccgtgcgcgctgagctccctgcccctt

SEQ ID NO: 43665 - DNA, 399 bp, Mus musculus
  source 1..399: mol_type = other DNA
cagaaagtcagcgtcctgaggtatgtggcttataattataggactgtgaaagttcctccgagaagctactcctgagaaacgtcctcaaggggccagagcttcaatttcaagtcccagtggatctggaatcagcttgagtctggtccaagcagaaccctgggccgggggtggggggctggtagcacactcccagcttctgggttatcaaggccttccgagataaggaactgctctgcccgccaacccgcagtccgcttccagagggcagccggcgcctgccacgtggcccaggttgcgaaccgggggcggggcgtgaggaggcgcgtcgcgcagagtgcgcctgcgcgggtgggcggggcggggcagggtacaaggcgagccccacgcattaaaggcacg

SEQ ID NO: 43666 - DNA, 394 bp, Mus musculus
  source 1..394: mol_type = other DNA
gccccaggatatgtttaaatttgaaatcttctggtcaccatcctgcaaccacagcatttttaaattgcatgtgggggtgaggcctgtggcatgaccccaaggcctgcggtctgttccagacctctggaggccttcctgagggtggggcagccccatcaatgaaactgttaataaaaattaactgaaaaaaattctaagaaaagccattaagggcttcctgcattaagccaggaccaactattagtgtataatttctctggcagatctgaaactgatctcacctaaattccaaacttggggctgaggtatttaaaccttgaccatggcaatgacccagtccagctgtggcagccgctctgcggggcaaccggagcctccgcagccatgcgcacga

SEQ ID NO: 43667 - DNA, 501 bp, Mus musculus
  source 1..501: mol_type = other DNA
actggatggtcttcctctctgcaggcaacaaacatgtacataaacaaaacacttgtaaatattttttaagttgcacatgtataattattctattctgtggcctggaactcagagatcagccccagttaactgatttgttcagtggagctattaatacgtactgagggttaaaaaactcttgttgcttttatttagaaagctgaaaaatagaatgactaggtgacatccacctaggttgaggtctccaaagtcaagatgtccggcgcgcgtctgaaaacatactgggatcggaagccccaggctgcttaagtagagaagcccaggccgcctgacagacgctgccacgtcttaccccgcttgagagcctccacagagcgggcggagcctcaccccgagcgttaggcccgcctctccgcggccagagtggctgttagggcggtacccacagcccggacggcgtgacgcgtcgagggggcggggcacgtgcgtgcccggaagtct

SEQ ID NO: 43668 - DNA, 402 bp, Mus musculus
  source 1..402: mol_type = other DNA
tgactttcccataggcaagcctttcatggaaaaatggtattcaccctttaaaagtgaacaggtcggtgccaggcttggtggcacatgcctttaatccagaggcagaggcaggcagatccctgtgagttcgaggccagcctggtctacagagcaagtctcaggacaggtttctctgtgtagccctggctgtcctggaactcactctgtagtccaggctggcctccaactcagaaccggctttgtgggagtttcctttggagtctcccaacgatggcgtgtgagaagacacacggatgcagtcactcattccaggcgtgcacttggggtctgcagctggaggtggaggttctgcagccccagactgtggttttaggtggctggccaagtaggtcatggcccaac

SEQ ID NO: 43669 - DNA, 320 bp, Mus musculus
  source 1..320: mol_type = other DNA
gtatgctgaatatttggaagtgatgattttatagcccacaaaacctgaactagttcagtctgtactttcaaagaaggttgtataatacatggttaaataacccatgggtaaagtaaaactgtaatccctggtgtgggccaaaaagtggcaccctgtgccactttcaaaacaatttatgtatttaggaattttagtaactgtcgtaggatttacaaaattttttaagtagatcccgagttcgaggccatcctgtctgcagctcgagttgaataaacacatgtatgtatgaatgtacgtactgaatacgactggtcctaggc

SEQ ID NO: 43670 - DNA, 183 bp, Mus musculus
  source 1..183: mol_type = other DNA
tcccttgctcagggctgacttcagtatgggagagagttaaaggctgcaccactgcagtctgtcagcagtaaaagaacagtccgtatgcacatgtctcggttgtctcccagaaacccctcttggcaggctgagaggctagctaggctgcatcagcgctgcggggctcgggggcggggctcgggg

SEQ ID NO: 43671 - DNA, 479 bp, Mus musculus
  source 1..479: mol_type = other DNA
acagttagtttgtgttattttttttttgcagaaatcaaaaggtttcctcccagagtcctctgattcatgcaggaaaaaatctgaggcaccatggaccgtccattcaactgaatgcttacggtgactggccctagagccatgtgcccttgacagggttcacagtacaaaagacaacgtggtttttcaagaaactaatacaaaaaattgcttctttagacactctctttgtgctaagcacatctggatcccacacctctttcgcccagcaaaggtgggtcgagctctggagcgctggtgaccacaaggcctccgtgccgggctctagggaagcggtgtcctcgcagccgacagctccgcgaactggccctgtggttccactgccccacgaaagcccccggacccgtcgcggagcctgggctggcgggggatgaactcctccggttatgtggagaaggagcaatcccttctccctcctcctc

SEQ ID NO: 43672 - DNA, 313 bp, Mus musculus
  source 1..313: mol_type = other DNA
cctttgatggcttgcaatcctaggttggctagtcggggtcaataccgctgccccgaggcgctgggtttaccactggttggtggcatggtcccaccagagacacctgcagattgtctgctgtcactgcagatctcccacaccacccaggccctaggaaagaggagtgctgtggacgggaaaaggagcgcagcctccgctccacccacttcaaagggcaccaggagccccggacgggggctaccgaggtcggcggggccccgcacaccacgccccccacccccagccgcagccccgcaggaggcggaggaggagc

SEQ ID NO: 43673 - DNA, 317 bp, Mus musculus
  source 1..317: mol_type = other DNA
gcctagaatggtgccaccctcaatgggcttggtcaattaataggacggagctctgagccagagccaacgccagaatgcctgctctctcaggattcctacagtgaggtccctgcttcctccacgcaggttctctgagggaagcatgcttacctcttcggtccccaaggagcttggagctcctgaggggtgggcagatctgagcagacttgtgtttacaagtgggctcaacccaggcatcccgggtcctgggcgatgcgcagctgcagttaccccggcagccggcagagggggccccgagccgggcctcgcccctgcgg

SEQ ID NO: 43674 - DNA, 299 bp, Mus musculus
  source 1..299: mol_type = other DNA
tagggcttgcaaacactcagaaggctggcaggtggcaggatggaagatgccaacatggatcctgtagtcctgcccttaacagtgttactttacattgttttagaaacactcaatgattctaccactggggagtgtatatatatatatatatatatatatatatatatataactgtatttgcttcattatagacaggtaccaggttctccttaaggctaaggttgggcaggtcccagaaagaggttgggtcatccccttgccagggtcctatctatgaaaaagctgaactctgccgttca

SEQ ID NO: 43675 - DNA, 447 bp, Mus musculus
  source 1..447: mol_type = other DNA
cttttctcccagggccttcgggtcaggcgggcggggcgtgatgagatgccccctctgcacttggacttgagcagggaccgtctctggtcactctgtcctctttcccaggatggagtcagtctgtgaaacatggttgcacacacattgctggatagcactttgaactaatgggcgctcctcccagctgccagccaagaagacacttgactccttgatcgctggttcaaagaagaggccttccttatatatatataggcacccctctccccagcggccggacgggactcttctggctgggcgaggtggagtgggggaacaaacagagtgctgctcccctcccccgaccgggaggagcgggctcgcgtggcgcagcccctgggccccctccgctgattggcccgtggtgcaggcagcagcccggcaggcacgctcctggccgggggcaga

SEQ ID NO: 43676 - DNA, 330 bp, Mus musculus
  source 1..330: mol_type = other DNA
ggtcctagaagaggattttctgggagaagaactttttttttggggcagatctgtctccggaagtctgctgctccaatccaggatcagactgagtgtcacacagccttggctggtgaaacttgctatgtagaccaggctaactgcaacaacaacacacttggtattttgttttgttttgtgagtagctctggatgtcctggaactcacagtgcagagccttatttttgactgaactacagtgcgagcaccctgttttctaatacagaactgggcacgacaggatctatgcacaggagcgctcctttttgtccgctccctggcccgagcggt

SEQ ID NO: 43677 - DNA, 303 bp, Mus musculus
  source 1..303: mol_type = other DNA
ttgcaggaaggcttcctctgtcaaactccggatacctccagaacccagggttggttcaccaatgggaaacaaaacagggcctgggagctggtcccaccacccacagcccactcacccgccccagcagtgcccgctgtgggctctttgtattccagggatctcagcccagcctgactgggagaggctggcattccagtgctccactcgctcttccgggtggagattggtccctcccaaaccgggtggggactgtgtggccagcctgctctgtgacccagagtttccttctttataaagcaagag

SEQ ID NO: 43678 - DNA, 283 bp, Mus musculus
  source 1..283: mol_type = other DNA
cactgcttaaactaggctgagcggctcaaaccccagcatttggaggatcagaagttaaggtaatcctgatccaatggaagagatttgaacaccatttgtccaaacgcatcctggaactcactttgtagaccaggctggcctcgaactcagacctgaggtgaatggcttccccagggttcccaagccatggaaggagggcgggagcaggcagcacctctgccaaggcccttgcctgcctttcagggaggagctgggagcagcggccgagggctggcagcattgg

SEQ ID NO: 43679 - DNA, 392 bp, Mus musculus
  source 1..392: mol_type = other DNA
gctgcagccctggtcatgggaacatggcctcagagttcttacttgtcatcccactcggggaccatgagctcttacatgatgtcacaggggcaggtccgagcatcatccccacttgtgtgcttccccaacagggaggatgggaggggtgggggacgagccctaatctccgatctggcttggcactgtgccaccacgcgtgaccgcgcgctccttacgtggggaacgtgcagggtgatgcctcctttccggcgcgggagggagcggccgtcattctcctgctctggctgggaagccccagccatagcgcggcagtggcgccttgtagccaccggctggcggttgtcaccctcccggggacgggagctcggaggccccgcccaaggtggagtcgc

SEQ ID NO: 43680 - DNA, 543 bp, Mus musculus
  source 1..543: mol_type = other DNA
agacaggccagctggtccccacctagacaggtctcagcccggcactgcgtgtgggaggaagggggggggtcttcagccggccgcccagctcctcaattgcccgggtgaatcccagcatgaggcctgtcgcctgcaccctgtagtccaactagatgctgtctagccggctgtggccagggcggcgccggcggggctcacctgtggggccagtggctcctcagtagccctggtgagcagtggtcctccagcggcggatccgcgactccaccttgggcggggcctccgagctcccgtccccgggagggtgacaaccgccagccggtggctacaaggcgccactgccgcgctatggctggggcttcccagccagagcaggagaatgacggccgctccctcccgcgccggaaaggaggcatcaccctgcacgttccccacgtaaggagcgcgcggtcacgcgtggtggcacagtgccaagccagatcggagattagggctcgtcccccacccctcccatcctccctgttggggaagcacacaagtggg

SEQ ID NO: 43681 - DNA, 328 bp, Mus musculus
  source 1..328: mol_type = other DNA
gtttaacttcaactttatgttgcatgtggcagtgggacccatgatccaagcactataccagaaccatgcgtggtggtggaactctgagttcgaggccagcctggtctctcatgcgtgaggcctaaacatctgtaactccagttccaggggatctgatgttctcttctgcacacacacacacacacaatatatatatatatatatatatatatgcaaaatattcatataaaacccctgttttaaaaaaataagacacaacactgctgtagtgttggctccagggaactgcctgatggggcctccgggagacagtcacccatatcaggga

SEQ ID NO: 43682 - DNA, 366 bp, Mus musculus
  source 1..366: mol_type = other DNA
ccctgaatccaggagcagcactgctcttaaccattctaagttttcatgtgtgcacatatatgcacatgtatgcacatgtatgcgtgtgtgtgtgtgtgtgtgatgattccatctttgggttctgggattgaactcagagtcaactcggtggtgagcacgcctaacggctgagctccctcaccagtatttatttatttttattttacatacattggcctctggaagagcagccagtgctctaactgctgagccagcaggtttcatcttaattagctgggatgatggctcacaggtttagcctgctgtaccaccgtggtctctcagcatgtgtaagcaggcctaggtatctaggtccctttaactgat

SEQ ID NO: 43683 - DNA, 176 bp, Mus musculus
  source 1..176: mol_type = other DNA
cacacacacacacacagagagagagagagagagaagtattgattacttctcattaggtgcctcagaagccaggcagcatctctgagttcgaggccagcctggtccgtactccttataacacgaactaccaggagtctacagtcctgttgcagcctcctgttagacaatcgagtgtg

SEQ ID NO: 43684 - DNA, 323 bp, Mus musculus
  source 1..323: mol_type = other DNA
gtgactcctgcaattacagctagcctatcatttccagtatttgaattctgtccattttaacctttaaatattttagacttacaacttgacactctacgatttcgttatgatagggctgatgacacccctccgcccataaaaaaggttcagtgcaaaggatgtgctttaaagattagcttttctcccccaagtttccctagggaaaagctcgtcacgtgacaactagcctggactgagaagacagatctgaaaggcggggcggaggagccccgcctcgaaacggccttcctgaagggcggggcctctagcagggcggggcctct

SEQ ID NO: 43685 - DNA, 318 bp, Mus musculus
  source 1..318: mol_type = other DNA
gtccaattttctaaaaaccgaacggctcctgaactcagaaactgagggaacgtcgccacacttccctcctagtgtttggccggccaagaactacggaacgaacagaggcacctctttccttacaactcgggtgggcttaaccaggtacacagagcatactttgtggttaaccacgtgtattgacacacgtgtcacgtaagcaacccgtcttgatctgtagcagatcaagctacgggaaactacggatattaagggggcttcgctccgcgggcgccggagctacgtcaccgagcggcgccagtggtccggattttcccc

SEQ ID NO: 43686 - DNA, 245 bp, Mus musculus
  source 1..245: mol_type = other DNA
ctgtctcgctacagatactgagggggggacctgccctcctgatttttgccttactcaagaccagaaagaaaaattttttttcgaagtaaacaaacagagcagctgattttatatatatatatattcctcacctggaatgctgagaacccagctcggctcgagccgagctcagttctggaacaactttttttttaaacatgcacgcctagggggagtccggtgttttggaacctctttctaaaagg

SEQ ID NO: 43687 - DNA, 366 bp, Mus musculus
  source 1..366: mol_type = other DNA
cgttgaaccccaacggagtgtcgacccccaagcagggcttagaatcctgtctgtccactctggaagcagaggcaggcggattttcgaggccagcctgatctacaaagtgagttccaggatagccagggctacacagagaaacccctcatggactcgatagagatccatctacctctactgcacagctggttctgttttccagggatcacaaattcaggtcaccagaactgtggtatcccctgaattccggtgctcaccaaagcacctgatgggaaatccaagtctagccgtggcgatcccgtagacggccggtacacgctacttccgccggatgcactccgctgcggaagtgacgaaccggctgag

SEQ ID NO: 43688 - DNA, 452 bp, Mus musculus
  source 1..452: mol_type = other DNA
agaccaggctagccttggtttctctgtatagccctggctgtcctggactcactttgtagaccaggctggcctcgaactcagaaatccgcctgcctgtgctggaaaggcgtgcgccaccacgcccggctagcagccatttttatttaaccaaattaagttttaaattaaggaataaagtttgtacaatttaatcataggctacagaatttagcattacaattcaacactggcccctgtgtcagcctgcagataattggcaggctgcggaggctgagcctgaggatctgaatttgatccctgagacctgggtacctgggttgtagtttcctacaactataatttttaactgtgatagcgtaatacattagccttacccctaagaatcattctgattctgaacatttttgtataaagcgctccgctccacagtcacgacacgtcgtaaatgaagt

SEQ ID NO: 43689 - DNA, 615 bp, Mus musculus
  source 1..615: mol_type = other DNA
tgtgaatatacataaagaccaagaagttcgctgacactgatatctttcatataaatttgtacctcagaggcagttaatcctgaaccttaagattaaatgtacgtattacaagcaggtcatctgtcacagctgtgagagcgctgtgccccaagcgctactgagtagtgaagccataacttaacgcctgcatggagctaatatccttgaggcggcccctcggcttcagacccctgcagtgctgaccccgggaggctaacgctccacccactgcggggggcggggcggggcgggggcgggcggcggcgaatggctgtacggcgcgtggcgctcccgccggcctcagctcgtgcttgcccacgagccgctgcgtcgcgcgtcagcccctcgctccccgccgcctgcgagggggctgcgcgagcgttgcagggctgcgtgccgcgccaggggaggcgagcgtccttcctggagattggcccgtgctctggaccgtgggcgggcccatcggggccactcaggttttcattggccgagggaggctgcgactctctgggagagtttcccccgccgcgaggtgcgtggcccggaagtgacgcacggtcctggccggcggggccg

SEQ ID NO: 43690 - DNA, 412 bp, Mus musculus
  source 1..412: mol_type = other DNA
acagtagtacttaaaaaaaaattctttcaatctacaatagttaatttaacagaagttgtggctattgttattaataacatctgtgatccagcctgggagacatatgttgaccctgtctctctcttattatatcgatattatggatggatagtattgagttcatagttaatcagggacccagggcctcaaatccccaggccctaaccagggtggggccccaggcttttgctaccgccgagggtcctcagagtcctctgctgcgagatgaggaacctggccacctcccacgcgcgacctgggtcctccgggcactgcgggtgggcgatgccaccggctcttctggttgctgtgggaaccgggagtgacagcgacgcccccaccccggccccgcccccctcagagggctcccggg

SEQ ID NO: 43691 - DNA, 388 bp, Mus musculus
  source 1..388: mol_type = other DNA
ggatgccaggcaccaattttcttggccaaccaagatgctatatccagcactatatccagcatattcatatgtatattgaagactaggtggcctgttatctttggaacaatacagagaaaattagcatggacaatgctatgaatctgctgagccttatcgtttttttaaaaaaacaaaaaacgctaggttatgtttggctacaaacttgctatgtatgcaggaatagaactcagggtttaaggcatgagtagcagacccagtcacattctcttggaatcagtttagaacctgaataagaaaatgtcttgatcctgcaggagtttcctgagtatctttattctgaacaattcacacctttctaccaacttcctggaaagagggtgggggg

SEQ ID NO: 43692 - DNA, 427 bp, Mus musculus
  source 1..427: mol_type = other DNA
tagaaaatgacttaataatagctctgtctttcattttttgatgggattagaggtgtgcacttactcagtgtattaaaatccacgcactgcggttaaaagcactaatctctgttctcaggacctgggattgattatcagcacccacggggtgaaaatgaaaagaatgtaaacaaaaaaaaattttttttttttgttcttcgagacaaccaggctggcctcgaactcattccaaacatgttccaaactggcggcggcgacaccggccggaccacgtgactgccgctcgctctccctctctctcccagggaaggacagcgttggcctcagagcaggcgaggctccccagtgaacgcactcgcggggagcgcgcacgccgaacttttttcgcgcacgcgcccgttcctctcggaaccgggaggcggtgcgg

SEQ ID NO: 43693 - DNA, 348 bp, Mus musculus
  source 1..348: mol_type = other DNA
gaaggacaccatctttgataaagggtgtctgagctgcttgtgttaatgccagaggccacacacacacacacacgcgcgcgcgcgcgcgcgaatcaaacccaggggctctcccctgcttcagagtcctgagtgctgggatgacaggcatgagcactacatagctcaagcgggtcttaggttcgctcgtgctgagactgcaagcctgaatgctcgaggctcgcagcaggaaacccgggaccctgagtgtcgcagaccccctgggtgacgcccacttgggtcccagcggcggctgcgtgcgtcatcattcctcgccgccgcgcgccatgggcatcatctggccccgcccgc

SEQ ID NO: 43694 - DNA, 425 bp, Mus musculus
  source 1..425: mol_type = other DNA
cactggaaaggctgtggctggaagttgaggagttaagaatacatttaaaggatttatttaccgaacaacctggctgtcctaactttgtaaaccagactggcatttatataccacagttcaggtatggaattgggggagtggagtgtaaagccacaagccagttttctcccttccacctgatttccttgtctaagggcagacttctggaagaagagaaagctatcttaccttgggtaaagtcaagcctgaacctcatgcaggaatttctctataaagtgattatgatcactaatgagtccgcagtcaaagggaaaaaatcaaagctaatttgatttctctttggtcttgacatctgattagagatactctgcgatttgggaaaatccagctcgcattttgcctctcgctcagcggtacagggtcca

SEQ ID NO: 43695 - DNA, 647 bp, Mus musculus
  source 1..647: mol_type = other DNA
catcaagccttctctagaggtagttatttgtagaactgatgtgatttttaaaacattaaaattaagctgcaaatgttatttctgcattttttcatgtatataaatatttcttgtcacatcttggaaaaaattggatgaattagtttcatttttataatctttactttaaaaataaaaatgtatcatgtgatttgtaaatgagtctgtttataaaactcttttgtatattttaatttctggactacattgtagctaattattccattcaatcttaaggtaatttaaatctataaaataaatatcgcaattatattatcaataaagagaactgaagatattttctaaaataagaaattgccttctatgtctgttatagaatccatatgatattaaaagtaattttttatccttgcggctagaccaaggctggcctcgaactcagaaagcgcgcccggcttagatttactttttaaaaaatttattttgtttctgcatctcccgctctcctgctctgaaaagcccgagacgggagttgcgcggcagcccagcaggttcatgcaggcaacggcggaaaagcgcctccggtccggcgctgtgcttcccggcgcggagagcgcgggagccgctggcgcgcggggcgcctgctg

SEQ ID NO: 43696 - DNA, 377 bp, Mus musculus
  source 1..377: mol_type = other DNA
tatctgcagccaggaaggagtcatcattcctagagggatttcgaagtcctccactaaggaaaggattttttttttttttttaagcaacaaacactctaggtctgttgcgcttacaaagtatcacattttgttacatggatacccacttacaaagtatcacattttgttacatgcaacaggcgacctggcacttgttaggtagctcagagtaacctcaaggtcctagcagtcctcctaggcgagcttcaaatccattatgtaagtgaccgagggttccttaaacccatccagcctgcaaggatgaaaccttgacaggtagcgatcggcggggaccagcttcacgcggccgtggcgtcctcccgccgccaggggcgctg

SEQ ID NO: 43697 - DNA, 360 bp, Mus musculus
  source 1..360: mol_type = other DNA
cagtgtttgtagcacaaagaaatctttggatggtgttacaactagaacctccacatgcggttttatgattgcataatgcaaatatggtgaccaccgtccccgggttggggggcggggtgacagaaaccacgtggctccttccgcgcggctcctcagaggcctggtcggtcggcgggagccaacggagtccgccacagcccactcgctgcgactccacgcccaccacggtggcaaccgggcaggtcccgagtgcgcaggtgcgctgcgccccgccccctgggagaccacgctgtcactcaagtatcgcgagaggcagagagggggtgggcctgggcagtcggccctgccccctccctctct

SEQ ID NO: 43698 - DNA, 324 bp, Mus musculus
  source 1..324: mol_type = other DNA
gtgtcaaaaacttcttaaatcactttaaatgggactttaatcccaggactgggatgagctcaataaaggctgcatagtaagacccagtttttgttttgttttgtttttttaaattaccaatgaaaacccaatgattgctttttatcagtcagattaataagcacagtaaatgttcatatactgtgtaagttggtaaacccaggctggcttggctttgtgcgtgccaagcaagtgcttacctgcccctcaccaaatgctaaaacttgttagaggattggtatctctaaaggtaaccacagtaaaactttaacttatttttcaaca

SEQ ID NO: 43699 - DNA, 459 bp, Mus musculus
  source 1..459: mol_type = other DNA
cgcaacccaagtgctttggaccctttgagacctaagcctttaaaggactctcttggtttgagaagcaatacagcatttctagaaatcttaagaaaacaagcactgaagggcagaattgtattcttcagtgatgaatttcattaaaaacacattcaaaccagtgtgtgcagcctggttagaaaacgtgttccccactttgcttagcaagataacacacacacacagtctatgtgggaagactgtaaaacacgtgcctctcagatgtctcatgaattttattaaagtcactgtcacagctagtgtcagctactctgggacagagtaaaactgtttcatttcagttagtattttaaaacaaattaaatgcagaggctttgaaaagtcggtgtgcacatcttgaggtaactattaactacgtctatacatggagtaaaacattaactttttcttcttcttaac

SEQ ID NO: 43700 - DNA, 478 bp, Mus musculus
  source 1..478: mol_type = other DNA
tttgtatctttggattcatcttaagttgtttcacagaaattattcacattccaggcctgcaacagtatttggatttcctaatttgtatgaatttatttagtaaattaaatgaaaatgttaatacttaacatcttcccgcaaaatgatttttctacttaatcatttaaaaacccggcctttgttttttgatttgggaaaagatggaccaggctctcccttcacccctcccccctgccgttcccagggtaggaaggtgctgagatgggagcggagggacgcccgcccacctgccaccacacctagcagagcttctgggaaaaagcagtctcaggctttcccagagaactggaaaggctttcgtttcctcctacttcatctgggcaagggaagggacttcccagcaggacccaagctagggtcccacacagtgtcctctggccactgactgactgcacgtgagtcgctccgtcatgaagtc

SEQ ID NO: 43701 - DNA, 311 bp, Mus musculus
  source 1..311: mol_type = other DNA
aagcttcctagttggcctggaacttgctaggtagaccaggtcggcctagaggaagatctacagacagtttaaaaggctctttacttcctcagtatcttagtcattaaatgagagtttaagttttccattgattaaaattaaagatattggacccaaagataaatatatatttttaaaaattaacaaaaaagtaacaaattccaattcgcatttaaagtaatgccattttttttgatgtatttcatttactattaattcaaaatatcaatcaataaacaaaaataacttgggacctgagagctgacaaatgc

SEQ ID NO: 43702 - DNA, 345 bp, Mus musculus
  source 1..345: mol_type = other DNA
ctgtttaaattgaacaacacacacagatttagtatcaagatgatgttaaaattggcctgtgaaatctggatttcgttttcagtttttctctgagtgaaagagtttgggtaatttaacctcgtatcttccaagaagttagctgaaaacgtgcaacactgttccggaacaatatatcttaaagggtttaaaatcgtctgctacttcaaaaccaaaattagatgaaattttcacttgtcaacgagggaaccgcaacactgcgcaggctcctggatcacctgggaggtctcccgcgcaggcgcacgaatggggaagtgggcggggtcgcgcatgctccccggctcactt

SEQ ID NO: 43703 - DNA, 555 bp, Mus musculus
  source 1..555: mol_type = other DNA
ttataatacatacctctaggaaaattacttaaagaaaaacaatcacaggactgctgagttttttttccaaacaagaccggaaaatctatataacttctgcgcttgaaagacatacattaaggggctgagagatgtctcttttaaaggatgcacgcatttaaaaaaaaaaaaaaaaccctttacatttctttaaaaagcatggtgcattaagaagcattaatagaagtcagtcttgaatctgaggtttcaaaacataattttcttgcatggacaccaaaactcgaaagttccagagagttctgcattgtcttggaaagacgttctctaggtaggagaacgcaaggcagtttggtttcctctgatcagctcccgcggcccggggcagaggaatggtctgcacacagcctcacgggccggccagccaaactcccgcagctacctatgggcgagccggggagagggttcaccccaccgggctcagccccacggcctcggccccagggagaccctttccccgagggcggtgcaccactccggccccggaaaacgttgagg

SEQ ID NO: 43704 - DNA, 366 bp, Mus musculus
  source 1..366: mol_type = other DNA
ttgagacgaggtcttaggccttttttgaacttcctaagtagttggagattaccttcaactggagttctcctcaggaaggccggcgtcggccaggttgggctctccagagcccctcccaggtgggaagtggcggcgccatcgcaaacttgaaccaccgcggcgatcccggacgagcaagcgagcgagcgagcgagcgagcgaacgggtcgggcgggcgggaggcgccagaggccgctgaggggagccgagccgccctgggtggggccgggaagggcccaggccgcgggcggcgcccggccacgtgacccggcgtgttgtggtccggcccgcgtgggtggcgggcgtgacggggtttaaatctcccgc

SEQ ID NO: 43705 - DNA, 449 bp, Mus musculus
  source 1..449: mol_type = other DNA
caatggtattttttaaaaaagatttatttatttattatatgtaagtacactgtagctgtattcagacacacctcattatggatggttatgagccaccatgtggttgctttttttaaagcctttttgttttatattgcataaaaaaaaattactggccttctgtttttaattttttttaaagattaattcattcattttatatatgtgagtacactgtagctgtcttcagacacatcagatagtcagtgctctttattttagtttttaaaatttgttttctaacgagagaaatcagaatatatattgtatgaaacaaattttttcaatgaaagcaaaagcatcaccagcagcagcagcagcagcagcagcagcagcagcagcagcagcagcagcagcagcagcaacaacaacatggcaggctcgatcctgggcaaacagccaatgagaag

SEQ ID NO: 43706 - DNA, 334 bp, Mus musculus
  source 1..334: mol_type = other DNA
ataagtaaatgctttcttctatttttgagtgcggtcccttaagaaaaggactgcaatagttcatgtttttatatattgttctggtggtataaagcaaactccataaacatatataagtatatattcttatgttcatatacatccatgtgtgaaaaagagtaagcctgttttctagaaccttaattattataaccttaattaatatactaaagaggtctttatagccctcctgtctatttttatctaactgtaagaatgacagtgtgagacggtgatgcagggatttccaattgtaacttatttagagcttccgaagaagaaagtttcagcaaca

SEQ ID NO: 43707 - DNA, 469 bp, Mus musculus
  source 1..469: mol_type = other DNA
actctgcagacgagtggagcagctagtgatttacagtgttacaggaactccttgtagaaatcacttggcatggcgttgcttaagctaaaccaagcatttgtctcccttaccaatatatgctaccctggcactgacttggaatttattctaagtgctgtagattgttgctattaaaacaaagagtgtgtgtgtgtgtgtgtgagagagagagagagagaagaaataaaaataaagtctattcttagactctccagccaggcaagccttagcctagagttgaattttataaattgtttccactgaaatttatagaattaacaggctttttaaaaaaaagacatcattatttcatgtgtatgaatgttgcacgtgggtgcactacatgcatgcatcagatcctctggaactgaactcagagctccgcaagagtcggggtaaacaaaggaatcatggttttaagaaccaagta

SEQ ID NO: 43708 - DNA, 404 bp, Mus musculus
  source 1..404: mol_type = other DNA
cttgctcctcgtggccatatcctggagcctggagcaggtgaccccattaagtctcaggtccttcaccttttcatttaagcacccaataaatattattaatgtgataaataggagcaacaataatgaaccaaatgatcttggggtcctaatactagcactaaaaatggttcatttctcttctgataaaaaaaaaaaaaaaaaaaaaaaaaccaattatatcttttgtgggaaaaacagaaaagccattagcctttgtgaagagctcaataattcattttataaatttcagctcaaagcctacactgaggttaagaaaatttgacattcgatctgtgaacttaacgtcaagctagttattgattacgctgctcatttgcaagagccccaccactgggggcagcttt

SEQ ID NO: 43709 - DNA, 380 bp, Mus musculus
  source 1..380: mol_type = other DNA
gttgttgtttttccaaagctataaaagaatagcaatctggaattgaaaaggtttcgaatttgatactaatctacattgggtatgaatgacaagaatcctagcttttgatttctaaagttttaaatacctgatcacatctgtagatgtagaaattggaaaataattcagcctttttacaaagatgcatttctgtatgagaataggtataattttataacttgcatggcatttgaataaccacccttggaaggtaaaataaacaacattttaaacctggaggatcttataaacccccggtttcttaaacttcttttatttatttatttatttatttatttatttatttatttatttattttcttactattaaactgtaggtc

SEQ ID NO: 43710 - DNA, 450 bp, Mus musculus
  source 1..450: mol_type = other DNA
agtgcttcagtctaaggcagaagtctagaggtccaggaacacttggaggtgacccttggttttgcaagacatatgatctcccaaatcagtcacgttcggtgaccatttccaacggtgatgttccttgacacgaaggcttcactttaaggcatcctagacgagactccagcctcccgcggcagcttgctgtcccagccccctagtttcaggctaattctcctagattgagagtaacacaataaaagcaagaaattttgttttgcttgtttgtttgctcggatccccacagaggctggggggggactttcctcagggaaaaaacagattgtactttgtccttgccagggcagacaaaggtttaaattatccagttggctgcctgccaccaccccgaggtagggggaagggagaccgtgtcccccgctcgcctgactcgagggaggtgacctt

SEQ ID NO: 43711 - DNA, 390 bp, Mus musculus
  source 1..390: mol_type = other DNA
cataatttgaaggcacccgtggcataactttatttatttgtggctttaagatgaatacaagaagtgcaaattttgaatgcattgcaaactaggttacctagctcactttataagctaatcctgttaacctcatataaacatttcattaaggtactcagatgacactacaaatttagtttaacttgtattcaaataccttgcaggctctttcccaggtcacctcgggacccctgagcaagactctcgtgcgccgcggacaacgcggtagacctggtgacaaaggctcgggcgcatccggagtcccgccggcctcccgcgctcagcgtcggcggagcctgcgcagggcggtgccgcgcagcgcgggccgcgggagcgggagccgcagccggg

SEQ ID NO: 43712 - DNA, 482 bp, Mus musculus
  source 1..482: mol_type = other DNA
ttataggcctcatgaaagcaggaggtaagcaagagtattattagcctctttttattatatgagccatcatattttctaggactttaattaaaggctccaaacactactattgcttccaccaggggaccaagaaaaagtaacttaaaaggtcagcttaaaattttggacagtgttaagaggtaacacacacgcgcgcgcgcgtgacggaaaggaaatcctgggtccacaccacgagcctcgccgtgccaacccaggcctgtggtaggccctggctgccgagcctcggtgagcaccggagccgcacctctcaccgcccgcccggagtcccccggcccggggaagcgaggtgaccgcgcagctcggtggagcgcagcgcccgcggggtcccggagccgccgcctatcagcggagcgcaggggcggggccggcagggccggcggggccgcgggcgggggcggacgggcgggggaccgggctccggg

SEQ ID NO: 43713 - DNA, 573 bp, Mus musculus
  source 1..573: mol_type = other DNA
tgaatttttgcggaaaaccagattgaattttgattcccgttttcacagatctttaaaatacaagcatcttctcactgctatcttgaaagagagacttgaagtaaaaccatcatttacgcggagtactccaacacggaattagaattgccgccgggaggaatgctgttagagccgcgggccgccgagggggcgcggtggggtgggcggcgcggctcgcccggggccgcgcggggatccgggctccttgacgacttcgcacggccgtcgctcctgacatgcggacctccgggagttggctctgcgaccgcgcgtgggagccgagccccgtccccgcactcgcccctccgagggggcgcagacggagcggcagaagcagcctggctgctgtccctcggcggccacctctcgaggccgcagcgcagtccgtgggcggcactacttggcgcgcccgccgacgccgacccccactcccccgcccgcggaaggacacgcggcgcggccggaggggcggaggggtaccggccgcctgagcggccgcgcgctccgtgggcggcgcggctccgggtcgtcgag

SEQ ID NO: 43714 - DNA, 415 bp, Mus musculus
  source 1..415: mol_type = other DNA
tgtgctagcccaagctggcctggtggtatctcaggtaggctttccttatactcctcctgtccttgtacttcccaagtaaggggatggcttcacaaatagtaaaacttatttttctctggggttttttttttttttaaaaagatcattttaggacaaaataagtttttcttttatttttgattttgcacgaatatatgtgtatatttctaagtataatctgttcagactgtacagtgttacatagcaaaataatttttaaaatcccaaaccactattttaaaagtagtataatgatactctttatttttgctaactttttctttctttgttaattctggaaagcaaaaactttgtatttgctttttgaaatgtgactcgtgctggaagtgactccatcagcacctgtgacggggga

SEQ ID NO: 43715 - DNA, 293 bp, Mus musculus
  source 1..293: mol_type = other DNA
tgtctaaagacagctacagtgtacttatatataataaaaataaataaatctttaaaaaaaaaaaaagaacggttcttataatcctccacatgtacaagatctgggccacagactctctgcacttggctcaaatttgctttttaaaaaaaagtcaacggaagagctccctctcgcgaggagaggggcggtcagccgcgccccctgcctcgcgccggcgcgtggcgacgtcacgccgccgcgcgcagcgacgccgggacggccccccgcgacgcgacgtcggaggcggaagtggc

SEQ ID NO: 43716 - DNA, 422 bp, Mus musculus
  source 1..422: mol_type = other DNA
ctggtcgcccccacgcagcggaccgcccagacacgccgggaagggcgcccgctctgagcagcagctggagcgggcagagggagggggcgcctccggccgaggatctttctcctgctgccaagaaagtgattttccggaaaagggccggggaggcggagccgccactaccggatcttcgtctcggagaaccgctaccagcgcggccgccgtgggtgaactcacggcggccgcgctagggtcggtgctcgcgccttcttcccgctgaactctgcagtccggagtccccgctgcaggcaggggccgagagccccagacccgggtggttgtccaccggctgcacgttcctggcgagctcagcggagcccgcgcagccaaggcccagccctgttcctcagtccatatatgggcagcgacgtcacggg

SEQ ID NO: 43717 - DNA, 487 bp, Mus musculus
  source 1..487: mol_type = other DNA
agaccttaaattcaagggtaagatttaaattcataatatctaaaacaacagctgcgcacagctgtgctgggtgaccgctttgacggcgcacacagtgtggcacctcattcctagggagcaagggtcaaaggtgaccccgagtgacccagcaggccctagcggcacaagaaggttaacgaccctcttgtgccgtttttttcccagcggcgagaagcctccaccagctgccggaagtatgtcaccccgactgcggggatggcgggagttgtagttaactggctatatctcttgcaataatagttcagttttattccgcaggacgcgttcgtgccccgcgcaagcgcaggctcggactacacatcccagcgtgccttgcggcgctcccgccgcgcccggctgtagtcgcgtgaatggagctccgcgcgtgaggcagcgcctggcacggcccgcgccagcgcctgtctgggccccggagcgtgagtgcggg

SEQ ID NO: 43718 - DNA, 438 bp, Mus musculus
  source 1..438: mol_type = other DNA
tcatcaattcagctaggctgactggccaatgagctcaaaggtgagctcagctcctccagcttgcagcaggcaaaactcttaataaaaaactcttaataaagagccttgtttattcgtaaccagagagaacacagtgttttgggtggcacattacagagcatctgaggtgctgtgtgatcaatagttaagactatttttattatcatttcatatactcctgaataggttcataaatcagtaatgcaaaaatgaaatttaaataactcgattgagtctccccttgggatcgaagacaggagtccatttttagatcccacccatttgtacttttaagaatgactcctgtggactacacacggtgcccctggtggttaatcctgatggtcaacttgatgatggaaacaaatctcccagcacaactgtgagggattatctcca

SEQ ID NO: 43719 - DNA, 356 bp, Mus musculus
  source 1..356: mol_type = other DNA
cctgactcttggttgtgtgcaatgcacactcagaccaaactttttttttcagcttaataaacagttggaataaacgcacctgtcatcaaagtcttagtatgaatatcagtgaaatttcaattaggaaatgagatttctcagaagctaaatctttcctccactgagagactagtgttgggggcatcctctcagtgaggaggcctcagggtcccaggacactactaccttccacggctggagtaagcgaagttctaatataaataaatatcctgctggctagctgcaactgggagcacttgcctgggcctgtagcaagactaggctgggcaagactggcacgtgtccccgcctccctc

SEQ ID NO: 43720 - DNA, 367 bp, Mus musculus
  source 1..367: mol_type = other DNA
tctttttaagaagtccatctttcaactgactgctttaacaaggaggtctgtaagtaagatgaccatatcattgaaagtccactttggaacccaaaataaacagggtcattctgtttataaaaggagcctagtcttccctcaggaggaaaatgtccaaagatttgtaattttaaacactttacaagggtgtgtacatcctctaattaaaagtctaagcagtggtggaccagttgctcactgtgcttaaggcctcgagtcttaataaaagcctgtgctaataacgaccaacagataatggatccttatatccctgattggtctgtctatggcgagccaggcgggttcaggccccgcctgccaagccctg

SEQ ID NO: 43721 - DNA, 400 bp, Mus musculus
  source 1..400: mol_type = other DNA
tggttttgttttgttaaataaaaacaatttgcctgaatatagcaatatttagagaggaaaatttgcatttgctacatttcggtggctccagtcaaactcccgaggtacggctactacaactcagagcctttgtttgaatgaattcaatctagatcaccatacatagctagctaatattatacccttctttaattacagataccaaaagttagtgtaacagtgttttagcctagcaggctggcaataatgacggaagactctgccaaaccagcttcggaatgttcctgaatcaggatgcaacatgaagcattttcattttgagttgttcaaattcattcatgtctatggaatagagacctcccagaaatgctaggtgtgaatcatgcctacagtgtgccag

SEQ ID NO: 43722 - DNA, 310 bp, Mus musculus
  source 1..310: mol_type = other DNA
gtaaacacgtacgagtgtatatacttcaaaatgcaaaatcacgagacgtgtgtgtactgctcacttgttttttttttgcgaagcgaacaaatgcattaatatttatatgtttatataatcgataacctaatttaacagattagttctttatattagacatatcacaacgcagctcgagagacttggtctgccatcttttttacaggagatgaaaattgagtcttcgaggaaatattaggatatattttcaatcaagcagagaatgctttcccctgccaggaatccattcaagccaacaagtttggagaga

SEQ ID NO: 43723 - DNA, 423 bp, Mus musculus
  source 1..423: mol_type = other DNA
ggtaagctggtggctttgcacagcatttctaatacaataatcggtttgatctctttggaaagcttcagcctccaagcaggtaaatgtatggtgcatggtgacactgggttcagttcctcttcagcctgggctaccaaggtggagtgggtggagggaggctcttcatactcccaatcagtctttgtattatggaaatttcaaacagttgctagaggagacagtgttctaacccgaagtaagttgcagattaacacctctaaaattagagtcagtttagacttttaaacgttataaaaattgcttaagatcaatgtcaactccagaattgcttctgaagtaaatttctcagtttccactgtaattcgcagcaggtggcctcacgggctcccgtgagtgggcggggcctgagcttcggttaggcgt

SEQ ID NO: 43724 - DNA, 347 bp, Mus musculus
  source 1..347: mol_type = other DNA
catggggctttgaagtcctgacttcagttctttcaaactaagtcacaagtcttcatctaaagagttcagaaagctaaagctgcaaacctcctttaatttttttttaaggcattgaattcacagcgatccccctgcctccacctcccagtgtgggggtggggggaccaggagggtggtggggtggttagaaaacccccaaaaatggagtggggtggagggcattcttatgaactccctgggggccccagcatccgcaggaggataggctgtgctgcagaatacagtcccagttgcctgcagagcccagcagccaggagaaggggcggggcaagcggcgctctcctgtc

SEQ ID NO: 43725 - DNA, 345 bp, Mus musculus
  source 1..345: mol_type = other DNA
gagttcaaggccagccttggcaacataggttgagatgctggcaaggccttagctaatttagaagggttttataaacggctgtctcgtctcgttgcaggactagagtgagcggattacacagcccagtctaggacaggagccaagttagttgcagttcccttggccccccagcctctctaaaacagctgatttcggggtgggaggggaggaccgggtggggggaaaagctgggcgtcccccccccccgccccctgccgggaccccttgagcccggtgcaggggaaggtgaccagcccgcacgtgcagcgcccaggggaggaggctgggccagcgcagcgcttagtc

SEQ ID NO: 43726 - DNA, 552 bp, Mus musculus
  source 1..552: mol_type = other DNA
tgaacctagctgaacacttaagttgaggtgtgtgcaagccctgtccttcgaggaaaaggcgcctttccccgggggcgcggcagcacccggccctggtgcaaccggactcctctgggaggggactgtccccccagctcactctcgcaaacgttgctgggggagggtgggaacatgggccggggtccccacctgccacccgcgaggcaatcgggagctggtgagggtgctccgctgctcactgggacactcagcacgacactgcagccgagcgagacctggctccctccgccgctcagcagcggcccccgccgcgcgcgctcgcggggacgccgggaccctgcgcaccgcgcgccacccgcccggcgtggcacaaaggcagcatggcccagccgcacccggccgcgtccgcgtcccggcgcaggccacgggactcgtccccaggtcgctgtcgccctcctcccgccccctttcctggccaggcggggcaccgggcggaaccctgcgcccgggcacggagcgagcaaagcggtggcggcctccgatcgctctctc

SEQ ID NO: 43727 - DNA, 546 bp, Mus musculus
  source 1..546: mol_type = other DNA
ttggccccccagcctctctaaaacagctgatttcggggtgggaggggaggaccgggtggggggaaaagctgggcgtcccccccccccgccccctgccgggaccccttgagcccggtgcaggggaaggtgaccagcccgcacgtgcagcgcccaggggaggaggctgggccagcgcagcgcttagtcagcagctgggctcggttttgaaacaaaagccaatgtcctccctcggagtccgcggccggtcagttcctagggggaagaagcccaggactgtgcggggagggggcgcggggacagctcgcacacaccctgccctgccttggcttaaggccgggtccccggggtagcgggacgcacgctgatcccggccctggagcccaggcccctccggtgtgcgtgcagccgcagcaccttcgccacctgtttcatgaatgaaatccaatcgagagagcgatcggaggccgccaccgctttgctcgctccgtgcccgggcgcagggttccgcccggtgccccgcctggccaggaaagggggcgggaggag

SEQ ID NO: 43728 - DNA, 737 bp, Mus musculus
  source 1..737: mol_type = other DNA
gccccccagcctctctaaaacagctgatttcggggtgggaggggaggaccgggtggggggaaaagctgggcgtcccccccccccgccccctgccgggaccccttgagcccggtgcaggggaaggtgaccagcccgcacgtgcagcgcccaggggaggaggctgggccagcgcagcgcttagtcagcagctgggctcggttttgaaacaaaagccaatgtcctccctcggagtccgcggccggtcagttcctagggggaagaagcccaggactgtgcggggagggggcgcggggacagctcgcacacaccctgccctgccttggcttaaggccgggtccccggggtagcgggacgcacgctgatcccggccctggagcccaggcccctccggtgtgcgtgcagccgcagcaccttcgccacctgtttcatgaatgaaatccaatcgagagagcgatcggaggccgccaccgctttgctcgctccgtgcccgggcgcagggttccgcccggtgccccgcctggccaggaaagggggcgggaggagggcgacagcgacctggggacgagtcccgtggcctgcgccgggacgcggacgcggccgggtgcggctgggccatgctgcctttgtgccacgccgggcgggtggcgcgcggtgcgcagggtcccggcgtccccgcgagcgcgcgcggcgggggccgctgctgagcggcggagggagccaggtctcgctcggctgca

SEQ ID NO: 43729 - DNA, 478 bp, Mus musculus
  source 1..478: mol_type = other DNA
aatattgtctgaaaattccatagtgaaacttaatattatatatatacatatattaaaggtgtgtgccacaatcctcagatatatatatatatatatatgtatatatatatatacacacacatatatacacacacacacacatatatatacacacatacatatgtaaactaatatattatatattaatattatatattatttatattatcccagcttaatatagaattttgaaaggcataatcataaagtaattttaaatgtttaaccccagtactctaaggccagcctggtctacagagcacaaaacaaaacaaaataaaagtaagaaactcttttttttttttttttttttttttctctgtagaccaggctggcctccacgcccagctaataacaagctcggctatctaaattcaatgcatttgaattgtgttagtccgctcccaggcagccccgcccaagcgtagctcagctctga

SEQ ID NO: 43730 - DNA, 296 bp, Mus musculus
  source 1..296: mol_type = other DNA
tctttgatcatattaattaaaattccttcagtaaatcagctgtattttggagactttccacaaaggagtgaagtcaccgacctctcaaaatcttggtggccactgacctgagtgccttatccaggagcacaggatgtttctggcacagaaaaagccaggggctgaaccttttggatttctatattcatgaccaaaaacttattttattttattttatttattttttgctaattacattttaaaacaaaacaaacaacaacaagagagagagagagagaatgtgtgtgtgtgtgtgt

SEQ ID NO: 43731 - DNA, 215 bp, Mus musculus
  source 1..215: mol_type = other DNA
atatatctcacaatgaatattcagaggctgcagccctgctctctgcccctcacagggcagtagaggagagagttcatgagcatgttgttttaaaaagacaacagacccttctggggcataatggatgccctgttgagagcagcagtgcatgcattgtttgcctgaaaattcgctcagcatctccctgggaaaacgtggctgatttattttatata

SEQ ID NO: 43732 - DNA, 349 bp, Mus musculus
  source 1..349: mol_type = other DNA
tgaacactgtcatcgatcaattgtgtgaatcacaacagaatctgaactagtgtgtgcaaacaatgtgtttgagtcagtatttgtcactgtatacacatattttcatacatctgctcactaagagcactgactgctcttcaccacatggtggctcacaaccatctgtaatgagatcagatacccttttctggtgtctctgaagacagctatagtgcccttaaatataataactaaataaatctttttttaaaaaaagtaatatgcagctccctgagcgactccaggcagccagggcacaggacccagctgattactaagacctctgggcttggctgcaggccacagatat

SEQ ID NO: 43733 - DNA, 350 bp, Mus musculus
  source 1..350: mol_type = other DNA
cagtaaatcagctgtattttggagactttccacaaaggagtgaagtcaccgacctctcaaaatcttggtggccactgacctgagtgccttatccaggagcacaggatgtttctggcacagaaaaagccaggggctgaaccttttggatttctatattcatgaccaaaaacttattttattttattttatttattttttgctaattacattttaaaacaaaacaaacaacaacaagagagagagagagagaatgtgtgtgtgtgtgtgtacatgtgagcttgcaaactgcagtgagccagcccctgggacgctgtgtgtgtgtgtgtgtgcagcgcacatgcacgtatgcc

SEQ ID NO: 43734 - DNA, 366 bp, Mus musculus
  source 1..366: mol_type = other DNA
ttatccggcccccggctctagctgtggccacaggtaagtccttgtagttaggggctgcacctatgagtttttaaaaacaatattgtgttgtgcacataacattctcgaaaaataaatttaaagaccttttaaaaaagacatacaaccaccctggtgtgtacatgagagcgtgccattgaaacggcctctgctcgggcgtaccccggtggaacctgcggagagctggcaggacgcttccctggcaagggtcacctgctgagcggggaccctctcagaagtgagaagcagagactctctgagcgtgttcacgaatggagagagtgtccctgggaactctagtgtcacagctgcttccccaggggcagg

SEQ ID NO: 43735 - DNA, 56 bp, Mus musculus
  source 1..56: mol_type = other DNA
ctataggtttttagcttgacttcaatgtaaatatattttgttagactctctcggag

SEQ ID NO: 43736 - DNA, 582 bp, Mus musculus
  source 1..582: mol_type = other DNA
agtgttatacagttcccctcacaagtttgtttcaacccttctgagattaaaaaaaaaaaaaaattaaataaagctcccgtttctttaactagacaaatctctggttcaaacaactggacgcaccggggccttgtggcaagctaggctaacctgtggctgccccaagcgcggtctgcacggggcaccctgggggagatccacgcgcgccggcgccgatccaaggtgccaggctccagctgagcgggggtgggagggtggggtggcccaaggagcccggctgcccctcccacgtgtcccggcacctgcggggctggcgctgcgtggggtccgcctttctccggaagaggcggcgcggcgcggcgggggctggggcccggggacgcaggggaccctccggggcgggagcacgtgcgcggggaggcggcgggggctcgagcgtctgtagcgctggggctggggctttgcggggacggccccgcggagcgcgccagagtcccggcgctgcagtactgcccgagtccgggcggggtctctgttccctggcggagcagctcgcgcggccgcgggaagcgccctctcttt

SEQ ID NO: 43737 - DNA, 445 bp, Mus musculus
  source 1..445: mol_type = other DNA
aggaggtagtccttgccgcctaagaacgcaggcttttagttctcttcaagcagaatatccctggagcgaagagccatgcatggtaggtagctccagcgtgagttgctttgcaccacagctagctctggccaggaggctcccagcgacccagggaagccagggagagcaggcgacccttgtacctcgcaaatgcacacggtgcgagaccaaggggactcgggtccggccctccccccactcctagccgggccttaagctacgggtgtagacgcagcgcccctaccgccggcgcagtctcagccggttcagactggccagggtgcccctgcagaggagtcgagtgggaccaccccgggagtgacttcccggggtgggcaggtggagccggccgggcgggctgcactccatgtgtcccgagggcagagggcggcggccgtatattgcg

SEQ ID NO: 43738 - DNA, 256 bp, Mus musculus
  source 1..256: mol_type = other DNA
acagcatattcatatcaactgctgtttttcaggtgaaagcaccacagccctcgagcgcaggggatctgaggacaggaagatatcctgtgattaccatctagaacctagttccatgagcggggtgggggtggggctgaccggccctcccttcccccaacaaaaaagggaacaacgtttgtgggggtaggagtccatctccccgcctggcacggtgtcctaggcatcagcgaaggcctggaaagcaaaaagcgacaga

SEQ ID NO: 43739 - DNA, 361 bp, Mus musculus
  source 1..361: mol_type = other DNA
cctgccatctagaacctagttccatgagcggggtgggggtggggctgaccggccctcccttcccccaacaaaaaagggaacaacgtttgtgggggtaggagtccatctccccgcctggcacggtgtcctaggcatcagcgaaggcctggaaagcaaaaagcgacagactgaggctgaggtggcaggctcaagcagcttggactctctgtagctcctagctgcctaccagggttgcgcggagcagctccaggttcctgaggctgaagcccccggtcgcgcgccgccgcgccccgccccatcgtccccgcagcctcgcgggctgctgggctttgcccctgctgggggtgtcgtcaggagcatg

SEQ ID NO: 43740 - DNA, 539 bp, Mus musculus
  source 1..539: mol_type = other DNA
ggccattggttaggagatagtaggttctggtgctgaatttccatcttcaggccgtagcattgctgaactcagggctgggactgtgggttaaaccctagttcttagaactgaggtctcaccactgagctgtgtctggaacacaaaaacttaggaacttaattgctctttttcgtgagataaataaaatggtggttggttggtaaccaaacacttgagaagtttagattattcagtcaaaaaaatgagcattttgttaacttggccaactttattttattgccagaggaacagaatattctgttaattcactacaaaagccgtcgtaattatacagcatttccagtgatgaatatataaatatgccattgaatgtagcatagtgtatttgcatctcagaacaggatccagttctctctaaaatcttgtatactttagaaataatgtttctttgagtgtagatacgtctaacttgagtataggtatgtctaacttgtctgaatcacacgtaatatctttaataggaatttgatattgctgtc

SEQ ID NO: 43741 - DNA, 215 bp, Mus musculus
  source 1..215: mol_type = other DNA
ctcgtgcggatcacgagaatgactttctttaaaagacacatgtcatgtgatccgtcaagtctctttaagaagacttgaatattagagaagctgtggctggttatgtagtcaaccaatacttgccccttgttcatgtttgtatcaatggaaacaaatgggccatgtcctacatgtacattgagtctgaacttagcaaatactgattaattggtctc

SEQ ID NO: 43742 - DNA, 770 bp, Mus musculus
  source 1..770: mol_type = other DNA
gcaagctgacaagtggctgtcacccggaagctgcctcctcagcagccagccgccagcatcctgagcaccgacctgagttcgcgctcgctgcccggtgcagtcctcaggtggccgctcattgctcactgcggggcctggtgagggcggctgggcgcgcagagcggggaccgggaaccctaggcggctcgggcctcagtttcccacaggcgcgcgctcgcctcgccgcagcccggggtggccgtccggctctacctgccgccatcgccgggcgagcgcgacgcgccgagcagcttgccacagcccgcgctcctcgcgcgctccatcctccttcgcttccagcgggagaaggcgcgcgggagagccaagcgagggcgcgtgcgcgcggcaggcggggtcgggcgcagggaagcagtggggcgcgcatgcgcgtgcgcgcgacaggcgccccggggggtacggtctacgcgcccgcaggtaggttgcgggtgcgcgccccacgtgggcgcgccactggctggggagagcggagggcgcgtccgcgtccgtgcgcgtacgcgcgcgcggcaggtagggggcggggtccgcgtgccaaggggcggggccctgtgcaggcaggtaggcgcgaccccggacccctgtcctccgtgcgcgtgtgcgcaagggcgggcggcagcggggcccgggtgcaggcaggtaggcgcgtccaccgccagccccgcccccgtgagcgtgcgcggccctcccttcaggcgagagcgcgctcttcccgc

SEQ ID NO: 43743 - DNA, 351 bp, Mus musculus
  source 1..351: mol_type = other DNA
atggagagagtaggcacccttgtctcattggctatagattagtctccaaagatttatttattatatgtaagtacactgtagctgtcttcagacaccccagaagagggcatcagatctcattacgggtgattgtgagcagtcagtgctcttaaccgctgagctatctctctaagaccttggtaaacttggtcagtattctgaaaagaattttctttcccgggacatatcttttctgagagaagaagccttatctctagaacctgcagacaggcacatacacacatatgtgggtcatctttttttaggtaacaaatgtgaagtcacaaggactcttcatggttcaccagatga

SEQ ID NO: 43744 - DNA, 382 bp, Mus musculus
  source 1..382: mol_type = other DNA
taagaaggaaagaaatcttgccttgacttttccagcggaagcagcttctgagatgctcatgtgcttgtggcctgaatcttcaaggccctatctctgtgaatacaatttgtttctgtgaagttccattctctgaacagctcttgaaagcaacgctattatttgcagtttaagatactgatactcaagagacgtgtctgtcagtacacactggactcaattctgtctcttcctttttaaaaattgcttttaaaggggcagtgaaatgaacgtacacttcgtgtccttgcaagagtattagacacagcggtaaaaagaaactcattaactttatttaatgggaaagtggggggtggggtgtctgaccatacactgaccccaatat

SEQ ID NO: 43745 - DNA, 137 bp, Mus musculus
  source 1..137: mol_type = other DNA
tagaagaccttggccaagagctctgtttaactgtctggacgggggttgcacagtagcaaaattatagttatgaagtggcagcaaaataattttatggttgggggggctcaccacaacagcaacaggagaatctccct

SEQ ID NO: 43746 - DNA, 411 bp, Mus musculus
  source 1..411: mol_type = other DNA
tcactgacggcaggaattaatgaccatcccatggtgtaccacccccttcaatgagatacccttttcttagatgattataatgtgggtcaagttgatatatcctggaggcttaaacctcttcaccttctaatgtaggaaatgattctgtagaaaaatttactgtcacagagaaatagaccaacacagtaaagtgttgtttattaaatgtatatattctgtttgattgacatatttcaattgcattattatttttttctattgccatcgttgcaagtcatctctaaaaaaactatgatcccatacattatattgaaatagaaccgtagatgtaatcttcatctttttgctcacatatatgaaagtgactttcagtactatttgcataaggtgtacactgtgcactctctcaga

SEQ ID NO: 43747 - DNA, 453 bp, Mus musculus
  source 1..453: mol_type = other DNA
tggcgggcagtcagcatcagaagttgcgaggctttcatctgtgggccgcctagaacagagaggagctccccagccatttctgtgatctcagacagagatagaatcaaggcctgaaattcaaagtttgtgagttttgatggagtgcggggcaccccaggagccgagagcccgagggtccacgcgatgggtcaggcattccgggcggcgccgcgcggcgtgtggacgtggtgcgtgtgagagggcgcgggctggccgctcccgcccgctgctccccgtgggcctggccggccaatgagcgcgcgaggcggcggcggggctggcggcggccggaggcgcgggcggctctgtgcgctcggagcgggcgctgcgggcgggcgggggccggggcgcaggcgatcggcgcggcggggcggggggcggcgcccgaggcggggatgcgcagggcttcccgcg

SEQ ID NO: 43748 - DNA, 308 bp, Mus musculus
  source 1..308: mol_type = other DNA
acgtgttagaaatacacttttattatttgtatttgtgacacatttggtcagaaacatactttgactataggcagagttgtagtgactatgattattacgctcactgtgtctgagacatggttcccagggctctgagctctcagggacaatggaattctgaatgactcaggacaacagtatcctcgcagcatggtatgccgccctccccacgggacttttacacaataatgtttataaagctgactcacagtgctgtgaaatatggatttgaattaaaaacgtctcaacagctgtgttttataagaaga

SEQ ID NO: 43749 - DNA, 375 bp, Mus musculus
  source 1..375: mol_type = other DNA
ggctggctaagctcatctagtccacgtgatctggctcaggtattaatataagaatatttttgctatcgcaagatcaagtgaagaatattcttgctagcaggggatgaatttgaatgcctgcctccgggctgggattacaggcactcagcttgccaggctctgggattcctttctattaattgttaaagagaagataaatgctgttggggcatcagcagtaccggcactgtgacacaagccgcagcaccaggtaagccgccgctctccgccccctcctcggcccggccccgcccactgagcggtgggggacgcacagcacctcctgtcctccccgcctcctgccgcggaccggaagtccgggcttcccacagtacc

SEQ ID NO: 43750 - DNA, 387 bp, Mus musculus
  source 1..387: mol_type = other DNA
tctgtggaccactgcaaaggcccgatgtggctgatccagctgcagagacactgtggaagccgcttttgagaagcaatatgggattcaaaaccattttagataaggaatggattgactttagtcatcagaaacctactcctcacgccctcaggggcgagcggggagagccgtggttcacagcagctcctaggagcgacagctcagaccttgctctgcagagcggctgcagggagcggcagcagcctggtcgcagctgtcacccacgggtgaccggacgacgtccgcgcgggcggcagaggccgagcctgggactacacttcccagtgtgccaggcgggcggggcgcggcggggagggcgcaggctccttcccagcaagcgaaggagag

SEQ ID NO: 43751 - DNA, 373 bp, Mus musculus
  source 1..373: mol_type = other DNA
tcttggaaatagcttctagttttactagcagagaaagctatctcaatcagaatttgtaaaatagtggacagtctagagccgctgagctgcttcaccagcctagaggaagctctagacacagctccatcgatgctgtgcctgcactggcggctttgcgggacgtcagattgcaggacccacagctgcttgtgtaactaaaagtcaaaggatcggcaggccatcggccgacagtcctgcaggtacccggcctggataggctcgcccgggcggcgcagacgcagtcaccgccttggcgcctaaggctatcccgcggctgccgggttggaccagctgcgcatgcgcgactctaccggcgcgccggcacacgcgctcc

SEQ ID NO: 43752 - DNA, 461 bp, Mus musculus
  source 1..461: mol_type = other DNA
agcacactgccttgtaaagggatccgatgccctcttctggtgtctgaagacagtggcagtgtactgagtactcaaataaataaataaataaatctttaaaaaaagcattattaaaaaatttttttaaaggagattaaaagcaatatatcttttgcataggacctatggcttcctcaattagaagagacatcttcagtcaggatgcttctgttgtgggaggtctgcccctaaccacctgaagtgcttgctggaatgatgcaagcaggggcatttgagacaagtcccatcctgcggcctctgagcatgctcagtgcaggtcggcagcgggctgggactctagacccgctcgctggccccgatccagggcatgctcggcaccgctgggcgggatcctggcggagctcgcccggccggagcgcacagggggcgggcagaggcggggccgcggcgcccttatcccg

SEQ ID NO: 43753 - DNA, 329 bp, Mus musculus
  source 1..329: mol_type = other DNA
attctgtaagataaaatttcaaaagcagtttggacttgcattgggttttttattaattattattattattattattattgttgttgaccaggctggccccaaactcaggtccacctgcgcacactctataagtgactgggctgcacagtttaaccccgacgcttctgtttaagaaaagatggaagattctccagtggtttgaaaatcagaagcagcttaacttttacgcaagttctttctctccatgttcggcgccccgcccaacgggatgtcggtggaaaaggtgttctaccaccttcccgcgggtcgtccggagatcccggaagcgg

SEQ ID NO: 43754 - DNA, 429 bp, Mus musculus
  source 1..429: mol_type = other DNA
taaacagtgacttattcatctaataatgaattttcttttagtcatgcctgggaatgactaagcaaagatcaggaagacacttctcagtggtgtatctgctcaccattgagtaggcaaatctccaaagcatctttaaaattcccttcaggaaatttcctcagatacagctcaggattcagcagagtatttcagaaagctgctcagctgggacttgtccacacaagagacccaactgggatctctgattaaggtctttaaaagcacaatgttttgaactcatatagtatttacttataagatcagtggaggagaggcccacctcctttctcagataatagcctttttccggtgtcaccgcctacgcttgcgtacgggggcgggaccggaatcgactccggccaatgaaaagaggtgacgtcatttaaagtc

SEQ ID NO: 43755 - DNA, 518 bp, Mus musculus
  source 1..518: mol_type = other DNA
aactgttgttttctttcttgagttaaaaaataaaacctttttcttgcggaaagatcaaatccaaaccatttgatctgtatccttcagatgaactggaatggaagattacataatcatttgtttcttcgtgtcaggaaactttagaaatttcatttttaatcttcctgcattgtgctttgtggttccaaaagaaaaatccaggatatgtgccatttagttaaatgtgaattttctttaaagaaaaaaaaagaaaaaaaaaaaggtgagtttattcatctgagaaaacaaatgaccgagacattatgtgttctataacacgggcacccggccttcctaaaggaaaacaagtacttctaggtatgtagagaagtgtttactttctgctgtaaaataaggaagaaaagtttataaccttccattagtctaaccagcagatatgtgttaggaatctatatgtcagaggtaaatctctttttctaataagtgagctcattcctatgtgctcagagaatccctgg

SEQ ID NO: 43756 - DNA, 457 bp, Mus musculus
  source 1..457: mol_type = other DNA
gagttcttattatagcagcaaatgtgctccttgctagggacagttcagtttaagatcttctcaaactgttagtagctaacagctaaacactggttacagaactgcagcagaggaattactctgcccactagtaagatatcttctcgaatatattggcaaaatttaatgcgacttttataaacttttgtagtctaaatgtattcaaagtgtgagtctggttagaactaactttcactcgtttataaaagtctaaatcagtgtgaaggtgccatatttaagaaatatatccaagttcatattttcatcggctcgcggacattattttacctggtcaataatatcgtcatcgaaacctaagtgctttgcaatcccgtttccctccgcagcgtagcacctgctcctaattggtgcaaagcatgcagcagcctcctcgtggcttagccctgtataaaagcag

SEQ ID NO: 43757 - DNA, 378 bp, Mus musculus
  source 1..378: mol_type = other DNA
gcatctaatttcccaaattatggattcaacttctgcttaatctgatatatctctaacagacttcgttattcagatatgcaaagttatttgaatttctcccgccaacttggaaattcctacaccctgcaaaagctcttaagtcattgatgagttttttgaacacgtggacattttccgcgtactgttgagcgcctgggcgatccagccagcggcgcgcgcgcacatagtggccagagcccgctccgctcctccagcgcaccacgctcggtgccgccctgcaggacccgtgggactcggaccccgtgcgccaccctcgcccggcgccctctctggccccagcggcagactcgtccgagcgctgcaaccggtggggcgggg

SEQ ID NO: 43758 - DNA, 260 bp, Mus musculus
  source 1..260: mol_type = other DNA
taaactccttggagtctccagtctcttgagggtcagggatgtgtgttgatcaacaacagaggtcagctgctgtccattggttaggtgcaaataactgcataattctttcagaaagaaacaattatgggtcagaagtgtgactgtgggatgacaaccccatccctcagtcctgggagtccaatcacaagagaattaaggaaatcttttaaattctttggaatttttatggttttgtgctctgtatcttgatcacacacaca

SEQ ID NO: 43759 - DNA, 429 bp, Mus musculus
  source 1..429: mol_type = other DNA
taatgtgtgaattgcagaaaaaatgcttttaaattgtaactcttaactcaagcccataagtcattcattttgcatttatcaaacgcttcttggcatatgagggtgtgtgtgtgtgcgcgtgcacgcatgtgcgcacatgcaggtttatgtaaagtctccatatggcgtatatgtagaccacccagactcggtgaggagacagtctttagaaaaccacttcagccagtatgtactgggtggatcagcttgcagaaatatgggccctgaccgggcagttctggggtcaggtctacgtgactcggagagagcaactgaaacttgtctttgttcttcatagtaacattgtaaaattatgttgttttccccagagtattgaccgagaagctgcagacgctggcagtctcctagcaaccaggtcgcctggtaatg

SEQ ID NO: 43760 - DNA, 307 bp, Mus musculus
  source 1..307: mol_type = other DNA
aggcagccctttcacaggtgggctgtctacctggggtatgcagtacaacagtcattgtgagagtgatgagagtagaaagatccaaaggaaccggggctacactgctctgaaggtgggtttcccaagatgctagaagtagcttcgggaaggctcggcgcagtgcagtgccacagtagctggagccagcagcgcgtgcggtaaggcggcgcgcgcacagccgcgcccctcccctgagccggagctagtggtcgggcggcagcgcgtggtgcggggcagacaagcggcagaccccgcccgcggttggcct

SEQ ID NO: 43761 - DNA, 266 bp, Mus musculus
  source 1..266: mol_type = other DNA
tgagtaagagcacttactgctcttggcagcacagcttacaactgtctgatgccgtcttctgtacagatgtacatgcagacaaaagtaatacttcctgttgcattaaagacaattgaaatagatctagctgggagtctgggaaacctgaacttttcaattttggtaagagttctgataagagttataaggcctctttttaaacatccaccgaggaaattaatcttgcagcagggaagatgcagggccttctcgggaggccgtcacga

SEQ ID NO: 43762 - DNA, 330 bp, Mus musculus
  source 1..330: mol_type = other DNA
aatacttcctgttgcattaaagacaattgaaatagatctagctgggagtctgggaaacctgaacttttcaattttggtaagagttctgataagagttataaggcctctttttaaacatccaccgaggaaattaatcttgcagcagggaagatgcagggccttctcgggaggccgtcacgaggtgagcccggggcgctgcagtggcagtgcaaagctcgaggtcccgggaggctctcgttgctatggtgatgactccgcgagggcctcgtgcctcggaggactggaggagggtccagaccccgcccccgacgtcgggattcgggagctacg

SEQ ID NO: 43763 - DNA, 335 bp, Mus musculus
  source 1..335: mol_type = other DNA
cctcagtgcctgccctggttgaacgtgggctttctccagcttgccctggtgtagaccagctgttcttcccagggagacagtgcagtacaggttacacatgctggctgcccggagcctatgtggagcagaggccccatacaaccacaagggcaccgaaactttaacggggagctgtgagggctgatttctcagacaccactgccagcggctctaggcagagttagatgctaggtctcacttgagagtgaacctgaaggctccagcagcttgcctgcagggaacaagctgctggagccttcagatgcaagcttccctgagagcctgctcaaaaggag

SEQ ID NO: 43764 - DNA, 441 bp, Mus musculus
  source 1..441: mol_type = other DNA
taaaagcatgttccactatgcccagtgaatcagagattaaattcttaaaaagaaaactgtcagtttgatctaagttaccattatctgggaagaggaacttcaattgcctatatacaaatcaccaggatgtggtgtgaccccctaggggatcctggatgtgcttttattatagtaatagagccatttacaaatttaaaaagtaaaataaagaattacataagcttatagaactctttaactttataatgctagtgatgtgctgggaacataatgggtgcctggcatgtgcatttttctcaactgtcgggttcagcacactgtaaacatacatttcacagagatttgccttggaggctagcacagcgcgtgcgcggtccagctccagctggcgcctgcgcagtagcagcccagggaggcgccgatcacggcacatgcgcgggg

SEQ ID NO: 43765 - DNA, 442 bp, Mus musculus
  source 1..442: mol_type = other DNA
ttctaggttttaaggataaagtgtagcacttgaccattcaaactcaaattatgaactttaaaaaaagattattgcagagacaggatctattataggtttacatcacatgcctgttatatgaacatacttttcctaaatgtatatctgtgaaccatgtgcatgcagtgctcccagaaaccagaagagggcattggattccctgggctattgagggaagaacagctgatgctcttttaaagcggagtgtatacccatacactcatttatgtagtgagtatgtagcagtacattttatgcataaatagacagtgcagggccacagcagcttggccattttgccatgccaaagataaaaactcagggtatacagtttagcacatacttaatatttttttagaagtgatataacctaggcatagtctaggcgggctttgagaccctc

SEQ ID NO: 43766 - DNA, 375 bp, Mus musculus
  source 1..375: mol_type = other DNA
aagctgagatggcagtgcccccacagatgctgtaacactgcgtgacaatcaccaaaggcactgcagccccccgggggtctagcctggctctcagcaagcctcccagacagcctgtgggttgcatctagacaaggttccagaaaggctgtggccttgtgtgaaggccctgttgtgaacagattgagatttgcaaatccttcagattcccagcccagaagtctgagagtcctccctccttgctcagtagttcagagaagtaaagatgcatcagagatgtaagaactaacccccctccgcccccagccccggcctagggtcgggtgtgaagcagcttgggtcataacagcatcagggcagcttagtggggcgccagac

SEQ ID NO: 43767 - DNA, 548 bp, Mus musculus
  source 1..548: mol_type = other DNA
atatataataaataataaattaatataacattaatatgtactattataaatattaataaaacaattaataaaaagatataaagttaatatagagactatataataaaattaatataacatcaatatgaaatattattttatatctaatatatactattattaaaataataaaagataaaacacaacatatatttgttaacattatagattaatagtatattaattgtttaatcaatatatgatctattaataataaaattaatatatgacattaatatttaatgtattatatgattattatatagcatatattaataaaataattaatgaaaaatatatagccaaggtggctaatatccaatatatatataaagaaccctatttaaaaaatggccaacatagtactaccggaggaactcttgggcatatacccagaagatgctccaacttgattcatagcaaccttatttataatagtaagaaatgtggtatatttacacaatggagtactactcagctattaaaaacaatgaattcatgaaattctt

SEQ ID NO: 43768 - DNA, 371 bp, Mus musculus
  source 1..371: mol_type = other DNA
tttggtcatggtgctttaccacagcaatagtaaccccaactaaaggtaagcttaatctatataagcaactgacacattgtattattgcacaacttggaggaaactttttaatcaagtttggttgaatatgcagcggcgggatctacactcagagtgccatcagccacaccttctagcaaggtggcgaagtggtcacgtctgggagtgcttccctaagttacagggaacagcaagagggtctttctccactctgcagctggcaaagcgcacatgtgggcaagtatgactgtggctcaatattatcatagtgccaggactctggtggcccctgaaatactcagatgccaaagtattgcttctggccgtacttg

SEQ ID NO: 43769 - DNA, 483 bp, Mus musculus
  source 1..483: mol_type = other DNA
tgacaatcaccaaaggcactgcagccccccgggggtctagcctggctctcagcaagcctcccagacagcctgtgggttgcatctagacaaggttccagaaaggctgtggccttgtgtgaaggccctgttgtgaacagattgagatttgcaaatccttcagattcccagcccagaagtctgagagtcctccctccttgctcagtagttcagagaagtaaagatgcatcagagatgtaagaactaacccccctccgcccccagccccggcctagggtcgggtgtgaagcagcttgggtcataacagcatcagggcagcttagtggggcgccagacgcgtggacctgaagcgcccacgttggggcgaagggtgctttgctgccggacccatcaccacctcgaggcctcggtttcccccagcagcggggcggggcgggagcagcgctggtcgcctgcagggtgcgcccatgagcggcgcggccggag

SEQ ID NO: 43770 - DNA, 240 bp, Mus musculus
  source 1..240: mol_type = other DNA
agtcagccacaccttctagcaaggtggcgaagtggtcacgtctgggagtgcttccctaagttacagggaacagcaagagggtctttctccactctgcagctggcaaagcgcacatgtgggcaagtatgactgtggctcaatattatcatagtgccaggactctggtggcccctgaaatactcagatgccaaagtattgcttctggccgtacttggggcgacctgcaggtgttgccagcac

SEQ ID NO: 43771 - DNA, 197 bp, Mus musculus
  source 1..197: mol_type = other DNA
tggcttcccgccctccgctaagcaagccccgctgagctcctccgcagcggccggggatttttccggttctggcacaaacgttagatggggaacttccggcaccggagagggcccgggggaccgccgtgggcttgagcccagtgctctcattattccttgtctgggtaagaagatctcgatggcactggcccccggcg

SEQ ID NO: 43772 - DNA, 429 bp, Mus musculus
  source 1..429: mol_type = other DNA
gggctgaggccgcagacgacccaaggtcgcgcgcggccagaccctgcccggctctagggcggagtccccctccgttcccccggttgaaggcaaggccctgaagagaggcactgaccgggctcgagcggctgccccgctgcctctgcctccgtcctcatgacccggatggcgcagggcgcccatggccccggcctggagctgattgcagcggcgacttctgctgggcagcgagcgcggccagtctcctccgcctccgccgccgccgccgccaccgcggttcagagccgggtaggcggtggctaggccgcctcaagccacgccgggggccagtgccatcgagatcttcttacccagacaaggaataatgagagcactgggctcaagcccacggcggtcccccgggccctctccggtgccggaagttcccca

SEQ ID NO: 43773 - DNA, 212 bp, Mus musculus
  source 1..212: mol_type = other DNA
agagagagagagagcatgtgtgcacatgcacgtgcacacacacacatacatgcgtgtgctacagagtgcattgtttaatcaaggttagaaactgaccctatctcattcaatgagaagtagttaaccgaaatacttggagtagcccctcccagctctgtggcccagatagtctagagctccgcccaccccaagccagctaggggagggaaggg

SEQ ID NO: 43774 - DNA, 282 bp, Mus musculus
  source 1..282: mol_type = other DNA
tacatacactgtgctgccacactgtgtgctggagtatgccccttgaggcaccatgtggcaggatggccctgctggatcataaggcctgggtctggaagctgaggccccaggccctgttccaggtgacctcttagatctaagctatggtctagtgcctgggctcaggaacatttttgaggacatcatgtctgtctctaaattcacagagaagggttcaccggtggcctctgcccctttggaaagtgggggagcccctttcccaggcgcggctgtgacgtcagc

SEQ ID NO: 43775 - DNA, 455 bp, Mus musculus
  source 1..455: mol_type = other DNA
ttcttctggtcagcagcactgggtgtcagggcactggacatctggcctgcctgcccactcccttcccaccccatgctcagatgtttggatgaggctgtgctggctcagcagttaaaagcactgactgctcttcctgccacatggtggctcacaaccatctgtaatgagatctgatgccctcttctggtgtgtctgaagacagctacagtgtacttacatataataaataaataaataaataaataaataaataaatctttaaaatattttaaaagattcatttctataaaaattttaaaaattaaaacagcacggtccggagtttcaccctgcaggagacaccctgacaggaaaacagtgagagaggttccctgagtaagcatcacatttccaatggcactgggacgagttaacagcggcagctggctcttcttccagggttgagcctcgggagc

SEQ ID NO: 43776 - DNA, 331 bp, Mus musculus
  source 1..331: mol_type = other DNA
tccccagggacctgggtacctgctgtcccttggacaatgacagggcctgggtgccacaatggataggaggagcccagcagcttccagtgagtctctgtcttcaggtcagagtcatgcctagattgagacagggcggtgtgcaaatctcatctgcatgcctggtgcccacagaggccaaaggagagcatcagatctcctggaactggagagttgatgtgatagcacaggctaacccagaacttactaggtagcttatgctgagctccttttatacggtttaccaaatcctgggtttacgcatgaatgcagccgctggcagcttctgaggctc

SEQ ID NO: 43777 - DNA, 191 bp, Mus musculus
  source 1..191: mol_type = other DNA
gagttaacagcggcagctggctcttcttccagggttgagcctcgggagctgtagcagcagcctggccacagcctgccgtctgtctatccataaacccaggctggctggctctctgtccctgggccactgagccatggcttggggtcacagggccacggtcagcaacagtcccagggcccttggcattgcaa

SEQ ID NO: 43778 - DNA, 565 bp, Mus musculus
  source 1..565: mol_type = other DNA
agaactaccctccacagggcactgtgtggcacaaagtggggaaattgcctacccatgctgccgttggccattgctgccaagcaagggttgcggtgggcagcctggcgtcactgaacccatggtggctagaccgattggccggcaaaagtcagttatgctgccaagtgactgccggggaccgtccggctcttgcctgccccgccccggcccgccgcgagtgaggagcaagcctccgcggccatggcctggcgcccgcactagctctcctgcacagatgccaccggggcgccagcgggtaggaacttgcctgtggccgacccccgggtgggctcggggagctgcccccgccccggacgcagcaggaagcccgagggccgcggtttccccagcgcttctacgaagtcgccgacggtgggtgcggtgccccccgtgcccggactgggctggcgttctaccgaacgtcaggtgggagtccagtggtggagtctgtactgcgcccgcccagcaaacccacccagcccgaccaagccccgggccggagcccaggcgtgggtgtgcgcctgcg

SEQ ID NO: 43779 - DNA, 325 bp, Mus musculus
  source 1..325: mol_type = other DNA
actcctatacctcgggtctcctcagatactcgtgggagacactggttcacacaggctagccagtgtgtctgcattgaaacactacagatcccctgctgagtgagagaagccagtagctggtctacaacactggagctaggctggcctcagccctggcaggctgagtccctaggggaagcagaggtctaggtctgccctaaggggcagactggactgtgaccccagggtctgagctgcttcaggtgccaaaggtcttagcatctggacgctccagcccctctgggcggggtcaggaggcggggcctggccagccaggcaagagcct

SEQ ID NO: 43780 - DNA, 273 bp, Mus musculus
  source 1..273: mol_type = other DNA
ttcaaaccaaggtcccctggaagagaagccagtgctctgaactgccaagacggctctgcagccccttagtgtatcattcttgtgggatactggattttttctgctcaaaaaccggtaaacttctctgacacgtttctactcgcgttcctagtttgggctgcactagtgagaggtagcggagcgcagcagcagcaggcagcagcgttcccacgcgcgcgcctactccgattggctgataaggctgacagagctccggccgttgccctggagacg

SEQ ID NO: 43781 - DNA, 449 bp, Mus musculus
  source 1..449: mol_type = other DNA
tcctgactttccaaattcttgtataagacgtcttttatgtgccttacctaataaatacattgttaacagaagagtaatgtagtatgcacactttcctatgtgtaatctcagtctgtagaccaggctggcctagaactcaagagatctgcctacctctgcctccagagttctggttttaaaggcttgcaccacaaccacccggccagattggtttgttttaagtagttctaccactctctaatggacaatgatttatccctgacagaagagtttacaaactcaggtatcttagggaccagagagagatgcccttgtccttaagcacacctcacgtgcaaaagaagtgcgcgtactgagtttgaaatgatcacaatcatttaagaaactttaagcctttaagtctctctagaagggccgagtctgcctggccaatgagaaacagagctgtg

SEQ ID NO: 43782 - DNA, 346 bp, Mus musculus
  source 1..346: mol_type = other DNA
gtgccaagacacttttttttttaaagaattatttgtttatgtctatgaatacattgtcactctcttcagacacactggcagaggatgtcagatcccattacagatggtcaggacctctggaggagcagtcaatgctcttaactgctgagtcccccatcatttggagatttggggaaatgaaatcctccctcctgctagagcctgagtcctgggcccaaggaactggatgggattcggctaatctgcccctaaattcaccaatagagacgccggtacaggggccagtttggctccaaaccaagactcagtccggcactgattggcgagctccgatcgggctaagagg

SEQ ID NO: 43783 - DNA, 264 bp, Mus musculus
  source 1..264: mol_type = other DNA
cctggacctctgagatctctcagacactgagtgccaagacacttttttttttaaagaattatttgtttatgtctatgaatacattgtcactctcttcagacacactggcagaggatgtcagatcccattacagatggtcaggacctctggaggagcagtcaatgctcttaactgctgagtcccccatcatttggagatttggggaaatgaaatcctccctcctgctagagcctgagtcctgggcccaaggaactggatgggatt

SEQ ID NO: 43784 - DNA, 390 bp, Mus musculus
  source 1..390: mol_type = other DNA
actcagtcttggggccctcagtttcaatatgaatcataaggacaattttttatttattatttatttatttttttttgtagaccaggctggcctcgaactcatgggccacttcatgaaagggatctacacgtttctttcactatgtgtataaacagcaaggacaaaaattacatctaaaccttagttttcccatctgggaagtggggaattgggaattctaaacacactagggtatacctttgacctcctctgcccactcagaggagaccagttgtgtccagttgcagggctcttggaacacaagctagctccccctttagaaagaagggccaggctgcggtatccgcccagtgggggcgtggccacacttggcttgatagggatccctac

SEQ ID NO: 43785 - DNA, 162 bp, Mus musculus
  source 1..162: mol_type = other DNA
ccttcaaggaaatgtcttctatgagccaacaccttccagaatggatcccaggctggccttgaactcaggtactatacctttaaggcatgggcttcagaggacatttaaagtcgagccttctcagacagatgtctatgaggctgaatccttgctgtggtaaga

SEQ ID NO: 43786 - DNA, 241 bp, Mus musculus
  source 1..241: mol_type = other DNA
ccaacctggactacctggaaagccaggcaggataggtctcacctgggagtcccagattgaggccagcctgtgctatagcttctggtgcccgatatggcccacgggcttcttttccccatcggaagacttcaagctttgctgcccagcctcacagatctggggaggtccagtgttcttagacgacctgttttgcacggggcagctggaccactgcagtaactgagagctaggagctgagcgg

SEQ ID NO: 43787 - DNA, 306 bp, Mus musculus
  source 1..306: mol_type = other DNA
aagtcccaaaattcccgtgacatttccttcggatgtctcacttgttaatgagaaagctaccagaggagcagaactagttagtaccgctggctccctaggcctggtggacacgtgtcccaggaggctcttggctaatttcttgagcttagagaaaagttcccaaggcaaggaaggattgttttttctccaagtacaagccatcacgctttcttacgtttccatcttaggaaacagaagcagcgcgctgaagggcagtcaccgcccctttgggacgtagtctgacgtcagcggaggcggcagccggcc

SEQ ID NO: 43788 - DNA, 300 bp, Mus musculus
  source 1..300: mol_type = other DNA
aaggcgagctccactccagaaaaacgtgtactttttcataacctggacagtgcacgttactgtttaacctttagtgagcacagggatcttttagaagtgacagttaaatgtcacctcttcaaatagaactgtctggaccatgatagacagtgtcttttgttggctacaggaacagtaggtcctcaataaatgattgactaatggcagacttccccattggctagccgcctcggataggctcggctcctcggacgctgattggcccccagagagcgaggcggggcttgggggaagagagcg

SEQ ID NO: 43789 - DNA, 223 bp, Mus musculus
  source 1..223: mol_type = other DNA
ggcgcgtgctcgcagctggggcgtggcctggtgggcgtggccggtcccgcctggaccgtcctgtgttcagaccctaagcatctgtcctagcttagagcgtcgagccggtacactcggatcgcacgcatatcaaagatcctgcatattaggtatttacattatgattcgtaactgtagcaaaaattagagttatgaattcaggctggcagaaatgtgcctgcct

SEQ ID NO: 43790 - DNA, 491 bp, Mus musculus
  source 1..491: mol_type = other DNA
agagaaaacgtatttgtcttttccattttcctgaaaacaatgtaatttcacttttgtggctgaaaaacaaaaaacacatgtacacacatttcacactcttttttgtcttggaatattgttgaatagctacctaggctaggctataacttaagttatgccccaaggcgggcagaggcacagaccagggctgggcttgtgggcaaggaaggaatgcaagtgcctcctcccgttcattgctgttggcctggagtggatagctagctattcctaacgcggcgctagcgtggggtcgccatgcccacccagccagctctggctatgcgactaggaaagctaccgcctgagtcagggcctcagtggctatttcgggttttcctccttacccgcccagggaggaagcctaggaagctccctttaagggcttgcgggaacgcgctcggccttgagtcgcgcaggctgcggcgcgcacgttagcgtcagcttctccacgc

SEQ ID NO: 43791 - DNA, 297 bp, Mus musculus
  source 1..297: mol_type = other DNA
gaaggcctggcagtgcgctgcagagattagagtagttgaactgttttcagcctgtctcagatggctgagcctgactggtcaggagtgtggctagtgtgccccccggccaggagttgcctgctagtagccatttgcatcagcgtgcaggagcaacaagtgctcctactggccaacttccgccatatgccagtttctggagagcagaattgagctctccccggcctgctgcaggccggttgagttgtggggggtgcggtcccggcgccggcgggggcggggcgaatgctataaggggcg

SEQ ID NO: 43792 - DNA, 291 bp, Mus musculus
  source 1..291: mol_type = other DNA
acatcttctaggaggagagtctccacctagggacttcagtctggagcccaggctatgggtctgaccagagcgtcacttgaaggtccgccccttggcagctcccagtgtcatggagaccactggaagctcagggagctgctgtagctgagccagtaagctccatgatatgtctcctccctaaaccgtacttaggagctctatctccctctaccctagagacctagtcagttgtggtccccaaccttctatcttagcccataatcccagttctccgcccctcccttagcgggt

SEQ ID NO: 43793 - DNA, 293 bp, Mus musculus
  source 1..293: mol_type = other DNA
ttttttaaaggaaagagtggcttgtcttttacgctgcttaaagaaaccaggtttgggacacctgaatgggcaatgcatggtgaagtgatctctgttgtcacagtaaaataaaagaactcaaggccccctgtgccctttctactcctggaactcagtctgtagaccaggctggcctcgcatgatcccacagagaacacataactaagccttgggctttccaaagctccaggactcgcgtaggagctttggcccctcccatttggagggcgtggatcagaggccccgccccagat

SEQ ID NO: 43794 - DNA, 263 bp, Mus musculus
  source 1..263: mol_type = other DNA
tcacatacataaaataagcaagtgtaactaactgtttctgacttaattctacctctataaacatgaataatgagagacattgtagtagggccttcagtgattggcgagggctatccaggtatcctagtgacttagttaggtctcaggaagcatggcagcatccaggcaggcatacatcttctaggaggagagtctccacctagggacttcagtctggagcccaggctatgggtctgaccagagcgtcacttgaaggtccgccc

SEQ ID NO: 43795 - DNA, 524 bp, Mus musculus
  source 1..524: mol_type = other DNA
tacatcatacctgtaattttgctactgctatgaaagtattgggcaaaagcgacccctttcacgcaattgagaactgctgttctagacccagactataccaggggtagtgtattagtcaggagtctttagagtcacaaaacttatggaatgtctctctatattgagggaatttattgacactagggtagctatttcagctggccttctgtataagctggaagcctgaagtaggctccaacagatgtgctgagccttccttcttccaatgtccgtatggaggcctccagcagaaggtgtggcccagattaaagatgtgcaccatgcctggatctgggacttgcttgtcccaggctgacgcacactatggcctcaagatctctgagccaaacaggtcagaaaaattctggatagggctctgatctcctgctggctgagatgccaggagatagggcctgaccctggccccagacacatgtgtcgtccttcagtcccatccctgtactacaagcatccggagcacagta

SEQ ID NO: 43796 - DNA, 267 bp, Mus musculus
  source 1..267: mol_type = other DNA
atcactgagttcgagtcctgtgtgagggctacacagagacctgaggttagctctgccatccagagctgtggctgtgatggaattgaggtagataccagtttgatatcacattttaattaaaaataatgcgaacattctgctcatagctcataaagacgtcattatcccacctgcgccaaaatttagccaaggatgatcctttgtggctagggactgaccaggcaatggaccaggctggacttggcagagcctctcggccgcacaaac

SEQ ID NO: 43797 - DNA, 355 bp, Mus musculus
  source 1..355: mol_type = other DNA
attttttttttagaatcacacactggggtttaaaagtaactaacatggtggttcacaaccatctggtgtgtctgaagacagtgacagtgtactcatacaatagataacttttaaaaggataaacaatcaacatataaaaaaataactaatgaaattatgttatcatgtatagagccagctgtctgatcagaatcccacaacaccatggtcttgaaccagttataaatcccagagaaatatagtattttagaaagcatgaaataaataattaaccttattttcaaaagataatttttttgccatagagctatgtgctttataaggaacaaagcttggattgatcattaatccagtg

SEQ ID NO: 43798 - DNA, 473 bp, Mus musculus
  source 1..473: mol_type = other DNA
tgagcatgttgtgtttcaaaactgaaaactgaaattcgaatttcatgtaatttgcgcatgctccaaaaaggcattcatcttttgatgagggtcttacagtatatccctggctgccctggaactcactctgtagaccaggctgaccttgagctttctgatgtttttcaaacaacaaacacaaaacaaggacatctgttctgagtttcctttggtgtgcttatgcaaaagctacacacttgagaggagctgtcatagctgtaatacaggaaccatctctggccctgggcccaggctagctgaaggcctggctttgggttcccaaatctcgcaggtggtgcactgcgtcccagctcagtccctccgcccgcggcagtcactaggggcgcccgagtgagagaacgcgcccaggggccttaaccaatcagatcggcgctacgccgcgcggctgacctcgcgtccacccttggcagcca

SEQ ID NO: 43799 - DNA, 106 bp, Mus musculus
  source 1..106: mol_type = other DNA
acatttgaaatataaatacataaactatctctttcgtattttaaatgtaaaagcatggggcaggatgctctgagggtttacttcaggctggcactacagtgcgtag

SEQ ID NO: 43800 - DNA, 502 bp, Mus musculus
  source 1..502: mol_type = other DNA
agccttgcaagccctgagatgcctcacagcaggtagcatgatggtttaattatagaaaacaaagaattttaatatttccctatcattcctcagcatgtattagagtgtctagattatattggacaaacgcatccacctaattagtatgcaaatctgcttttgttagtcagtggtaaaattgtgtgtatgccgagttttacaataaattcttttctgattcacttatcagtaaatgtttgatgaaaccttgcttaagcacaggatcttcaggacttgttccacgatcaaaacttagtccaagatactgtaggggggtcccattctgcagaagctgattcagatcaaaactagggcgcggtctacaccacctgtggcctccaacccggagtccgcgtcttgcagccttaaggcccaatgcgaccggccggaagccaccgagtttatacacactgcgcttgcgcaggacacccaggcctgggcggggcgtgctcttcggccagct

SEQ ID NO: 43801 - DNA, 369 bp, Mus musculus
  source 1..369: mol_type = other DNA
tgtacacctctacactagaagggggcaccagacctcattatagatgattgtgagccaccatgtgctcatttctgggcaagagcgcacaattgatgccagactgctttttgtgccttgacaagaggtgcaacatttcttccctatgcaaaacaagagctggcaggtctttccctaggtgcaacaagtactaagtatgtaactaacttactgcatgctggtcagacctttggaactgggccaatgttcatgtaatacatttaaaaggttggctgcccagtggatccccagggtaccactcaatggggccctgtatgcagattggcagcctcagcctgcagtggactgcgccaagcccacacccagttctag

SEQ ID NO: 43802 - DNA, 385 bp, Mus musculus
  source 1..385: mol_type = other DNA
agctttcatgcaaagcttgttatgattagtcagctcaaatcagatgttttaaaatcagttggggacacgctcactgaaagcctccaaaatggtcttttttgtttgtgtgtatatatatgtatgtaagtatgtatgtatgtatgtatatacatgtttatacgtatatgtgtatatataccgccactctcaaggactgagacactgccagagctccttcttggtcaatgtcagaggtggggtcgcacgtctcccgaggcgcctctgtgaagcggagtaaagctccgggagttgctgggcggggccggcccggcgtacccgcgcaagcgttgccccgcccctcagccgcgcacgcgcgtccccagcgcgctcccggagccggagccag

SEQ ID NO: 43803 - DNA, 276 bp, Mus musculus
  source 1..276: mol_type = other DNA
aacactcagtcttactactgaacttgagtctcattttgtagaccaggctggtctcgaactcagaactagggcgagtactctacctctaagcagggcctgctggcgaacgctgattccacgtgggaagatgcccttggagtaacttctccatgacccctgcgtgtagtgtgcactgagtgagtgggcagttctgtaagcatggccactcttgtcagacttgccttggcgggctggcgtcccaaaatagcagggacgcgctgtccttgccgcctccca

SEQ ID NO: 43804 - DNA, 321 bp, Mus musculus
  source 1..321: mol_type = other DNA
aacgtttcaacccaatgataaattaataaatgttaatttccttatggcagaaagactttacacacagcgactctgtacattgaagcgtgtgcgtggtgggggctggtggatcctagaggatgcctcctcctgtcgggagagggcgataggtagcaccgcctcgggaaaacggtttgtccaaaccttcccgccgcccagtcgacgaacgcccgcgagccccgggaacgccgcgcctcgctcattggcggatggctctccgcccttggagcgtcagcggagcgcgcgtgcgcaaggccacacggggctccggattggcggaga

SEQ ID NO: 43805 - DNA, 274 bp, Mus musculus
  source 1..274: mol_type = other DNA
tgtcgaccctttacatcccatctggtttagaatagtgcactctctgtcccagggtccccttaggcactgcctttgacccctctctggccaaagtctctgccacaaagagtttcctgaaaccctcagggagctcctgtctgatgatgaggagtcctccaggagtcttctaccgtgagtcagtgtttacaggtgacccatttgggaaggactctcagaggtgtcctggcaacccaggacctccctcacagacttcagggcaggctctggcactgtg

SEQ ID NO: 43806 - DNA, 334 bp, Mus musculus
  source 1..334: mol_type = other DNA
agacttcagtgcattttacgagaagaacatatatacatacatatatatttattttaaatatgaggtatacatatttacctcatgaaatgagaaagatgttctgaatagtcttgttgtcaacacagatgagtggcactcttctgatggctcacaataaaactttatttgatgggatcaatgctaagggaaatcacctttatttaccctaggtgggtccagcgtctctcgggcactcaggctggaggatccacgcacgaaggggcttccacgccgcacagaaggtcgggggtctggcgggccgcctgccggaagatcagcagcagcacaagttggt

SEQ ID NO: 43807 - DNA, 331 bp, Mus musculus
  source 1..331: mol_type = other DNA
agcaaacttgtaggactccaagctccaggtatctctgcacactctgcagctgctccctgtgaggagccaaggcccctgccccatgatggtccatgtgctagaggggccggccccgccccccatcccgccccgcccctccaacgggcctgcccctcccacaggccgtcctcgcccacaggccggcctctttcataggccccgcccgccccgcagccacgccccctggtgccctcgcggcgtcgggcggccctgcgcccagccactgtggtcgcggtgcgcggcccacccagtagttccggtcggccgaggctcgcgcctgcgcagtgcacta

SEQ ID NO: 43808 - DNA, 477 bp, Mus musculus
  source 1..477: mol_type = other DNA
aagaaagcaagcatacttgagaaagtgttttttagaacctatcaaaaatcataccttaaaatatacataggcaggaacctcccaaaagtgttttataagtccttgaaggcctgtctaaagagctttacgtacagctggttgtacaccagctagaaacatgaataatgttttcttggaaccggtgtccaacagttcggttagaaggagaatctcgtcaacaaatggttggaatcacaccctgcctgttttaagccaggtggctgtgctcccaggtagagctgccctgtcctggctaagcctgcacctcacctccattccctggggagcaggcctcaggagtaggtcccggctctggttctccttcaggaggcgcacctgcttcttcaggtctgcgttctcactcatgagcctgccatggtgtcaggtactcacacatgggcctgtggccccatggagatgccacgctgcctagaggcg

SEQ ID NO: 43809 - DNA, 264 bp, Mus musculus
  source 1..264: mol_type = other DNA
tcctttctcatcaaggaggagcagcaacccttggtgtctctgagcagccagtacaggaagacctgattcagagacagagctcatccacttagtgcagtaggaacccagtgctcagtgtgtgcgtaagggttcctctagaatctccctaagactggggggcaatcatagggttatctgggagtcccattggagtggccattgagatgacagccaagtcgccactgtggcctatgggccatacttgtattcatctgcgccgcctct

SEQ ID NO: 43810 - DNA, 288 bp, Mus musculus
  source 1..288: mol_type = other DNA
gagagatctgttctcctgaagagccggccctgccacactcctcactggctagtcagcttcttgtctgcccagcccgacccgacttagtgcagggcggcatggtgcagcagaagcgggcaagtgacttcccctccctggcctggccagagatcggaggaccaggctttatgctggaagtcccatggggcctcttccagaaagacctggatggtcaagaggcaaccctggcccaagctgggccttgagctcaagttggcttgatgccctagccgcctggttaataagaac

SEQ ID NO: 43811 - DNA, 212 bp, Mus musculus
  source 1..212: mol_type = other DNA
aggccctagccatagcggagcctgaagtccccacatcccgcccaacttcagtcagaatactgggggtggggggctccttcctttacgtagaggaggagacctaggacccgctgaccccgcccatccgcggggccgcagcgccccccagcggtcgagttggaagtgggaggcccctggcttggtcccctcccgttcagtcccgggccgcgcct

SEQ ID NO: 43812 - DNA, 409 bp, Mus musculus
  source 1..409: mol_type = other DNA
gccacagcccaaagccaatggcctgatgctcaggttggggcaggaagaacatgtgtccaccatggtgacgacacagtctcactgagtcctaggagtcactgtcacttacttttattattaatgatgctgaaatttgtaaccaagtttttgtattataatgactatacctttatctggagcccagatgttacatgtggttagtgttgacaacttggatttccataataaagatcgaaagatcaaatatcttttgcaagttaagtatttaagagaaagccacgtttgtggctcacaccattggaatgaaacaaccagaaatatttcctggaacttcttttgggaatcacagatgttctgagtggccaggagtgtcctggtgcctagcgagaggagagggcctttttctctt

SEQ ID NO: 43813 - DNA, 239 bp, Mus musculus
  source 1..239: mol_type = other DNA
agtacagtgaggcttcaggactcctttcttttctgctcacagtgaccagctgagccctctgatcttacataagtggcaatatgcacgatactaaaataggaattttctatgcacttgcaaatgtctccagtcacaaccccatagtcagtggctggggacccacctctcgggtgctggtgcccctccaagggtgtgcctgggcgatgtcacgcggttcccaccccaggccaatgggatgg

SEQ ID NO: 43814 - DNA, 403 bp, Mus musculus
  source 1..403: mol_type = other DNA
cttcaggaagccaggaagatgaccctgggctcctgggtatctaggcccaggactcagctcggaataagccggacaggtgtgcaggcccagaacctaaacacaagttctacagtctgggctgtgttggctttcaaaggctaaggctgtgggtccaactggtctgcagtctcccgctagctgcgtgtgccaaacacttgcagaggatgcaggccccgcagccttctggaggccccgccccaggcccggccctggccccgccccgtactgtccccgccccagtggggcccgacgctaaacggcttctagccggagagcgcccgctttctcaggccctgcccttgagcgggggcggggccagaggcggcggcacggagggggcgggtcctcgccgcgcgcagtgctt

SEQ ID NO: 43815 - DNA, 371 bp, Mus musculus
  source 1..371: mol_type = other DNA
cggcagtgccctgactgtcttctgcacgcagagcggtactttgaagcaacctccaggaattcctttccaaacacttgctgacctcctgtggccactgtggcccacagagaaaactagtggactcttggagggtctaaactggaatggtggccagcagccaggacttccgggtgttctccaatggaggccctaggatctggggcgcggtttccatgtccccgaggaccctggccaggcccccactcagcagctctaagttacacaagctggagttccgctgtgctcctggaggtgcagctcattcccttctgccagagggaagcggtgagggtggggacctggcaggccccacctccaggaccacaggagcc

SEQ ID NO: 43816 - DNA, 334 bp, Mus musculus
  source 1..334: mol_type = other DNA
gtagcagccagccccaagagcgcatgcatgcctgctgccaacttgtagccacatctctggccagaggtggcaagtccagaggggtgtggcccccatggggagactgggttctcacacctgggaccccagaggctggtttcagggagccccgccctctcccaacccaccagcagcctccacctgctgagcatcagctgaacatcccagacttctgtccctgttaacagtcaagtatcaatgccgggcgctcgtctcaagaggagccggacttctgcaggccagcaggggtcaggggcggacccggggaggggccttgcttggtcttaggccgggc

SEQ ID NO: 43817 - DNA, 243 bp, Mus musculus
  source 1..243: mol_type = other DNA
gctgtaccagcacagtacatccccagccctgtcgattttcttctttgacaataaactttatctccctaacagctttagatgttgcagggaaattatgaagacacgtcctcaggccctccctggaggcgatggcttctcattgagactgtactgttccagaatgttcccacacatgagcatagccagcccagctcagcactgggctatagaccttagcatcttctttagaagaaaatgtgaggg

SEQ ID NO: 43818 - DNA, 254 bp, Mus musculus
  source 1..254: mol_type = other DNA
gcatcagctgcagacttctgtccctgttaacagtcaagtatcaatgccgggcgctcgtctcaagaggagccggacttctgcaggccagcaggggtcaggggcggacccggggaggggccttgcttggtcttaggccgggcgcgatcagatcaagcgagacccggtcaagcgctggacgggtcaggctagcagacgcgccaccggtcgtccgctcctcagggcgtgcatgaaccccctgcctgggggcgtggtca

SEQ ID NO: 43819 - DNA, 163 bp, Mus musculus
  source 1..163: mol_type = other DNA
aggccaggaaggccatgcgtcacccctgggtgttacacctgcaggcagctcttggaggagatacccgtgggggtgcaccatggcaacgtgcacgggccctgcagtgggcatgaattaatgaatgcgggatggtagcttcaggactgcccacccctgccctagc

SEQ ID NO: 43820 - DNA, 700 bp, Mus musculus
  source 1..700: mol_type = other DNA
aaatctggtttataaattaaatctactgacagttcctaagctagaagtattcatccattcactgaaaaataacaacagtctcgttatattaacaaagattattttaaatgaaaaatatgcattttcaaaataaaaacagtgaaaaggataggatgataatattctgattaagcctcactgtgatattaaaaacggttctaaaactttatttaaggcttcgccaaagcaagattccttctacggaatatcactgccagccccggaagagcggccgcggctggaacttaagatcggcctcgggacagcgtgcctgaggtggccagagccgggctccacctacgctcccggaccttctggtagcgatctctcgggagtagacggccagctcagcccaaggccagggcgaccttcgccacgcagccttcgctcctgcagcctgcgtgcgcagccccggtcccgctgcccccagcccgctgccctcgctccgcccggccggcgtggacgcgcttaccgtctgcgggatgccgcccccgacaggatgtccgccgccgactggccaggccagaattcttctcctgaagccgagaccggccgccaggatgccgctgccagcagcaggcagacgacgctgagcgccgccatggccccggcggccacgcacttccggctgccgcgccccggtccggaagtgcgcctgtcc

SEQ ID NO: 43821 - DNA, 304 bp, Mus musculus
  source 1..304: mol_type = other DNA
aactgcttggcctgcagccttgctttctgttgctgtgataaaaacacttatcaagacgtcccggcatccaggatgctctctaccctagaagggaagaaggcagaaggcctctaccctggctgtgccttttccttaagcaatactgcactgggtgcacaggggctgttggacacggagccgaggcacgtctaacgcgctagcgggagcgcgcgacgtaagcaccgcaactgcgcacgcgctacgggaggcacttccggggaccggccgaacgccgatctacgcagccgcggctgctgtctgggag

SEQ ID NO: 43822 - DNA, 249 bp, Mus musculus
  source 1..249: mol_type = other DNA
ctggtgtaagccagctgagggtgccttagtgtctcatatcacacccctggcaggtgggggatcaggtgtgaccacccaagtctgcttatgtggtccatccatctcatccgggagagcatgaaatacaggcactagtggtaggtattagaaatttacggaacttctgaaatctgttgttgcatatgcatcctctctgcagaagaggcccttccactgctggcctgaaggagcttcaggactcctcagtct

SEQ ID NO: 43823 - DNA, 412 bp, Mus musculus
  source 1..412: mol_type = other DNA
agcagatgtggaccggctacaacactactccatctggcgaggaaccacacaagttgttgaccacatctttactagacctttttctttttaaacaaacgtggaaacatgaacttgaccctggggtctaggttaaaaaccggccatcatttctagtgaccaccagccagggccagctctcaaaactggacacaggatctctaggatccttggagaaccccgccccggtgcgtgtcggaggctcccttccgcttcgagtctaccctcgcagttcccgccgccgcgagcgagtccggacgtcggctccgggcaggaggcgcgcacgtcagcgtggagcgctggctccacccctgcaagcgagcacgcgcgcgcggctgcggcggctggggcggggcgagccgagggggcggagccg

SEQ ID NO: 43824 - DNA, 177 bp, Mus musculus
  source 1..177: mol_type = other DNA
ggttcagggctattaacaactatgtctttaaaaataaggaagaaaatctgccatgtttttctaccattgttgcggaaagaattaactgtttctcaacatgctatcaatggctgctgcttccaacggtgatacccacatgtgggccaatcagccaaatgtcactcaactcctcctggg

SEQ ID NO: 43825 - DNA, 345 bp, Mus musculus
  source 1..345: mol_type = other DNA
atcttaaaaaaaaaagacaaagactaggttttactttttgatgaaggactgttacagcatacagttcggaatctgtatgtaatactaagggtctgtacaagagctccgtggggcacctggtcctctgacctcgctgctccagcgctagaggccagtgctctgtcctctggctctgtcctgcaggaccagacctgcggccagccggcaacaggaatgcctggcgtcgtgatgctcaggtgactgcgctgaggacacgcccattccaggcgcgtgcgcaccgtgggtctggccgcgttgccgtagctactggagacgcgctccgtggggcggacaggcgcacttccg

SEQ ID NO: 43826 - DNA, 234 bp, Mus musculus
  source 1..234: mol_type = other DNA
cctcaagtcggctctgtgcacagttatgatggcgtgctatgccgctgctgcgccagattaaaatggtgacgctgccaccttccatttgtaagctactccttttagagaggaaacttagcattcgctgtttacactagaattaaccataaggcactctgttgaagacaggcttttaatgtagcccaggttggcttcaaactcactgatttttctaaaactgagttatacagattc

SEQ ID NO: 43827 - DNA, 493 bp, Mus musculus
  source 1..493: mol_type = other DNA
tagtgtccacaatagctttctgtgcctctcacccacccaagccacctagtggttactttgggactacgtaagttctggagagccatcttgggaatggcccttgtggaggctggtcgtgctggctttctgggccaacagaagccatcctctgtgtcctcaaaggatgccttttctagacatgagccctcctgtgacattcaaattaaaggccagaggcctgttccaggagtgtgtggtctgcagcctgcatataagtcttgcctccctgcgtggacgcgcagtcttgcacccacatccggggtctctgggcctaggaccttgagtcgcgcgtccccggggctctgcgcgcacccgggcgcctgacccgccccgtgacgcattcgcaaccgtcctgaatcgcggctggccagcgcgcacccgcggcgcggggcgcgcgcctcgtgcacgcgcccgaccacgtgactccgcgcgaccaaccagcgcgccgggattt

SEQ ID NO: 43828 - DNA, 461 bp, Mus musculus
  source 1..461: mol_type = other DNA
ccttctgccgcagcaccaggagtggagctggaacgcttcaagcctttcccttcagagttgcaacacttacagtacaaatggacataaagctggtgggctcaagcttgagtcgagaaacttgggatccagagtcccgaagagggtctcattggttaaggaagaccttgaacttcatgcattggttgccaggcaagcaattacaagttgagacagcttggatgctgttttaacgtaaatccacatctggcagtgtgttaggcagagcagctgagcctcagaacccgcctcagagtccagaagcttcgctgtccactgcccagcctagtagtctactacgcgctccctccccgcagttccagcagcgcgcaggcgtgctaagcctcagctgcgcccgtaggcgggcggaggtcagggggcggagccagcggctgcgcactcgcaagctccgcccgtctggctag

SEQ ID NO: 43829 - DNA, 378 bp, Mus musculus
  source 1..378: mol_type = other DNA
cacagtgtcaggctctgcctgcctttcctctggaacagctttaaggatggctccccccacaggggaattccccctcctcaaagccggccctcctggggacggtgtgggacccggcagggcaggagacgaacagaggatctgaccttccccctgctgcgtgttgggacctcgggggacactcgccccagctgagccccaagagagcaggaggtggaccgacagagcacctgtccctatcggtagctgcaggtctgccaaggtcacctgctcgagtcctgcacagcagcacgcggccgccaggaaaaactggttttctaagtttttccttcaggagggtgagttgtcacctgcgctcgggacccaagcccagcagggccc

SEQ ID NO: 43830 - DNA, 324 bp, Mus musculus
  source 1..324: mol_type = other DNA
taagtacactgtagctgtcttcagacaccagaaggcagtcagtgctcttaaccgctcccccttaatattcttttttaaaacgacaaatgtgatgaatctaatgcctcaaatcttttgatggcagttccgtatgaggatgggatatggcccgggaactttatccttcctttcctcaaaaaccaggtgtagtggcacggcggcgtaggaaccttctccgtcgacccgggccattacccggggagcgcgaggcgaaccccagcgagcctgtctgaagcacccgggtgcgccacgtcacccgcgcgcgccccggatgcatttgcgccc

SEQ ID NO: 43831 - DNA, 701 bp, Mus musculus
  source 1..701: mol_type = other DNA
gctggctttctgggccaacagaagccatcctctgtgtcctcaaaggatgccttttctagacatgagccctcctgtgacattcaaattaaaggccagaggcctgttccaggagtgtgtggtctgcagcctgcatataagtcttgcctccctgcgtggacgcgcagtcttgcacccacatccggggtctctgggcctaggaccttgagtcgcgcgtccccggggctctgcgcgcacccgggcgcctgacccgccccgtgacgcattcgcaaccgtcctgaatcgcggctggccagcgcgcacccgcggcgcggggcgcgcgcctcgtgcacgcgcccgaccacgtgactccgcgcgaccaaccagcgcgccgggatttaagcgcggccccgcgacagttgcggcgggagagcggcggggcagagagcgtgactcgcccgctccagtgccaccggttcccgctgcgcttgccgccgccgtcgctgcgcaaccatgtgccgcagcagattccgcggaacgcaggccgggccgcgcgcaaaaagggcccgcggggccgcgcccgagcctcagcgcccctcccccatgcactccgccccgggcagcgcgctagccccacccccggctgtgcctcccgccacaccaaggctccgcctccggggtagccccgccccgggtgtagccccgcccacggctcgagaacccgg

SEQ ID NO: 43832 - DNA, 250 bp, Mus musculus
  source 1..250: mol_type = other DNA
gggatcctacacacgtgtgtctaatgacagaacccatggacaatgcatggcgggtcccatggtccccggtgacttgcatgaaggtcctttagagaatcgccatagctcctcacaggtgccctgggatagaaaggcggcttggcctctgtcttgccatgtcaaacgcaagggcatccctcaaaacagctgcttcttaggtatgggcctgacccaatctttggcctatgccaacaacacactgtgtgcagag

SEQ ID NO: 43833 - DNA, 273 bp, Mus musculus
  source 1..273: mol_type = other DNA
ttcattcctgtcctttgcagcagagtctgggatgtcacagggagacaagaatatagcagtgcctctgttctatgtggcactgtggcctcactcaaatgtctgtgtcttcttgccagagaggcattcaaaacctacaggtaggacagggcctggagccttggcctcagcacaagttccagctgtggttttcctcaggacattgatgaatgagggcatgcacgggaggactgtcataaagaaatctgaacttcattgggcttggaatccaggtag

SEQ ID NO: 43834 - DNA, 188 bp, Mus musculus
  source 1..188: mol_type = other DNA
ggccatctggcaggggcagacccggggtactcctgggggggtctgcagcagcaggagcagcagcagtagcagccatgggcttacagtcatagatacacatgtatggttatacagacataaagagaggtgccctctatgaagtctttgtgggtatgtaaggattctcacacagggagaaagcccagacc

SEQ ID NO: 43835 - DNA, 278 bp, Mus musculus
  source 1..278: mol_type = other DNA
tttctgaccccccagcattagttaggagagaaagagattacttccttcaataccccaggtattgaatatcttcatcacccaagaattccaagtgtttgcagaaactgtctactcagctgctgtggacaatttgaacatgatacttgtgattaaagcaaaaacatattcctataatacttctgtgttttaaaagaaaccaaaattctcactacatttaagcacttatgcatattttctctctctctctctctctctcacacacacacacacacacccac

SEQ ID NO: 43836 - DNA, 303 bp, Mus musculus
  source 1..303: mol_type = other DNA
acatgggggtctgcagcagcagcagcagcagcagcagcagcagcagcagcagcagcagcagcagcagcagcagcagcattttcacagccttggtggtataggtggcacaggtgatacaggtggcacaggtggtacaggtagtaggcaccacaggtgaccatgtccatatgcgcgcgcgcgcatgcacacacacacacacacacacacacagagagagagagagagagagagagaaagagaaaatgtcctttatgaccttgcttctggggtatgtaaggattctcacgcagggagaactcccca

SEQ ID NO: 43837 - DNA, 205 bp, Mus musculus
  source 1..205: mol_type = other DNA
aagtctgctcatgtggcttcagagcagaataaggcctaaagctctaataaaatggaatttaaaagtcataactgcctaggtactacatcatgtgcagataacatggtaaattgtcacatgtcacatagacttgcaccaggtctactgaaaagttgttctgtgaagtgcagatactgagctccaggaactcggaggagatgtaatt

SEQ ID NO: 43838 - DNA, 263 bp, Mus musculus
  source 1..263: mol_type = other DNA
atgttcaaatgagactgtaagaatatttttagcagagctgctcactgtagttggaggacacaactccacaggtcactggcagaggtccagaggggtcttgagctgtagctatcacatataacacgtgaaaagcccacactgtgtggcacagaagccctactcagtgcagcaaaaggcttctgacagtgtgatggggccatcacctctctcctagcctcaggcaggctggaccacccttgaaggacccctggctggagcaacca

SEQ ID NO: 43839 - DNA, 599 bp, Mus musculus
  source 1..599: mol_type = other DNA
tcctctatgtgcatataatatgtatgtgtatgcataaacttgtctctacacgtacagagttcaacacaaactgttgatctctttagcttaattcaagaagttccttttatgtaaccctgtaaagaattgtctctttttaacagctaatagagttcttgttgtgtgactcaaaataacacacattgttatagcaaacctggctctgtggagctgtaccaaagctgagccaagccctgatgggtcctttgagcagatctctttcctgctcacatagctattgagacatttaagaccgagtgtcaattttcaagacatcagcatccctgcggcagctgctgcagtactgacccttgctacggggcatggcccgcccaggggcagggtctgcggcaatctgtcacagtcactatgctgagcctcagaggcgttctgcactgagaactgattctagaaacaagactcagaggtcccctgggacaacccatggctatctctgtgggatatttaacacacagcctctaaggttcctgtttgcaaagacgcatcttgtccagctcagggtggggccacccaatatactcaacatgtttacaaagact

SEQ ID NO: 43840 - DNA, 332 bp, Mus musculus
  source 1..332: mol_type = other DNA
gtcccctgacaagcagaccatcacgtactcaggtcacgtgaaccttctcccccatttaactggtcaataaaaagctagagcatatggcttataattataataactggattgttggaaattccagcaataccctgatttaagaaaaactgaggcagcagtactgcctccagaatcaacaaccacagagtagcatgttattgtaataagttgtggtgcaacaaacaatgggccatgggaaccatgtctgatggagtctatctttgtcacatggtggataaggatgtgccttggcccttctgtgaccactggcttgtgttgtctgggaacaagac

SEQ ID NO: 43841 - DNA, 228 bp, Mus musculus
  source 1..228: mol_type = other DNA
gttgtacaaaaccttgtgacaccggtgacaactgctgtacgcaggccactaggtgggctatgtccttatataaaatgctgacagtcctgggagccaggagacctggcagtccccttgaccactgacacccaaggtgaacgtcagtctccatggtgtgcgatggtgacaccccagttagccatacccttggggtaccctggctggccttcctccaaaacaagccaggaa

SEQ ID NO: 43842 - DNA, 307 bp, Mus musculus
  source 1..307: mol_type = other DNA
aattttcagtcaaaacttttatataaatacatgtaaatgactgctctttggtgtgtctgaagacagctacagtgtactcacatacattaaaataaataaataattcttaaaaaaaatagtgttaaacaaatccacatagttatccagcttcccacagccttaggcacaggactggacagtgtcacggcaggggccattagcctgccgctgtaccctctgagtgcgcctggagcaaatcgctcccctggcagtaattcttgctgaaggagtgagagtcctggcagccagccatggctgggtgacgtgc

SEQ ID NO: 43843 - DNA, 429 bp, Mus musculus
  source 1..429: mol_type = other DNA
acagtgtccctcttcatatgaacatgtcacatgtatatatgcacacatacacatgtgcatgcacacacaaacgtggtcaaggtaggccacctcagcacagctgcagtgtggttcctgaccacagaagccactggaccctggcgtggactgtgggagccagttaggaggctgccattgctgcttccctgagagcaagcatggactccataatgtcagagcaggtggcacaacctgggctggctggggagcctggggtctgagccaggtcccatggttgatctgaaccatctctctggagactccacagcccagttaccaggcagcctgggaggagtgctcctgcagagcaggcactgtctaggagacctccagggagcaccagagagtctgggaggacctctccaaaaggcaccatgggggaggacttcc

SEQ ID NO: 43844 - DNA, 382 bp, Mus musculus
  source 1..382: mol_type = other DNA
ataagagcctgttctctaaagagagttttataggtataagttaaagttaaacttctgactgtattttgtaagccttggctggcagaatgctaagcctaggctgaccactgtctgggtaccaagagggttcatgtagtggcctgtagccaaaaaaatgctttgagtgtacataacctcagctgaaagtaaactgtggcactgcagtcacttccatgaggcttcagggaaagcagagcctctggttctctcaaccaaacctcctgtcgaaggacagacagcaagttggtgatggccaaacacccgtgtcatgtttgcaatgccatgaagacaggattgggtagagcactatgttgtcacaaagtcagtgaccaaagccatttcc

SEQ ID NO: 43845 - DNA, 105 bp, Mus musculus
  source 1..105: mol_type = other DNA
ccactcaaaggaagactggggtcctcctgaggccggtggtgggaccttagacgctgctcagggcggggcttggccacgtggcacgcccacggacccttccactgg

SEQ ID NO: 43846 - DNA, 311 bp, Mus musculus
  source 1..311: mol_type = other DNA
gaaggaccttcaacagtacatgctgaatcagggtctggccaggcatgacttcctgggcattgtgtgacacacttggagggaccctgaggctgccccagtctttgaggagcacagctaagtggcgccctaggctgccgaagacaaggcatatacaaatcttttcctacactttgtggaggacgaagaggctgacccgcaagtggagcatctcaggaggcccagcacatgcttggctccacgttcttagttagttgcggctgccaagcaatcaggctgagtgacgcagagtgcggggcgggccatcaggctcg

SEQ ID NO: 43847 - DNA, 413 bp, Mus musculus
  source 1..413: mol_type = other DNA
aaacaaaacaaaaattcatttgtgattacttattcaaaaacataacgtctattttctatttgtttgtttgcaacccaagtgacctgtctggtgcgcaaggactatgagccagtcttgccagaaactggctcaggcaatcctccgcctcagcctctgagttacaagtgtcagtcatgtggattagctgttatgtaacacaaatccccgatttggggtcaagcaaaccggagggtttctgctggcagcaaagcccggagcctcgtgcatgcgcaggaccggcgggccgccaaaggggcggggcggaatcgcgtatcacggaagtcgggccgtcccgcttcgccggcgcgcttccgccctctcgcctgactgccaatgggacccaggctccgcccctagaaacgcgggccccgccc

SEQ ID NO: 43848 - DNA, 154 bp, Mus musculus
  source 1..154: mol_type = other DNA
tctggagggacttcaagaacctggagcccctacctgctttttaaggatgcccatcctggggcccaggataaggctgacacttaggtcaaaggtgaagcatcttgtctgcagctgcccctcttggtacccatgggtgaggcagacccacaggtgg

SEQ ID NO: 43849 - DNA, 192 bp, Mus musculus
  source 1..192: mol_type = other DNA
ggccactcgcctgaaccaggtttagcaaatcaccctgaagtaaaaatgctacgctaagggacgcggcttaggaattcattgctggccaagtgggatttacggcctggggaaccagggttccggaaccgctgcgcagacatttgtgcggcagctaccttctccagcagccactagaggggcgaccaggtcccc

SEQ ID NO: 43850 - DNA, 316 bp, Mus musculus
  source 1..316: mol_type = other DNA
gtctggacagccaggctgtggctagagcaatatttggtcaccacattcatgcagtgagatgctctggaaccggagttacaaaggagcccaagtgctctgcaagaggaacaagtgctcttaccactgtgtgtgtgcgtgtgcgtgcattctcgcttgcatatgtacatgtgtatggaatagtgaatatacaattgttcacctaacttcttttttaaaaaaattcagtttctcgtgtgaggcaggttctgctgggcagtctctagcccagctttcgaaagctgggccctgattggctctaggctaaacaacagcctct

SEQ ID NO: 43851 - DNA, 343 bp, Mus musculus
  source 1..343: mol_type = other DNA
ggattctctgagggtatcactgatgtggttgtgcctgcaatcattgattattgagtcggacaccaaaggttgaagcatgtgctcactgtgtgggcccccacaacctggcatctgggagcttcttgaggaggttcgaactccttccatcctgtacctagggctaacgggaaaccccgtgggcccacccacctgctgtcctattagggcctccccactctgtgggagggtgattcaaggcttttaaaaaaacaaaagattaatttattatttattataagtacactgtagctgtcttcaaaatgtctccttagcaagggaaagcattttaatttaactgaggtga

SEQ ID NO: 43852 - DNA, 85 bp, Mus musculus
  source 1..85: mol_type = other DNA
ccctatttctttgacactgagattccgacaagggacctggctgtcttccacagtacctattggtaccacgtcaacgttgtggacc

SEQ ID NO: 43853 - DNA, 369 bp, Mus musculus
  source 1..369: mol_type = other DNA
ccagcaaacacagaggccccgaaggtgctctgaatagctataagacttgatcaagctctcgttctcagagtctgagggtaacccacccgctttgtgggtccccagcctggctggttgtctaagcaagtcagcgagagcatgactcagaaatgccgagttttgcaacaaattacttcatatctgctgaaatgatcaagctgctagtccatagctgggaaattgcactgtcatgatagatccccactctggggacagagcccacatcggagcagcatgttggtggtctcccgaccagcatgggtcttggctggagccagcctgggtgtaataacaccccacccccccatgcctcacagtaggaggtaggga

SEQ ID NO: 43854 - DNA, 347 bp, Mus musculus
  source 1..347: mol_type = other DNA
aggctagccctcccgcattctcaattcactggcaggtggggcggggacacaggctcaacgcttatgaaccgttaaggctctcccagagtgcaagtcgaacaagagtggagcccgtcttctccttacggtctttggtcagccccaggtccgggctttgaaccttggttggcccaacgggggtgcagcggctgagtttcctgtcttcccacccggagccgctgctcagcagccgattgggttattcgggagcgggagagcggaggcggagctccccgcctccaacccccgctcggaggtggccggagggatgggccgagggcgggatcccgcctgtgcccaattagcca

SEQ ID NO: 43855 - DNA, 348 bp, Mus musculus
  source 1..348: mol_type = other DNA
gtgttgggccaccaaacgttcccatcttaagatgggaacacccagcagctaattatccctagccttcactggggagaggggtctaccgctcagctcagctcttcactgaatcgtgactggcacgttatttaaaatcagtttttagtcattgcatagactggaattgcaataggtagtcaccgcccagctcggtcggtcatgtccagccaccggtctcttaggtgagggggggcgtgtcctgagatctgtggcccctccctcccggtcggtcactgcgcaggcgcggccccacccactggccctcgtgttacgcgctcctccattggccaggcgcgaccccgccccacg

SEQ ID NO: 43856 - DNA, 468 bp, Mus musculus
  source 1..468: mol_type = other DNA
tagtgtgtctgaagacagtggcagtgtactcatttatttaaaaccctctgaaaacctattttatgtgcagtttaaaactaataaacagccctctgaactctgttttcggtaaacctttgacagttggcctgcactggcagaaaagcttccatctacggttttctaattatatatattaagaataaaacaaaggggagatctaaaatgttggtagttctgttatttctcatgaagacacctttctctgtaagagagttggcagccgcaccttgacactttcacagtgttctgtaacataatgtcagagtaataagatcgtttaaagtgtaagcattaaaattctaaaaatacacgttttaagaagaaactccgtttgaacttgggttttttagttcaccgctacgcagcgcctgcgtagaggcagggtgcggggcttcccaggacactagggttgcggctccgccccgg

SEQ ID NO: 43857 - DNA, 331 bp, Mus musculus
  source 1..331: mol_type = other DNA
aaatttgattttgacctatgtggtggttcatacggcacacttggcaagtccgtgttaacaggcaagcagagactcagcttggcactgcacagttgagccctttccgcgacaggtctgatgagaccaagcaagggtcaccaagctgctcaggcacgtgcgccgccctctgtcctctgcagctgcctgagaaccgaggcagaggcggctcccgctattgacagctacagcggccccgccctgcaccgccgggcggcccggcacgcggcctttttcgtaggagggcattcggcggcgaggcccgcccctttaagtcgcgcgccccggaagtggt

SEQ ID NO: 43858 - DNA, 402 bp, Mus musculus
  source 1..402: mol_type = other DNA
gctgcaggctacagtgttgagcctgagttgcatgctggacccatcagtcagccccttagccccagggctaaggaaccaggccttggtggttcctcacagggaaggcgtgttaagacactttcttgaagctggtctgccatcctgccttcctggaagctctcagccatgttgtgtgacatccggaccagttgttagcccaggcacaccccagtctccagccttgtctctgagtgacagcctaggggccccagactgggcctgtggccctcactgttgtctctctgcccagtatagagaggcaggttagctgcagctgcttcctgtgaactcaggcagagttcccaggtcagaagactgagccgtacttatagtgtgccctgagagcacagccttcctgtgagc

SEQ ID NO: 43859 - DNA, 411 bp, Mus musculus
  source 1..411: mol_type = other DNA
cagtgccctggtcacagggcctctccagtcaccaccccagggaagagctaattaggaacttctaaactatgactcagtaataaggagtaagaccaaaaagcacttgtttctcatcttacagcccagtgtctgcaccttgagaagcaggatccccttctaagagtgctccctggggcgggcagctgttctctgggccacagggactcattcccctaagaggccacgctgcggcttgtgaagcaccctctgtccttcactgggctgtggagaaaaggcattttctagataaggaccttttctgtgggcacacatggcaggagtctggctgggctcttactccaggccacaccggtccagaatcctgtcaggtgtgatcaggtgtcagggcctgggtccagctcctcccagcac

SEQ ID NO: 43860 - DNA, 535 bp, Mus musculus
  source 1..535: mol_type = other DNA
cttagagaagagggtcctgacttcttctgacccaaggctgaccctaggaagaccctggactaggtcagttgccaactaagcgatcctggtgccttaccaggcactggggacaatcctacaggattccaggatgggatccttaattaattggcggggaacccccaaatttccaggcgtccccaggaggacaacctgggcctagggaggcaacccaggaggactccagggaaccatcgggggtccaagtacggcccaggaacaccccgaagacttcagggggacaaggggatccaggctgggcccaggaacaccgcagtaccccaggggcccaggaacaccccagtgggactccggaggaccgcaggcccgctggccagggagggtggaggctgctcccgcggggcgcgcctcgcgtcccctcccccgcttgccgttggccgaggcggtcgccgctgcgccgcgggccgcgactcctcccccgcgcgtcggtccgcgcgtgtccccgcgtccccgcgcctggcgtcccgcgccggcg

SEQ ID NO: 43861 - DNA, 701 bp, Mus musculus
  source 1..701: mol_type = other DNA
gggcccaggaacaccccagtgggactccggaggaccgcaggcccgctggccagggagggtggaggctgctcccgcggggcgcgcctcgcgtcccctcccccgcttgccgttggccgaggcggtcgccgctgcgccgcgggccgcgactcctcccccgcgcgtcggtccgcgcgtgtccccgcgtccccgcgcctggcgtcccgcgccggcggaactgtgggatcgccgcgcacaggaagtggcggcggcgccgaggcggagggcggcgatgggggcccggggcggcgggcgccgcactcgctgaggccccgacgcagggccgggccgggcccaggccgcgcgcgcccgacgcgagaaccgcgaccagcaggtggagtgcaggtgagccgcgccgagcccggccgagccgccggaggtcgtcccccgcccgcggtcgccgggccccgccgcagtggccggctgcgctccgcggggcgcgcggcctggagagcgcggcgcctggaggctccgggtcccgcccggcccctgtgcggcctgcccggcccgccggtgctgtgcggggtgcgcggcggcctgcggggcccgacgagagggcctgggcggccttggggcccctctccggggggaaccttgctcggctcccggctcctcgctctgggggagccccccatgcctgattgagaccaaaggccgactgtgaa

SEQ ID NO: 43862 - DNA, 299 bp, Mus musculus
  source 1..299: mol_type = other DNA
tggtaccactaagtccactggtcttggaaatttcccccagcaagtcatcagacttctggtggtctgccaatgaaacctgtaattttgacatttcagctcttgggctatatggaaaaattttcccaatagtgtcccaaattgcacactcactgtgtgttacagttgaggacaagctgggccacatcacgatcttcttgtaatctcctccctgcagggtgcagttgcgcctctcggccactgagaggcggtagcgtacgccagcatcgtccaggacgtttgacgtcagtgtgacgttcagt

SEQ ID NO: 43863 - DNA, 375 bp, Mus musculus
  source 1..375: mol_type = other DNA
gattgcaggtgtataccatcatgtcctgctatccaactgtgacagttttgcaaacggaaactcggttgggtgtgtgagaatagagtctcacccagaatagaccacctacccagctctgtggggctggggctgggatccccaagccccgcctaccgcctgacaaggccatgtcattcaaaaagaatggaattcccagataagctcttatttcatggggttatccgaaggaggatagggaaaggacgtgaagcacgcccagcctgggtctcctgactctgcctggaacggagagcgagcgagagggtgcggcgccccgccccgtcgctctgtcacgtgctacgggtccgggggggcggagccaagccaggtctaggg

SEQ ID NO: 43864 - DNA, 195 bp, Mus musculus
  source 1..195: mol_type = other DNA
tgtgtagctgaagatagctacgtggtggcccacacctttaatcccttaaatacctgggtccatgcctgagcagaggcaccatttgttgccttactgtcacagaaaggccatcctggggatggcccaagagctccagcagctacaggcacatatgcagggaccaagtgcatcctgttgccctcagctgtgccccag

SEQ ID NO: 43865 - DNA, 349 bp, Mus musculus
  source 1..349: mol_type = other DNA
aagcaattaattattcctccaatgtacggccttggtatgcaccccaccaacggagcgcaatgggaatgttcctttctcttcagagcagatggcctgtgccactgatctgtgaccctggtgtgtccgtgaccacaggagtcttgagggcacgtgactcctgactcagggtagcctgagatcagatgcctgtgagccctactgggtctgggattccacgcaggccgcgtggctggaaaggatctcggctctggagcgcccggaggggcggggcctgcgtgaggcaccgccttcagcccgcccctcgccgcgcgggactcgcgggttagcagccggcctgttgaggctgcgc

SEQ ID NO: 43866 - DNA, 272 bp, Mus musculus
  source 1..272: mol_type = other DNA
tggggggtgtgtcacagtccacgcccgtggaacgtgccgcgagatggttcataaacgtctctttcggatagctttttcagcgagactccagtttggcgcacgcgcgtctcgttgaactacggggcgctgcagagccaactgcagtcagggacctttcctataggcaaaggtcatatgggggagcgtaccctaggctgcgcgatcgtaagcgcgaggcgggctctccgctgagccccagtccagcgttgagcctcggcgtggctttaagtcca

SEQ ID NO: 43867 - DNA, 290 bp, Mus musculus
  source 1..290: mol_type = other DNA
cctgaactttagttgtgccacagttcatgtgtaataggctagtcatggtgaaaggagcctatcggcggagttggccttcagaagcataataaaaagtaaacttaagttgtaagaatcagcccaaacctaagattttactttagaagtttcagtactaaagctgtgttctcgactgagtagagatcagcagactgatgttcctgacagtgagcatcccggctgttggggggcccagcctatgcggaatgcgcttcctgctggggggggggggtaggcgggcggggcgggcg

SEQ ID NO: 43868 - DNA, 336 bp, Mus musculus
  source 1..336: mol_type = other DNA
ttggtatgtgtggtatgcaattaataaccaatataaatggaataaaaattactttaagatgcatggctgagatgtctcatcagagtttttcataaccttagcactgttacaaacaggagggcaagcatagttcctggttcaatgagagatcctgccagtctttgaaagatgaagagttcctggccctactcgagtttatctcatgaaacctgtcagcacagccttgagcctaggcttcaaaatgggagagacaatgctaatgtctcctgaggactcctgaggactggaggatctcatcaagggtgtctctcttgtcacgaggtgtcttggtgacag

SEQ ID NO: 43869 - DNA, 537 bp, Mus musculus
  source 1..537: mol_type = other DNA
atgttgccatcaacaacgaacatcgattgactacactacagtacatgtttgtattgtgaccacgtaagttctaggaatgaaactcaggttgccagccttgccctgcaagcaaagaggctcagttctcagactggaatcagtgtcaacctggaggaagatgccagctccacagtgtcgcagatacgctgcagattgcatgctgcgccttgtttcagcgaggaggccaggagctgggcagcgagcccacgtggtggctgtggtcacccgaccctgcctcagacccacgctgaggatgtgggcgctctcccagcggtaacagggctgggtaccccaacatcccaggaggcctgctggcctcggaggactcgggaggggcagggggcgggctcggaggcgcggctcggcgcgggggcggaggctgtgcgggagaggccggtcaccccgcccgccccgcgtcccggagctcctgagcagctgcggcagggggacatccccgagggggtcccgccccccgccccggccccgcgccccccgcac

SEQ ID NO: 43870 - DNA, 406 bp, Mus musculus
  source 1..406: mol_type = other DNA
aggtggccaggtcaacttttagcatacccagtgctgagattacaatctcaccaccgggtcagcctgcgttttcatgtaggttctggaaatcaaattcagatgttgtattgtacatttatatatttttattatttaattcaagttctcagaagagctatatgtgctcttaattgattgttcatttcaggagtataaaaacacaagatggctcagtatgattccgggacccctcatgatgagtacatacaccctgtggtggtgtacacacacaaatatatgtatatggtattcatgtatacttcaaaactactaatattagtactagtttgtgaattccttaggattttccaaatgcaagtctactagtagatatactccctcaaggaatacagtctgaatttccagg

SEQ ID NO: 43871 - DNA, 420 bp, Mus musculus
  source 1..420: mol_type = other DNA
caggtatccaaaattgctatctgcaaagaaattaagatttttcagaacagtttggaatttggtcaaaaataatttgcatgcatgtggcggctcaatacgtgttcaatttttttcttctataaagagaaataaattatgccatcattgttattatagtgaatttgatttttttttttaaagctgacacttctcagaatacatatatgtgcatacctaaataattaaccaatttttcagttctgttgaagcttagagttgggaaaacacagtttaaaactgtcatgatgtgatttccatttgtgaataagatatatatatatatatatatatatatatatatatatatatatatattcagccgtaagtccataaatcctgagcagccctgcctgacaacatctgtgaggcgggccttcgctg

SEQ ID NO: 43872 - DNA, 375 bp, Mus musculus
  source 1..375: mol_type = other DNA
gtggcctccgtggaggcgaggcttcacgctgtggcttggctcccaagtgtccctggcccagggtctcaggacaccccctgaacagggtaggctgggtcccacccatcatagtctctagagtggatacagcctgtgttaaggcatgatcctgaggtcactgtgtccagcacaggtgccctcctctggaaaagtgttggggacacctgggtgacctccagcctacagtcttgagttctggtggcccctcccagctggaagactcctttctgcatggagaccccagtcaacgttctcagccctgagattctcggatcccagcttggagatccctcccaaatagggggcccctgcccctgcgcgcccgggtcaaggtgg

SEQ ID NO: 43873 - DNA, 277 bp, Mus musculus
  source 1..277: mol_type = other DNA
tgtcttcaagggaagacatcctgagggaagctcaggactcctgatgcttccgctcagcgagcggtctctacacacaccactgcttggcccacaccaccgtgctgcatttctgaaagcaggagcaccctgttccaggaatgcagctgctgcagtgacactggagccttggccagtgttgtgtctaggcccacagtcagtgtgctgccacttaccctgggctccctggtgtccagtggggttacaagtgtatccttctacatctgctctcacccgagcc

SEQ ID NO: 43874 - DNA, 236 bp, Mus musculus
  source 1..236: mol_type = other DNA
tagcttggtttcttgaggcagggtctcgctccatctcatgcctcagcctcctgggcactggagttacaagtatggtggtgccttcacctcccagcttggtcctggccccagagggaaggaagcttgtgtagaccagaggccttcacctctgcaagccctgacagcgaaagttggacacacaggaatcagctgattggctgatgtacgggagcgcgcggcaccgcatccggggaccc

SEQ ID NO: 43875 - DNA, 424 bp, Mus musculus
  source 1..424: mol_type = other DNA
agcagatattggaaagtactggccacgggggaaggtctccctttaatccttccagccaggctggtctcagatgacagtcaaggttagccagcacgtgtcagaggttgggtatcacccctactcttgtaaaagcagtgagagtagagatggagtctctccagccataatgggggtgtgttggcagtgccctctgtcacagccatcatctcattgtaagatgcaaggtggtatattcggaaggtacttccttatataatccctgtggcagaggccaggaagcagagatgtggtttctttcttgtggctcttttaaagggaaaagaaaaaattctagcctgggctacatagtgagaccctgtcgcctcttgtctcggtggagtcctgagctgtgcacctcagacttagctccaacactgggatggaa

SEQ ID NO: 43876 - DNA, 339 bp, Mus musculus
  source 1..339: mol_type = other DNA
gtcactaggatagccatcagacaaacccagccaacagtgaccaggcctttctctgggtgggttgttattgggactcagttcccaattccaatcattagagttattattattggttgtacagctagactcagctggattctgggtcttgcccaggaccacagaggcaatgccccatccaccctgtaccaggcaggtggttcagtgctaccaaccctgcccctggctggacagctccgcatgcagtccccgccagttcgggaggccccgcccctcgcggattgcgaggacgcgggcgcgcggccgcaatcggaggaatacggcttggtgggcggtttcccg

SEQ ID NO: 43877 - DNA, 418 bp, Mus musculus
  source 1..418: mol_type = other DNA
tccgagggactctgagaatcttaaaggagggagctcttactggaagaaatatctgagtttcattctgcggcaaaggtgaaaacaggattttcctgctgtcctcagccctgcctcagggcctttgcagagtaccagaacaatctattaaatttattgtttagccgccactctgaacagaatctgggatgtatcaggtgctcagtacatccaatgagcacccgactgagttggggacatgccgtccacaaccctgggctctagggcctgctctggccccgtggcccagctcagccgactccctggggacctgttcggctgatactacagctagctccacttccaggccagcgtccggccgaccagcttggctctggccaggccctgagtgtggtgaggccaggcttctgccaacaccagc

SEQ ID NO: 43878 - DNA, 371 bp, Mus musculus
  source 1..371: mol_type = other DNA
ggatgtcctttgcttacaatggtcacctttagacttctccagacgcagcgccacccgcggtgtcttttggagggggtaccctctgagtctgaggttctcttgtcctggaccccagcctgtgcactggcccaggccctattcacactgagcaaacccgaagccaggcctcagtttctcaacttagatcaggccttagtttctctatttagaagaaaagaagggaggactggacattccctcggggagccccggcaggctgcgctaggtcggaggcggcgctgccagaacagggtcggggtcccaggagtgtagccccccgcggctgcgcgctgcgcggagcggtgacatcactcggcggggaggagcgcacg

SEQ ID NO: 43879 - DNA, 345 bp, Mus musculus
  source 1..345: mol_type = other DNA
gcattcttgatgaaagagacagttgtacatcgtggaaaatgagtgcattccacctcctcaggatgcactaagcatacagaactgttctgggctactgtgaccacaggtcacggttcctatgtgggaagtgtgacacgtgttccaggacaggaatatcagggagccacctaccatctcagctgggtgcctgggtgcccgggactctgaccctgctcagtcttaccaagtttcctggcaaggtccatgggaccccaggctctgtcaggcctgcaagtggcggccacctggggcctggaacgggaaagccccctgggaaagtcccacagtaggaagctgccggcccat

SEQ ID NO: 43880 - DNA, 243 bp, Mus musculus
  source 1..243: mol_type = other DNA
tttctgcctgctggcccagagctaaataaaagccccgataggaaggctttgtacatcacctatccctactgggaaaaacggtttgaactccgctttcagatctggtacccagggtgcctggttgctaggagaccatgcagacttgcccactaccatgaagtctggaatttctcagagaggggggccgctgcctctgcccttaagagggaaggcgcctcatcgcgccgtgaattatggcggcgc

SEQ ID NO: 43881 - DNA, 531 bp, Mus musculus
  source 1..531: mol_type = other DNA
ggatgtcggagcacctgtggtgggagctgccctcacagtcagggtgagtggacctcaaggtcagtctgaaggggttcagactccacctcctggaagccacgtgctgggaaacaggggcggatcctgctccgctcccgcacaaggcagctgccactccgcagcgcgcagcccggccctgccggccaccccgcacacaggcatccgcggagctcttccggccggaggcgacggcggcctccggagcttcggaaacgcaaggcgcctgcgcggcagggcgggggacgacgactacacttcccggtgtgccccgcgggcgggcgcgcagacacattccggacccggtggaggcgtcgcacaggcgcattctagacccggcagtggcgcgcaggtgcatttccggcccggcagcagcggcgcgcagccgcactctaggcccgggtgtggcacgcaagcgctttcggggcccgaaggaggcacgcaggcgcattcggggtcgggagccggtgcgcaggcgcattcgaggcccggcgg

SEQ ID NO: 43882 - DNA, 601 bp, Mus musculus
  source 1..601: mol_type = other DNA
acctcaaggtcagtctgaaggggttcagactccacctcctggaagccacgtgctgggaaacaggggcggatcctgctccgctcccgcacaaggcagctgccactccgcagcgcgcagcccggccctgccggccaccccgcacacaggcatccgcggagctcttccggccggaggcgacggcggcctccggagcttcggaaacgcaaggcgcctgcgcggcagggcgggggacgacgactacacttcccggtgtgccccgcgggcgggcgcgcagacacattccggacccggtggaggcgtcgcacaggcgcattctagacccggcagtggcgcgcaggtgcatttccggcccggcagcagcggcgcgcagccgcactctaggcccgggtgtggcacgcaagcgctttcggggcccgaaggaggcacgcaggcgcattcggggtcgggagccggtgcgcaggcgcattcgaggcccggcggctgcggcgcgcaggcgcgttaggcgcgggccgggccgggccgaagcgagcgccgggcgggcagcggcgccagagcgagtggagccttcggggtccccgggtggcggcggcggcggcggtgc

SEQ ID NO: 43883 - DNA, 341 bp, Mus musculus
  source 1..341: mol_type = other DNA
tgacagctgcccactgccacagtggctgaaagccagccttccagtaagacatagccagccagccaggcgtggtggcacatgcctttaatcccagcactctggaggcagaggcaggcgttcccagcagccagggctatacagagaaaaggcctgagttcgaggccagcctggtctacaaagtgagttccaggacagccagggctatacagagaactaaataaatagatccatcttgattggccgcagctctcaaggaacctgaggcatgtagatctctacctgacctagtacatagtaagatcttatcttaaagccaaaagggatagctagcttcagcaaag

SEQ ID NO: 43884 - DNA, 563 bp, Mus musculus
  source 1..563: mol_type = other DNA
cccgtgtgggcctcaggcgacagactacctcaccgaggttccatgtgtgggttttcctcggctttggagaagagctgtggtgcacaagcctgggaggctggggaccgactgcctggtggggagccagagactccagcccagcccggacgccggtggcactcggtactgagggccacctgggtagcccggccaaggccgtgggatgggcacaggggccccaggcccagaagcaacttgctgcctgcagatcccaccttcgcctccatcctgcagtcagaaggcctgggtcctgaggcgtgcagaggactagtatcccagcagtccttgtgtcctgggcacttgccctgggaactccagtgcctgcctgaggagtccctgtggcaggcagcctggtgactccccacactctgaccacatcatgctgtgcagggtggctacagtgacccagtgctgaaagaaaggaaaagaaagtgtcactttcattgcgtggctctccagagttccagtctccagaacaaagctgtactctactgaatagcacttcatggaacctgtgctgctta

SEQ ID NO: 43885 - DNA, 416 bp, Mus musculus
  source 1..416: mol_type = other DNA
ggtcccaagagtctctgagtccactctttggtgaagaagggtgtgtcacctggctccagcctcaggccacagccttgccaatgtctccccggacctggggtaaagggagaagtcgccagaagccacaggagtcttgctactgttttgagaacccagaatgatctcagccccccgaggggtgagcgtcagcggttgccccgcccgcggtgtcctcgagatcgcggaggaaccccagagtggaccagggcttggtctgtcaaggcaggggcccgccggctgggctctgtgcagtttccccctggggaaccgagcctgagcgggggctgaccttgagccttccccatccatccctgtgtggggtgagggtggttcaggtggaggcggggctcccgcccccgcccctcccccgcaagcac

SEQ ID NO: 43886 - DNA, 374 bp, Mus musculus
  source 1..374: mol_type = other DNA
atatgtgctgccgaagcgagcacaaataaatacatttttgcttagtctagaactggctacgtagctagagcccaagcgcctcgcctctcaaatattttgaaaaggacagccccctgtgggagagcacgagcgaggcgagagcgcgcgcgcgcgagctcaagggcagtccaggctccaggccccaccccctcgagggtgtggcctgtgtggtcacgtgccaacgcttctccacccgctccgctcctgtagcgcgagcgggagcggcggacgctgggtacgtgcctactccctgtgtgcctggcgccccgccctgcgacgccgcgtgcgtgcgtacgtgcgtgcctgcgtgcgcgcgccccgcccttcttatagag

SEQ ID NO: 43887 - DNA, 300 bp, Mus musculus
  source 1..300: mol_type = other DNA
gtactgagaaaatgagcccaggtcctgtcttctcaggagaattagcctggaaaatttagtgagattctgtgatagcacatatctgtcatccggcacttcctgagaggaggcaggaggatcaggaattcaccttatacatgtaaaatgaatgaaatcgcgatgtggtactatcgttgagttcaagggaatcctgttaaattccaggacagagactttgtgccaaaaatgtgcatatagtacataatatatacacatatgtaaatgttacgcacatatatatgaacaaataagagctccctg

SEQ ID NO: 43888 - DNA, 166 bp, Mus musculus
  source 1..166: mol_type = other DNA
aggcgataaaacaaaaacacattcttgtaatatttctgtgttttaaaaagaaaccaaatttccaaaattgtcactacaattgacaccttttgtggagtcgaggccccgcccccacgcgtccattggacggcagctgccctaaccccgcccccgaccgtgcagctgg

SEQ ID NO: 43889 - DNA, 231 bp, Mus musculus
  source 1..231: mol_type = other DNA
atcctcgttgccaaggagacggcccccgcaagcttggagctccgcctccaggcccatggaaacccggccccgccctgcgcaggctcagcctgcggaccctaatcccgggcccccacgaaggccccgccctttggtcgcggaggcttccggcgaaggagactaggctccgccgcttcgcgccccccgcagcgcgttgcccgcgtttctccgcgagccccacgcctgccgtgc

SEQ ID NO: 43890 - DNA, 453 bp, Mus musculus
  source 1..453: mol_type = other DNA
ccagaagacatcaggtgtcccctcaactcaggtcttcctgtctcctcaggtagcccaggctagccttgaattccctgtgtagtttcctgagagctggaatggcaggtgtgcaccatcccttgccgagctgggggagcactctagctcccacggagctagctacagacaacctcaactttagtttgatgcactctgaagccctaggcccaggtggggcttctcacccagagatccccaaaggaacactggacacctggaggtgtccacctcccaggacatgccctccgggccacactttgtgacctgaccaactgtctggttcccagatgggacacggcctgcccccggtggccacccccgcgcaggcccgggccctgcgcctcggggacacgtccgtcccgctgcgccccgccccgcccgccgccggccccgcccgccctgggcttttatagg

SEQ ID NO: 43891 - DNA, 375 bp, Mus musculus
  source 1..375: mol_type = other DNA
ggtacccaggtgtaaccctgaaatgtaggtctctccagatcctggataatcaagacaagtttgagtagcctaggctacttgaggccaactcaacagtttccatgcctctttggggaggtcctagtagaaaccagtaatggatgcatccagtaattgtgcatcacggtgcacctggactccagagcactcgtgcgagtgcggccccggcaaggcgtgccgcatgctggggggccgtccacactgcgagtgccaggtctgcggctctgatggcgccacctaccgggacgaatgcgaactgcgcaccgcgcgctgtcgcggacacccagacttgcgcgtcatgtaccgcggccgctgtcaaagtaagagctgtgaccg

SEQ ID NO: 43892 - DNA, 391 bp, Mus musculus
  source 1..391: mol_type = other DNA
taagtgaacacaaaccacctggccaacaatgctggcagtgttagtctacataatttcaaaagaactcactctccctgcgctgccccaaggcccagtgagtggcactctctgagggagacaggccctatgtctttcttactgtggctctccagtgccctgggaacaaagtctggctggtatccagccattggcccaggctgggcctcgtgcaggaactgaaccccctcaagagctgctgctgtggctctctcgcgggtcgggggtccgacttggggccctaaactatatcaggactcctttcattccatggagaactcagggtgactgcagctgcgcggtgcggagcgtctgcggccagcaggaggcgcgcgcgggcgcgagggatacaggg

SEQ ID NO: 43893 - DNA, 414 bp, Mus musculus
  source 1..414: mol_type = other DNA
agctgtctgggaccactgtgcaccctgagttcacccaagccccttaggtacctaccatttgcatcagccctggggtgggtcctacaggccaactagggcatagcctgtagcagacttaattaaagctgcagcatctgcgcccagccagtgtgtgctctgggcacaacctaggggaagcttatgttcccaccttacgtgcgtattgaattagaggccagataactgaactacatatcctgatgggtggtctctggactccagaccttagcttccaaggaagtatggtattatggtcctcactgacctcaggttcatgatggggaaactgtgctcctgggctacctgggacagacagtgtccccagtttgagctcacaaaccaatcttgtttctactggactgaaccgttgggtgc

SEQ ID NO: 43894 - DNA, 367 bp, Mus musculus
  source 1..367: mol_type = other DNA
gggcacctgtggatcccctcccataggtaggttggccaacatacccccataccctagaagtcagtgggtatgtctgccatgctccacacacactttgggtgggagtaagggacccccccccatctgccacctggcctgacgggagcctggcagagggtcaccaaccttcgggccactttggtccccaccacgcctggtctaggtccctttccttgggaccccagcctggtgtgcagcagggtgcagggcctcctgcgggccccgtcactacccgcagctacagtaggggctcaagcagaggccacggggtctgtgtcctgtccttcccgtggcctggaggagaggcgcaaacctgagccaaggcccc

SEQ ID NO: 43895 - DNA, 443 bp, Mus musculus
  source 1..443: mol_type = other DNA
agggcggaggagaaacttttcccccttgcctggctttttttttttttttagcagataaccaggcagacaagattgggagtcctaccacccaggactggaaggcagaatcctggctgctggggtgaaggtacaagagggcggagtttcgtccctccaggaaccagccacaccatctgcgacacagtctagtcgcgactgcgagcacgtggcctccacctcgttgcgatctagtccaggcccgcttctaagatggcgaagcagcttgctttactctcacgttggaggtgcctgcttgcaatatggaggcaacctccagcgtcccacgtccgtcttgactgacggccgtcccgcccaacagctgtctcctggcgggggcaggcggggttgaccacgcccacagaccgcagcgggtgaggatcgcgcgcgggggacgttgcgggcgt

SEQ ID NO: 43896 - DNA, 390 bp, Mus musculus
  source 1..390: mol_type = other DNA
ttttcaaagaatcttttgtcctgtctgtcatctcagaggctgaggcaggagggcttacggatgccaggccggcgcccaggcccacccgcccctccaatggggggccctggaggcctcctccggacacctccccccaggcgggaagggcgggcgcgttcggcacaggtccgcgcgcgtgcccgcaccagggcgcgcgccctactacgcgcgcgcacccggggtcgcatgcggcgtgcgaagcgacattgctcggggcacagggcgagccggccggattggagcacggcaggcgggaaggatcgcagcggccgagccgctccgagtgagcgcgtctcaccggagggagcgcgcgtgcacgcggagggcgggagggggctgggttcctccgga

SEQ ID NO: 43897 - DNA, 401 bp, Mus musculus
  source 1..401: mol_type = other DNA
gggcccctggagtccagctgggggaccacgcccaggccccacacacaggccgtgggctgccagaggggtatggagaggtctcactctgtagccaaagtcctgagtactggggtcgtttcatatgaaattttctgtgaatgtgacagggggttggggaggaaccagccggaagcccccccaggccctgagtttcccagcctgcctggatcaacccaggcttgcaccccgcctcagtcagcaggaggcagaggctcagttccggctttgtagggccaaggcctgcagcgggcacggtgcccgccctcgtcagactgagaggaggggcccacctgctcctgggtggggcctctgtccccttagcaacatgtggccggggcggagcccgggggcctttcctgcag

SEQ ID NO: 43898 - DNA, 477 bp, Mus musculus
  source 1..477: mol_type = other DNA
agggcagagggtcctcacgcctgcagcacaagtgaagacagagtctcactgtgtccaggcagactcagcactcagctttcaacagagagttgcagggtctgtaagtccttcccagtgggtattaggtgctcagcagacatcttagggcctcagtttgtcccatccaggatggggtgctctgtggagaggaggagagaaggtagaggacagcccctccaccccgagccgcgggcacggaaggcgtgggggccgaggaatcggcgacaggcaactggaggcgcggggcgcgggatctcgccttccccacactgcgccgcgcgctcctaggtcccggagcgtgctcgcgcaaggcggggacgagacccagattgcggtccccgcgcagggccagagaccctgagacccgcagagtgggaggcggaggcgcccaagccgggggcggggttggggcggggccgagcgggctgcagagcgcgc

SEQ ID NO: 43899 - DNA, 355 bp, Mus musculus
  source 1..355: mol_type = other DNA
cttggtccctgagaccaacagggcagagggtcctcacgcctgcagcacaagtgaagacagagtctcactgtgtccaggcagactcagcactcagctttcaacagagagttgcagggtctgtaagtccttcccagtgggtattaggtgctcagcagacatcttagggcctcagtttgtcccatccaggatggggtgctctgtggagaggaggagagaaggtagaggacagcccctccaccccgagccgcgggcacggaaggcgtgggggccgaggaatcggcgacaggcaactggaggcgcggggcgcgggatctcgccttccccacactgcgccgcgcgctcctaggtcccggag

SEQ ID NO: 43900 - DNA, 282 bp, Mus musculus
  source 1..282: mol_type = other DNA
tccacagcggagacctcctgcctcaatatactctatgcatgtgcatccacacatgcctatgcaggattaaaaaatttaagatatataaattaaaaagaaataaaacacacaatatatatatttatatgaaagttcatggctagccagggttacatgcaaccctgtttaccaaagtaaaatctaggcaggttattaggaccctcagcacgctctgggtggcagagggcttcctgtgcctccagagagaccagcctttagccactgttcaacggctcccggcag

SEQ ID NO: 43901 - DNA, 306 bp, Mus musculus
  source 1..306: mol_type = other DNA
ttcttactgtcaccctggaccacagtgtgaagactgtggctctcatggctggaacccttcaggctgcatggcgcagtccaggcctccaagattgtaggtgggcacgaggctcggccccactctcagctgagcaggttccctgggagccacttctgtggtggcaccctgatccaccgtgctgacagccgcccactgcctgcaggacatgtgctgaactgtctctcaacctctagaattccccactgcctagaatcccccagtgagcgactaggggggagccccacctggattcctcccagagggcgt

SEQ ID NO: 43902 - DNA, 375 bp, Mus musculus
  source 1..375: mol_type = other DNA
tgcacacacacagaaactcttttataggtatgtgttgctgttattactatacctgaggtaaactgaacggaggtgctcaccatcatcccagcactcacgtttatatatttatttacttatttaattttgacctgtagaccaggctggcctcgaactcagaaatctgcctgcctttttttttttttttttttttgagatcccatttttaaaaaaaagaaaagaagagcctggtttcagggcagccagggctatacagagaaaccctgaaaaaaaaagaagatggatgtctgctgagttttcattggtattcgcagtgctgacccctgaggggcacacatctctccatgacacccccactgtcgtgtcccagggagg

SEQ ID NO: 43903 - DNA, 443 bp, Mus musculus
  source 1..443: mol_type = other DNA
tcactatgtagaccaggctggcctagagaactcagaccacccaggtggcttctgattataatgacagtcctggggcgctgagctgagcctgggctcagccaaacaagactttgattggcatgagggtctgattttatagtcaaggtccccataaccggtgaggacagaggctgcgcctggatcaagccagctgaggtgtgagggagttaagtgcccttcccccactgtcaagcaaccttctctccaaattgaaggcagaaagaggtgttactaaccgacctcctgctgctctccaggacaacaggtggtccatcctctgctccttgagagtgggcgcaggagggagaggagggtttgccctgccccctgcacctcacaggttcacatcatctgtcccagaagggctgccccttccctagttggttttctgcccaccaggcaag

SEQ ID NO: 43904 - DNA, 339 bp, Mus musculus
  source 1..339: mol_type = other DNA
catggtgactgggccatgtggtagacaggtctcattgttggacacctctgaatcctagcactcaggagccagaggcatagccgagcaaaatggttaagcacgttaaggtgcttgccgccaagcttgatgatctgagagcaaggaggaacaaaatatgaatttgcgtgtatttatagtctcaaaacacacaattactttacagttctgttttttaaaataataatttagtatttgtatctcttatagaaatccataaaatgtagctagtattaaaaagaacagattatctgtcttttatcgcacattaagcctctatagttactaggaaatattatatgc

SEQ ID NO: 43905 - DNA, 397 bp, Mus musculus
  source 1..397: mol_type = other DNA
tttacagcctggggactctgagggtgagactgagaggggtcttttgttttaattaattagttgattaatcaaccaagtgtaatagtttaaaagcacgtggctttcctaggctgggcacctgccactccaccccaattaggttttgtggctgaggctgggctggaactccactgatcttgctgcctcagcctctagctcagccagacagctgttcgcggggctcgcatacccctcccgcagtcgccccggggctggtgtgccccaccgtctcctcccgggtggctcagactttgtcctcagccagcacgtcctggtgggtgacaccgaggcagagcttctagcccagcaaccgcggctgttcctagactgtccccgccccgggccgctgcagactccg

SEQ ID NO: 43906 - DNA, 80 bp, Mus musculus
  source 1..80: mol_type = other DNA
tttgaaatgtaaatgaccggccagggactccccagtctttcctggatctaggaggcgctatggccgttctagtcggccag

SEQ ID NO: 43907 - DNA, 363 bp, Mus musculus
  source 1..363: mol_type = other DNA
ggccaggggccaaggcagcgcttggcccgcaaatccagcggggatcacagagagtgggagtacccctggctgctgctctcccgtccagcggggtagaaggggaatcagagagccctctcaggaggctcctgcatctgcggcccaacctggggaggaggaggagaccccagcctagggaggaggagactagctgccgaccccagcccggggaggaggaaggggccccggaaagaggtccagccccgcggccctgctcacagcctggtctccccgctcggggtagcctagagccaccatggcctgcagccgctgttgcagcccggccggaggccgcgaaggaagtgacgcgcggggcggagtctg

SEQ ID NO: 43908 - DNA, 296 bp, Mus musculus
  source 1..296: mol_type = other DNA
gaggctggcctgcactgggggggtgggttggaaacccacctcccaatggctcacaccgggagtacagaaggctatcgatcaccagttgtcagtgttcttcattgagcacatggctgggctatgagggcccttcctaagcaggcaggcacctcttagagtcagacagggtttctctgtgtagccctggctaccaggctggcctcgaactcagcctgcctctgccaccagagtgctgggattaaaggtgtgcaccgcccccccaccaaagcctgccacactctggggatggctgagga

SEQ ID NO: 43909 - DNA, 494 bp, Mus musculus
  source 1..494: mol_type = other DNA
ggtgtgcaggcccagctccaccccgaaggcgcagttcgctgccacctgcaactttcttagccttgcaggctaaggttccaagcaactgctgcagtctcagattctagggaggattccgggaacttggattggccggagccaccccatctctcctttcccagcctgcaaaatgggggtagaccgaggcaggggcttcactgagttggttaaggacgcgcgcgcacccggtgcttttgcgcacgcagcgccctcaggcccggaaggttagggtagcatagtgggcggaggttccagctccaagcttggctccgggtgaaaccaggaaacggccgggggcccagcccgcgatggggctctcgcagccccgccctcccgctcgcggcctctgcgccgtgggctgcggcgtgcactttgcgcacggtccctaagatgggggcggagcgtccctcagtccggttcccccttccttttattatttattatcatttaaaggg

SEQ ID NO: 43910 - DNA, 379 bp, Mus musculus
  source 1..379: mol_type = other DNA
cccctcagtggtagccggatcagcgcggaatccgtgatactggtagttaggaagccctgcctcccagggcagggtgggtaatgagtcctcagcagaccccgcccctggccagagtgaagccctatgtaaataggccttactaagtgaatgcttaagatagagctctgggctaaagacatggctaagagcactgacgcctcttccgagatcttcaaatgaatcgtgccacagtatgtgggagtgaatactccatggtactctgccctttaagtcaggctccgcccactactcgtggtgcccgcctttcggccctgaagcccggcctcctcgggcggccgcggcgatcccagcgtgccccgcgcacgggcggcgctctggc

SEQ ID NO: 43911 - DNA, 330 bp, Mus musculus
  source 1..330: mol_type = other DNA
ccactgggcgtggtgggttccagagaaatcctgtctcgaccctgagacctcaggaatcaacttgatccatctacagactcaggttgagctcaggcgcagaaagccttttccctttggactgaaaaaccagttttctgtctctcactatgataggagacgatggcaggtcggaagcccacgcccaaacgggacggcgggcccctcctgatcggccgggatgctagggtggctccggcgggcgggggtcccggcggccgaggggggctcaggaagtcgcggccagccaatcggcggcgggggcggcgctcagccccgtcccgggccgtccgc

SEQ ID NO: 43912 - DNA, 230 bp, Mus musculus
  source 1..230: mol_type = other DNA
cgatcctcacagcggtcatctggtcacctccatgtagatggttaaactttggcaattcgtgctcaaggagcctgtccctgactccggagggcgggccccccatctcttaaaaaagactccgggtctcaccgggggccacctggggcgaacggaaccgagaccccggtctggtatgaggctgaccgtggagccccgagccgctacgaggacggctgcgcgcagactttgtc

SEQ ID NO: 43913 - DNA, 394 bp, Mus musculus
  source 1..394: mol_type = other DNA
tgcggccctgtgtccagcctcctgagacctgaagctcagagctggggagctcctgggttgctggatggaagccacccaggcatggcaccttcaggtcctatggtccccagaagactgtatacacatgacatgactgtatcccaagcaagagtcagctaatgcctggatcgggtggccacacaggacacaggctgcaagtggaaggtggccagtgtgagctgacacttgggacagtcacactgggggcggatctgaggtgtcacctccctcccgcagtcacgtgggcgagcaatgtggtccagagacagcctgcaccaggcgagaactcggggagccccaacccgcagtcctcctcaggggtgagtggggcacagagcgggtggggacccaggat

SEQ ID NO: 43914 - DNA, 385 bp, Mus musculus
  source 1..385: mol_type = other DNA
tgacacccaaggcctggtactttcctggcctgaccggaccagaagccagccatccaactatgagtgggaggcacgggacccttaaggggctagcgggcctgcggccctgtgtccagcctcctgagacctgaagctcagagctggggagctcctgggttgctggatggaagccacccaggcatggcaccttcaggtcctatggtccccagaagactgtatacacatgacatgactgtatcccaagcaagagtcagctaatgcctggatcgggtggccacacaggacacaggctgcaagtggaaggtggccagtgtgagctgacacttgggacagtcacactgggggcggatctgaggtgtcacctccctcccgcagtcacgtgggc

SEQ ID NO: 43915 - DNA, 403 bp, Mus musculus
  source 1..403: mol_type = other DNA
taggcatttgctcagatacatagaaactgaggttgtatgtaagggctgcagcctggctgcagcagctcagtgagatgggtcgggcaccagactcagccccccccgagctgtgcccagacagatccagagagatccagggaggtggaggctgggtctgccctcacccaggagcctgtgcaggccactccctcctggagagcccctgggcttatctggactccccggtggaggctgagtctgcccaggcatccttggagacctggtccgcatgcgtggggcctgtataggacatgcgctggtgctctgcgtgtaccaggctctgggcctgggttttttttaaaacaggacaagaacagagtcgggcctgatgaccggcctaagccggtttggctgtcggctatcc

SEQ ID NO: 43916 - DNA, 388 bp, Mus musculus
  source 1..388: mol_type = other DNA
catggtggctcataaagtgtactttcatgtaataaataaataaataaataaataaacaaagcgttcctgtgaactcccaatacacacttgtttgttcattgtgtaagtgtggcccttggaggccagaggcatcagactctctggagaaatggctgggggccacctcatgtgggtgcttgcatccaattgaggcacatgaacctggctgttcatctctgtagacctggctatagagcaggctgatcccgacgcgcgacaccgccccggtgaaggctggggctgcccaacgcgcagcctcacgaacctgggcgggggccttcccagcccttggcgcaggcgcactgccggggggcggggggcatgcgtccggcgcaggctccgtgctggc

SEQ ID NO: 43917 - DNA, 425 bp, Mus musculus
  source 1..425: mol_type = other DNA
cattctagcttcctgggagccagtattctgctagcagccttcagacaccatgcctgcctggatgctgccatgctcctgccttaagagttgccttgatcatggtgtctgttcatgaagccctgggttccatcccccagctccacatgaaccaggtactggaggtacctctttaacttttcaaccagtctaagatagtaatgccttctaatccaaacaaacacaaccaaactaactctgtgtggggtttctttgtaatgctctggggcccggcaccttagcaagggccagttcctggggggcctcaggctctgctggaatccacaccagtaaggagcacaggtttggaggtccctgggctcctatccccaggaaaaggaactgtccccatgcatgcagctgtgctgggcctgcagcaggcaatccca

SEQ ID NO: 43918 - DNA, 369 bp, Mus musculus
  source 1..369: mol_type = other DNA
ccagcctcggaatcgcaggttctggaattacaagagcatccttgcatggcaatggtgacaagatagggcctggtgtcattgacctatcaccctagtacctaggagctaagggttgagagccctaccatagtttaggttagcctgagctacagccgacaccgagatcccagcactcagtaggctgaggctgcagtccaaggctagcctgggttacatgagattctgtttccagtagaaaaaggagactcctgtactttcaaaggggctctttaagcgccctggcaccctgctccgctgcaggcaacctcgcggaacgcgtcgtccgcgagaacgcggctcccgtgcgcagttgctgattggctgagggcg

SEQ ID NO: 43919 - DNA, 519 bp, Mus musculus
  source 1..519: mol_type = other DNA
ccgacaccgagatcccagcactcagtaggctgaggctgcagtccaaggctagcctgggttacatgagattctgtttccagtagaaaaaggagactcctgtactttcaaaggggctctttaagcgccctggcaccctgctccgctgcaggcaacctcgcggaacgcgtcgtccgcgagaacgcggctcccgtgcgcagttgctgattggctgagggcgtgcccgagggcgggcaagccatactcggcctcgcgcgtccattggtcggctgcgtgaggggaggagccgctggctccggccgccgagatgagctggggccgtctgagccgcttacttaagccagcactgctgtgcggggctctggcggtcaccgtatcatctccgacaaggctaggcctcggcgcgggaggtccttgggcgaaccggtgtcggggtcaccatagcgggctctgacctggtcacgcgccctgcccggcctggtgcgtcacagtcggcggcgccttggccggctctttgtcccc

SEQ ID NO: 43920 - DNA, 273 bp, Mus musculus
  source 1..273: mol_type = other DNA
attaaacttaaaatccaagtttctatagccttactgcttaagatctccagtggaggacagatagtcctgttagacaggggttttttgggggcacaataaagagccaggttctcatacatgccctgaagcctctgggcctgaattcatgactggctttagccccactgaggccattgccctaggtctttgtgagttctaggccagacaatcagctccctgaactgcccggccccaagaggccccgcccctaaggccgcgccccttcgcagaagc

SEQ ID NO: 43921 - DNA, 458 bp, Mus musculus
  source 1..458: mol_type = other DNA
ttattttttattcgtgcagttaaaaaagggcacagataaaataaaattctgtgttgtgtgtgtgcgcgcgcgcgcctaccacggagtccctgacagcctgaatgaagtcagatttgacgtcagaggagcaagcctgggctggatctctttaggtccccggaggacgttgacgcgcgtgtcaccacagccagcccagaggtttcgctggcccgtcgcgcttgctgacgggcgtctgcgacagccactggccgcccccacacaccagggccaaccactgaggggcggggcttgaagccacagcccacggccgctctccaatgtcagctcgggcgcccacctaatagcccaatcctcgttggcgattgaggcgggtccgaaaggtggggcctaaagctacagccaactgccgcgcacgtcggctccgcgagggggcgtgtccaccgttgcgacgtgcgacg

SEQ ID NO: 43922 - DNA, 655 bp, Mus musculus
  source 1..655: mol_type = other DNA
caagcctgggctggatctctttaggtccccggaggacgttgacgcgcgtgtcaccacagccagcccagaggtttcgctggcccgtcgcgcttgctgacgggcgtctgcgacagccactggccgcccccacacaccagggccaaccactgaggggcggggcttgaagccacagcccacggccgctctccaatgtcagctcgggcgcccacctaatagcccaatcctcgttggcgattgaggcgggtccgaaaggtggggcctaaagctacagccaactgccgcgcacgtcggctccgcgagggggcgtgtccaccgttgcgacgtgcgacgacggcgcggcgcagggcggtacggctcacggcgtccgcgagtgaggcgcgagtcgccgagggcggcgccggcgtggagttgtctctcgcgggcagcatctttctgcccccctcgccgctccggcctcctgcctgtcgcgcggcggctaggcggcgagggggacgcgccgcctggggtggcgggtgtcccggtgtcccgcgtccgggtggagtctgcgccccgagaagtcgtagaactaaggggccgcgcgcggcttcggcgcgggccggacatggacggcgcggaccggcctcgacgcggccgcctgggcccctgagcgcggggc

SEQ ID NO: 43923 - DNA, 486 bp, Mus musculus
  source 1..486: mol_type = other DNA
gttataaggtatggatcattccataacagacctctatggatgcaagtttaaatgttattacattcatttactcttcctttcctatgaaacatggcgcaggtacaaatgcaggtgtgcgggaccatcacagttctgttttgctatctgctggaccatctcatggcttgactggaattgcacatctggagtgcagagacctgagatacccgcgttagcttaggggcgtaatgcgccccgcccgcaccgggttctgggcattgcagcacccgctacagcgggagggggcgcgggagctcaggctccgccccacgcccccgccggaagggaaggggaggcggtggccatcgcagtgcgagccagacgcggcggcgagagcggcgggggcggtcaggctgcgggaccgggcggttaccgggtgcacagagccaggggccggagcgggagcaccgccaacgcggtcacgtgcgcggccccacctctcctgcg

SEQ ID NO: 43924 - DNA, 403 bp, Mus musculus
  source 1..403: mol_type = other DNA
tctagccctggctgtcctggaactcactctgtagaccaggctggcctcgaactcagagatggttcgttataaggtatggatcattccataacagacctctatggatgcaagtttaaatgttattacattcatttactcttcctttcctatgaaacatggcgcaggtacaaatgcaggtgtgcgggaccatcacagttctgttttgctatctgctggaccatctcatggcttgactggaattgcacatctggagtgcagagacctgagatacccgcgttagcttaggggcgtaatgcgccccgcccgcaccgggttctgggcattgcagcacccgctacagcgggagggggcgcgggagctcaggctccgccccacgcccccgccggaagggaaggggaggcgg

SEQ ID NO: 43925 - DNA, 424 bp, Mus musculus
  source 1..424: mol_type = other DNA
gcgcggacaagactggcgtcagtggggccccttggccgcctgcgcacgggctcctgcgtcagtggcacgcaggggcggaggcccccagcgcggcatcatgaaatttaattatttatttagcagcttctcagccccgcttgagtgcgcctggcatatgcatatatatatatgtgtgtgtgtgtgtgtgtgaccaggctggtctcaaactcagaaagccgcctgcctctgcctcgaatgcttggcacctgatatcaagcccatatcatttccgcgcaaacattcccctcctgagggaatatgttcgtttgtcccacttctaggcatcactgcaaggggtggggcagaatgctcagcgcgtactgcatcgcgcagccttcggagaatcctgtgcgcgtgcgttcttgtgggaactgcgcctcccaga

SEQ ID NO: 43926 - DNA, 423 bp, Mus musculus
  source 1..423: mol_type = other DNA
gggcacccaaatgacaaagggctggctccttggtccataggtcaccccaaaggccagggccagggccagtatgtgccgatgcatctgtgctgtgagaacagatcacacatgccaggctgcagaaggccttcctttgctcacacaggtgactggcctaggcaaggccagggaccgcagctgtcaggggcacctactgcctagcaggccccccccttccacacgcgggcgcccccaggcggcatggggaggtaggagttacccaggtcggtgacacccctgaggcactgctctgtgggtgctgcgaagccctagggccggtgtccctgtccaggccagcaggcggtggggtggggtgggggggttagggaatgcgtcaccattgcccggccccccgccagggaaggcggcgcggataaaggctca

SEQ ID NO: 43927 - DNA, 340 bp, Mus musculus
  source 1..340: mol_type = other DNA
aggatagaaatccttccatggcatgcttgagactctggggtctcttccatctgtgtggtaatgtacacctggttggttgtggctaatcctgagtatgatccttaggacctacatgatggaaggagagactccatctgtctctttcagttaaataactgtaattaaatattaaattggtctcattgaggtagcaaaagctctttgttccccgccgcaggacaaacgggaacgcggaagtgggtcagctccgctgtccccgcctcctagtcgctagcgggcggggggtgggggggcctccaccgaggcgcagatgccgaatctaaggcgtcggaatcaggcg

SEQ ID NO: 43928 - DNA, 586 bp, Mus musculus
  source 1..586: mol_type = other DNA
ttgtggctaatcctgagtatgatccttaggacctacatgatggaaggagagactccatctgtctctttcagttaaataactgtaattaaatattaaattggtctcattgaggtagcaaaagctctttgttccccgccgcaggacaaacgggaacgcggaagtgggtcagctccgctgtccccgcctcctagtcgctagcgggcggggggtgggggggcctccaccgaggcgcagatgccgaatctaaggcgtcggaatcaggcgggactcttgcgctccccctcgcactcgcgccttaggaagcttgggtgtgtgtggcgcgctgtcttcccgctcgcgtcagggacctgcccgactcagcggtgagggctctggcggcaccggctctgaggggcccggggcggcgggcggcctgtgactctcgggcgaggcggagccgcagcggcacgcccctgggacttgggggcgggcccgggttggagtccgccccgccggcggcgaggcgggcagcgggacactggggcctcacgcttgtcggagggcgtcctccaccgcgcgtcatccccgggccgaggccgaccttaac

SEQ ID NO: 43929 - DNA, 480 bp, Mus musculus
  source 1..480: mol_type = other DNA
tttgcttcctggaagtctgagtcaaactggtggtacctcccgccagtataacgcggccggccagagctaccgggcgccctgcctttgttgagcaggacagagcccggctctgctcgaggcgggctgcaaaagggcgctgacgccctgggcatggccaccttgggacgaaccacttggcgccgggtgggaggtgggagggcaggcgctgcaggcccaccatgggaggatggctgactctgggtcctagagggttccacaggatctggagccatagactgcacacagtttgcccggtgagtgcccgaggtcaaggcctggggtccttggacactccgggtgctcagagggttgagggatcccccacccctctgagctagcacctggctataaagggctgtgacccagaacccccgactctgtggcttgggtctgaggagtcttagtgtccacccatctccataataaggcgctaagatgaac

SEQ ID NO: 43930 - DNA, 499 bp, Mus musculus
  source 1..499: mol_type = other DNA
ctctgtgcccacccagtgtgtgtgtgtgtgtgtgtgtgtgtacacacaagcacaagtgaacacatgtttatgtgtgtggcatgtggggaacttgtcacagaaggccacatgccaccctgggtcccaggtaataataacactggccaggttcacacagctctgatctaggtgttgtagggtccctggtgattcccagagttcctgaagtgactcccagaggcctcacctcagcctcccgaatgctgggagggcaggtgtgcaccaccacaactgttatcagatctgatctgacacctaagtactgagatgccagggtggggctcagcgctctggggtccccttcccgatgcgggaggctagggcgggaccctggggatccgcggcagagtctgcgcgagtctggccggggcggggcccgggcagaggcttggagggtccggggcgcggcgggagggggcgcccgcgaccctccaagacgctccagcggggacaaaggcga

SEQ ID NO: 43931 - DNA, 379 bp, Mus musculus
  source 1..379: mol_type = other DNA
cagtgacattgctcaggtgagcagcctaactgccttagttaagaatttgagtgtgaacctcacctgaactggaaacttccagttctagaaaagtccatggatacaggtcctggatgcccacataggtgggataacttccttctgggaggagctcgtgaggccttcgccttcccaaccgctgctcgcaggcggaaatctgtctggaaaaagggcccactttctctagggaggccgccgccgtctgtgtgggacttggagcgggcctcccggtctaccctgcctcgggcccagggggagccctcgccgcgcactccacaagttgggcaacgcagttcccattgggcggcggcgcgggcgggactcggcgccgctgtgaggc

SEQ ID NO: 43932 - DNA, 224 bp, Mus musculus
  source 1..224: mol_type = other DNA
ctctgagtttcatgtcagaatcgcagttgctgaactcaagtttctgcagcttgaatgctgggaaccctgggcttgccagtgctgcagccacccttcaggcccgaggcagggctgctgcaggggatctgttaaattttatttacagaaaacaagacatttcctcaaattccagggccctgcacttgactgtcacgtgaacctcactgctgcaagcagcacctttc

SEQ ID NO: 43933 - DNA, 352 bp, Mus musculus
  source 1..352: mol_type = other DNA
gctctgctgagccattttaaaaaaatgttacttcattaccaacaacaataataattttggctttttgagaggaagaacttgtcctcgtacacacatagtcagtaatggctttagacctattaattggaagataatatgtaaatagaacgtaaaagttcaacattggattggactaattcaagactgtggttcaaacccttgctttagcgcgcaagcgcacttcacaatttgtctgtcaaaccttgtagggttatactataaggcaatcggttagcgcgttcggctgatttttcattccctaatactgaataaagtggaagtggcgacgcgggtcagaaccactcggcttgtg

SEQ ID NO: 43934 - DNA, 228 bp, Mus musculus
  source 1..228: mol_type = other DNA
cttggcccgtcagctctagcggaaagctaggccccggatccgttttgcctctaccaggctgggccccacccgtgaaagaagacaccacggtctcagccggctggcaggctggactctgtcctaccatacaggctccatcctgtatggctcctgcctgcattcctcatagaagtctggattctaggcccagcccagtgccaggctggaccccctcccagagcaagggcc

SEQ ID NO: 43935 - DNA, 404 bp, Mus musculus
  source 1..404: mol_type = other DNA
caacaaactgagccattacatcgttttattcacttacttattgttgttgttattattattattattattattattattattgtttgttctgtagccctgcctgtcctgggactcactctgtagaccaggctggcctttatatacctcttagtaactattgaacttggttaatttttactttgtgagtcagccttccagcgcgtctgcgcctgcgcgcgccatgaacgcccggcgccgcatgcacgcgtacgcacgcacgtggctgtctccctccgcgcgccttctgaaggccagacgcagagctctgcgtccctctcgcaagcgggcacgcacgcgcggcgcgcccctggccccgcccccggaggccccgtgcgggagcgcgcccgggcgtgcgcagggcggag

SEQ ID NO: 43936 - DNA, 369 bp, Mus musculus
  source 1..369: mol_type = other DNA
gcaacgtgcagtgcccgaggaaggctgcaggcccggcctcctggagtccccagcagctgactcatcagcctgggctacatggtgagaccatctcacctgtggggggtgatccctcagaagtcactgacccctttccttcttgacagcagaaagcccttcaggcgcttcccatgcctaggaggcatgcacgctacgctgcctatggtggccagggcctctgagccctgtgccacctgggaggattccgctataggagagcagctggcctggtgctgagtgcactgggcagcatcctcatgaccctgggtagtgcacctggggcatgcagcccccacccgtgggtctgtggcatctacccccacaaactct

SEQ ID NO: 43937 - DNA, 535 bp, Mus musculus
  source 1..535: mol_type = other DNA
gaaaatgcggcttcctttagcccaagagcgaggccagcctggtctacaaagtgagtccaggacagccagggctatacagagaaactcacacctggcttctattttattataaaacgaaacactcactgggtcatggaaagagagcactgatctctccaagttgtcactcacttttgaggtggtaggctcacacatccggtggtagctcacgcctttaatcgcacttgggctggccagcctgttctacagagcgagtttcaggacagccaggcctacacagagtccctgtcaaaaatgtatgtatatattttgctattaggaatcataattgtaaatatctgatatgcaggatatctgatatgtgacccacgggttgagaatcactgcttgagaccaaagggagccacgcccctccggagggtagcggcgcttttgctctggcctccggacagcggggggcaatggcgagtatccgcagagcggaagctgttgagcggtggaggcgggccctcccggcagagctcgcgataactgc

SEQ ID NO: 43938 - DNA, 145 bp, Mus musculus
  source 1..145: mol_type = other DNA
tcaccctgccatatgtagcccaggctagtcatgaacccaatatgtagcctaagctaggcttgaatttgggggaacagctgttcacagcaggtcctctgaggggatggaatgatgaggggctgagaccctagacactcactgcttc

SEQ ID NO: 43939 - DNA, 270 bp, Mus musculus
  source 1..270: mol_type = other DNA
cagagcagctgcatgggtcaggtgacagcccaccgctcagcctcagctgctcccagtggatgtgcaaataaaagttaaacagcccacagaggaagactgctctgagcccagatctgccaagtgctgctttgtagaccaggctgcagggtctcactgtgtagtcctggctgttctgggattccccatattgaccaagatgcacagtactgagatcaatggttgtacactgattacctttcctcccaccacacgcggtgaaggagggcagag

SEQ ID NO: 43940 - DNA, 476 bp, Mus musculus
  source 1..476: mol_type = other DNA
ctgaatcacttagactgagctcaagctgctgcgggcacctcggcatctgccccgctggctgctggcatgatcgccctggccctggaggccaagtaggtgacagtggggctccgcccaccgccccgcccccaggggcggctccccgctcaccccccccagcccgctcctgacctggagggacctacagcacctggtggtccgcgcgtccaggccggcgcagctgcaggcggaggactggagcacggcgtggggcggtgtggtgcactcagggccagtgaccgctacccctcccgcgcagtgagccaccattatggctatgctgcattcgggtggtgcacacccccacgtgagagagcccccgcccactggagggaggccccgccccttccactggagggaggccccgcggtccagactccacgcctacgcggagagtgccctcaggcagccccatcctgcctcggatgctggtgccg

SEQ ID NO: 43941 - DNA, 524 bp, Mus musculus
  source 1..524: mol_type = other DNA
caggacctcatggtgcccgttgggaaccaagtgagggtggccacgaacgttcgaagcgctggcgcagaccgtccatggcagcggcgggcgcggggcaggccactgaagcacgcccgcaacctcgcgcaccggcgccgccgagagcgcactttcacccgcccaccgcccggccccgcccccggcccagtgctttcggccccggaccctggctccgcccccgccccccggctctggccaatgggagggcagggcggacaaaggaggtggggcctgccccgtctccccggccgcatggccctctggccagggtgagggccggggcggcagcgaggagtcccgagggggcggggccccagggtggttgaaggcacctgttaccttgaacctgcttccctatgaatgtgtcactcctagtggaatattcccacccctcccaggtggggagggggtgggggaggagcttcgcgttgcttggtgtccaggctgggagtgcttcctgaagccccgccccgcggccctcccag

SEQ ID NO: 43942 - DNA, 489 bp, Mus musculus
  source 1..489: mol_type = other DNA
cacccgcactgcccagctgctgacatagatgggggcctgggctgaggcccacctcacagccaggaagtcagacccagccacagctctgtctgggagggccgcggggcggggcttcaggaagcactcccagcctggacaccaagcaacgcgaagctcctcccccaccccctccccacctgggaggggtgggaatattccactaggagtgacacattcatagggaagcaggttcaaggtaacaggtgccttcaaccaccctggggccccgccccctcgggactcctcgctgccgccccggccctcaccctggccagagggccatgcggccggggagacggggcaggccccacctcctttgtccgccctgccctcccattggccagagccggggggcgggggcggagccagggtccggggccgaaagcactgggccgggggcggggccgggcggtgggcgggtgaaagtgcgctctcggcggcgccggtgcg

SEQ ID NO: 43943 - DNA, 444 bp, Mus musculus
  source 1..444: mol_type = other DNA
acagcactgatcatcgcagtgcggcgtccttctgcccggctgccgggaggctacacgaagggcactggcgtccaggcctagagggcggatgtggggcagggagggtccctccgcccccagcgggcgcgcggggcctcgtgaggggatggtgctacggtgagagggcgccctggcatggactatcccaccccaagccccagcgctaggcacattccctggccctgagcgcggcgcccggaatagcagtccaggaccaacgctgggccgctgagctgcgctgtcagacacagtaggtcagccccctgccgcaggtccgggcccaacgcgtgcgccctctcctgccgcacgagggcgcccttggcctgcgccctcggtgaccccagcctgggcgcgcctaggaggcccgggtgggagggatcgaccgagttcgcagtcccgcacttt

SEQ ID NO: 43944 - DNA, 439 bp, Mus musculus
  source 1..439: mol_type = other DNA
acttgggagcactcaaggggtgcttcttgtcccccttggtggcacgggccaggccagattccaaattctggctctggaaaattccatagcctgaatccagccacacggagtgaggctcggattaataccagaggcagatggtagggctcacaccctgccctgtgcctgcctggctttgggagtgaggggactcccacctggcacatgcaggcggggccccgtgccctgtaggccatcagagctagcgtcgcacacatgcccacaggcggccctcccgtagggagcacccagccagcctgtacccccgagagaatcctggggcgggcaccagagagttcgccaggtatctggctcccggttggctccagagcacctgccactcggcttcgggtgcaggcgggaccccaccggcgtccgggccccgccccgccccgccccc

SEQ ID NO: 43945 - DNA, 298 bp, Mus musculus
  source 1..298: mol_type = other DNA
tcttcctggttgagtaatactccatgacagggcagagggaccacacaggctgccccccttgcatacctcctgagactcaccatagcctataagtagaacgtgtttgtactcacatgccttcccacacttgggaggttatggtaacgcaagaactggtttctagcctaatacctcatagggcctccaaggccttcctaatgacctggtgaaagggtcctgctcgggctgaccagcctcccgtccgcagccccagcaccttcgacttccgcaccggaaagatgttgatgaacaagatgaa

SEQ ID NO: 43946 - DNA, 478 bp, Mus musculus
  source 1..478: mol_type = other DNA
ctccagacaccatgccagtgactcggggaatgggtccccaacgccaccctgttactcagagtgggttccatgactgaatattgcctttaccgtgtggctgcgaggtgatccctgccagagggtccccaaggtctccaggcacacggggaggatttccctgctctcgaagagcggcggatccctgatagaggtcccgaaggtcccctggcgggcactgggaggaggccggggaagccaggggtgatggcgagggctcctggagcacacgaccctccggctcagaactgcgggctccgccgacccacctgtggcgcctcccgcacgtgcgggcgggccagggggaggggggggagggtccgcaccctgggcgggggcggggcaaacacgtgactgccggcccggcccgcgcgtgcgcagcggcgttgcccattgttggccgcggtgacgtcgcggggcggggccggggcggggcggcggg

SEQ ID NO: 43947 - DNA, 412 bp, Mus musculus
  source 1..412: mol_type = other DNA
agctccctgtcctcagggctgcggtagacaagggcactaacttagaaaccagtttttggttctccaagctggtcttgaagcccaggctggccaggggtgcagcctaacggcagaaagtctatttcagtactgctgcaaagaacaaacttcttcgatctttttcacaaagtgcgcaggtgcagcccagcgcgaccccaggaccaggacggcagctcgggcgaaactgctccagcttggtacagaccaggtgcagcacacactgtgcttccggagtctagagacctgtgggcgtctcccgcaaggcgggacgccgaggagctgaagtgatctgattggcttcacagcctgtcggggccgcggctgcgcagagagtctggacggcagtcagactggcctgcgagcgcgaaggggc

SEQ ID NO: 43948 - DNA, 285 bp, Mus musculus
  source 1..285: mol_type = other DNA
ggctaaggtcagtggcataactgaacctacatacattgggcctgtggggtccagggctccgcagacacccatatgctgttctgggagatgagtcagcctgtcacttgccatttgactggagtccctcagcgactcaccgacaacttcaaaaggttggccccaggcttccatatcaaaaacacctaagtatgtgtattattaaagttattatcagattagtactacgtgggtgtgcatgtctctcctccccggaagtagatgtcaatgtcttcggcgtcacgcatg

SEQ ID NO: 43949 - DNA, 148 bp, Mus musculus
  source 1..148: mol_type = other DNA
ctatcctggaactcactctgtagaccaggatggagagagaatgatccatcgtttcctagcctctcaggatctgatatcccccgccggaaggatagagactatctctgccggaagtactggctgcaggcttccgcgggcggcgcggggc

SEQ ID NO: 43950 - DNA, 294 bp, Mus musculus
  source 1..294: mol_type = other DNA
gagagagagagagagagagatcctaggctagctatctcagtctggaatccagttctgtagaccaggctgaccttgaactcaggctttgatgcaaagactcactataaagcccttgcctgactggaacttgctacatagaccagagtccctgttaagaaagatttctgcagggcaattacattgcacattgttctggggacctactaatagccccacttcatcccaaaagaggttttgaaatctttgtgtgcaccctcggggcgggggcgctgacgtcagacccgggccggggcg

SEQ ID NO: 43951 - DNA, 200 bp, Mus musculus
  source 1..200: mol_type = other DNA
acagagtttctctgtgtagccctggctgttcgattaaaggcatgtgtcaccactgcctaatagactcccctggaagcctctttgtagaccaggctggcctcgccactacgcctggctgtacaattaattcttgctccacccataagcctggtttgtagcacaaggttggctcccttaagctgcaggccttaaggctctgg

SEQ ID NO: 43952 - DNA, 365 bp, Mus musculus
  source 1..365: mol_type = other DNA
ccaggtgagtgccaccctaggctttggggtggaggcaagcagatgctgggagcttgctagccagcctgcccagctgaagtacttcagtgaagtaacctctgcatgcgggtgcacaaaatatattttgtctagtgtatgtatctaggcacggcaaatagccaaggagacttgggttcggttcccagtagctctcctcgtcctccggggggcgcacgacggcggcgcactctggacagcccaggcttctcaggggcttgaggctcaagattgcgaagctgcacccgcgaaagtccggtgccggaaggttctcaggaccagaagcatataatcacgcgttctttaaacgccggcgtccctagcgacag

SEQ ID NO: 43953 - DNA, 581 bp, Mus musculus
  source 1..581: mol_type = other DNA
aggcctagtgattctcgagtcccggtggcagggtagtgggtaccctacgctgtccccaagccaagaatggcattggggaccccaaggccaggaaagggggagggtcgcgcacgtggcccgggggcggggcagcgcgcttccgcacccccaccctggccacgcacacaccgcggacaggggcgcgtcccagtgcctgaatcccggcgactgcgcaccgggcacagcgtggtgggcgcgccgggaagaggatggagcgcgcgcccggaggaggcgtggcgcgccgtaactctcaaagccttgggaggtaccaggccaggggaacgatttccctccgtttggcacaatccagggatttggggaccccgggtgctctgctaggaccggcagctggcagtgtgagctccgcccatcagcggtggcgcgcgactctctggaggaccgatactgagccccgagggggcgtcctccaggaggggcaggctgcggccgcccccgcgggctccggtgcgtcagggagcgtcaggcggggcggggcgggactgagcgcgggcggcggcggcgcgccggggcctcctcctccc

SEQ ID NO: 43954 - DNA, 526 bp, Mus musculus
  source 1..526: mol_type = other DNA
aacggagggaaatcgttcccctggcctggtacctcccaaggctttgagagttacggcgcgccacgcctcctccgggcgcgcgctccatcctcttcccggcgcgcccaccacgctgtgcccggtgcgcagtcgccgggattcaggcactgggacgcgcccctgtccgcggtgtgtgcgtggccagggtgggggtgcggaagcgcgctgccccgcccccgggccacgtgcgcgaccctccccctttcctggccttggggtccccaatgccattcttggcttggggacagcgtagggtacccactaccctgccaccgggactcgagaatcactaggcctgtggattccctcactggccctttgagactgggacagggaaatccatggataatcgaccaagttgggcggttgcgcggaagtaggagaccaggctcccgccccttcctaactcccgccgggttgcggaggccatgcagtggcccgcgcagcctccagggggcgaagcaccccaaccgacagcagtctgtcg

SEQ ID NO: 43955 - DNA, 190 bp, Mus musculus
  source 1..190: mol_type = other DNA
attgtggctgaacacagttacagtgtacttacatataataaataaataaacataaaataaaaaaagagtagattctcctggaaatggagttacaggtggttgagaaccacttaaagggtgaacacctctccagctcctgtcttgagatcctgagagaaactcattttattgcctcttccaggaattcggg

SEQ ID NO: 43956 - DNA, 270 bp, Mus musculus
  source 1..270: mol_type = other DNA
acaggttgatcctggagccaaccccaggcgggagagactcagggactctgaaagctacactgtgaaactctttatctaaaacaataattaactaaaaggtattaatgttaggtcattttttaaagacaggatctgtcctggaactcccagtgatttgcctgcccaagtgctggggttaaaggccctcgcctccaggttctcctggggggcctgagtgagtgactaatggccatagagtctccttctccgcccatggaactacgctcccgt

SEQ ID NO: 43957 - DNA, 331 bp, Mus musculus
  source 1..331: mol_type = other DNA
tgtcctggaactcccagtgatttgcctgcccaagtgctggggttaaaggccctcgcctccaggttctcctggggggcctgagtgagtgactaatggccatagagtctccttctccgcccatggaactacgctcccgtggtgccccgcggtggcaggcgtggcggcccggttcctcaggtgagcagccgccgtagcggctttcgccgttccgaatccgccatggggcaccggcgtagcctgaggagtacgcgtgcgcgagtagtcaacgctagtacgcgtgtgcacagggcttttcgcccaccgcgccctatgccgtggttgcggcgcacgc

SEQ ID NO: 43958 - DNA, 410 bp, Mus musculus
  source 1..410: mol_type = other DNA
ggcctgaggtcttgaagccaccaaagcattttttttttaaagatttattttattaatatatgtaagtacactgtagctatcttcagacaccaccatagcccttcaaagggctggcttcagaatatcctctggcccctacatgtcctgggatgacagggtgctaccaggcctggtttactcgtttcatagaaatgaatatcaacatggcatctgttgggaccacgtggcctcgtcagagccctgaagagcccggcacgattattccttatgcggccggggaacctgggcctggcgggacccactcaggctttgcagagcaaccctccctcgggggccgtggagggcctatgctgcacctgtcctggacaagcgccagacgtcccgcctcctccgggaggtgtctgcgcccc

SEQ ID NO: 43959 - DNA, 544 bp, Mus musculus
  source 1..544: mol_type = other DNA
gctactgtgaaaagtagctgctaggtgcctttgggcctacctaaggtcccagtgagagccaggtgcctgtcacatggcaaggagagggatgtgtcagaagtcgctcagagccatctgtggggccactgagaccaggacatcttggctccaaggctctggggcggtagcttgtcccatccccttccagggatgctctgagaagccactgagccagcagccaagctggctggcctgtgtagcagagcctgcagcagtggggttagcctggcctggtggcgggtgccaggtcagctgatacagaaatggcaggtgagtgacccgagactcctgagctggttgcagagctgaccaggcctccaccaccttgggttccaaccacagtccatcatcatccagcttgcagatgagggagggttgtgagaggactcttgacctctcccctaggggctgtggagaggcctctggcctggtgtgatcgatcctgcagggctgtgtgctctagcaggcaggcatctggctgtagcaggctacctgagggtctcct

SEQ ID NO: 43960 - DNA, 405 bp, Mus musculus
  source 1..405: mol_type = other DNA
gtctctaaaattaaaaaaaaaatcaaaataaaattttaaagaattagaatagtatcttcttttacgcccaccgtgacgtcaggtggcgagacagtgacgtcacagacatggttgtgggttggcgcccgggagaccgccacgcgtctccatggcaacgaaagggtgctgccagcaagggtgggtccgctgctggtctcagtctctggtgtcccgcgggacctgcagaccagcggcctcggcttgtccgcaaagcgcggcggccgtagcgcggcgaatccttaccaacaggcgccgtcgcaaaatggcgtgtccacttctctaaagccgcgttccgttccttaaggccacgccccgcgctgtgacgtagaacgcgcacgcctctcgcggctcgggttgcgactgcgc

SEQ ID NO: 43961 - DNA, 368 bp, Mus musculus
  source 1..368: mol_type = other DNA
cgtggtaccaggccccttggccagctttgtacctggctccctactaggcttgagcagcagcaccccctcatgttaccatgttgagccaccctgtgtccccagacatggcccatagaggctttgggtcccacatcacctatgctccgaccctggtgtctccgggggacgctgaggaaacgtctgctcatcagaggcgcagagagtgcacactggctgtcaggcactgggctgcagcacgttgcccactggccaggtggcaccagcccctttcaagtcctcgtgtgctacagctgggcctgcagcccagaatcccaccactgcagggcaggcgggtgccaggtctagcctgggaactgccagtgaatcac

SEQ ID NO: 43962 - DNA, 150 bp, Mus musculus
  source 1..150: mol_type = other DNA
gcggcttgcaggcaaggcctcctcaggctcccagtgctaggatggcaggtgttttattatggttattattattattattattattatttttttttctcactctgtagaccagactggcctagagctcaggagcgcgtagccccggggtgc

SEQ ID NO: 43963 - DNA, 438 bp, Mus musculus
  source 1..438: mol_type = other DNA
gcacacacactcacacggacgaggacctgtgtgagtgcacacaaacacacaaagagctgcttgaggttcatgaggctccagcctcagtctggcttgccctccttcggcagctgaacgcggcacccggctcaaggacggcctcacggcccaaactgaagccttcagtacccttctgcgcaggcgcaggcgactccggaggctggtcaccagcctccaggtcacgcggctgcagtcggctccgcccccaccgtgggagtgcgcaggcgcgcttgaagcttcgcgccccacccctgccagctcgaagtgcgcagccgtgtttggagtcgccaacacggtcgctgcgcagctccactccgctccccgctaagctccgccccttaaacgggagcgcgcagccgtattcagctccgcctcctcgggaccgcgcctataaaggtg

SEQ ID NO: 43964 - DNA, 574 bp, Mus musculus
  source 1..574: mol_type = other DNA
cgcactgcaggcagccccgggccagcgccgctgtcatgcccagaaacaacagcagggccatggcctggcccagcctgccttgcccaaacatcggcgccgccagcgccagctcgcgctgtggaccctggccgcgccatcccctgcccgggcctgatcatgcgcccaccgggcctgatggcgacctggtctacaaagtgagttccaggacagccaggactacaacctggccaggccccgattagactcctgtcccaggcctggttccgcctacaggcctggtaccgcccacggggctggctcttggatctccccaggagagtgtaactgaatctctccagttacaattggcaactggtaatgcccatccacagcgccttacgcatgcgctttgggctggcgccagttcccgagccagcgagggagggctcgtcccgcccctcatccgctccttagcagcgcccgtcctggtctccaggggcgcggagtgccgcggctgcttccctttaagggaagtaaatccggctggcgggcgcggcctgggcggggcgtgcggcgtgtccctccgcgggcgtgt

SEQ ID NO: 43965 - DNA, 560 bp, Mus musculus
  source 1..560: mol_type = other DNA
gtcaccctgagggatgaagtcccgctgcccgccgcccgccttggccctcggaggacccagcttcgcccagtctccggccgcgcccgcagagggacacgcccgcggagggacacgccgcacgccccgcccaggccgcgcccgccagccggatttacttcccttaaagggaagcagccgcggcactccgcgcccctggagaccaggacgggcgctgctaaggagcggatgaggggcgggacgagccctccctcgctggctcgggaactggcgccagcccaaagcgcatgcgtaaggcgctgtggatgggcattaccagttgccaattgtaactggagagattcagttacactctcctggggagatccaagagccagccccgtgggcggtaccaggcctgtaggcggaaccaggcctgggacaggagtctaatcggggcctggccaggttgtagtcctggctgtcctggaactcactttgtagaccaggtcgccatcaggcccggtgggcgcatgatcaggcccgggcaggggatggcgcggccagggtccacagcgcgagct

SEQ ID NO: 43966 - DNA, 285 bp, Mus musculus
  source 1..285: mol_type = other DNA
acatcttaaaactattttaatcaaataagaaattctataaaatcattaattcatctattttatgaaagttcatctttatattaatctgcaggagactcaatcaaccacagcagactctaggcagtgagggtctcctgagacgaacgcctccggggggcagtgcattcagaaaggctgggctggatatatttggccaggaccttgcagaaaaagctccacgtggagcttagcgagtggggctgcaaggcattgcaaggcggggcttccgggaggctgaggctctcc

SEQ ID NO: 43967 - DNA, 408 bp, Mus musculus
  source 1..408: mol_type = other DNA
ggatgaggggtgggagccatctcccctagatcagaagcggctggtgagctggtgacagctcacctcaaggtaacttattctcagataaagttctgggcaggtcagagaataacattgctttgaactcttaattgagagcctccgacctatagggtccaatttgactgatgatttattaattaacttattgctcacatcttgttcctggacagccagggacaccctgcccgggtccccgcttccggctggcggcgacgtcggagggcaaccgaggacgtgcgtgcgccgctgcgtgcgtaagcgtggcgtgcgaggggtggcgcgcgcggcgcggcgggcggaggctctgggcgcgcaccgcctcttggctcccggcctcccccgcgcgcgctcgccgagtggttccgc

SEQ ID NO: 43968 - DNA, 543 bp, Mus musculus
  source 1..543: mol_type = other DNA
agccgcccggttcttcctgggccactctgcagcgctccagcaacagggctccgaggggctgcgcgagacacggccatgagcgccggcctccgggccgcgcgggtcccccgcgccccccacgcccctacctcggcctcgtccgggcggaagtaaaagaggaagttgaccaccagcttcaccagtcgccgcttggccactgtaggcacagggcggtgaccgcgccggcccgcccaagtgccccagccgcagccccgactggctcaccgctgcccttcttggggccccgcatgcccagctcggccgccatctctgccggctgtcgggacagcgctgtaccgcatcccgccgcacggatccgcgcgaaccaacacgctgcctctcggccgccgtcctccccgaagccgcagtctcgcggcgccgctagacttagggcggagcgaaactgtgcggtcgctgcagtgagcacgcgcactctgcgccccgacgaagacggaagtccatccgctgggcctgcgcacacacgaaacgccgacgcctttgctc

SEQ ID NO: 43969 - DNA, 272 bp, Mus musculus
  source 1..272: mol_type = other DNA
atggcttagcagtgaagagcactgactactcttctactctcacatggtgactcacaacctgtaatgagatctgatgcccgtgtacctatgtataataataaataaatcttgaaagactgcacagagcagaagcttcagatatggctgctggagtcacagttgcctaggcccctggacaccagggcagcagacaagtactgaagtaggagtgggtcacccctcagtcagttggggtggtggccaccctgccagtgactctgtggaagtccctc

SEQ ID NO: 43970 - DNA, 349 bp, Mus musculus
  source 1..349: mol_type = other DNA
gtctgtgaactggaaatcggccaagtttccacaccgagccggggaggaggcctggtcccaggacaaatccctcccagcaagggacctgctccggtggacaggagcagtggtcgccgcggcgacccaacgggcctcgcgagagcgcgctctcccggcgggcgcgcgccgatcctgaggcaagagggcggccgctgcctctccccgtcccgtctccgccaaggccgcggtttcgccgcgcgcgtgcgcacgaccgacgaagcgatcccttccgggagcaaaggcgtcggcgtttcgtgtgtgcgcaggcccagcggatggacttccgtcttcgtcggggcgcagagtgcgc

SEQ ID NO: 43971 - DNA, 560 bp, Mus musculus
  source 1..560: mol_type = other DNA
catcccccagctcctggggtacaccccccagcacgccccagcccctggagtgcacccacccacccctggagtgcacccaccagccccaggagtgcacccaccagctccaggtgtccacccaccagctccaggggtacaccccccaactccaggggtgcacccaccagctccaggggtgcacccaccagctccaggggtgcacccaccagctccaggggtacaccctcctccatcagctggagttcatcctcaggctccaggggtacacccaaagcccctggggtacaccccccagcccctgggatccaccctcaggcaccaggggttcaccctcagccgcctcctggagtccaccctgctgccccgggggtccaccctcagcctccaggggttcacccctcaaatcctggggtgcacccctggggcgtcctccaggtgggctccccagggagatggggacagctcaggcctctgcagttatgggcccagctctgaggacagatgggcatgaaaagtgccaggcactgtcccccaaggtcacctttggtgttgataggggc

SEQ ID NO: 43972 - DNA, 293 bp, Mus musculus
  source 1..293: mol_type = other DNA
gagaaaagttgtttaaattccaatttgacataaaatacttctctagattgggatacttaacttttgacagattttcttttaaatagcaagttgcttttaaaacaaagagtcccaatctattacccattattacaaggtcattagaagcgcagagtcctagccttgaggcctgggcttcctggaggcgactacagaagccccgcctccgcctcacaaagcctcgagggcgggcttgctgtggccccacacacgcctgcgtgtgggggcccgtgacgacgcatataaaagtgggc

SEQ ID NO: 43973 - DNA, 417 bp, Mus musculus
  source 1..417: mol_type = other DNA
ctggtagctgctgaccagatgtgaggcctgtcaggggcagagtcacacggggcagtgactcggccggggcctcggtggtgctcctgatgtccctcacccacccctgaagatcccaggtgggcgagcgggatcacagtctttcagctagcatcctgtactccgtgagtacctgtggagagcccggggtgtggcactggcaaagtaagctggccaaaaccctgctcccctagaccagggtcctgagcatccagtccacgctcacggaggccaagcaggtcacctggagggcggtgtggagtggtggtggcctctacatcgagctcccagctggacctctgcctgagggcagtaaggataggccacttccccttagggctgtaggggatttggggcctgggcacaggtggctaatgactc

SEQ ID NO: 43974 - DNA, 490 bp, Mus musculus
  source 1..490: mol_type = other DNA
gtgctagtctggttgatccacaggccaggctgcctgccaccagggagcactgggttcccagcctcagaagggggaactcaggctaagatttatcttagttttagctctgtgcattgcatacagaagttcaccaggacccctggatgggtgctgggacctgaaccctcagtcctcagcaagagcagccagtgatttggctgctgagcgcagcagccacagccgcgggtggcaactgggctctgggactcactgaggaggcaatttccagaacgttatctgggggggcccccaagtatttctcggtactcagtgtctgcggaggcactgaggggatgtgctaggcacgcggggtacccgggtgctgcgtccccatctgccccagacctgctccaacacgtgttgtcgcgcgcgtcccttgcagctcgcgcgcaccctggccatgcgcacggggatgcgcggcggggacgcgcacggcggagcccgggaggtg

SEQ ID NO: 43975 - DNA, 614 bp, Mus musculus
  source 1..614: mol_type = other DNA
ctccaggatctgggactgaagggttagccaagcctcaccgggtgcacagggacagccagggcaacatgggaagtcagagcccagcctggactgcagagcgagctggaggccagcctgagctgcggagcaagttggagggcagcctggactgcagagtgagtgtgaagccaacatgcatagtgagttcaaggctagcctggactacgcctcctgccagggcgcaccccgcgcacacctgaggcgtcccagctgcaccgaccctgaggtggggacccccttcaagccggggtgccgggctgcatgcacctcgggggccgcgctggacgccccggggatggagcgcgggaactcgccccattcggaacagcggcggcggcggttggggccccggggcgcagggcgggctaagccccgccagaagtctgcggtggggggccgggccgatcggccgtggcgctcacctgggccgcgagtagcagcaaagctgcggccagccgcgccgcggccatgtccgccggtccccccgcagctctaggcggaactggcaacgccttcgggacgccgcaacgtgcttgcgccgaggctgcgcgtgcgcaaaggcctccgcgttagaa

SEQ ID NO: 43976 - DNA, 180 bp, Mus musculus
  source 1..180: mol_type = other DNA
ctcagccaagctctgtgtcagggagccacttggagctgaggagagaggtccagcctccccatatccctgtagcctgggcatggcacccagggagaaccctggaggcgccgccccgccttttctaacgcggaggcctttgcgcacgcgcagcctcggcgcaagcacgttgcggcgtcccga

SEQ ID NO: 43977 - DNA, 337 bp, Mus musculus
  source 1..337: mol_type = other DNA
ctgcgcagctctgctgccttgcccacagggcaggtgtactctgcactggagctggcactgctgctggggagccgccggcactgcgacgcctatgatttgtaatatacattttacaactggaaacttttgtatactcaaataaacattgactttatcagagtagatcttcagatagcaccggactgctcttccgaagaaaaaaaaaaaagcagcgaggattttatattgtacgccggggaggtccaggacaaaatgaccctggtccagcccttgccaagccaaaggaccagagtgcacggcgcgcacgccgcagctttgtcagactgctgacgacgcg

SEQ ID NO: 43978 - DNA, 509 bp, Mus musculus
  source 1..509: mol_type = other DNA
ccactgtgccacgtgaagccaggctgacatgatggctgaagccctggattcatcgctgccatcacagaaccaggcacacacctgtcatcctagcactcaggaggtggatgtggctcagcagtacattcctgctgtggactgtcagcccaaagcctttgcccaggctctcacaccacctgtgagctgtgacgtacgtcagcagtcggttacagctgcagcaggggttagtccccctggcgtgtgggtccctcaccccgcagcctacacagcgacttggccagcttgcagcctgatctctggcttgtacctgtgggactctgtaagactctcaaggattagcattatgtaatggaagtacaattttaaaatcattttgtgtttgagtatgtgtatatttgtatgcatatgctagtctcctaccatgcctcaggtaccttgagtttgtagaggctgggcagtaagtacctattagttttaagtggtgtccaggtccaagctcaggcctgtgg

SEQ ID NO: 43979 - DNA, 446 bp, Mus musculus
  source 1..446: mol_type = other DNA
ttttgccactgctcccccccggcagggggcagggtcactccgcagagcgtctgggctcttcacctgcgcctcccgtgcacacgtgaaattctcggggtgccgggaggagggagaaagggttccggatctctccccctgcgatcgccaggacccctggggcaccgccttagagggctgagcgttctcaaagcaccttcttactgtatacttagtaatctccggggacagcgaggggattccagacagccctccccgaaagttcaggccagcctctcgcgctggaaaccccgcgcgcggcctgcgtagcgcggctgccgggaaatcaggagagaaacttctgtggtttctagagctctctctctagagctcctgacccccacgtggggccgccggagctccgagctccgcctaccaatgggtggaaagcgcatgcctccagtggccac

SEQ ID NO: 43980 - DNA, 460 bp, Mus musculus
  source 1..460: mol_type = other DNA
ctgtggttcccgtggacacggccgggagctctacaggcccccctttcccccagggtggccacgtgttgagcctcatggtgagctgcctgtgaggaatgagcctagctgactcacattctctggcttggggtcagcaatgtccagacacatatgtggacaaatgcagccatgtccgtgccctgtgcctgtctgaagacatcctcacacagaacttgtatctgtgtatgctgatctctgcacacatgcctgcactcggtctgtgttctacccagctatatttagctcaggagaaatctcgggaagccctgatgagctgcatcccatgctgaggcccggcttctctgtccccaggaggggagctggatgtcagcccacacaccagagagccaggcaggctgaaggatttttttgttatgatcattaattgaaaactgattagtgcatccacccttcccagcat

SEQ ID NO: 43981 - DNA, 361 bp, Mus musculus
  source 1..361: mol_type = other DNA
cctttcaacccttaacactagataggagggtttgcacacgactagttaacaaaccgttctgaaaagtgtccataattcctaaggtcacaatcgcagaaactgcaaatcatagtcagctgctgcagactatctgaagcagccccatatgttaaaacaaaaacacaaactcacatatttctgtgtttttcgaagaacccaattggagtccaggagacaattgtgtgcattatccaaattctttattaatggcttcatgtgtgcatctgtacacatgtagaaatcagatgccaaaccccgggttttactggaaagctggaacggcatgccctgcgtgctccgcgccaaggagactacaaattcc

SEQ ID NO: 43982 - DNA, 242 bp, Mus musculus
  source 1..242: mol_type = other DNA
gtgagtgcctgggtcagaggacggagtcccagagattgaactgggtcatgcaagccggggacttgccgagcacttgcagggtccgggccgcccccaccctgtgtgcctggtaccccagggaggcctcccagctaagaggagacgactgcacggatcctgctggccacaggcgcaaggcggggaccggtccagcgctctgggagctgaggcaggaggattcctggtccctggtgagcttcatg

SEQ ID NO: 43983 - DNA, 426 bp, Mus musculus
  source 1..426: mol_type = other DNA
ggatgagggatgttccagatgtctctgaggtcaccaagaaaacttgtagagaatgcagacccatgggctggggcttccagcatgagtccctggtgccactgcccccactggagtccctgtcttaaaatatatatatatggctgaagttataaaataaaaaatcagtatttctgctaaaatgatgctcagcggaagatgaatattatcacaatatgggatacaaatgtatgcaaacgtcataatgaaacttatgcctaacgttaagcagcttctcctcagagaggccccttgctagtgaatggcccgtggagacgccattcctgggtttggcccgcccactcaggctaagcctaccagactgtcggccctaggctcctcctctggaccaacctccggaggctccgccctcatcgcgggagaccccgc

SEQ ID NO: 43984 - DNA, 361 bp, Mus musculus
  source 1..361: mol_type = other DNA
ctgttcaccacgtgggtctcagggagccacccaggctgtcaggcttggaagattaatgatacaaagtaaacttttgttctgttgacagcaggcttggcaagatggcttccagatagaggctgaccctctccatagctgccaaggaatcgatgctacaacaccaataatagggttcttagtgttttgggtgtggctgacatcttaatctatgaaggtttatataagttggggcgacagcatgcccccggttgctgatggacacccagggcgggcttggcggtgacctggggctgcagctgcccgggcccgggtcctggcaggcggggcgggcggggcgggcggggcggagcgcagctggggc

SEQ ID NO: 43985 - DNA, 336 bp, Mus musculus
  source 1..336: mol_type = other DNA
catgtcacatacatcagggtaggctcttggaagacagagttgtaaaactatagtgttctgtaaagcacagtaaaagcacggtttacacagcatacatattgtgtgaggtgctctaccaagcgctcgggaagctgatgcaggaggattctgagctttctgcatgccacccagcctgggctgctcagcaaggcatactgtgtagtatctgtaggctctactcaggtgccatgtcacttcaggagagctaatttatctggctatcaatagtccattcgctgtacagctccgggatggaggccctacttccggaactatgttgccggcactgacagtgtc

SEQ ID NO: 43986 - DNA, 497 bp, Mus musculus
  source 1..497: mol_type = other DNA
ggcgtgggccaccacgctttggctatcctttgtagacaaggcttgcctcaagagcatgctaatctttgtttttcttttaggcatcagaaagataagtttgtaaataggttttaaatataaaaataagtgaagtagattgtttagtggttaatcacacttactgctttcacagaaagtgggatatgccagttcaggcggctcgtagtattgtcattttaaaaaaaggaaaaagaagtaagagcactgacttggtggctcatgccctcttctggtgtgtctgaagacagctacagtgtacctacatataaaaataaataaatctttaaaaaaacttcatagcatcagttagtggctttgattccagactccataccacgtggtctgccttggtgcctcaggggtccgccgccgccccaccgtgtgacgtcacttctgttttagagcgaagggtgcacttgagcgcatgcgcaaaaggaaacctacacaggttctgcgct

SEQ ID NO: 43987 - DNA, 284 bp, Mus musculus
  source 1..284: mol_type = other DNA
gttcctgtaggacagctcctgcaggggtgttctgagatgtcatggtcacaggctggtgcaggaaggaggggccagccctggctgactgaaattgcaggtataagtcagcattcccagcccaggctgtcagcaaattcagaccagcctgggcttccatggaaacagcatcctggcgttccgagggtgcgtaaggctccgcctcactccactgtgttcagcgcatgcgcaaacaccggcgccagactggttgttcctgcgcatgcacactcgcgttgaccagctgc

SEQ ID NO: 43988 - DNA, 256 bp, Mus musculus
  source 1..256: mol_type = other DNA
ggcacataggagctcctcaatgagcaagagcctatcctggtcactgagtatgcacactgagcttgtctaatgcaggtgcaaaggccccgggggatgcgctgtgcagcagtggctcctgctttatgacggcatgaaacctacccaaggaccctgggttttgctggagatccactttgctctttgctccctggaaaaagcacaaaacagtcctgcctgtctcccagtcaacagcaggagctgggctgggagctgctgg

SEQ ID NO: 43989 - DNA, 339 bp, Mus musculus
  source 1..339: mol_type = other DNA
ctaggcagaggctccacctctggtcatgtccccagcctctcactggggatcctaggagtagacaaagttggctttgaattcctagagatctttgacagtgcccttgtcatgaagacatggctcccatgtgcccactgtggggccggaataactccacaggtgtgcactgctgtaaaagttcctgcaattgcggcccagaggagcttgcacccaagcctgaggccctagttcaatcctttctacagagtagaaagagagggaaggcccctgcctagatctgctccatgtgcagctggtggacaaggattgacttctgtctgcaatgatgcatgaaggcag

SEQ ID NO: 43990 - DNA, 135 bp, Mus musculus
  source 1..135: mol_type = other DNA
ataaggtagctcaggcctacggtcccagcggcccccgcgtttgagacgcacaggccggggagccacctcgcgcatgcgcctcgggcgggacctcgcagaaaaagatctcgcgagagctcggcctgcgagcttgtg

SEQ ID NO: 43991 - DNA, 438 bp, Mus musculus
  source 1..438: mol_type = other DNA
agtttgcaatagggcccggggcgcgccgctcccctttccgagtggtagtgggcaagcggggggcggggaggcctatccgggattgcgcgcttggcggggcctgcgtgcaggggcggggtttatgcagaagaggcggagcttccgcggctccctcgcccggggccggtggcggtcccggcttccggctgccgcccctccccccttccctttagttccggacgctcagggaggaggagaaaggttcctccgcaagactggaggttccctcccctcggggcttcaggcgaggccggggatgcgcggcctggcgcgggccgggccgggcgcgggggaggtgacgggcggacccagatccgggtgcatcgccctccccccagcccgggtggggattggccgggcggcggcggagggtggcgcggggccgggctcagcgtcgcc

SEQ ID NO: 43992 - DNA, 237 bp, Mus musculus
  source 1..237: mol_type = other DNA
ggccggaggaactcccagtggctcccccagctgggccctggcacctctccggggctgggctcggggctctggacactgaaattttaatttgccggtggcactgaggccacagaggtcctgagtatcacatgcccagtggtcctgcctctgaggccacagtagaagctcgcactctgccctggtcccgggcacctaccaccctgtgtactaggcacctggttggggatgtgagtggtg

SEQ ID NO: 43993 - DNA, 330 bp, Mus musculus
  source 1..330: mol_type = other DNA
ttcgattccctgaatccatattgtggaaatatacatttggtaaagaagcaaggctaccttgtttctggttcatccctgctacctacacagtggaaggagaaaatgttttgtgactttcacatatgtacacactaaataaacacaaaaatttagcggtttgctgctatttctttaagcagcagactcctccccaaggcgcgtgcgcgtgatgcatcctcccgcctctcagacgcgggggcgtggaggaaggagccagcactcgcttttactggctctcgcgcaggctccgccctttagtcgagggccctcacgtgacgcgacggctggggc

SEQ ID NO: 43994 - DNA, 358 bp, Mus musculus
  source 1..358: mol_type = other DNA
agaccagcctggcctcgaactcagtgcctctgtctaccaggttagccaaggcgtgcaccactacttgtctccggacaaaaaaagtaaggcagatcttcatgatttggtgcggtcctgggctgcatccaaagaccggtccgaatttcaaagtcttgacctacaaggttttcaagaatcatgttgtaagcaactgtgttctttaaaaacccatccgtggatcttggcccagggtccagagactgagctagccacgccccggccgcgccgcagccactcccaaccgcgctctgtgcatgcgcagacgctggctcctagccaacccggccggacgagcacccggcgccgtcacgtgacgggc

SEQ ID NO: 43995 - DNA, 394 bp, Mus musculus
  source 1..394: mol_type = other DNA
cccctcattaagcagagcaaggatggctcgggctgtggatcagaggtgacagctgccaacagatgtaaattgaaatcatattcattttaaggcaaggatgaattctgctctaatttgaaattgtatgtgccagtccccatgtcagggcagggagaggccttgaactgtcagtggtttagagtacttgagagttaagggtaaacacttagtccttttcaccctgtcctcaggcgtgtgtgtgcagacagaaactgtgctgcgccaggccatcgctgaacgcatcaagcccgtcctgatgatgaacaagatggaccgggccctgctggagctgcagctggagcccgaggagctctaccagaccttccagcgcatcgtggagaacgtcaacgtcatc

SEQ ID NO: 43996 - DNA, 446 bp, Mus musculus
  source 1..446: mol_type = other DNA
ttctatttatttcggaattacaagatagcgggagggtaagtgcctccaggaaggcaggcagcctgccttagacttgcagcccggctgtgggaataaactacagtggttgatccacatgtgctcgcaactctgggcacccgggttttattgtgagttcacagtactgctcaggggtttggtctgcgcatacccggcaggttattgcaataatgatgtgctccacaagggcggtgtcgagccttcctgtgaatctgtcaggctggccaatgagcactcctagccttgggtgatgacgtcactagtcaacgtccgtccgctgagaggtcagatgctaaccaatgcccctgcgctgtcagcgcatgcgtagatgccgaggttctcgcgggggcctcgctggcaccgggcggggactcgggccgggtccgggacgttgtgttgggacccaa

SEQ ID NO: 43997 - DNA, 419 bp, Mus musculus
  source 1..419: mol_type = other DNA
cagccgctgcacagtaccttgagactgtcccacagtgctcctctagaggctgctggggccacttctatttatttcggaattacaagatagcgggagggtaagtgcctccaggaaggcaggcagcctgccttagacttgcagcccggctgtgggaataaactacagtggttgatccacatgtgctcgcaactctgggcacccgggttttattgtgagttcacagtactgctcaggggtttggtctgcgcatacccggcaggttattgcaataatgatgtgctccacaagggcggtgtcgagccttcctgtgaatctgtcaggctggccaatgagcactcctagccttgggtgatgacgtcactagtcaacgtccgtccgctgagaggtcagatgctaaccaatgcccctgcgctgtcagc

SEQ ID NO: 43998 - DNA, 427 bp, Mus musculus
  source 1..427: mol_type = other DNA
gggagggtaagtgcctccaggaaggcaggcagcctgccttagacttgcagcccggctgtgggaataaactacagtggttgatccacatgtgctcgcaactctgggcacccgggttttattgtgagttcacagtactgctcaggggtttggtctgcgcatacccggcaggttattgcaataatgatgtgctccacaagggcggtgtcgagccttcctgtgaatctgtcaggctggccaatgagcactcctagccttgggtgatgacgtcactagtcaacgtccgtccgctgagaggtcagatgctaaccaatgcccctgcgctgtcagcgcatgcgtagatgccgaggttctcgcgggggcctcgctggcaccgggcggggactcgggccgggtccgggacgttgtgttgggacccaaacacccctga

SEQ ID NO: 43999 - DNA, 305 bp, Mus musculus
  source 1..305: mol_type = other DNA
gtaggctaacctagtctacatggcgagttgcacatatatacatgcatacataaacacatacatacatacgtatatatatagggaatggtcacatggtgggctcacaatgacacggtcactctagaaggattttgtagccaggcctggtcatcagagcaaagctgtcttgtgattccatacacttttggaagaggaatttcccacagatattttggcacaggctaaaagttggctgctgtccctttttaggcaaaaggctaccaaagctattgggggcctcttcccccggggcggcctccaggctg

SEQ ID NO: 44000 - DNA, 317 bp, Mus musculus
  source 1..317: mol_type = other DNA
acgcccccacccctctttaaatgtttgtgtgtgtcatgtgccagtgcatgtgtcagtgcacatgcagagggcagacgttgacatcaatggccctccgattggctgatcacttctgagatgggaggattgcagatgctgagctgcatggcaactgcaggggcgctgtttcctgggtgaatgagggaccctttgactcaccctgaaagggggctggaagcctccattttgcataagtaagatgcaccatctcagatggctgggagaaatgctttcgcctcagccaatctagaactgtctatcaggcctgggcccgcccc

SEQ ID NO: 44001 - DNA, 387 bp, Mus musculus
  source 1..387: mol_type = other DNA
ctcagctgttaagagcactgactgctcttccaggtggctcacaaccatttataatgggatctgatgccctcttctggtgtgtctgaagacagctacagtgtactcatatacataaaataaataatttttttaaagctgttgcccagctgatagggccgacacagctgacaaacccctgtggcttctcaacccaaactccgtctccaaagctggtaaccagacaccccaactggggttaatcagttaattgacgcatttataggtcagagggcactgctgtgcgccatccacagcctggaacaggtgcacgtagcagaccgggcctagccacgttagcagctccctcgctattaataacctggcggggagccggcgtcgtgtctataa

SEQ ID NO: 44002 - DNA, 234 bp, Mus musculus
  source 1..234: mol_type = other DNA
tctgtcagtctgaggactccaggaacctcctggaagtgagatctcatgctgaccactgataaatcagttccttaagccttggaggccacacatgcgtcagcatcagcaggtgatggggcttgccgccaagcccaactactggagtgcaggccgggtctagaaccgacttccctaagatgtcgcagacaggctgcttgaacgagcacggggcggtgcgtcgggggcaaggccctg

SEQ ID NO: 44003 - DNA, 373 bp, Mus musculus
  source 1..373: mol_type = other DNA
agatggccgactccgccccatgtcaccctgtggaccactgggcgtgcatggcgcactcagcctcccaacactaggctgcattgtgagtgtgggcggagctccaggggcaggagcagccttgtgactgccactgtgccgaccctcactagtgaactcagacccgggtcaggtttcctggaggaatataggagactcgcgggtcccaggcctgcctgtgtccaccggagccgccctctcctgcccgcccgggatgaccagtgtcgtcctccctgggtggcggggcactagggccaccacagactggagatgtccgcctgacgctgggtctagctgagtcaagtaacccagaccttggtggcctggctcagggaca

SEQ ID NO: 44004 - DNA, 425 bp, Mus musculus
  source 1..425: mol_type = other DNA
ttggattgcaggctatgtccttcaaccccaagtgctgaggtgacaggcctgtgacaccacagtgtgtcacccatgctaactgtaggtacggaggaggtctcgctaggcccgtgccagagcgagtcagaccactactgcacccgtggggcatctgccggcaagggagcctgtgactcagacactgtcatcagcaatagggtccgagaaaagtggaactttgggctgccttggttccaagtctctgggcctccctggccaaggactcctcagtgggtgcacccccaaacgtgcttaattactttgcctccggagggcggcatgtctgaaagtacaggcagaccaggcagggccgcagcttgccttggtctccttcccggacagggtgcgcgcgtgcccgagcgctcccagctttcccagggtgggcg

SEQ ID NO: 44005 - DNA, 476 bp, Mus musculus
  source 1..476: mol_type = other DNA
ataacggtacaatctagacttgagttgacactggaatttgcatggtcctacatatagattagggacaatgataattcctaaacttaactgtgtgatctaaaaagagttcacagtctagaagattctagtactagtctatttattcttgagagtctttttttctattagtgaatagaacacatacgtaggcatctacctacctctgcctcccaagtgtggggattaagctggggttcatcactcccatacttttaagctttcaaaaattccacaagggatataagcatgattttgctgtgacatttaaagtaaataaagatctaaatactttcctggaactcaagcagtagccaaggttaaccttgaattcagagatcctcctacctgtatttaatgaaatattctttgaaccgatagctacagaagttaaaattagtcgttagtcgggcaaatttttttttaaagactacatttcg

SEQ ID NO: 44006 - DNA, 498 bp, Mus musculus
  source 1..498: mol_type = other DNA
tgctgaggtgacaggcctgtgacaccacagtgtgtcacccatgctaactgtaggtacggaggaggtctcgctaggcccgtgccagagcgagtcagaccactactgcacccgtggggcatctgccggcaagggagcctgtgactcagacactgtcatcagcaatagggtccgagaaaagtggaactttgggctgccttggttccaagtctctgggcctccctggccaaggactcctcagtgggtgcacccccaaacgtgcttaattactttgcctccggagggcggcatgtctgaaagtacaggcagaccaggcagggccgcagcttgccttggtctccttcccggacagggtgcgcgcgtgcccgagcgctcccagctttcccagggtgggcgggggacccgagagcacccggcacttggtactcagcactctgcccggacggtagtgagaccggcgctaggacccgcgggggctccgagccgggtcccctccatcct

SEQ ID NO: 44007 - DNA, 330 bp, Mus musculus
  source 1..330: mol_type = other DNA
ctttaaatgtcacagcaaaatcatgcttatatcccttgtggaatttttgaaagcttaaaagtatgggagtgatgaaccccagcttaatccccacacttgggaggcagaggtaggtagatgcctacgtatgtgttctattcactaatagaaaaaaagactctcaagaataaatagactagtactagaatcttctagactgtgaactctttttagatcacacagttaagtttaggaattatcattgtccctaatctatatgtaggaccatgcaaattccagtgtcaactcaagtctagattgtaccgttatacaaagtggaagtccctcact

SEQ ID NO: 44008 - DNA, 266 bp, Mus musculus
  source 1..266: mol_type = other DNA
ttaaagaaatttattacatatattagaagtgtattttactactgtcattttatcgctttacaacataagttatcaataaaaataagcatatgtcatattgcaaaataataagatgtatgtaatatatattgtttgttgtgtttttgaaacaccttctgaatctgaagtcttcttgccccagtgtccccccttgtgatgaaagctggaagcttgacattcatcccgctgggtactcaggggttaaggcctgtctggccacgtgagag

SEQ ID NO: 44009 - DNA, 420 bp, Mus musculus
  source 1..420: mol_type = other DNA
tgtttcaaaaacacaacaaacaatatatattacatacatcttattattttgcaatatgacatatgcttatttttattgataacttatgttgtaaagcgataaaatgacagtagtaaaatacacttctaatatatgtaataaatttctttaactcgtagactaggcttgagatagggtcccacctatgtagccctggctaggctggaacttgctatgtagaccaggctagtcttagagggtgcccctgagcctcatgtctaggctctgcccggctgtagtagactctaggcttcctgcaccggacgccggagggcgctcgcaactcccttgagtgtaagcccagttatatccaattggttaggagcttcgcgtcgacgccaggctccgcccgggccccgccccctccctccgccctgtagt

SEQ ID NO: 44010 - DNA, 321 bp, Mus musculus
  source 1..321: mol_type = other DNA
ctttcggaaagtcccacagggactgtgcacagaatttgtggactcgctgagtcacagagaaaccgtgtgtctgactggggacaagccaggctcgcccacagccaccggctgcagcatgtggcctctcttctgagcacaggcacagtaggcataatgccagatcccctggaaccaaagatacaggtggttgctagccattctttatgtcttagacagggtatccctgcatctcctgtctcagactcctgagagcgaggatcagggccatcccctctgagtgtccctgaggggaaccagtgatgccagtgaggggtggccctg

SEQ ID NO: 44011 - DNA, 419 bp, Mus musculus
  source 1..419: mol_type = other DNA
agctaccctagaaaccgaggactcccgcgagcgcttgggtctccgggttacccctaagcgcagtttctgggttcattggccccgaggccacgcccagcgcaggtccccggccgggtctcccgatctacagttgtcgatctccgcccctagggcactgcccatgcaagtgcaggctccgcccactaggcgcctcttccgccgcacgctactcgccggtcacctagggcgcgagggagggcccacctaggtcagtcctcactgcatgaatggagcgtcaatccgctagttctaacggcgtcccgttaggaatctactatgtgttcccagcttgagaactccggagaaatctcgggttatgttccctggagtcccgggagggattggacagtccttagagcgccgcgccaaaggaaagcccc

SEQ ID NO: 44012 - DNA, 297 bp, Mus musculus
  source 1..297: mol_type = other DNA
caaatgttgagaaggtaaagacatttgttttgcctcagcagccttgtccatttctgtccctagcttatgggatggatagaaggggcttcctgctgctgacaagagtctggctgaccctgggccacagccaggccaggcatctcaatccccaccaggacctgtcagggccatgcctggctcagtcatcctgggcaaccagtcaggctggagctggccttgcgctgtgtcaggaccagcttggttcccaccctagcggctgagaggcgaggccagcgccagcgcagggggtggggctga

SEQ ID NO: 44013 - DNA, 428 bp, Mus musculus
  source 1..428: mol_type = other DNA
aaaccccttggcttgctgagtcagtccgcactgaccttcaaaatgatttttttttttttttaatgaaaatgctcttccccttgggaagggaaatcagtgcctggtggtcattttttaggtctgtgtgtgatgcacatggcacagcacacagtggtgggttccgaatgcaagtcgtccactaggtggcgagcaccttttttttcaacgtagtaagaaaaactacacctggccgtactgcaggggcggggggtgcttagaagccggtaatgggccgccagtcgcctccgattggtcccgagcgcgccggagcgcagccgaacttgcccgcccggcgcgcgagcgggcgcgggcgcttggttggaccgtcgccgcgtctcaggtcccgggaaagttgagccgggaagtccgggcctgcgcggggcgggggc

SEQ ID NO: 44014 - DNA, 395 bp, Mus musculus
  source 1..395: mol_type = other DNA
caactctcagtttctcttttactgtgggatgttacagaagactggagtaaaatcacataaaccccttggcttgctgagtcagtccgcactgaccttcaaaatgatttttttttttttttaatgaaaatgctcttccccttgggaagggaaatcagtgcctggtggtcattttttaggtctgtgtgtgatgcacatggcacagcacacagtggtgggttccgaatgcaagtcgtccactaggtggcgagcaccttttttttcaacgtagtaagaaaaactacacctggccgtactgcaggggcggggggtgcttagaagccggtaatgggccgccagtcgcctccgattggtcccgagcgcgccggagcgcagccgaacttgcccgcccggcgcgc

SEQ ID NO: 44015 - DNA, 424 bp, Mus musculus
  source 1..424: mol_type = other DNA
tcaacaatggccccagggccttggtgactagagcctctgggcaggcaggaggcgggaggctactcggccctctgttcctacccctaccagcagctcaggtggctgggatggaggtattctcctgtctacaggtgctgcagtggcagccatgtcccatttcataggtctcaggccacctcacgtgggtcccttgcaagccccactcctgcagcctgcatggcctcccatgcatgcaccatctgtggggagttacaggctagccataagtggctcaaggctgaggcaggatctcacccagcaccttggggctgggaccagcaggacgcacgtgtccctggaggggccccgttgggcgccggccatcaaacaagccgtgcgctggaaattcacgcccatgggacgggatgcggccggccaggtgtgg

SEQ ID NO: 44016 - DNA, 496 bp, Mus musculus
  source 1..496: mol_type = other DNA
gtctgccacgtggggctcctggcactagcagccctcattaaagactaaagctattctctgtaattaataattaattagcactaatatgtccattctggccccttctgcagggagcacgcgcgggagtgagcaccagcctccagctgcaggctagctggggcccaaggcagagtgtgggtgagtgacagacatctgggcgcccttcactttcagggctagcctggatagctgttatcctcagctgcgttctgagcttgagggtggcctgggctacatgagaccctgtctcaagctttcaggttctttgttacaagaagaaacaaaacttttttctttagtcaaacaaattaaaacgggccgcgggagtgcgtcggacagaggccacgcctcctctgggcgccgggccgagacgcgcggctccggttggcgagcgtggccgttgctccgaggctccgccctgttgaggcggctcccgggagcggcggcagcgtagccg

SEQ ID NO: 44017 - DNA, 363 bp, Mus musculus
  source 1..363: mol_type = other DNA
tgcctgcaggcctgtgggagtcttaacagcagggccacctgctgctgttgacatctgtacccaaaagcaaaatgcctttagatgtgacctgccctggacagagcagccagctgtgacctgcaagcagggagggcctgtggcttgggctcccaccccacagcagtgtcctgggtaagttggccaatgagcaggccctgggctctgcatgttcagcgatgccaccagtgatcccagggtatagatggggtggagacccacgctctagagggcatgacctcccgctgtggggcagggaggggggagggaacactttgggtcccagccccgcaccaggaagtaagctgaggtcttagccctgtcaac

SEQ ID NO: 44018 - DNA, 350 bp, Mus musculus
  source 1..350: mol_type = other DNA
gccctctaccaagtgataccttttgagccattgtgatgggcccaacatgtagaattgcttccagctcgaggctagcctggctagagccgcgcgccgagcgccatccgtggggagtcacttaactgttgcttcagggggaagcgcccctgccccgggcattgatttaaatcctgaagactcccgagctgctccgcgctggggcgcgcaggcgcagctgtttggggtggacgcgagcacggcacagggggcgtgccgctgagggcgtggcttgcccacggaaaacccctaggcgcggtgatgcgctgggcggcggggccggtcgcgggcgcgcgcgcggcctgcgggacaga

SEQ ID NO: 44019 - DNA, 447 bp, Mus musculus
  source 1..447: mol_type = other DNA
ctcacaaccggtgtacttatatattataagtacatctttaaaaataaataaataaatctttaaaccaaaaaagtaatgaacttcatgacatttacacacacacacatatatacatttgttttgttttttagctcactttgtagaccaggctggccttgaactcaaaaagacagggtttctctgtgtagccctggctgtcctggaactcactctgtagaccaggctggcctcgaactcgcatatttaaaaatttaaacttcgactttaatcgaactcattctcaaattgactgcaagtgccctcggcgcgcccacactgcgcatgcgctatgcacggccggcccggttgtgctgaactcttcttccggaggaagaccggaagttgcttacagtcctggggcgtcgctgccgcatcgttccgggtgtggtcacccctagtcgcgacgat

SEQ ID NO: 44020 - DNA, 564 bp, Mus musculus
  source 1..564: mol_type = other DNA
gccaaaccctttttccaaacttgaggatgacctggaattcttcattctcctggaacccagggcctcatgcaagctgggagactgctctgcctctgagctacagcccagcacacagttttatttctgagacagtgtcttgctctggaggtcagataaggcctagacctaaccatcctcctgtctcaggccctgtggtgggaatgacgggcacatgaggacatcagtgccccgtttctgtctcctgcacgtgcgcaggctgtggctgcacccgtgacacagcttgaggcccaaggttgagggcagaagcctgtgcccgtcccccttctaggaatttgcagcctggtgctcacagagctgccaaccccactggggtcccagccaccaagcctgactgccacacttggttgtgtgcacgtgacagcgtggacgtccggactctaaggacctgtccctggggctgctggtcttctaggttaatattaaactagccgcagactctgccggggtctgatgccaagcaggcatgggaggctgggccacagacggcaggttccccaccccgcc

SEQ ID NO: 44021 - DNA, 254 bp, Mus musculus
  source 1..254: mol_type = other DNA
cccatgtccttgggtccctgggagatgcaggcttcttcagacgctgccttcagaaaggccagctgggcaaggccgttcaaggtcatctttagctacatagtgagttatgggcagcctggacacaccccactctgctctttatcacacagtagtgtcagagcctggcctggcactggcagtggccactttgaggggcagctaagggctcagccccatctcgtggacctgatcgctgtgtcctcctctactctaga

SEQ ID NO: 44022 - DNA, 378 bp, Mus musculus
  source 1..378: mol_type = other DNA
gggaaggcgacctgcctgaggtccctagacctaagtgagatcgacggtcccgcgcgtgaggacccgggtcccagcccatgaaccaggcagagtggctcctagaatccctcttacacagcccaatggaagggctcatccatagggtctgaagctgaagggggagggggatccatcttcctggagcactgcgagcaagtgatcaggctcttgctggaggctttgaatgctgcagtgagactgactgtcggatcagctggagctctaggctggaatcttccgaaggtaaaacttagatcccagctcagagatgaaatgggtccgggacacctgccgaagaattttctccaccgtgaagggtcctccctggggtcccctcgg

SEQ ID NO: 44023 - DNA, 238 bp, Mus musculus
  source 1..238: mol_type = other DNA
ggtgtgagtgacatataattttaattcacatcttaactttgcaaaaaccaaagttagtcaagacaaaggcgaaacaaggcaccaggcgggcactttctttactgggaatggtttttaatcagtgggactactgtcacagggttccacagcgcgcggagccgtttaaaacgaggctcggcggcgcggcagacagggccgtccgcagtgctgcccgaaggaccctagggcaggcgcgggc

SEQ ID NO: 44024 - DNA, 373 bp, Mus musculus
  source 1..373: mol_type = other DNA
ccggccatcatcctgccagttctaggctagcctggtttaatgtctctgacatcatgcaggatatacttaaactaagtatcggggcatgtctgccggataggccactatcacacctggaattatggaggggaagagactgctgctttcctgacaccctggggtagtggagtcccagggtgaccctgcggactcccaacagatgggagctgtgggtctctggcacctgctgctgatggacggctgcctgcagcccttctgcgccctgagggctctgccatcacccacagaccaggcaatcctggcctggttgggcagaatggacggggtgggccacccagccaggccacctctccccgctgccagccaccagcgc

SEQ ID NO: 44025 - DNA, 332 bp, Mus musculus
  source 1..332: mol_type = other DNA
gcacatatttattattattattattattattattattattattattaggtatttgtaagcccaggctggcctggacttctgtgtacacacatcctgtgagttgccctctgaccccagcaaatgtaacaaaaattctaaaaagatattaagcacctgttatggtatacaagtgacaaacatttatgacattctgtctagccctggctgtcctggctagaccaggctggcctgtgtacagttgacaaatacttattaggcacctgctgtatatataagcatacggtggggtgccatggagatcatgctctctagctcagagccgcagtgactcc

SEQ ID NO: 44026 - DNA, 181 bp, Mus musculus
  source 1..181: mol_type = other DNA
gtgcacagctgtggcctcctagatatagtgaggtcctgtggccaccgtgaccaaacagaggctcagtctaaaacacagacacgccccgttcttgtttagggtgtggaaggggctaaccccatctgagtcccgacggtgatgacgtggagtggtgttcttgaattctagcatccaacaggat

SEQ ID NO: 44027 - DNA, 370 bp, Mus musculus
  source 1..370: mol_type = other DNA
ccatggctccagccactatcatttgaaatgtaaaaaaaatattcaataaaaatgaacacacaaaaatgctatgtataaaatattacctattgagttttgattctagctggcctggaagacaatatatagccccatagtactaggaacttcaatttcaaataaaaatatgctagcacagacctgccattccagtctgatgcaagagccagcctgggtgtctgcttctggccttgcacgtccctatcagtctttctgatgggcatgcccagcctgaagtcccccacagcttcaggacttctgagcctcacccggcgccagcgccgcccgccccctgaagtagccgaggcggccgccagaggcgctgtggcgc

SEQ ID NO: 44028 - DNA, 373 bp, Mus musculus
  source 1..373: mol_type = other DNA
tacgcttatctccccaggctagagatacacgagccagaaggatggtctgaggggctcagcccagtgattcagctcccagatggctgtgcagacagaaactttacaaaaaaagttctgttttgtcctctgtggagcaaaatagaagccttcctggtatacagtaggcattcaaggggccagacatgaccctctgcttcctccatgggtcttggggacacggaagcacagacttccctgaaatcagccctgaggctgtgcccactggtcgcttcctatttggcccagaggagggggcagctggggccagtccaccaccgacctgtctggcgggcagggccaggtagggggcgggaagcagcacccaggtccccgc

SEQ ID NO: 44029 - DNA, 307 bp, Mus musculus
  source 1..307: mol_type = other DNA
tacgcttatctccccaggctagagatacacgagccagaaggatggtctgaggggctcagcccagtgattcagctcccagatggctgtgcagacagaaactttacaaaaaaagttctgttttgtcctctgtggagcaaaatagaagccttcctggtatacagtaggcattcaaggggccagacatgaccctctgcttcctccatgggtcttggggacacggaagcacagacttccctgaaatcagccctgaggctgtgcccactggtcgcttcctatttggcccagaggagggggcagctggggccag

SEQ ID NO: 44030 - DNA, 663 bp, Mus musculus
  source 1..663: mol_type = other DNA
tgtgtgtgcgtgtgtatatatatacacacatatacatatatacatatatgtgtatgtatatatacacacatatgtacatatacacacatatatgacatatgtatatatgtatatatatatatatacacacacatatatatatgaaatcaggcagcatattaataggaggtactgtgctgcatcagcacatagtacacagtaggagctatatacaatatgtggtatacggccatatttggcatacgttgtatatgtgaaaaacacttggtttgtataccctatattgaatgtgatattaatgcctgagctaccacaggctgccgcatcagtgtatactctacagcaagagacgcctctctcttggcgctctcagcacagcctcggggagccgagagaagccgagcgcagccgagcggcgcctgcccgagccgagaggagccgagtgtagccgagcggcgcctccccgagccgagcctcgcttcgcctcccgaaaggaaccgagctcgggcgacgcaaccccacgcgcgcttgcgctgcgccctccagaccccgcccccgagcggcgaggccccgcccccaggcgatccagtcctgtccctgcggcgcgcgcgcgcgcgcagccgtgcggcccctcccattggccgcgccgcctgcccgtcccgg

SEQ ID NO: 44031 - DNA, 235 bp, Mus musculus
  source 1..235: mol_type = other DNA
tcccagctactacagggactgagaattccaagctcaagctttgcaggggcaacttagcaaggccttgccctgcagttttctagcaagggcatagcccccacggctccagaggcgcgctaggatcgaacccaagcctcagtttccccagcgggtcttggaaccgaagacaggcgggggcggcggtgccaccttaaggcgggtcccgcccgcggctcccagccgagccccgcggagg

SEQ ID NO: 44032 - DNA, 449 bp, Mus musculus
  source 1..449: mol_type = other DNA
ggagccctggctgcccttgtgttaccacaccagcaacaggttgatgctgaattttcgataatcctccgtgttgggatcacactaggacctggtctatgtagaccaggctggtctcaaatcagatcggctgtgtagatcaggctggacaaaccatgtcttacttttgttgttttaagacaggctctctggtaacccaggctggccgagaactctgcaccccagtcattagattacaggactgggcccccatcacctctgtgggacaggtgtcactctactgcccagtgtggcaagcctgggtgtccaggctgcgagtctgggcggggggcactgaggcaggcctccagctggggttccgggccgtggcgggggcggggcgcgcggggccaaggtcacgggtggggcgtccgggcctgcgcagtgccgggcgcggcaggtggagcgggagc

SEQ ID NO: 44033 - DNA, 361 bp, Mus musculus
  source 1..361: mol_type = other DNA
gccaggccaggctatgttgggactcttgtaagtctcaaagaggtgaagacctggaatgggagccatgtcagcctctggcaggacatggtttgatctggcttccaggtgccctgaaggtcctgtgcatgactagaggacaggcctgtagaggggcaccgggctctccccgcacccccacctgccacctggcccctttctcaagggcactggcaggaagggtcactggcagggagccagagcctcaactgccaccatcagccagtggagactggggactgaaggaagcccagggtgggagccaagagctccaggcaggggcttttgtctgggagaggaacagctcctctgcaaagccctgagg

SEQ ID NO: 44034 - DNA, 163 bp, Mus musculus
  source 1..163: mol_type = other DNA
aataattcccagcgttggtcattctgtgctttccaggcctcgaacctgtaccttggcaagaacaggctgtgaattaacacctgcggggctcaattctcaacaccacctgagactctaacattaatgcatttcagcgattctgaagtccgctagtgggttcatg

SEQ ID NO: 44035 - DNA, 332 bp, Mus musculus
  source 1..332: mol_type = other DNA
actgcccctgcctccgagtccaaagtggtgactgtggtagggaggtccagagagtccactctaccaggatcctccatccagggccagggatgggggctgagccttgcagggggaatttttacctccccagtgctgggataatgggcacatgcgggccagccaggatgaatcctgattctcctgtttcagtaccaccctgtggatcccagggatcgagttcggatcagcattctggctcgcagcccacgtgggagggcctgcaggggcggttcgctgagtccggggcccacgtgcaccgtggcctgggccctgatacacgcttccctcggtgg

SEQ ID NO: 44036 - DNA, 332 bp, Mus musculus
  source 1..332: mol_type = other DNA
acaagctgctgttagccagcttgctcagatgggcagccccaaggacggccatggctcctgtgtctgttgattaccaacagggccacggaagcattccgggaggtgcactccagaaactaacccaggaaattggcagggggcccagaggtctttcctctagccagagtcaggcagaccctggatgacagtcacaaaggttaagcactccgggcagggagttggtctgggactcgcaatccccctgccatcccaggactggggtgctgcatcaggagggcgcatgcgctctggaaatagggaaggcccggcggaagcggcctcaacaagggaaa

SEQ ID NO: 44037 - DNA, 297 bp, Mus musculus
  source 1..297: mol_type = other DNA
ctttacctaaagtggtgtcccctgatgctcggctgcagccctgcagtctggagctgcagtacagacactcaaaggcatgctcgtgagggcaggcttgcccataagggcagggtgaggaatgagtgaacgcatgcatgcatgaatgaatgaatggccctgcacactgctacacagcaggcactaggtggtaggtggctgtccagtcccaaccacttctacctgcagcccctggaggcggaggccagctcagtgcacagtaggcctctgtaggtgcaggagctgcaacagatgctggcg

SEQ ID NO: 44038 - DNA, 326 bp, Mus musculus
  source 1..326: mol_type = other DNA
ctgttgaggccgcttccgccgggccttccctatttccagagcgcatgcgccctcctgatgcagcaccccagtcctgggatggcagggggattgcgagtcccagaccaactccctgcccggagtgcttaacctttgtgactgtcatccagggtctgcctgactctggctagaggaaagacctctgggccccctgccaatttcctgggttagtttctggagtgcacctcccggaatgcttccgtggccctgttggtaatcaacagacacaggagccatggccgtccttggggctgcccatctgagcaagctggctaacagcagcttgt

SEQ ID NO: 44039 - DNA, 306 bp, Mus musculus
  source 1..306: mol_type = other DNA
cagggtggctatcctggaactcactctggattcaaagttacagttaaaggtgttcaaaaccatcaactgcctctcagacagtgttaatatttggccaacagtatacgagaaatcttaattgtgcctgaataaaattgaggatgcctggtgaatatcaattttcagctgtgagcagagggaccacacagtgcacatagagtaacgatctctgtgtactatggggtggagcccagggttgggaaccaccgtgttgagtccctgagggcccctaaggaccaatcagagtctcgaggcagctgagtggag

SEQ ID NO: 44040 - DNA, 242 bp, Mus musculus
  source 1..242: mol_type = other DNA
aattgctgatgctgacttaattaatcttaattaatcttaattaacttaatctgttggcttaatttcaaccccatgattactcctagatattgtgagggagaattcttgcaaataacatatgatattttgataaataggcaccaaatttatttaccactttgcactccaggagcaagttctacagcaaagcctgcttatgatctaggtctcttagggacactgctcctgtcacttaggcctca

SEQ ID NO: 44041 - DNA, 180 bp, Mus musculus
  source 1..180: mol_type = other DNA
tggaaattgtgtattttcaacatcacaggatgggggatccacacctgtgcccagttgcaatccaggcacaagttcgggaaagttctgttgcaaaccactgtgcattgtccctgtaaggcactcttgactctagagtggcctgtcacatggattcggactgccagtcagaacggaggcggg

SEQ ID NO: 44042 - DNA, 291 bp, Mus musculus
  source 1..291: mol_type = other DNA
gagtaacgttttctttttccagacactaaaatggcaatgtcaacttggcaattgaaggagtcaagggaacctggctctttggcctgaggggccgtggttataactgaattggtttctgctgactgattctccctctgcaaacagtgtatcatacatgcacttcttaataaccagaattggtggtgtattgtgccatagaccaggctgttttaaactatgcctctatgataaggcagtgccaccgccatctgcgcgtcccttcacagcctcagtcgctaagggaatggaggc

SEQ ID NO: 44043 - DNA, 566 bp, Mus musculus
  source 1..566: mol_type = other DNA
gacaataagaattttagtgaaagaactaggactttataaaggtttaaagtcttcggcaatgttgcacattaactgtgctgtttatgcatcttatggacagtttcccataattgtctaccatatctcatgttgattttgaggcaaacaaataataaaataactcctaatatgtctagtatattttgcaagtaataaaaattcaacaaatcatttatcaggtacctctacctgtatgatacatgtatcctaaacaaaataaggatgaattttaataccttatggatttgttgttgtctgaaaggttagaaatattcaaaacatattattttgtgaggtaatacagttattttatttaatcataatgcttgatttcttagagacactaagtctttgactatgattgatagggcacaaatcatgacttatgtttgaaatattacaatagaatattataggtttggtatgttctaaattaggaccaaatcttagaggatactacagaaaatgaacattaagtgatagccactgttctgtctttgacatgtgacaatgtttacatgtgctgt

SEQ ID NO: 44044 - DNA, 406 bp, Mus musculus
  source 1..406: mol_type = other DNA
cacagcctgagcaggcctgaggcaaagtctgtacagaaagacagaccttgacacatcctgcaaagggtgttactttctttgccaactcagagtagagttagttgcttaatgtaaaagaaatgccttggagataatgtacaaataatctgcctgagcagtacatcttaacaaactcggttaacatgagccattgtgttatgcaagacatgctaatctcaaacgccataaatcaagtttcttgcatgtgagcaacattactgtaattgctaatgcctgaatggtgccttgacggctgggcgcccaccgaaaactttgcagttcaggctcaagttctactgcagtgccaaactcctcaggtctggggcagttctgtgcctgagcaatctgtcactgtgggagctgttcc

SEQ ID NO: 44045 - DNA, 351 bp, Mus musculus
  source 1..351: mol_type = other DNA
acttaataccatttagttaaaactaattttttttattatcatgaagttaaaaaaaagcatgtgtagtcaggtttaatgacaaatgccctcagagtagttatcacgattcctgttacacaataatgcttcaaaattcttgcagtttacttaacaaaaatacctgggtgtggctcaggagaataaagctttgagctgctctctctaacaataatgtgacttgtaaatatctgatatacaggagatgtgatagacgactcccagaaagcggtcagtgacctatgctgtaaacaagctaggattccaggctggctaaggggtggaaacggtcaattccccccccccccccccgcg

SEQ ID NO: 44046 - DNA, 349 bp, Mus musculus
  source 1..349: mol_type = other DNA
taaaagaaagaatgttgttttgtgtaaggcacaatatttatttatcattattataattatcattttagtttttccgcccagctgttttcattttaatttaattaactttacgcccccttctcttctcagagaagaggaagccccactttcccccagtccgcgctgggtccactgggtagctcaggctctgtgagccccaagtcaggtagcttttaatccgcacaaaatttgaggtgaaaagagtccacgtttcccgaaaggctaagcggcggtcggggcgccccgaaaaggacacgccattggcctggccagcatcacgtgatggcgaggccgccggcctcctcggagg

SEQ ID NO: 44047 - DNA, 278 bp, Mus musculus
  source 1..278: mol_type = other DNA
ttctgtgaactctcttgctttctgagaggacacatttcatccttgaaaaacattaaattaaaaattcaaccccataggggggaaaaactttgttgtagaccaggctggcctcagaactcagagatctgcctgcctacagaattgaacatattcatcatgctatctttttaaatgaacttaaaatataaatgttaaattatagaattcttagatcaaaaagactttggattaagccaaagtcttagatataacatcgggctggaagtccctccacatgc

SEQ ID NO: 44048 - DNA, 447 bp, Mus musculus
  source 1..447: mol_type = other DNA
agcgctagaatttaaaacttggaaaatttgctgctctttcagaggacccaaatttggctggaatctgaaatgtggagcaaaatttagcttactgttttgttccatgatcctaaaccacagaacagcagtgtttgcctctcccctccagagggaatacacccttctgtctttcagcctcaataaaagacgatggttgtctgagacatgatttgccatggtaacatttcaacacacaggagatttcaaagattctcagcaagaacctggctgaaattagaaatttacactagcctgttttgctgagagtttcacacgcagactgcaagagaaagccgagagaggaagtctgccccagccagccaacctgccctgcctgcacatctggaagcgtttcaggagcagcctctgcctgcacaaggcttgggttcccaggcacactcagggctc

SEQ ID NO: 44049 - DNA, 267 bp, Mus musculus
  source 1..267: mol_type = other DNA
tagaccaggctggcctcagccatactattatttctaaagacaggggcagtggctggccatgcaggacacagggtggggacagcctacctgttgaaaaactaacatctttgttcactgtgaaggtgtagatcccctccggggctgaactcaagcgaacatccagagcccgcccgcgcgcttttacggaccgcgcgccttgctcagaggctccggggcggggccgggggcggaccggggcgtggcctcgggcgcgggcgtcgcggacgc

SEQ ID NO: 44050 - DNA, 291 bp, Mus musculus
  source 1..291: mol_type = other DNA
ggggctgctccggttcaagcactgcttgtacaggtcagcctggcagcctcattcattcaccaagcattcttagtagcctaaggcaggaggcatgaaaggacaaggcctttctagggaacttccttaagagaatcaccagacttaccttaggattttttttttttttttttttaagaaaacaactatttggcaatatttttaaaattaacgcctttgcggggacaaccgggacaggttgccggggctgcccgcctactaagagcagggcgtggcttcccggagccactagga

SEQ ID NO: 44051 - DNA, 397 bp, Mus musculus
  source 1..397: mol_type = other DNA
ttaaaaaaaaaggcagcttatttttcaaaagcagcatggcccccactacgtgggagtggtcccaagttctttagaaccaaacagtttagcagtttcaggagatgagttttagtttgatccaggagaaaactgatccctgagttttctgttttgtttttactctctctgtagaccaggctggcttgaatttacagagacccctgctccctctagtactgggattaaaggcctgctacctacacatttttaaaaagtcaaagaaccctggccggcagggggcgcgcgccctccgctcgccatcctcctcctcctcccgcgcgcgtggaccgccccccacccccctcgcgtgccgggctgctcgagagcaaggaggaggggagggtgtgtcaggtacggc

SEQ ID NO: 44052 - DNA, 414 bp, Mus musculus
  source 1..414: mol_type = other DNA
gttgtgagcctgtaagtgctcttaacatctaaacagcccattttaaaaaattaaaaattagtattgtgatatatgtatgcatgagtaccatggtccatgtagtttatttttaaaagtatgtgcatgcacacatggtggctgtgagctaccccatggggtgctgaactctgtcactgacacccccccccccccccaagctttctgtggtgagagttggggggtcttattcacccagtaggtgataacacaggtgcgagatgatactaaaaatcttcttagtttgctcatcttataggattggttaactagtgtataaaagcatttagcctttggcaggcttcccttgcaaaatagtggagacactcctaagagtgtcatccttcatgctgtgaattagcatgtattgccatctcg

SEQ ID NO: 44053 - DNA, 426 bp, Mus musculus
  source 1..426: mol_type = other DNA
tgcatggagctgagcatttaagcaggccaaggctaagctggcttggataaattacagaaagctgtaccttttggtgaaacagttttaaaagctacaaacccgctttgcctcctgggatctcaagctgagctgtcctttgaaagaaaaacggaactgcccagttttggggcaacttcccccgcaacctcgagacagcggcccagctccgcccagggactgagggcttttgggaccctgcgggagcgtgctgcgcactccggactccccgggaaacagctggacgcgaccacgtctcgggtaggggcggggggaggcgacgctccgccccggcgcggccccgccctccccgctcgccggcgccctcccctcgccgggggctgcgagttgcgtttggtaaaacccagccctggaatatatagatcactg

SEQ ID NO: 44054 - DNA, 519 bp, Mus musculus
  source 1..519: mol_type = other DNA
atgatttttttttatgtatgtaagaatgttagatgactctaacctaactttatttgtagaatagatgtcttatactgtattcaggatactaatgaaatggtttttatgataaatatcatctttgtcactttgtattctgatgaaattaatatggagtaacttataaataaaagaatatggcttattatgtaatatttacagagtatgatggcatatattttattgtgtcttttatattgacaatttacattttttggcgacgaaattccggcacaaacacaatgtaaatagtaatgggaactgacatgttgctgctgtcacaggagtgaccgctgtgtccacacttgctggcttggaactcggcttcaaactcacagtgatccgcgacctggcttctgtactatattttataaaacaaaacaaaacaaaaaccacttttatgtcacagaacagatctgtgcccggctcatagaatatagtattactcgcatgagtgtaatttatctaagttttacactt

SEQ ID NO: 44055 - DNA, 442 bp, Mus musculus
  source 1..442: mol_type = other DNA
gacagctctctgtgtttgtgggcgtggttctgagttctaggccagcctggtctacaaaaaaaaaaaaacccacaagaaaatgagggtggttgttgttttgttttgttttgagacaagatctcacaatgtaacccactcactgagaactacctggctctgagattactaaattacccccatctgaatttggtgaaaactttggtctaaggtaataccaagagtcagtgctctggggctcacatctttgggtggagtcccactagctgaaccgcacatagtaggtgccccgattttccttggcaaattctggccaaaatcaggtgggcaaactgcaaagctcggctgagcagcgcagtgcacttggctctgaccctgccaggcgctcggagggcgtgacgcgctgcccgcacgtctcctccccgtccgaagagcgcaacgaacg

SEQ ID NO: 44056 - DNA, 286 bp, Mus musculus
  source 1..286: mol_type = other DNA
aaggaatccttttgggacaaaggtttcactacagcacaaggcacaaaccctcatcctcagatgatgggggtgctggataaatccacacatgcttactcatgaaatgagtgcctggtccaggtaatccctttcccagatcatcctaccttgagtcaagttgaaaataaaaagtaatccttacagggtgtccgattaaattataagctcacttaggatggattcattccctagacctgcaccaggtcacgtgtgcttagggcgctctggggcgggacctgccattcga

SEQ ID NO: 44057 - DNA, 302 bp, Mus musculus
  source 1..302: mol_type = other DNA
atgaaggatttgtttttctgtaggggattttgacatgacagtgttccaaaggcatgctgtatatatagcaacgtaaacagcattcttaacacttctgggttttgtgtttacagttaaatagtaaacttggtcatccagacctgaaatccaggctatttaggacctaggtggactttgagtaccaggtcaaccggggtaacttggtgaggctttaacaaacaacatgattttgaagtcaacctgggccagccaggatgaagcttgaccaagccgggttgagcagcgctgcccacgcagtgtgg

SEQ ID NO: 44058 - DNA, 480 bp, Mus musculus
  source 1..480: mol_type = other DNA
ttcaagtaatccagtcttctttaatgagatttgaattcttcctatgcatttgcaaacacatgagcataaataaacgtttacgtcgattgtagatgttacagcaaatatgcattgagtcttaaattttacattatgattttttttttgatgctatttagactgcttcgtagaagtacatactaaaaactgccctgatagaaagcgttttgtcagttcacccagtagtgagattgcttggtggcgttcttaaagtcattacttttttacacacacaggtcttttctcaacaaataatgggcagtgtccaggtgaaggaccgggtcttgcgttgggccccaccatgccaacggcagccatcactatggcggccgcgccgggagcaggcggtcgactcgctttcccagcggctcccgcggtccgcagggccgagagtccactggctctggcgtgcgggggcggggccgaagccggaagtcacgt

SEQ ID NO: 44059 - DNA, 436 bp, Mus musculus
  source 1..436: mol_type = other DNA
tcctggtatttaaaaaaaaaaaaaaggggcacttatctccaagcctgagacctgagttcacagtttgtcttctgaacttcacacactaaatataatttgtcttgttgtatttttgggagatacgtgcacatgagtgtgcccatgcatgtccctacgggaaataaggtgcatcttgaaggaagccctgggtttgatatttagaatccatgagcacgggggagggcagcctcgagcaccggggagggcagcctccagccggaacctcccggtgctgctgcgctggccggaggggcccgaagccccgggatcggacggaagcgtggtcgccacacttccggtgtcctgtcccggactgtctacatgtccggcgcctgccacacttcctgttgatcccggcagcggggggccgggctgaggggcgggccgcggagagtgg

SEQ ID NO: 44060 - DNA, 306 bp, Mus musculus
  source 1..306: mol_type = other DNA
gacctatatcaaaagctcaagacctattataggcacaggtgctgagcagtttacaacctctcaacaactctagttacagataggtctgaccgacctggggcaatggagctgtctcagctttcttcgaaagcaggagtcctcttcagatctgattcctctcctctccacatcctggggacagggaggggccggtgagacctgctgcggaccacgccgcttggcccaggaacgcgcagaaggctgcgcattggtcggtgcccgtgggggtccccgcgcggggcggggctagggctgtccctagtcccg

SEQ ID NO: 44061 - DNA, 641 bp, Mus musculus
  source 1..641: mol_type = other DNA
gggcagctcaggggacccagctccatccaggccccttaccgggagatcggagccctggagaagggccgggttcctccttcgtttctccctgagagagccggggttccgaagcatccctctcggggactttccaggctccgcggttgctccaggagggccctgccctgaccgtgccggagctgggggcctgcagggcctcggcggctggaggggactgtgactcaccgccggtaacccacctggcgccaggaggctacagccccgggccacagagcgtgagcctggctctgtgcgtgccggggacctgcgacctttatccgaggccgatcggcccaagctagctgcggacggcccgcagtagttccggagggtgtccccacccggcgaggacaaagcagccgggccgccgccccggcctgcgccgcgccgcacaagcaccccgccccctccctgctcggtggcccggcgcggaggtggggacacccgggcgcccgccccgcgttcccctctcgccccgccccgtctgcgcgtcctcccggcgcgggggcggggggcgcggcgccccacataacactcctctcacctcgccggacgctccgcagattgccgcggctggccagggggcggtgcgccgagcgtgc

SEQ ID NO: 44062 - DNA, 351 bp, Mus musculus
  source 1..351: mol_type = other DNA
aagaacagatctaataggctccatatatttgaggggtgggctttatggtatcaaaagcccccccttgcctctggccagaggatcatcaacagtccaatatggaattcttgtctcgatccaaaagatttctaaccagatagctctgatgtcagaggcctgtgacatttggttatatcctgatgggaaagatcaaacttgcgatagacccctgactttgtcaatagtaaacaaaaaagaggggaccctttgtaaactttagaaactgtatactttgtcaactttgtaaaccctcaaggcaggtttgaggacctccagccagcgctgaggcagaataccacttattatttagta

SEQ ID NO: 44063 - DNA, 673 bp, Mus musculus
  source 1..673: mol_type = other DNA
gcaaatgtaatctcaaccgttcaaagcttttgcgaggatgctatatttctttttacaaatgtggaagtgacaacctacccagagcctgtcaggaactggagcggcaaagagggtctgtaactcagtaactcaataactcagtaactcagctccctaggacaagttctagtccatacccaaggtgcttgggtgcagagtccttcgagcccaaaaattctcgggaagagacaggcctggcccggctgcagggcggcctgtggtgggcaagtagggcgtctgaccccccccccccccctccccctcggcccgggtggggatcgtgctcagcacagtgctcaggaggcacccccaccccgctgactcctctcgagggtagccggggcactgggagtctcagccatccgggcagccgcgcccagcctcgccccgccgggctccgcccgccctccgcggggtcgcagcgaagggaggaggggcggcggcccgcttgcgtggcaggcgctcgggctgggctcggcctcccttcccgggaggcggggtcggcgccgcggcggcggcggagccaggccccctcctccttccgcggccggcctcccacgttcccggccgctccgacgccgctgcgcccgcgtgccgcccgcgcagtccccgtgggagccggagccagcgtccc

SEQ ID NO: 44064 - DNA, 377 bp, Mus musculus
  source 1..377: mol_type = other DNA
aaacaggaatatttcagcttatataaagttcatttattttttttgtatgacgctacccacaagtaataccaacttgtacctggcaaaatagtggttctgtttctttatgcccagaagcaagctcacgagaagttatgcttagtaagcctgatttcgttcggttggagttagtccatttcatcctacctggtaacgaacgctttaggccctacagcagcccaggcgctcccggccgtaggctggcggtccggaccgtacgatagaaacgtgagaaagctgtttttagactcttcaagaatttagggatcttcgccagaaccctgccctggattctggcgccgcggtgcgcgcccagggagtacctctgggccctttaa

SEQ ID NO: 44065 - DNA, 294 bp, Mus musculus
  source 1..294: mol_type = other DNA
ccccagctctgacgccggggcttctcaccaactccgggttatgggaacctaaggcttcactttcccacgcacgtccgcggatctgcgtggaaggacgcacaggagactcctagggctcggggcaccccccttcatggctgcaccgcgcggggcccgggcgcgggaggactgctgggattgcgtcgctctgagcccggcttttcttattcaaaacaggcccacaatgggtgcgcctcgccacggccccatctgacgagcggccattcatcaggcccgctggcctatcaatgaatg

SEQ ID NO: 44066 - DNA, 377 bp, Mus musculus
  source 1..377: mol_type = other DNA
ttaaggtatatttcatcgacataggatttaaacatattttcccccaaaccgttaattaactattctaatataatttattgggttttcaaactccctgagacagtgaggttgtgatcctaccacctcttgggattcccagggagaaagtctaacaccttctaagagttaacacatttcagaatcaacactttgtaggccaggctggcctcgaactcagaaatccgcctgcctcgtgctgggataaaggcgtgcgccaccacgcccggctggtactacacaacatacaagcagtttagactgagttaattgaaaagattagttatacagttagaactactatactcgcaggttaggccctgaccaggcggaaccttttg

SEQ ID NO: 44067 - DNA, 294 bp, Mus musculus
  source 1..294: mol_type = other DNA
gtgatcaaaagtggataattcaaaatctcggtcgaaccagatttaagcagtttctgatttctaaggagctacatggtggcaaattaggctttcaagctgcaaactgagtctccaggctgcagcgtggcctgtccctatagatgagacataggtatgtctagatctatgctacatgcatagattaaccaggaaataaatggttctatcttatgataatgtaactatctcataatgtcatattaagatatggctgtcttgaccttaagttataagaaacattttaaagctaagggg

SEQ ID NO: 44068 - DNA, 387 bp, Mus musculus
  source 1..387: mol_type = other DNA
ttatatatacataatctaataatctatctccaaataatatctatatagatatatagatctctccaaatttctttatctgttgtgattccttagggttccacaaagaactcatgttgctgtagcctagtgcataacaggactgcaacaagggtccctccgcctctggcctccagcggtcgcaggattcattttccagcatgccctctggaaagagggaagtgatgggcggggaacagcccgccagttctcgtccgctcaactcttccccaaggctggcagacctaggggagtaggcagggcctgggcctgactcagtctctggtggctcctcaggcctccaccaagccccgggccttgtcaggggaggcctccgggcgccggttgctg

SEQ ID NO: 44069 - DNA, 440 bp, Mus musculus
  source 1..440: mol_type = other DNA
cccaatcccattataaaatggaaaggcatggtagtatgaacaatggtctcctcagtagataccgtggtaaatgattaaccagtttaacgagttgtactagtaagaaagaacccagtgcactttagaggcttgtgactcctcactgcagagccacaggggatctatccccataggcattttatgttcattaaaatacttcatttatatactaatgtctcatcccatgttccaaaggtgaaaaggaattaaatatgaaatggctaatttaacatgtcagggttttgttatacactgaacagaagtcaaagaattaatcagggtgattaaaggagtttctcttcttttctaatcatagaacaaaatacgctattatgtagtactgttttgtcaaaagagcagactggtgattacagaccctgtcattaattccatgtcaatac

SEQ ID NO: 44070 - DNA, 568 bp, Mus musculus
  source 1..568: mol_type = other DNA
cccacacctgcgggcttagaacagctccgcttggagccaagccctgtgtacttgacccaccgggaccgtttggctcctgtggacccactggggtaaccccccccgcaaagggccaggctggagcggccaggccccggggtcgtgcagggggcccggagtgcggccactcaggccactcaccgcggggtcgaggccgggagctgcggccgggcggaggaagcggccggggcagcagaggccctgatgcggcccgggagtgcggtgcgaggcggcggcggcggcagcggcggcttctggctgcggacgtggcgcctgacgcgacccgccccctccgcagcctccggagctcccgcctcctcccgcgcctcgggttccgacgcgcacgcgcactcgcgcccccggccctccgcccccccacctcccgcgcccaccggtcgctcggcgcgcgcagccctcccagcagcccccggccagcctgcgcgcgcgcctcatccggagggtctccccgccccctccgccccggccacccaatcagagcaggcgagggggcgctgccccggcgaggcgc

SEQ ID NO: 44071 - DNA, 430 bp, Mus musculus
  source 1..430: mol_type = other DNA
agctaatagcaatggaggggaggatgtttacaccctatcactcggtgacacaggctcgcagagcgccctggggagagcgactgacagaggccctgcccgtcactcccttagggcaacaccggcgagcatgccgccctcctcaggggagagtggccgaagactcgggcgaggccggaggcgcgcgcctcgccggggcagcgccccctcgcctgctctgattgggtggccggggcggagggggcggggagaccctccggatgaggcgcgcgcgcaggctggccgggggctgctgggagggctgcgcgcgccgagcgaccggtgggcgcgggaggtgggggggcggagggccgggggcgcgagtgcgcgtgcgcgtcggaacccgaggcgcgggaggaggcgggagctccggaggctgcggagggggcgggtc

SEQ ID NO: 44072 - DNA, 241 bp, Mus musculus
  source 1..241: mol_type = other DNA
tttcagatatgatttctggagttcttaactgtggatcaagcattgttcttagctaaggacaccacatctccttgctaacagcacagcctcaggtttcaaagttttaaacttgagaattctgaatgcgagtttgctgagacagaagcgccaggtggcactggtggcaatagaccctgtagtgcccacgggagccttggttaccagccaaggcgaagccctgccagttacctgggaacttagc

SEQ ID NO: 44073 - DNA, 615 bp, Mus musculus
  source 1..615: mol_type = other DNA
ggctaccagcctaatggtggcgccactacaggcaacctgatggaagtctttactacaattaaggttcctcttcccatttaacttcagttgaagaaaaaaaaataaactacacttcatgtaatagattagagttgataaattgacgatgtatctacagtattatgaaatgctgaatatctgagatcggacttagcttggggcaggactgtgcctcggttgcctctaagagccctgggcgcgctcccgcgtcctagcctcttctcttccaccgcgagagcgcagcgcacgcgcgccgtgcccggcagagcgcgcgcccgcgagctccccgcagccccgtgctcatccgggtccccgcgagcctcggccaatggaggcggctcccggccccgggagcagaactatgcctcctcccccttctcgcggcctgtggcccccgcgagcggcctggggctcaggagacccgcagaggctgcgagtccggatcccacgcgagaactcaggtcgtgagcgcccagcgatcgcaaccggtcccgaagcaccgggcgcggcggcgcacgcgggggtctgaggtggtcacgtggggtgcatgccgcccaatgagaagccgggggcggg

SEQ ID NO: 44074 - DNA, 188 bp, Mus musculus
  source 1..188: mol_type = other DNA
gcagacacacacatatattttgtatctttctttagctgaaaagaatattctcctgtgcacaaatttaagtttgaacacccgcctgaattagtcagggtgggaacaaataacgatataaatgatatttttgtcgatagctaggccgcggatccctcctagctgcagccctggtcaaggcctgggggggc

SEQ ID NO: 44075 - DNA, 181 bp, Mus musculus
  source 1..181: mol_type = other DNA
gagctcaaccacatggtggctcacaacctctgtgtctgaagaaatcctagtgtgactcaagtattttcacactctccagaatacaagtatgagaatagactatatataatgctagcgtcactgcctcagccaatgtggcaacaagctggttccacagtgcacccattggctcccacggtgc

SEQ ID NO: 44076 - DNA, 245 bp, Mus musculus
  source 1..245: mol_type = other DNA
atggaatactattcaagaatatcatcctgagtgagataacccagtgctggtgtgtactcagtgataagtggatattgtccataaaatacaggtaccatggtgactcaatcaaggaagcttgaatctcacttagaaagaggccatctcctgtatcaaatttatcctgtctttgcagacagaagcatattgttctctgagagtagctgattcagacagatacagacagcctgcgagtgacgtcagcg

SEQ ID NO: 44077 - DNA, 389 bp, Mus musculus
  source 1..389: mol_type = other DNA
ctttattggttgatgacagatcattaacaaagttgcaaggaacttagtacatatgtctttgtacatacatacatacatacacacatgtatatgtttctgtattgggtaaaaagagggtaaggctctttagtccctggtacccacatgtgggaaagagagtgtaagttgttctctaacttagatgttgtggttccaatgattattctaagtaagcactgtgcctgcaacatcatcttttatgatgtgggagaacaacggcggagcgattattcggccctcgattggatcggcacccagctgagctgcaacactctgggtggagcgtctctaagcccgcccactcccggggctctgcggttctccacacgcagagagggccggaaaggcgc

SEQ ID NO: 44078 - DNA, 419 bp, Mus musculus
  source 1..419: mol_type = other DNA
ctatgggaagatattgttataagtaagcactccgagaaataactggctaaattttgatgtgtttttacagagcagcagaagacaatgtgcggatccttacattcgatgctaaagtacatatattttgtttgattctttaatttggtttttaaagattctattgaaaacctcgggcttccccggaggtccaaggaggacttgcaagagagcagtcttccctttgcaaacactctgaaagctctttctgttggcagccagtgcctgggttcgggctccggaatgttaactcttaaactaagattctgaagctttataaagacccaagaagaggtgtgctcaggtacctaacttctggacctagaaacttaagtctggatggaccagaatctccgctacgacagcttccagtctcgtcttca

SEQ ID NO: 44079 - DNA, 209 bp, Mus musculus
  source 1..209: mol_type = other DNA
atgaactccaaactgtatgttctatatagcagttgacctgatccagggtgaagaggtttcaggagcagctcaaaaacattcttaaatctgtgagagttcgaagccaacccggatacataggtcgcgcgaagagttttgagcccggcgcttccctcctggagcggagctggtcgcgcctgcgccctgagaggcggcgctgcgtggagcgg

SEQ ID NO: 44080 - DNA, 521 bp, Mus musculus
  source 1..521: mol_type = other DNA
aaagattctattgaaaacctcgggcttccccggaggtccaaggaggacttgcaagagagcagtcttccctttgcaaacactctgaaagctctttctgttggcagccagtgcctgggttcgggctccggaatgttaactcttaaactaagattctgaagctttataaagacccaagaagaggtgtgctcaggtacctaacttctggacctagaaacttaagtctggatggaccagaatctccgctacgacagcttccagtctcgtcttcaaggtctttttcgcagagaatggaaaaacgcagatcggccggactgcttgccctgccgtccgcgctacgtacagcgccgctgggcgcgctgcccgggagggagccctgcagggtctcggtgcgccaggatgccgcggactgcgcgcggagacggccgtactcgtccctgccgcttgggggcgtcgccgagcccgcctttttgcgccaacgcaacgagcgcgagcggcagcgcgtgcgctgtgtgaacgagggc

SEQ ID NO: 44081 - DNA, 396 bp, Mus musculus
  source 1..396: mol_type = other DNA
taagtaataaatactccattgtgtgaatataccacgatttctttatccattattgcattgaggaaaatctagattgtttccagttttttccataatgtggaggaggcgttccccttgctccacatcctagattttaatctcaaagcaattttaatctgaaggacgttgaacatttccttaaatgcttctcagccatttaaagcagtacaccactcttaaattggcttatttacttgagtttttttaaaaatatactttggataaggctgataaatatgggtctgttttcatccttctgcagcagacatacagcttgaccagcactgtttgctgaagatgttgttttttttccagtgtgtactttagcatatttattaaaaaaaaaaaaagaggtgt

SEQ ID NO: 44082 - DNA, 490 bp, Mus musculus
  source 1..490: mol_type = other DNA
ggtggggccagccactgcaggcaccctggtggacccagagctgctgctgctattgctgctgttgctgctgcttagctgcatcctgaattaattcaataagaattaaggcctctgaggcctaggacactggctgctcttccagggaatgccaggttcatttcccagaaccttcatacagatatacattcaggcaccaatgtatataaaaaataaaaataaactaattttaaaaaggaattatcaccttcttaaaaagtagctctggaaaaataaaaaggacagatctgaagtcttttcttagtcactttggcaaaatagctaaatgctttcataagtatgttgtgtgtgtatttggcatgttaacacacatgtgttatgacagtaatgattgcgagagactatagtattcattcatgccattgagtaattgtagttttgaaagagtcatggctgagatgactcagacttaattatcttgatgtttcggctt

SEQ ID NO: 44083 - DNA, 416 bp, Mus musculus
  source 1..416: mol_type = other DNA
atcgtgagaagtgaagagctatactgttgtggccttcaaatccattgggagaaaccaaagacttaggctcaattcaaatttatattaaaatgagtttatgcttactgctagcagaaggaaggcagctttagcattggtgtatattacaacaggaaaactgttttacttatagtaattaaaagatcatttcatccctttcccatagcgacccttaagggacctgtgttgttggcattccttccagagctaagatcctgcttgctggcagcgcctgcgccgtgcgcgcctcgcctccaggtggcgatgtcgcgcgccgagccagcgatagggaagcgcaggcgctcggccctccgctcgagcggaaggctctagggggcgtagtcgaccgagcggcgagcgctggggattcctcggga

SEQ ID NO: 44084 - DNA, 151 bp, Mus musculus
  source 1..151: mol_type = other DNA
taatgatgcccagttctgggcgcaggccattggcaaacaggctactccttgtttgagataacagaagcatgttttcctgtttctgtaccagagctagttagctcatttacattggccgctaggccccggcaagtgtccacacttcagtctt

SEQ ID NO: 44085 - DNA, 478 bp, Mus musculus
  source 1..478: mol_type = other DNA
gacttaggctcaattcaaatttatattaaaatgagtttatgcttactgctagcagaaggaaggcagctttagcattggtgtatattacaacaggaaaactgttttacttatagtaattaaaagatcatttcatccctttcccatagcgacccttaagggacctgtgttgttggcattccttccagagctaagatcctgcttgctggcagcgcctgcgccgtgcgcgcctcgcctccaggtggcgatgtcgcgcgccgagccagcgatagggaagcgcaggcgctcggccctccgctcgagcggaaggctctagggggcgtagtcgaccgagcggcgagcgctggggattcctcgggagcgcaggcccggagctccttccgaagccggtccgactctcgccatgaagctgcgcgtgcggcttcagaagcggacccagccgctcgaggtgccggagtcggagccaacgctcgggcagctg

SEQ ID NO: 44086 - DNA, 450 bp, Mus musculus
  source 1..450: mol_type = other DNA
ataatgttaccaatattgctctgttccttgcagaaggaaggattgctgtctgccaccagggagacaaagaagatgtcacatcctagcacaatcgccctggttgcaagggcttgcttagaacagggtctgtcacagccatcccacaaaggcagaggtgtgtgtgtgtgtgttttcctcttactccctgctctctctaggaaagataagaaggtgaaaatttctttgaggcttccttcttgactttttccaggaggcgtgatcaaggacttcaggggccacctggggcgggcgaaggggccgtgggacgccgctgtagcgcacaccggcccaggatctgaacggtccgggccggctccgccctgtcgccccgcgccccccggccccgccccccgccgccggtcggagggggcggaccccgagctcccgaggggctgggtcccctcgcgcccc

SEQ ID NO: 44087 - DNA, 258 bp, Mus musculus
  source 1..258: mol_type = other DNA
tgggtagctggaatggcagacctatgccaggaggcctggcataatgtccacgagtgtattatataagctcagaaaaaaagaagagttctaggttttgaagtgtatcactataaactatgtgtttaggattataaaccaaatccttttgggtttgataagtaggaaagggttaagagaaattattagccaatgagggagctcactggtgatgtactcagtgtgaagaaatagcagtgctcagcacactgttggcatttg

SEQ ID NO: 44088 - DNA, 390 bp, Mus musculus
  source 1..390: mol_type = other DNA
acaccagtggtgttttttttttaaataactacatttataggtctttatattgcagctagaaacctctatgagtttgaggccagcctggtctacatagtgagttccaggccagccagaaggacctgctttgaatttctgcacgagaggccagcaagctgacagctgactcactggtctctcagaagctcctactaaggcccagggaagtcaggtgactttctccaagctggcttggggcatctcaatcctcctgggatgaaggccagcaacagcaaagcttgcttgctctagcaactttccctacctggctggcgaggggaggggcgggcctggatgcagggcccctgttggcccagccaatgggctctccggcgtagggagaccagtctg

SEQ ID NO: 44089 - DNA, 368 bp, Mus musculus
  source 1..368: mol_type = other DNA
ggtttccccacatcatgtacctgggaagaaagtcacagggcagtatcctgattaccgttatcacatacatacaatggaaatatttacttatacaatgcacctgcatagaaagatatttgttctatcctcatgtaagggttaaaagcatgatctttaaaaacactctcacattaagtaaggtgattggacccaaaggtactgtgcctgggtgtggctctgaccaggagaataaagctttgagctgctctctctagagttttttatttaataccctcaggctgtggtgagcctcaaaaatacaattttgttgctattttataactttgtaaatatcggctagacaggaaatctaagactttgggcgacgc

SEQ ID NO: 44090 - DNA, 359 bp, Mus musculus
  source 1..359: mol_type = other DNA
gctctagggaccctgagtgagacgtggaaacccgggtgctaccaccagcccagaatccagggctgaccctctgacacggtgagactttacaattcccagcattcatgagattagtgcgttgcatgccggaaacttctcttttgcgaaaagaaagggtaaaggacgcattgtcttggctaccgtttcccctagtcacctatgcgcctacgttcattggaggcttcccaggccaaagggtggcccggtgtgtgagggcccgcggagccatgcatcgggcaccgcacctggacagttccgattggcgggctgcggtccccccccatgcgtccccccgcccgcaagcagtggggtgaaaagcg

SEQ ID NO: 44091 - DNA, 517 bp, Mus musculus
  source 1..517: mol_type = other DNA
agggcccacgctcgcgagtcgggcgtggtcctcaggctctggtggccaaaggtcggacctgatcacaaaagtccttagggaggggttccaggaaggcttcccccgggagtagagtccgagagaccgcgccccgtcagcgagacttcggggagcgctctagcaccatccgcagggttttcccagaggcctcagggaaatgaaacccctgtaggccacccggcgtcccccaggaaggggagggcgcccactgccgcccggtcactcaccacaggaccctcatggtgcgtggccggcgagtcgcaagcagcgcggtccgcccactaagccgcgcgcaggtcgggccgcttttcaccccactgcttgcgggcggggggacgcatggggggggaccgcagcccgccaatcggaactgtccaggtgcggtgcccgatgcatggctccgcgggccctcacacaccgggccaccctttggcctgggaagcctccaatgaacgtaggcgcataggtgactagggga

SEQ ID NO: 44092 - DNA, 312 bp, Mus musculus
  source 1..312: mol_type = other DNA
agatgacatctttcttgaaacacacattctagcgtgggcttctgaacactgaactgtttctcttttccattctgtaagagcatgcattctgcaggggtcagccattctccaaaatggtgaccccagacaaggcacgcaggccttcttacagggaaccagttgtggcattagcataactttgattggctaatatgttagttcttctatattagttctaatctaaacatttctatgtcatgaacatttaactatagatgccccatcccgggataagatatttccctctttttaaaatcagacctggtccttaaa

SEQ ID NO: 44093 - DNA, 278 bp, Mus musculus
  source 1..278: mol_type = other DNA
gcgtgctgccagcgtgggcaggagactgctaatcatgtccggaggacctctctggaggtgggaacccggctttccagaggcctgcactgttaaggaaatttacaatcttgcagacgactttagacctcgagtgtaacctcagcctcaggcagtctcagagagggagtcatcccctgcctcgcgggtcaggaagtgaccgcagccgaccgggcgctgagccctggcagctccggccacgcccatcgcccccggctccgccccaccgtgggtggttcttg

SEQ ID NO: 44094 - DNA, 452 bp, Mus musculus
  source 1..452: mol_type = other DNA
tgaggactgctgcagccatgactcatcagtataagcaaaaacttgaatgtgtggttccatggatattttataaatcttcttttgtaagtctttgggaattccaatccatgttatatcctgaattgtttaaataaaaatatgacataaagcaagcccagcctggtctatatagcaagttccaggcctgccagggatacacagtgagacgctgtctcaaaaaataaatattccttaataaaagataatggtacattctgtggggtactgcaccgcaggatatatctgcttaacaacactatagtatactgttttaaaatgaaattctgaagtcctacatttaacctcaaagcctggaggagaggatttgaatgttgtcatcctaggaactaattaaatcattgcacagtgtgtacactacactgaacactataggtaagtatcgttaattttct

SEQ ID NO: 44095 - DNA, 413 bp, Mus musculus
  source 1..413: mol_type = other DNA
gaggaccagggttcatcagcttgaggaccacctgctcagggctggcaccgcccacagtgggctggaccctccgcctggcacctagtgagtctttaagcagtggcagtgcagaaaagagtgacactgtgccggacagatggattgcaatatgtgtatctgtgctttgaaagtcttcctgggagaaatggccttactcatccttgaagggctacattaaaggagcaggctcggtcactcactgcttcaataatctttaagagaagagtggttttggcaaacacaggaggatgaagacactgctgtcttccaaggcaggaaccactgcattctccctacagaaaatctgaacctatatgttggaggggaccatccctagttgttccgctaggcacagaaatcccaggtcagatagc

SEQ ID NO: 44096 - DNA, 134 bp, Mus musculus
  source 1..134: mol_type = other DNA
agctgtgcattgagaaatcaggagataaattctacctcattctctctttaacccatttaattggctgggcctggctttaacttctgaaagtaaaggttcactaatagtgcctgccacttcttatgagcttgtgg

SEQ ID NO: 44097 - DNA, 376 bp, Mus musculus
  source 1..376: mol_type = other DNA
ccaggctggccttgtctgttttgaatttattagacactgcctacaaacaaaatcttaactagttgccggcattaggttcccatgtgggtagtgcctgtgttagcaaacagatgaaacattgtttcaaaaagcaaaatcaaacctaaacctagaccttggcttgggttgcagtccatggaaccttacacagcagttttttttttttctgccgagctgaataaaatccccaggcaattacttgaaagtttctgaactttcaagaaatttgagactatggctcaaagagggaaaagggcactcttcccatctatggcatagctatgaagggagaacttgttaacaaaagataatcaagtaatgctcatctttttaagct

SEQ ID NO: 44098 - DNA, 445 bp, Mus musculus
  source 1..445: mol_type = other DNA
gatggttgtgagccaccatcttcagaagagcagtcagtgctcttaaccactgcacagaatttccactatttttaaaaacgtgttctcctgaagaattatccatctatgtttcattgatattatactgactgtgagacaagcattagttatttaatttatgaatagaagtgagtcattttgctacaggcaagcatgaagtgttcatgggtacctcgatgatcatgagtcatgaatgataatagttaatccatgctccagttaattattacaacttcagttgtcattgcataagctggccagtaaaatcaggtgctagctaatttccttaaggtaacaatagatggcttcctcaattatcccaactccttttctcctcttggacaaatgaggtcgaaaaacaagttatcatagctttccctaactttagccatggaatctctgagaa

SEQ ID NO: 44099 - DNA, 294 bp, Mus musculus
  source 1..294: mol_type = other DNA
cccagcacatccatccttgaagctgaatggaacagcagtagaggactcaagttctcatacagagagaccactagtgtattttttaggtcttccaagttctcaggagactccaaagatttaaaaagggagccaccccctggctcccggagccaccgccccgagcgcgcggcctgtttattcagccgggagtccggcacgcgccgggcgcacgcactgggggctgcagccgctcgctgcagcagcggggagtggggggcgaggctgcgcgtggggctgggtgtcccattgaaaagg

SEQ ID NO: 44100 - DNA, 159 bp, Mus musculus
  source 1..159: mol_type = other DNA
attagcttccatttatgcagtgtagactaacttgcttggcattatcatcatcatgattaaatgtctcagcattgccaggcctgtcttgtccaggatactctgccaaaagaatcatgttgtggagtccaggactggagttgggtatggactgtgagagtg

SEQ ID NO: 44101 - DNA, 402 bp, Mus musculus
  source 1..402: mol_type = other DNA
tgtcaatcagacatcaatggatgagtcatatctatcagactgacctgtaggtatgtacagtctatcttaggcagtgctaccctggggaaagtggccctgggtgtcagtaaattgtattcctgcattttgtggatggtgtttatcacatcgatagaaaacacaatgactgctgtgacggctgccttatgtttattaattgaacatttttaaggtattagagaaaaatgctggtgtaattacaggtacatgatctcatagctgatgtcgcttctaaaataagccgtgaggctgatcatcatgggctctacgctgtattaaacattatacacatatacatttttaaaagctttatgatggttttggctctagagcaaagtcctgctttacagcgccctgctgaga

SEQ ID NO: 44102 - DNA, 301 bp, Mus musculus
  source 1..301: mol_type = other DNA
tccctgtggaaagagaagcagccggcttgaaccatgctgccagccacttacctgagggatttgaatgacatcataaccctacacacacatatgcatgcatgcacacatacacacaactgtgtctcattgtcccatactgtccttagctttgttgaaaactaggatcattttatttttcatgattctctgcacaaagcatgacacagtgtcctgacaggagccagcccactgctgcctggtgagatcattccccttgcctggcaactaggatcaaattttgcatttgccctaaaatataaaa

SEQ ID NO: 44103 - DNA, 279 bp, Mus musculus
  source 1..279: mol_type = other DNA
gagggatttgaatgacatcataaccctacacacacatatgcatgcatgcacacatacacacaactgtgtctcattgtcccatactgtccttagctttgttgaaaactaggatcattttatttttcatgattctctgcacaaagcatgacacagtgtcctgacaggagccagcccactgctgcctggtgagatcattccccttgcctggcaactaggatcaaattttgcatttgccctaaaatataaaacggtgcccatccttactcgtagataaatgtg

SEQ ID NO: 44104 - DNA, 484 bp, Mus musculus
  source 1..484: mol_type = other DNA
gtaagaatgtattactcattagaatcttagaattaattttgaaatatgcttttaaaaacacaatttctaagctaaatttaaggccagccagggctacattactccttatggagaccatgaatattcttctcacagactttttatcaattatttactaaatgcattaggaggaatgtttatacggacaagtatatgtactttaatcacaaaagaccatatcaagtatttataaaggaagctcttttctagagataacttctatttaataaggattaaaagggcataaaacttttatcttattatccatgaattaaataacatgttttaatatcttaatcagaaaataatagcaggcgagcctggtatcctgcttctctcaaagaccttaatcagattctgagaaaatttctttacaaaggctcgtcatttctaaactgaaaagataaggccttcaagtgctttctattcagacagaaagtatata

SEQ ID NO: 44105 - DNA, 458 bp, Mus musculus
  source 1..458: mol_type = other DNA
taaagatttagcatgtgttgggcctgaattatatgacctttaacattctaatttgacagaccacctgaactatcaagggtccgatgagttataacctgtgatactaacgttattaacacctgtcacaatcctcaactaatttgtctcgagacaggtgtgttactgtagaaatagcattctcacgtgcaaattaatttttactttgttgttaaatcctgagttatctgctgagttttttcgaggtccggatttgatggcaacccctgacctccaggtctttaaagccctgggtcaatattcccagggtccctggagttgtgtcccccacgcctcgcgaggcccggacctgggcaaggctctcccgaccataggtggccagggcgtgcgcccgctctgcttccgggtcggagggcgagcgcggcgaccaggtcgtccgcgaggaaagggacgccgaggcg

SEQ ID NO: 44106 - DNA, 382 bp, Mus musculus
  source 1..382: mol_type = other DNA
atttaaacatgtaaaaccatgtttagttctagatctggctattcaggcactgggctggcatgccaatatcctccagggttacctaactttagatctggctgcccaggtataagaacagcctgttgtgaagactcgatgagttttaaattagctctccttattgccagcacttaagatgacaggcactcgtcgtgtgccagcgtgaagtcggggcgaagccactgcgcagacaacgccactggctggcacgtcgctgtcaccgagatgcgttcgcagagcagcagcccgaatgcccactggaactgcgacccggggcctcgtccagtgacccaggctgggcgcctcggcgtccctttcctcgcggacgacctggtcgccgcgc

SEQ ID NO: 44107 - DNA, 495 bp, Mus musculus
  source 1..495: mol_type = other DNA
gtgtgcatgtactcgtggatctacaagtgtttgtacatgctaatttgcaatgccacaaccataacttttgcacatcaaattgcatgtccttagtgtagcagaggagatcctgtttcagtacttgttttggtacaataaaaaggtttacttttgcttaggtgacctgccctaagaaccaaaatcttcatactgtaggtgtaagatcgtttacatgacgtaagtgcagtcactttcacacagttgttgcttgaaattatgttatgtcaaaacaaacaaacggcttgccagggctgaagacaagttctgacagacttctctagacttacaaaaagagaagtgctcttcagtgaattatggatcttttttttgtttgtttgttttgtaacaggactaagcaattaaaatctcaaatttttcagattttacagctaaaacagcaactgtgaaacctgctcatcagcagctgcgagggggcggggcggcctctctgaagcc

SEQ ID NO: 44108 - DNA, 544 bp, Mus musculus
  source 1..544: mol_type = other DNA
tattccctagcatggtatggcacacaaggcacatttatgtggctgagatgaacctgtattaggtcatctatggccaaaagtgggctcagaattcccaaactatagctcagacccgcagagctggccagtgcttcaggaacaccaattggcaagtcatcttgtcttgctgctatactccaagtagaattggtgggaacagatatatactccaagtaggatccaaccctaggcaagtgctctaccattgggctaaatttccagctctttagagggcggctcactaagctgcgaattcagaccagtagccaggcagcagggatgacagacttgtgctatcaggcctgtgcccagtggcccaaacaccaagcgggacccgatggggtgcgcatcacccagccagtttggcgggacttgcccaagagctggccagcctcgcggggtcccgcgtctcccgccgcacccaccagcctcccgcgtggcgtggcgtgggcggggaggtggctgcgcgctctagctccgcgggaccaggctgccgctttgtgac

SEQ ID NO: 44109 - DNA, 671 bp, Mus musculus
  source 1..671: mol_type = other DNA
cagttcctttttaaaattttttataattaacaatgccaattcaatagctatactacccagttgtatttgaaagcctgacttcagttccttgaacccgcagcatggaaggcacgcacacgcactcacacacacgcgcacgcgtgcgagttcccctgcatacttataagcagattgattacctatcaaaagctaaggcttcagatagtaactaaatccgttagtgtgacctcaaaaaattttttttgataaatgcccgattagtgacttttgtttttccaaaaccaattaaacctcatctttcaaattttctttcgaagataaacttattggcacactgcagacctgttggttgggtgggtcccaccgtgcagaaggcagagggcccaaagggcagggcccacggcgcacgcgcagatgggagggcgcgcgcctgcccttgcccctccgccctctaggtggcgctggcgactcgccgccgcctctccgaggccaaccccgggtggcgccgggcgccttgcgggccctgggtccgcctccgccgcgccgagggcgtgggctccgggctcccggaagcggcggccgcggcgtggagcccagcgggccgtcggtcgccggagcgacaatgtgcggcagccgggggctgtgagctaagcgcggcggcgcgtccgggg

SEQ ID NO: 44110 - DNA, 493 bp, Mus musculus
  source 1..493: mol_type = other DNA
ggcccggccctgagcacacacttcttaataaattatgagacatcagtttctatagaaaaggtaatattttttcttaaaattttaaatattaaaatatttttaaatattttaattaaaatatttttaaaaatatatttaaaaacttaatgactcatggaacttgtagagaatgatgattttttatatgaaaatgaacacagaaaaagcataaaaaaccttataaactctgtttaataacagcggttcttatagcaataaataaaaagtgagttgcagaatattatattaaatgttgaattttttcgttattgcaatgctcaggcataaagaaaactatgatgtattgctatattaaagactatatgtgttatcgaaactcagaaaatgtatggataatttatagtttccatcatcatggaagtgccccgcccatcgtgtccctgccgttggctcccacgtgagaacgggcatggagcacgtgctaggactcctg

SEQ ID NO: 44111 - DNA, 392 bp, Mus musculus
  source 1..392: mol_type = other DNA
ttttgaaagctaaccgttcctcaaaataggtgataatccaagaaagcagaaagtagtttccagcttgtctgatgtgttctccactgaagaaactgtgaaactggctaagaattttctctgctagttctgatcccgcagtgaggggtaactaagttataggcgacattttcttgaagttgttcctaccactcccaggctagccaaagggccagagctgccctcgacctgagtctgaaagcgcaggctgcttgacccctcccggggcgtccagagccaagctcactgaggccccgccccggtcccgcccccagcctcgccaccgcccgcgagctcgctgaggccccacccccccgtggcccggccttgccccgcccccgaggcccggccccgcc

SEQ ID NO: 44112 - DNA, 562 bp, Mus musculus
  source 1..562: mol_type = other DNA
gtgtgtgtgtatttcacaaagctatgaaaccattcccacgaaaagcttatcacttaagttatttgccaatgttatatgcaggatatttcatgaaagtatggttggataacttgtaaattgtttatatgcttgtaattttaaaaagaatatctgtctcttgaaaatgttgcaagagcaatgtatcctaaaatagacagctttgctattcttagtagagaaatgaaacaaaatatttaactgactagttaacattggtgtagaaatacaataaaaatttttaatctcattaactaagaaataaggaaaatgaacaaataatgtgggcataaaaatgatcttcttaatataccttaaaaaaagttttaataaaaattaagagagaagccaggctcatgtagtatgattttcatgcactgctgagtcggcacacgcttctgtgtagagatgctcgcatctgccacacgagacgcaggatccttaatcccagagctgtcaggtttcagcatccttgtgccgaagtagggaggcgccaacatgattgatggtcggagcctgtataaaa

SEQ ID NO: 44113 - DNA, 183 bp, Mus musculus
  source 1..183: mol_type = other DNA
atttatttattatatgtaagctctccactgagtgtgatactacaattatcttccactctgtaagtttgggagctgaagctttaggttggtcacaccaaatgaatgtcttacttggtcacggcactgtgccttttaaaaaaaatcccctttgcagcacttccttaaaaaatagctatttaatgc

SEQ ID NO: 44114 - DNA, 413 bp, Mus musculus
  source 1..413: mol_type = other DNA
caacttgatgtacatagagcttgcctaaggctctcgcgctaggccatcgtggaccagggcgcatggcgtgggttacaggtggatccgacctggagcgcgcctcgagcctctgagaggctgcgcagaagcaagacgcgtttctaagaattttaagccacccagagatcaaaaattagacacctcgggtacgagggtgccccacgctgcattatgatatcagaatttaacacgaaaaagtctcattttaatatttgagaaggccttattgccagaaaagtggaatcaggaaacacttttgtcttaaatttttttttgctcagagcgcctgggagttgcatcgagcgccgacgcggacgcccagacctccgtgtccagcgcgcagtcgcagtggcctttcgccccggctcccgccc

SEQ ID NO: 44115 - DNA, 388 bp, Mus musculus
  source 1..388: mol_type = other DNA
atttttgtgcaaataatatatagccagattttattttctagtactaaactaaaacctggacctcgatgaagatcgtcacttacaagatgcccaactttggtttccttgcatgccaagggggcttaaaaaaaacacttcacgttttgagtttataaccagcattactgtattatgggtctttctataataaaacccttttatcctttttattaaaaattttcatacaatatattttgatctgtacattcttctctcttaaaaaagaaagaaagaaagaaaaggccggcctggtctacacagtccaggacagccaaacgtccacaaaaataccactgagtttgttttgtgttggccaaccaatcaggaagagcacgcatgctcggcccgc

SEQ ID NO: 44116 - DNA, 284 bp, Mus musculus
  source 1..284: mol_type = other DNA
agaacgtttgtggggttaaaagcctttgatgctgaacttgaacttgcagcaaaacatttttccttcttagaaaaatggagacactaacttaggaattgcatactcgctagtattttttgtttttgaaacctaatctcattagagacgatcactgatgatgagcttcaaactcaaagcgtaccttccagcgaggacctggagcgcagagcgcgccctgtggattcgctggacgcggcgggaggttccagtgctcccccgccccagagtcgctggtgcctaggcag

SEQ ID NO: 44117 - DNA, 233 bp, Mus musculus
  source 1..233: mol_type = other DNA
gaaaaagacaaatagtcaaagtgtagacttattcttcaccattaatagccctgtcttaaatcatgggtgatttaagagttcagagctgtctgatgtgtgagaagtcactagcctcacgtccactctggcttcctgcagaaagagcgctggcagggagctgtcctgcagctcccaggactgcctgtcatctgcccatgccgcccctgcacccggtggggaggacctgtcctggg

SEQ ID NO: 44118 - DNA, 218 bp, Mus musculus
  source 1..218: mol_type = other DNA
tccaaagttagaaaatctggaagtttcgaaaaagacaaatagtcaaagtgtagacttattcttcaccattaatagccctgtcttaaatcatgggtgatttaagagttcagagctgtctgatgtgtgagaagtcactagcctcacgtccactctggcttcctgcagaaagagcgctggcagggagctgtcctgcagctcccaggactgcctgtcatctg

SEQ ID NO: 44119 - DNA, 507 bp, Mus musculus
  source 1..507: mol_type = other DNA
aggtgctggattcttttaaaaatgaaatcaacgccaccagggcacctgaccgctagggtcactgattccaaacccagcgttctcaaaacagcatgggtgggtttgcacaacacctacaaaagtcctccagtcaaggttgccactctcccttggggctttggcctcggagaccaagccaaccctttccaagcctgtcccctggactgggcatggtgcccgagagtcagagaccgtaggacccaccccctgcgcggtccggggcgcgctctccagtggaagtcgccagggaggttgtagatcctcccgggactcccaggcttgtccctcaaccccaggaccatccccatccgcccggggtcaggtcagggacggggtcccacgggccctccgtcgcgcttgcgtcccggcgggcggccccccggagcgtgcccgctccccacgccctcgccgccacctctcccgagcgcggcgggctgactgggcatgctccggagctcggccccgtgc

SEQ ID NO: 44120 - DNA, 267 bp, Mus musculus
  source 1..267: mol_type = other DNA
gcctaggaatcaatcgttcatagcaatgacttcctctgcaggccttttgaagttacagtgtaacaatcacatggctacattgttactttgaacacagtgagtgggctctgtctgaaagagagcaacattccagggcgctctgaagcagccttgagaggcgggttgtcactgccacctccggaggcgtggcgcccagaccacgcctccggtccttcgaaacaggcggccgcgctgggcgacgaactgcggcggcggcggcggttggtt

SEQ ID NO: 44121 - DNA, 414 bp, Mus musculus
  source 1..414: mol_type = other DNA
gattctggatcaatcctttttataaaaaaatgagaaaataaacctatgtacgtgttcattgtccatagagcttgtagatattaagaaagattggatttattaaatttatttattttggtttattgacttagaattctgaaggttagaagtctaaaatcagaaagattggctcctcctgagactcccaggaaggaatccttcttggagtatgggccggacaattcttcccatattactactgtgaagtctgctgttacaaatgtgccctagttacaaaggtaaagatcccctcaaaaaattcttaggctgggaaagggttaccagtttccagctactaggcaatttggcattgaggacttttctcataaacatttacaaatattccgctcagcgatggggttaatcagtaaacca

SEQ ID NO: 44122 - DNA, 305 bp, Mus musculus
  source 1..305: mol_type = other DNA
tccacacagaactccagaggctatgctgagttcgggctagctcagagcaggtggtaggacaagctcagatatcctctacccggaatatttcaaaacttcactctgggctcctgccctggctgagagctcattcataaggccgggctgcagaaagggtggtttctatagcatcgcccctgggagaagctgacagcgccacctgcaagctgaaggaggcaggaggggccagggctgccttcagaagccggtgctggtatcaggacccctcagtgcactgagctcactttagcttctcccgctgcagc

SEQ ID NO: 44123 - DNA, 367 bp, Mus musculus
  source 1..367: mol_type = other DNA
agtaagtttactgctttcttacataggtgagaggattacctataggggtgtgggtgcctcctatagctggatagatggaggcccctccctaggtggtaagaacctgtcatactaggacactactatgtttctgggcacaaagtaggtaaataatacttttttcaagcaataaataagaggaaaacagttgctatatgccctacatgtatcagttctacagatgaagtcctttctagttttcatttctggcaagtaacagaactatgaaatgggctcagaccctacaagacagccagcagacctgtggtgctaggtgacgctggcaattccaaggctccatggggcacagagccgaaggccgcctgtg

SEQ ID NO: 44124 - DNA, 374 bp, Mus musculus
  source 1..374: mol_type = other DNA
gctaacctctagcctcgtggcgtgtgtacatacagctgtacctacacaaacatgtgtagtagtcctactactacgaacaatttacttctttcattaagcacgtaagataaataatctttgttgctcgttatctgagaatgtcttagaaacgcagagcatccgatcctacttgtgcagcagaatctgcactttaacacggccctgttatggttccagaaactcgggcttcctagcctggggccccggaaagctggtcttacggctgtcagcagaggcccgggctggctccacccccgccccgggagccccgcctcactccgcctcggggagggcggagggaagccaagccttacccttccgaaccgcccggaagt

SEQ ID NO: 44125 - DNA, 565 bp, Mus musculus
  source 1..565: mol_type = other DNA
ctgtgtgtctgcaagctttatctgtctaaaccttttaaacaggcgcactggagcccccatggggaggtgaccccagccacggcggaaacccgagctcctgcgccagctctggggactctcccagcagcagaatgacccaggcagcggggctcccgtcgcccgaaggcctcgcccagagtcaccggcctggatccggcttcccgggccacccaccgccagcccgcccgacccggcccgtcactaggcaacagtagcagccgggaggcccggggagacccgtagcccgcaagctggccgcagacccaggtcgcccggtgcccgagacaggtcactcacctcgcagccggctacctggaggggcggtgctggggccggtcccccgccggctccctcaatgcctccgggctgtgactgctcgggccgccccccgagtccgcagaaccccgagatcgaggagtcctgcccgctcctgcatgacgtcacttccgggcggttcggaagggtaaggcttggcttccctccgccctccccgaggcggagtgaggcggggctcccggggcggggg

SEQ ID NO: 44126 - DNA, 353 bp, Mus musculus
  source 1..353: mol_type = other DNA
aatacgtgtaaagaaagtgaaacagcttactctctctttttttttttttatttatatcagattattttgtagcagagtctacattccaatcaaaacattttgagagagactctctgtatcgtgtatgtctggctgtcctacgtaaaccaggctggttttgaacacccactttttcttaacattatgaaacatgtcagatgtcaagaagtcctttgtagataggatacatataatttattgtgaccaaattctcgtatccagttccacgatgcgtatggtttcaaggctcggagtaaataaagtacttagcagtttctactaagcacaggaagggctgctccgctgctcgactt

SEQ ID NO: 44127 - DNA, 285 bp, Mus musculus
  source 1..285: mol_type = other DNA
ttgaacttgagtctccagaattcacatgaagccagaagtctgatcctaggaaccaggtaacctaaaacaatctttccaagttaacatagctagaaaatattagaacccttcatggtggtttggtcatcaagttcagatcatcaagcttgcttgacaagtactcttgctggctgagagccaggctctagactttcatatgacatgctgtcaattttacttcctttaaggttagaccaacgaatggaaacattaaattacagccgttagtctaaggttcccggaact

SEQ ID NO: 44128 - DNA, 507 bp, Mus musculus
  source 1..507: mol_type = other DNA
tgggcttcaggcagagaaggcgcctcagcagccccgcccgccccacggtcggccccgggccgcacctgccgcgcgcacacgccccccgcgcgccgagcctccgagccgccgccgccgccgccgccctccgcacgcacccgccgcggctcgtccgcacagcccagcctcggcgcgggccgcagccaccccagccgcgggccgcggccgtcgtccccgtgtaagccccgagcccgccgggcgcggaacccaggtggatccaggctgggcgtttgtacgcacgggcctccgcctggggaggacgcgctcgactcgccggagcatcctccccgctgctcagcatcctcctgtcagcgccggagcatcctgctcagggctcggcgttctctgagctcagcctcggcagcgcccgggcccggtccccacccgctcgcaccccacccgcgggaaggaggcctcgggaaggggagtggctgtgggggcgcgtcgccgcttggccagcccctctgc

SEQ ID NO: 44129 - DNA, 453 bp, Mus musculus
  source 1..453: mol_type = other DNA
tgtgtgcatacatgtgtaactagtctattcaaagaccaagttttccttgctgtttagcaaagctttgcttggaactaatattacatgcattcctgggaacggaactcaggtctaaattcaggcttgagcctggacctcaggcccacattttatgagcgtgtgcacacattacagatgcaaggatgatttttaaataggggttttagcttatttctaaactacattgctgatttgtgagttggtttacttaaactaggcaactgagagaaaacctggttactttttagattacaaatgaatttacttttataagatttgagattatttaaaagtaattttgctttttcattttaatataatccctagtaatacatgtatgttgatacctttaatcccacagccagggctaaacaaaccaaaatatgttgacattagctgtactaggtttttttt

SEQ ID NO: 44130 - DNA, 319 bp, Mus musculus
  source 1..319: mol_type = other DNA
cattattaaataaattactcagtctgtctgccattcagtaaaaactcacacacttacatctgttattcttgaattatttttggttagggctcttcttctttattaaaaaaaaaaaaaaacaaacttagctatccagctaatgttacctttatagatattttagaacagtttctatatgttgcagtaattcaaaaattaaaaagaaattacactgtgaagctttcaatcagaaacggttccctctggtacatttttaaagggaaaaagcacgtttcctggtgtcttttgaaacgtaaaaaaaaagaaagaaattcaagat

SEQ ID NO: 44131 - DNA, 383 bp, Mus musculus
  source 1..383: mol_type = other DNA
cttaattagtaatgccaaggatttgaaatccagagattaaaatttgctttactgaatctttagtcatagtcaagaatatattttgtcttcaaagtttaaggtgtatggtcaaatcaggcagtacagtctgaatgttttcttagttgtaaataataattacacttaaagtcatttttccaagaaaaaaaaaatattccttgcctggcataagaatgccctctattcctatggtttttgtgaggattaaatgacataaaaagtaataaatgaagaatattgactacataggtgttcattgttgacttgatttatttatttaattttattttttaaattcttctcactgagtcaagacctggctttcttaaggacttatttaaact

SEQ ID NO: 44132 - DNA, 752 bp, Mus musculus
  source 1..752: mol_type = other DNA
ggacagccagccgtagtgaccgtggctcttgccatccctgctgccgccaccgagctagttggtggtcacctgggcgccggcggagctgccgccccagcggtgtctccaagcggggcgcggagcgcgggcgagcgggagcaccgagcccccgcgcgcgccagccggcccagctaggcaccccgcggcccggcgccccgttcggcgggaccgcaacggtaagcctgggcggcccaggcacggacacctcccactgcccacgccctccgcggccgcagaacaatggagagcgccgcccgctgccaggagacgccgccaggggggcggacggagtggcggggggcgaggatgcgctgccgcccgcgctgctggcgcgcgccgcgaggaaccagagcactagcgagggcgcgcggcggcgggggggtggtgagcgcgccggtccccggagctcgtggggatccggcgcctctcccaccaccctcgtcgcttgctcacgttcactggagggggctctgcaagaggcgtgagccgcgcgtccgcgtcctcggggcgggagcccggcagccctctcggatcccggatcccggccagcccacagccgccgctagtggcgcgcggctagggtgagtggcgcgcgcggcggcggcgggcgggcagcgcgggcgggcgagcgagcgagcgaacgagcaaggttcggtttcttccctccccgccccccgtgcgtggcccccgctggcgaagatgcgcctctgaga

SEQ ID NO: 44133 - DNA, 444 bp, Mus musculus
  source 1..444: mol_type = other DNA
tcatttatcggctcgaggtgctaggcgcccacgcgaggcccgacccacgccaggcccagggtcggacagcaggctgagcccagtgcgggggtccgcccagcccgcgtccccccgcgcctcggggtggacgtggctgcagagcagcttcggaaggccacgcccaccaaggctgtgccccgccctcaagcggctggccccgcctctggattccgctacccgactgagtctgcgggagacccaagctcgcgggtgcgcgcaggttgcggccacgtctagctgggcgcgagcccgcggcttagccccaccccaccgcgcatgcgagaacgctcaaccagggcttgcggtcacgcgccgggcggggcgcgcgcgcgcggccgcggcggcgggccctgggcgagtgaatttgcgtgcccgggcgcgcgctgtgtggactgggcgggccca

SEQ ID NO: 44134 - DNA, 655 bp, Mus musculus
  source 1..655: mol_type = other DNA
ccagaaagcagccggggctcccgcctggcttccggcgaccccgcgccccgggcaggtcctgacacctccctgggtatcagctgctcggggcgcagggtggatgcccgggatctccaagcggcgtcgaggggtggtcacctcggtgggcttgcctcgggccgcaccaggggagggtaccgggatcgccgcttcacccctctggcgggagctgcccgggcgggaagcggacgccgctcggaaagccgctgcgactgtctcagatcgtcgccggtggctgatggcacacacccctcgcacacccctctcacacccttccgcgagcggagtgagacgtcttgggcccgcccagtccacacagcgcgcgcccgggcacgcaaattcactcgcccagggcccgccgccgcggccgcgcgcgcgcgccccgcccggcgcgtgaccgcaagccctggttgagcgttctcgcatgcgcggtggggtggggctaagccgcgggctcgcgcccagctagacgtggccgcaacctgcgcgcacccgcgagcttgggtctcccgcagactcagtcgggtagcggaatccagaggcggggccagccgcttgagggcggggcacagccttggtgggcgtggccttccgaagctgctctgcagccacgtcc

SEQ ID NO: 44135 - DNA, 405 bp, Mus musculus
  source 1..405: mol_type = other DNA
gtcttttgtttgtaaatgttaagaatttttaaaggactaactacaatagtcaatacaggagccagctctagtggtgtctatgtcacatgtggaaaatttagacatgcctatgtcaaaagtcagatggaatttttttctgaaaagtccgatgatggcaggaattccgatcaaagatcttgtagtgatatcctagcttccatacctgaataacgcttaagcattcatgtctttaaaagtttatgcccgcaatcacttaaagacatgagtaggtcacctgtctgcgcctgcgcagtaggaatcctcctgcgcactagcagctgcgctcctctccgcaaatgagaggcgcgtggcgcagtgacgctctgcgtgcgtcacggtgacgccgcgcgaagggcacggatcttc

SEQ ID NO: 44136 - DNA, 546 bp, Mus musculus
  source 1..546: mol_type = other DNA
aataggaaacatttctggtcagtattgtgttccagaaaacagaactgtggcacatttgagggttcctggctccctctaaaattaaaaaattagtatgcaccactataccaaacattaggtttgtttttaaaaatgcaattttgtaacaaactaaagctgtatggaaaccttcagctgtggaagtctggctttccctagattccgcttcccctccagggccagcactcggagggggcaaggccggggggctcggtgtcccgggaaggagccaggcccgggcaaagggtcctcaagagagctggcgcagaactccgcccgtccgaaggcgatcgagccgggagcccatcccttatcagcgtccgaggggaagggcggagagaaacagcgggccccgcgcccgagctcccgcccgagcgccttttgcacctctcgccctgcgccgcggcggctggaacccgcgcgagccgcccagccaatgggtggcgcgcttcctccgggcgcccgccaatggcggcgcgcgttcttggggcgtgcgcgagccaggct

SEQ ID NO: 44137 - DNA, 309 bp, Mus musculus
  source 1..309: mol_type = other DNA
tgcaggcagatgagtgtcacagatgtaactgaggtaagggaatatttatatacaattcgttcggaaaaaaggaagtcactataggtaaatatctttgggtaccctctaaatctgtatctgtagaaaaaaaatagaatttctgtttgacgatagtatcgttttttttttgtaattatttttacactcaacagtactgaggtcagagagttttaaaaattaatgagattccctgtggagttcaaatagtaatatctacagtgaagataagattaggccagtatatttttgctatagattgcatctgaaagc

SEQ ID NO: 44138 - DNA, 223 bp, Mus musculus
  source 1..223: mol_type = other DNA
tttaaatgggttttacccctatgcacaagattgggacccttctggttaatttatttacagtcagggcatttgaaataaccttgttcccagagaaagaagtcatttaccttcaaatgtcacatttcaggactagtgagaatgctacatatctgtctctggaacaataggtaccacactcaggagaaggtctgcctctgtgatgaaggacaaagctttgatcatt

SEQ ID NO: 44139 - DNA, 315 bp, Mus musculus
  source 1..315: mol_type = other DNA
gaaagtaaagtacaagtagtgagccttttcttgtcatatcctccttttctacactataaaggaaatctgctatctgaatcttcagatccacaaggagaagggagaatgagcattttctccctcctccaagtttttgtaattttgcaagatttagccactggttttaaatgggttttacccctatgcacaagattgggacccttctggttaatttatttacagtcagggcatttgaaataaccttgttcccagagaaagaagtcatttaccttcaaatgtcacatttcaggactagtgagaatgctacatatctgt

SEQ ID NO: 44140 - DNA, 287 bp, Mus musculus
  source 1..287: mol_type = other DNA
aggctgaagtcactacgatggatttgaactcacagagatccctaaaggcttgtagaagttagataattgcctttattaagacagaggttctctgtgtaggctggcttagaactcagcagtctgcctgcttctgccttattaacttcctaactagactgtaatctccagcaggctagggaatcctctgcaccgccccagggtgggaggccacccagcacccccgcgggctgagcgctcggggcaccgcctttcccgtgacgtcatgcgaggcgggacttccggccgcc

SEQ ID NO: 44141 - DNA, 584 bp, Mus musculus
  source 1..584: mol_type = other DNA
aaaaagataggtttttttagtccagacacagagatggtcttgactatttctgttttagcataaagttagtttaatttttttaaagactctgaactctgattagttaaatgaatttaagtggcatcaatagtacaagctcattatatgctaaatcaaatgcattaataaattaacctgaattcatcttgctgcctcttctagaggtgccgtaattggaataacagaccaatcgcttgttatttaatccagcgatttatacagctttctttttaatgcataaaaaacccaattagcattagtcaggagatttatttctctgttcatttttggactcatataactcaatataagctactaattgacttactactatgttaggaaacaaagtgttcaatgaatagaaatgattctctttgtgggcaaaaataggtaaaagttatcacagcctgaggttagaaacttggaattttctcattctatataaactttgggcagagttttaggctcaaaaatgtctgaacttctgaagttgaccttagtaagatctgtgcagacatgtgatgtgaaggccagacttttttaaa

SEQ ID NO: 44142 - DNA, 437 bp, Mus musculus
  source 1..437: mol_type = other DNA
gaaattcaaatcccaaattaataaatttgactcattgtggcccatgagatgcaagaaaagaacattttttagtgttaagcatttcctctgagacctacagtttgtccatcagagagaaaaaaaaatttggagagttaacacttcaaaccatttagcatatattaatgtcaaggagttaaagttgagcaaaaggcatattgatttagaacactgaagtggcagtaactcatgatcattactcaggtaatgtctcaaaatgcttggaataatgcccaatacatcttaatgattgtaaccatggatattagtaggtggtccaaatagggaaaacattgtatgaatttttgaaagagcactcaagacactgaggctggaggataggagcatcctgcctttccaggctgtggtccggagagttgccgggagatcgttgcttg

SEQ ID NO: 44143 - DNA, 329 bp, Mus musculus
  source 1..329: mol_type = other DNA
tctacacattcagttgttcctaactggggaagaagaaagtaaagaaactgggccaacctctttggcctgtacagttcatttaaaaacactgtggttgaaatcaaagctttgtgcgtgggtgattactgcactggccacgcatatccatgcagcaatcgaccgcaaggtggcgatcggttcctcaccaatcgcgatggtcagacactgttcccgccccgcatgccgccgtcgccgccaccgccggcaggggtcgcgctgccccaggcgagccgtgcaggcgggggtggggaagctcccgcagccggtcgcttttctccaataaaagtctt

SEQ ID NO: 44144 - DNA, 310 bp, Mus musculus
  source 1..310: mol_type = other DNA
gtttgcaaagcggggcggggagtccagtcttgaaaccacagggtacccctctaagacacaaggctcctagtttgtggctcttaagaaacctccaaattattactattaatattaattatagtgctgctgttaacgcttagggacctccctttcggggcaccattagcagggcacgaacccaggtgccaaacttaggaacccgagggctcaggagccgacggagcccccgccgagtggagagacggcggcctggccggcgggtccccaggctcctcccctggggtggccgagcaggaagcggggcgggcac

SEQ ID NO: 44145 - DNA, 521 bp, Mus musculus
  source 1..521: mol_type = other DNA
ggggcggggagtccagtcttgaaaccacagggtacccctctaagacacaaggctcctagtttgtggctcttaagaaacctccaaattattactattaatattaattatagtgctgctgttaacgcttagggacctccctttcggggcaccattagcagggcacgaacccaggtgccaaacttaggaacccgagggctcaggagccgacggagcccccgccgagtggagagacggcggcctggccggcgggtccccaggctcctcccctggggtggccgagcaggaagcggggcgggcacggcgcgggggcgcgcggggcgtgcgggcgggcgcggggcccggcgccgggggtatgcgcgggtctgggcgggcagccccggcgcacagccgcggcccgggcgcacggcgcggggcggaaaagcctgtttacacagactgcacaccgcctaaaggaagtgagcaggctcggcctgactgctccaacttcctgctctcacacacaccagaggaggggggggggg

SEQ ID NO: 44146 - DNA, 359 bp, Mus musculus
  source 1..359: mol_type = other DNA
gctaacttctgtcttgatagcaaatcgagatgttgcctacaatgtggatctgtgtctatctacagagcaactgttctactgattattcaatcaaatttctcagaactgacactgcacacactcttgagggcatgtggagtgttaaagtccgtcctggtgagagtaattgggagtctccccatccgtaaagctgaatcccaggggactcaaatgactgcgagtcacacagccaggatttatcccaggtagatgccgcgaatcatgcctttggcttggaagatcactcactcaccccagggtagtgagctgagggtaaacacaaccgggtgtcacaattgtttaccaattgagtaattccc

SEQ ID NO: 44147 - DNA, 411 bp, Mus musculus
  source 1..411: mol_type = other DNA
gtgcattatcctgtctttcaaaacatacaatgtttgcaatgttacaataaaagttgtttagaattaaattgccaagcatctttcaacattcctttgattttcacagtagacttgaaaaaatggcaggcaatattaccaacataaatttatagctctcaaaaaatgattcggggaatcgaaccccggtctcccgcgtgacaggcggggatactcaccacactaacgaggaattgcacagtggtggcctttctgatagggctcttgaatagatattcatttgcttttcgtgctgccatcatggctcctagcaacggaaaaatgaaagcgtctagcgctagcctgatcgcgctgcatcatgggattggcccctcggaggctcggtgcctccctttcccggggtgcaccgcgcca

SEQ ID NO: 44148 - DNA, 266 bp, Mus musculus
  source 1..266: mol_type = other DNA
ctgcacacactcttgagggcatgtggagtgttaaagtccgtcctggtgagagtaattgggagtctccccatccgtaaagctgaatcccaggggactcaaatgactgcgagtcacacagccaggatttatcccaggtagatgccgcgaatcatgcctttggcttggaagatcactcactcaccccagggtagtgagctgagggtaaacacaaccgggtgtcacaattgtttaccaattgagtaattcccttctgaaagtccactctc

SEQ ID NO: 44149 - DNA, 470 bp, Mus musculus
  source 1..470: mol_type = other DNA
caaatcctgcctgccagttctttaaacaatctggatactgtggtgtgtgtgaaagccaccacactcgggaggagggggggagtgtcagacacctcaacaagtctggatcactgttgaactgatactctgtgtctcagccgcgtggcacccgcagccaggctaggagggtcacgcggacaccgtgagcctctgccccgtgtgtttttgtctctgtttctgtcactgtgtctaacacacacacatacatacataatacacacaccccactgtgtctgcctctgtttctgtcactgtaacacacacacacacacacaccactgacgtctctgtgtgagcccgttggggagggggtgatataaccatcacctcctttactccaagcactgctcctgtcccggtcactggctgctggccagctcccgccccacgctgcccagccccgccccgccctgcccgggagccacagctcg

SEQ ID NO: 44150 - DNA, 564 bp, Mus musculus
  source 1..564: mol_type = other DNA
ggatcaatgatcaatgatcataatgaagttttgttggagaaagagctttcgctccggaaccccatcagtggccacgctggcgccctccagcaccgccaggctgcgcagcgcagacccggtcaggaagcgctcgccgcgggcacacaccagcaccacttgctgtgcgttctccagcaggaggcggtggctgctcgtcgtcgctctagccgctggcgggctgcggaggacaggagagcctgcgagctgtggctcccgggcagggcggggcggggctgggcagcgtggggcgggagctggccagcagccagtgaccgggacaggagcagtgcttggagtaaaggaggtgatggttatatcaccccctccccaacgggctcacacagagacgtcagtggtgtgtgtgtgtgtgtgtgttacagtgacagaaacagaggcagacacagtggggtgtgtgtattatgtatgtatgtgtgtgtgttagacacagtgacagaaacagagacaaaaacacacggggcagaggctcacggtgtccgcgtgaccctcctagcctggctgcgggtg

SEQ ID NO: 44151 - DNA, 209 bp, Mus musculus
  source 1..209: mol_type = other DNA
gagagggcctcttaatgctaaatcaagaagtattattccctttaaatatgagtagccaatttacgctgcctaggaggcgtattttaaaaccgaagagcgctcctccactgcgttataactaggcagtgtgcggagcgtgctactcgcttcggtttacccctactcggggaggggaagggcttccgcgcgcgcgccgccaaggcctccga

SEQ ID NO: 44152 - DNA, 347 bp, Mus musculus
  source 1..347: mol_type = other DNA
agtcaccaccatgtggggatgggattcgaacccaggtcttttcacgtgcgaaaagcgctcttctccattgggcatactttaataatataaacgacagtctttaggcttaggcctgggccaatctcgaatctcgagtttagatctcccgaaaaagaaaaaagtactctttttacacgggtttcatatcacaggtgaatcaactgttgtaaagccccacttgagtgcttttcaccaagtgctggatctatgggaggatgacctccagaacccgatctcgttctttcagctgaaggacagactaaaccttctttagctaaagaaaccaagtccgttgtctttggtggcca

SEQ ID NO: 44153 - DNA, 363 bp, Mus musculus
  source 1..363: mol_type = other DNA
agccctgagctacaattagctgcttgtggttgctgcatatttcataactttatggttcccctgctcaccatactatgaagcacctaggacccaggcattcttatgtccctgatcatggatcctggtcactcctttgggctgcaccccccaaaaagccagagtcaactgctctcaggaatgttcctggagaaggtgggcccaggcgaggcccttgggtgctggagggcacccgcgatgcgcgcagcgggggctgcagacaccccctccccctgggcggcggcggcggcgacaatgaccggacccgcgcgtctgcaccgcccggctgtcaagcgcggggggcgggcgggaaccggagcgccgcgg

SEQ ID NO: 44154 - DNA, 426 bp, Mus musculus
  source 1..426: mol_type = other DNA
attcttatgactcctaaagagaaaacagcaccataaaattaggctgttttcttctgctcatagagattctatggaagagtctgaagcacaggatttcaaagaatgtttatgagccattgggtttacagcagagctgttctatgagacacacccacttgctgagacacacccacttgctctgagacactcatcaagccgcacatttactgctggatgacttgagctatagtctgtctcctatagtctaatcctgcattagataaattccttttatcttcaacacggacaaggccttcaaatggttaaaagaataaaagcttggctttcatcctctgggtaaaatatttttatgtcaaaatggatatcaaagtttttttttttttttttttccgcttaacttaagcaatagtccgtttgaaaagaccc

SEQ ID NO: 44155 - DNA, 352 bp, Mus musculus
  source 1..352: mol_type = other DNA
attagcacacagtgtcctgctctctgatagtctgtcctacattaggaagaagaaactgtacagtctaccctttctgcgatactctgagttgttttgttttgagacaaggtctcactttgtagcccaggctgaccttgaacttgcaacattcctggctcagcctccagatgaaattaaagaattgagtgcattcagacaccatggagttctactctaagccacgctcaaagctagtaacatgcttctaggtttatagtcatatatgcatgcatgcatacagtctgaatctaggtttatattcatatatgcatgcatgcatacagacaatatatgtacgcacatatgtacgacc

SEQ ID NO: 44156 - DNA, 349 bp, Mus musculus
  source 1..349: mol_type = other DNA
ttatgtagctgtggtcaggcctaaatttggtacctagtttaaaactaattatccagatagctttggccacttgtctcaaaataagagacgcgttattttgagacggggtctctaaatctgcggaggggattaattaaccgcctccaagcgatgatcctatcttgaaccatcggaggtttggagtgcagcatacgaaacgcggaattccggcttccatcatcaagaatgtgtgtgataaatacattattttaaccctttttttttttaaatagggaacactaaattccctgctttttcccaggctgggaagatgcgcaagaccgcgtgctgcagagtcctccgccgtccc

SEQ ID NO: 44157 - DNA, 420 bp, Mus musculus
  source 1..420: mol_type = other DNA
tcctgagttagaagaattttactactcttgcagttgcaaagagaagctaataacacattgtaaaataaaagctaatttgagatgtcatttaatcccaacacttgttctaggacagccagggctgtcttgaaacactataggaaaaatattatagagggcaaggaaaatatgtttaatttcaagaaaagtcctttccagaaccctaaggagaggattacaattccctagtggaatgggtttgggattcttcatcctttgttagtatctcctaacaaagttgtcctattaaagcatcagtgttttttttaaagattaatctatttattatatgtaagtagaagagcagtcagtgcacacttgggcccaatgctgctaacattcctcaggatgatgtctgcatgccctgcagggatctcaacc

SEQ ID NO: 44158 - DNA, 196 bp, Mus musculus
  source 1..196: mol_type = other DNA
tatagccctggctgtcctggaaccaggctaaggttcttaaagaaaaggccttaatgactttatttatttattcattttataagaattattattgtagataagtacattgttgatgtcttcagacacaccagaagagggcgtcagaccccattactaatgaggttccaggaactggttaatatacaggtgttctgtg

SEQ ID NO: 44159 - DNA, 646 bp, Mus musculus
  source 1..646: mol_type = other DNA
aggaggaattaatttcatacctatctttaaatgtgtgatcaaatctaggtgtagtggcacatacaggcaggcatatctctgatttcaaggccagcctggtccacatagtgagtctgactgtatatatattctaatgcccatggtgtctttaaaatgcagtccattagaatccactttagtgtgtcagcaatccctgtgtactgagattcacttagcacatatgatacttctgattatacaagctgaaaaattggactacctgtagataatgctaaatagatattttttctcacttatttcttaagagtttcttaaaatagatagtattattttaggatttataacagttttataacatgtcctaaagactgactacatacaaataagtttattgttgcaaatctcttctaaaataaagtaaagtttgcttttacaaaaatgactaaattgactctgattctgagtccaagtagtctgtgacttaaaagtgctgaggcacagtactggtgtgtgcccccttaaaggttggtgtgtggccctgatccagccctggaggcccacatgggtctgaaagcactcccaaggagtctggttttgtttgggtttgttctaggtatggtcccagggatcccagatcaaaccaggc

SEQ ID NO: 44160 - DNA, 468 bp, Mus musculus
  source 1..468: mol_type = other DNA
ggctcaaaacaccagggtgcaaacagctgagtttcttcagctccgcgacgccgtcccatcacctgggctcaggggtgggggacgcatcccggggaccccacagcgggcgcgggcgaccggcgccagtcccgcaccgcccacccgcggggaacgcagcgggagccggagcccgccggcgcccgccgcgactactccccagcccggcgcgagcgcagccgcggcagaagtcatgactgccccgcgcggctcacgcgcaccgcctgagcgcctcacaaaggacggacgccggctcccgcgaccctccggcggacccgggcgctagcggccagcgacagggggacgtgcacgagcgccgctccgccgcgctccgggacgatcgccaggcgcgcgcacgagaggagatcgcagcggcttcgcggacgcgcgccccacctctcggaaagggaggtgggcaggagccgaagcctg

SEQ ID NO: 44161 - DNA, 383 bp, Mus musculus
  source 1..383: mol_type = other DNA
gccagagctcacaccattggccacaggtgccacaccttgatgatgatgattatgatgatgatgatgaccggagcacgtttcggccccgccccaacgaggcgcagtccagggcggtgcagccatagccgatcaaggctcccgcccagggccggtcaattgcgccgggtctgggcgagctcggggcagaggccaaccacgccaggatcccctgagctcgcggaggattggggacccaggcccgcaggcgcccgtcaccctaaaggcaggagggcgggcagcacccaggcttcggctcctgcccacctccctttccgagaggtggggcgcgcgtccgcgaagccgctgcgatctcctctcgtgcgcgcgcctggcgatcgtcccgg

SEQ ID NO: 44162 - DNA, 331 bp, Mus musculus
  source 1..331: mol_type = other DNA
tttattatttcttcagctgttaaagagcattggctgctcttgtaagttcacatctagaggatctgtgcctccacctagactaggtacacctagatgcatagatgcaggtaaaacgcccgtattaatgctagtctgggttctgacaggccaggtctcaaaagacttgtctttcggcctgcacatatgtttgtgcacagatgcacttgggtgcgcgtgcccgcggaggccagggtggacacgcagctgcggcggcgctctccctccagttccagaaccgccgctggactccggggccctcggcttcgcccagggaacgtgccggccgctccac

SEQ ID NO: 44163 - DNA, 380 bp, Mus musculus
  source 1..380: mol_type = other DNA
atattaataacgcaaaatatttttaaaatgaaattaagaatattagctgctcttgccaaggttgatcttagccaatctggccagccttgtcgacttgacacttaactatttttaatctttaattttattaatctatttattttattattttgtaaagcactaactccaataaaataacaaatccttcaggtattttacttaatcttattaatgaattcaaaatcatacgcactctgtattaaatgtacaatacaatgcatggaggaagaaacttatttcgacaggagaaactcccatctgggaaagctttgcttggcgtacttctccaaaacattaatttccctgcgtagaacgacctccgcggccggttgacgagcgcg

SEQ ID NO: 44164 - DNA, 369 bp, Mus musculus
  source 1..369: mol_type = other DNA
aggctttcccttatctttcttgataaataccagagagatccagacaaaatggttttattcattagctcagtctatgggttccagaaaattataatggcacttctttgacagcagtgataagtgatgatctgtcagagtatgctgcatccattcattctttgcaagtctttcaaagagtcttttgcaaacaaggcatggaattcgagcaaccttgaattctacactgctttctttactttgctagaagtcaaagcagcaaaaggccgggggtccatcctggccttgatctggcagcctcgcaccccaaattagcatttgaggatggatggactatggggaaaaccaaggtactttggaggtggcgcatca

SEQ ID NO: 44165 - DNA, 294 bp, Mus musculus
  source 1..294: mol_type = other DNA
cttggctaccaaggttggctgctgaaaccacagcttcaacctcaggaggtttgtgtgttggtgacctcatgatgggaccaaaaggaggaagggtgctccctattggctcagtgaacagcttgtgattgacagatggggaactgttcctaaaccgtgatctagttataatctttattataggtcctagttgctggaaggcctccacggagtgctattagggacccatggtcccgacatcaaagtttgggtctgccaagcaccaggcagctgggctcccagagctataaatctcta

SEQ ID NO: 44166 - DNA, 343 bp, Mus musculus
  source 1..343: mol_type = other DNA
ctcacaggactatcagatagatgtcttagacttccaagccagctagggggataacactctgagcctgaccgataccgcattgattaccaatcagtacttctgggactagagaacgctcagtccaggaaagctgtccagccctgttgagtgaaatatgtatatatatttcattaaggcacgtcgctcatctgagccgggagaggcgtgggagcgcgtgggccccgttcgcaggcagggagggcagctgagcccggcacctggagcgggtctaggcgccgcgcgggcgcaggggcggggagcggggaaaggggcggagactgtcgcccgcctccccacccgggcg

SEQ ID NO: 44167 - DNA, 279 bp, Mus musculus
  source 1..279: mol_type = other DNA
gcacagggttttcttcaaaataaaatctttaagaggagatgattatcctgggagcggctcttcatcatgggcgagacaaacttggccagggtggacacacacaccaggatgaccgtcatgaaggccagaaccacgttgatgcacttccgcaggaccttggcgttcacggcatccgtctgcagggtctgctgttcctgctgatgcagctcgagcttgcgggaacacgtgcccagatgtgccccaagctccagctcagagcatttctcaatgtatttccct

SEQ ID NO: 44168 - DNA, 484 bp, Mus musculus
  source 1..484: mol_type = other DNA
acttaaagacacttaaatgccctctagggcatttttaaaaagccaagagtctttttatcatagtcagaaactggactaagaacttaccgtgccgcagtgcggagtgccgcaggcttccaagcagacgcctgctcgccccagcacagcagccgcgctcgccaccgggagcccccggctctcccaggcattggggccgagggctcgggacggtcccaccggctggggtgtggggcccggagcggtccaagcggccgctgccgccgcggggctggaggcgaaccgaggagccggacggtccgcgagggcacccacgcctcggggctgagagggcggcggctgcaaggccggctcctcctccgcggcccgccctcctcggccgacacgccgccagcccgccgtccgccactcccgagcggaccgcgcgcgtcccgagccccggcgaggcgcgaggcaggaagtcccgcctccccgtcctacgtcagca

SEQ ID NO: 44169 - DNA, 472 bp, Mus musculus
  source 1..472: mol_type = other DNA
catttctagaaaaaatggtgactgaagataagctgtgcttcataatgcactgtgggatgcatgtaatttaccttagcttttaggtcacaaatattatcaaagctgtcaccaagtgtcaatttagtttgcagcctggagaccaggagcccaccctgggccggggcaggaaggaggtcctgacctgacttccctggtggcaagctgggggcgactccgcactcacaggctgactgggtgccagagcccgcgggcgtgaggtgacatctgccgttccccgggctcgcgggcttcggtgcggcccacagggacgtcccagagtcaccaacggctcggaccttgggcggcgcgcggtgctgacgtaggacggggaggcgggacttcctgcctcgcgcctcgccggggctcgggacgcgcgcggtccgctcgggagtggcggacggcgggctggcggcgtgtcggccgaggagggcgg

SEQ ID NO: 44170 - DNA, 399 bp, Mus musculus
  source 1..399: mol_type = other DNA
tgttaagattcaacaattcatttactgtaacaaccctttcacagtggcagtgtaagacttatcaaaaaccagatgtttacactaggatttataacatagcaaaattagttatgaagtagcaacaaaaataattttatggttgggggacaccagagaactactgccttagagtttttaaaccactctctctcttttttaatgtaggagagtgtgcctcttttcccgctgtccccgcgccgtggcgacatcgcccctgcgcggctctcccgggggctggaccggggttcgggtttttacaagttccaaatggaacctgccacctcccgatttggcggaagatcgcgagcaaggctgggatccgagtgggctgagggtggcagaagccccgcccgccaccct

SEQ ID NO: 44171 - DNA, 700 bp, Mus musculus
  source 1..700: mol_type = other DNA
ctctgaccgagggaaacccacccccggtcacaggggcgtcttggtccccctcagcgccccagtgtcagccgccctggcagcctcccaggggctcaagccctgggcctccgccgcaacccgttcgaccctgggtcctggctccgcgagcctcgcgtttgcccggggctgctctcgtaaacaaaacccgggcgttggagcagccccgcgggctggggagcgcgggagccagctcggtgcgcggttccggcgccgggggaacccggggcgagcaaggggcgatggtggcagccgcggcggccgcggcaggcggctcagctttagagcctcctcccgatctcaccgaatcaagaagggagggggccagttgcatcccactttcacaatgggaaacctccgcgcctccccgcgagcgcccgcgccgcacagaggaactctccggcgaagggaagcgtctccggagcgcgcagggcttgccgccgcggcacaggctgccggagcgagcccgccgcgcgccgtcctccctgcactccttcccggccgagccgcggggatggggcggccgcgggagcccgagcgcgcgcaggagccgccgccgccgccaccgccgcccgcgtctccgtcgccgcgcgcctgagctgcccgagctgccgcgcgccctgcccgggggcggcccccctagccccatggaggtctcccggag

SEQ ID NO: 44172 - DNA, 516 bp, Mus musculus
  source 1..516: mol_type = other DNA
aatgatttgaaatgctaaaaagaattcctaccacttacatacactgtcagtattagcattgtaagtttgcaatttataagtgtctactgatatgtttatagatattttattttcaaactggtagaaatattctttttctattgtcaaaaaatttttttagcacacacatcctttttgttacatgtcacccaactaattaatgagtttattaattgttttattttatgaagtaatttgtgcgagttgaactcagggcttaactgctagattaacttttgactagcttattatagtgttaagattcaacaattcatttactgtaacaaccctttcacagtggcagtgtaagacttatcaaaaaccagatgtttacactaggatttataacatagcaaaattagttatgaagtagcaacaaaaataattttatggttgggggacaccagagaactactgccttagagtttttaaaccactctctctcttttttaatgtaggagagtgtgcctcttttcc

SEQ ID NO: 44173 - DNA, 523 bp, Mus musculus
  source 1..523: mol_type = other DNA
tggcgcagaaaaagcctggctcccccgccccttgtccgctggggaggctgcctagtgcggaggcggcagtcgcggcggctgcgctcgctgttgcgggctcagccccggcctcatttggagctccggcgggggctgcacgctccggccgattcctcgacagcgcccgcggcggcagccgcaggagccgcggtccgcgttttggagcgaccgccgctgagccccccatcctcgtctggagcgtgctccaggaagcggcaggagtgggggtgaggccgcctccgaggcagggatgcagcggctggcgcgccgctagcgcaccgcagcaccctcggctggcgacccaggagccctgcggcgctttagggcggccggatgcatcctcccaagggccctggggtgcagagaactgcccggttcagggtgtaattccagcacacagttcgcgggaaaacacgaggagtccctgggattttccacgtgtctgtttacccacccccacctcggccgtaggggttcagcccag

SEQ ID NO: 44174 - DNA, 405 bp, Mus musculus
  source 1..405: mol_type = other DNA
aactccgggtccctggctttgcaaggcacccgggcacaggtaagggcacctcctctgtagggtggccagggtgtctcccaggaggcgctcagctcgtctctttcctggccctctagctcttagagagggagggacggacatctgagccccgcccccttcccgcacgctggtcctgcatcccacatggaggagaggaggcttgcagacactgttcccgagcaccccgaggtgcagggtcagaggagggcggagtcgcaggcttccaccccgcagccgcgcattagcggccggggcctctttaaagcgctggcgggggattcctggaaagttcctggaaagcggcctccgccgcggccgggcggggcgcgaggggcgggaggcgggggcgtcgggctgggaagtcgc

SEQ ID NO: 44175 - DNA, 572 bp, Mus musculus
  source 1..572: mol_type = other DNA
cggaaaatttcccgagagcagagccccgacttgaactctcccggggcgccctaaactgcggacgcccaggcggtccgccgccgcccccgtgctcgcaccccgccgccctcccggccactgtccccccgggcggaaccttcgggcttcgcgagcggtacctgccgcaagcttccgggctccgggcacaagggatcttgagggcgcgcgcctggagtcccggcgcgcactgtccgagacccgcgcagcgttggcggctgcgggaggaaggctcatgcttccggagccgagtgtgcgcgcgacttcccagcccgacgcccccgcctcccgcccctcgcgccccgcccggccgcggcggaggccgctttccaggaactttccaggaatcccccgccagcgctttaaagaggccccggccgctaatgcgcggctgcggggtggaagcctgcgactccgccctcctctgaccctgcacctcggggtgctcgggaacagtgtctgcaagcctcctctcctccatgtgggatgcaggaccagcgtgcgggaagggggcggggctcagatgtccgtccctc

SEQ ID NO: 44176 - DNA, 465 bp, Mus musculus
  source 1..465: mol_type = other DNA
ctggcacaagcctagctctactcaggttggttacatagggagccctttctgcaggatccaggcgtttttttatgtgaaatttaaacgtttagaaaaaattttttttgtcgccgccaccgaggaggagcgcgcgacccgcctgccctgtccgcagggaaccgctgcagcgccagcccgccacgcgcactgcaatgggctgcgtcgggggccgggcctttgttacgtcgccccccgacgcaggcgtggtcgcacgtacagcgctcgctcgtggacgccggccgcccagtgttgccgattgccacgggccaagaagctcggcgccgcctcgcgccgcctccccccaagtccctgccccgccgcggagcgtcacttccgccacccccggctggggttggggcggggagcgcgatttcccgaggggcctcggcggaggtagcgacaggcgggcgcggcgacgttccccgg

SEQ ID NO: 44177 - DNA, 371 bp, Mus musculus
  source 1..371: mol_type = other DNA
attcagttccaaatcaaacaccccggtgggtgggtctgaagtgccagacatcaaacccagggtctcaggcatgcgaatggaatggttgttgactaacctagtcagtcgacatctatcagatccattggttgagaaagctttcaaatattgtcttctctgagaaaacttaattgatccattatgaaaaacacattcatccatttggtttatttggtgccaataggctcataaattttagagaatgttaatattctctgaataatagtataacattggttttgatgttattttaaatattgggaatcctgagtccaaggggccacaacaaatgcagcctggccacagctggagtgcctcgcgcgcgtatagcg

SEQ ID NO: 44178 - DNA, 319 bp, Mus musculus
  source 1..319: mol_type = other DNA
agaatcaagcaactccatcctgggttgcatccagggcagtggtggcgtgcgcgccttcaatcccagcacagatctctgagttcgaggccagccagggcttctggatcggtggttcaaatgaagcatctagcctccctctgggctagcctgctgtagagcttgatagcttaggaaagtccaaacttacagggggtggggtgtttgaccaagagatttaagtcactgaaccacatgggtttttcagagcttgtgtgtgctaggcaagcaggcactctaccgctgagctgcgcccccagctcgaggcgtgactgtggctccc

SEQ ID NO: 44179 - DNA, 274 bp, Mus musculus
  source 1..274: mol_type = other DNA
ctgaaataaccagtgttcatgaatggaatttaaccgtagtcctgccatggctccggggaccttggctccaggacccagtactggggtccgtccccactcgcccgcgggcagggcagagctggcggagccctagacttaggcctcgagccccgccccccggctggtcgaagccgcccctacccccgcccggcaacggtcctggcgcgcaggcgcactggcgcgcccaaaggagggagcgcgccggcgcgcgcgcgcgggagccccgcttaaatgc

SEQ ID NO: 44180 - DNA, 200 bp, Mus musculus
  source 1..200: mol_type = other DNA
ttggtttttttaaccacttgaataaaatatgatctgattaaatatgttaggttggatacttaattcaaggcactgccaggcagaatctgtagtgcataagagctgttgtaaaagagctcagacagtttaaggtcatgattttaaatacagaaggttctgaataattgagatgtaagagcatgcacagaaagaaagaactc

SEQ ID NO: 44181 - DNA, 413 bp, Mus musculus
  source 1..413: mol_type = other DNA
aaaggcctctcacaccatcttgtaagtttctatacaaaatagaaacttcctgtgcctcagtccggagcatctgctctgacgtcatgactctaaaccactgacgtaaataaaagttgtacagaactgacagataaaaaccacatcacatgttaattggtattttttcttatcatgttaaagatggagaaggaacagacatgtgacacatgcctcagcaggctgagaggccggaagatcatgagtctgaggccagcctgagcaactcaggactgttgactgaacatctgtgaggtaccaggcctcatggtcagaacaatgcctttgaacttctcaggaatgaaaactttatgattagttttaaaataggcttacagtaagacctctcataataatttcttgacaactaagcttaa

SEQ ID NO: 44182 - DNA, 453 bp, Mus musculus
  source 1..453: mol_type = other DNA
aatatttattttactttaagagagttgggttaaccctattaacactctcgacaagcttaaagttttatcttatgtactctaaagtcttgaactagaaaaacgaatttgttgtgcctttctaaaatacatatgcagatttttatgagccccccggggttctgcaaaccctaggggcaatggcttggattaagccgcaggatagctccagggagcagcggagccttagtctccgccaccgcacgctcctcccgccagggctgccagccaagccggctggaactggggctgcggagaccgaacctcagtcctgaggttccagccacacaggaacccggagcccgctcggggactggagggtccccgctggcccgaaccgggggcggagctagctcgggggcggagcttcggagtctcaggctgcgcccccgccggattggctggcgtccgtgagct

SEQ ID NO: 44183 - DNA, 328 bp, Mus musculus
  source 1..328: mol_type = other DNA
ctggcagaggcctcccaagcactggaaacacgaagttagctggggtatttcaaactccagctgaatctgattgcaatcagccaagaggaggatccggcttccatcctaggctggggctcagctgaagttcgtgtgggggacacctccaggcgggacccgtgaggtccccacgaagaagccaaggcaccagcttcctgtggcctgtcgaagcctcgggccggccctccctccggccccgccctccccgcggatggacaggccgaggaggcggggctgcagcggctccgcccctcggccccgggcgggcgggcccgcccagctgtcagtt

SEQ ID NO: 44184 - DNA, 424 bp, Mus musculus
  source 1..424: mol_type = other DNA
acacgaagttagctggggtatttcaaactccagctgaatctgattgcaatcagccaagaggaggatccggcttccatcctaggctggggctcagctgaagttcgtgtgggggacacctccaggcgggacccgtgaggtccccacgaagaagccaaggcaccagcttcctgtggcctgtcgaagcctcgggccggccctccctccggccccgccctccccgcggatggacaggccgaggaggcggggctgcagcggctccgcccctcggccccgggcgggcgggcccgcccagctgtcagttacgggggcggcccggcaggcgggcgctcgctggctccctcctcgctggctcgtgctcgtgagcgccgcctgtggggaagtcggggccgccaaagccgcgtccaccgccgcctcttccccggct

SEQ ID NO: 44185 - DNA, 407 bp, Mus musculus
  source 1..407: mol_type = other DNA
tagggggaatctcctcctttttcatagatggtggcttcaagtccccacctgatcagagcctataaaatctccaaaaactttcttaagggacccatctataaaaattattatttttttctttacttacaaactaaatcttattgtaatcagtgtctagtttctatgtgttttattcaacaacagataggtaatgaaaataataaacaacatattttccagattaaattctggctttgctccagagcacttgaacttcagagcccaggagtaattctatggaagtctaattagtcttctctgcagaccacatttaaaaaagctttataatgcgttacaatcttttagaaaaaaaaattcaaatcaagttgctccactagactacaaaagcagtttaccatatgatctgt

SEQ ID NO: 44186 - DNA, 442 bp, Mus musculus
  source 1..442: mol_type = other DNA
cttagcgtagatgacaaagagacatctcaaattacaaggcattaaatatgcaagtccagcaaacttgtggtaaaccataaacattctattttaatgtgaagcagtcttctcctacaatctttatgatttttttttaaattgagaaatcacaattatgtatggagtattctgttttagacatactgcagtattagatgtaaattaaaaatgaatgtgtggagttttttttttttttatgtttttggaaaaagcttcaagctatacatttgtatcaacatatttgcagagatgcagctcttcttgataagagctgaagagggatcttaagccatgtccgttcaaaaaattgattgttcattttgagttatctttaattaatatccaaataactagaaatttgctgtgaatatacatgcactgtgttattaataaactgaaatga

SEQ ID NO: 44187 - DNA, 345 bp, Mus musculus
  source 1..345: mol_type = other DNA
ggcggcttatatgccccagtataggacttttgatatagcatttgaaatgtaatttaaaaatatctaattaaaaaatagaaagtgaatattttaaaataaaaatataccctataaatatatataatcttctcaagtaattaaagcaataagggcttgaataaattactcatttgctacattacataccagaaagtgagttagaaattagtgacttgtgatatttttaggatatatttatggctttaaagtatagaatataatcttcaatgaggaaatccaccagaccttggctgagtggttccagatctgaaaaaaaaaaaaagactcagttcctttgcgtgtgct

SEQ ID NO: 44188 - DNA, 293 bp, Mus musculus
  source 1..293: mol_type = other DNA
ccctataaatatatataatcttctcaagtaattaaagcaataagggcttgaataaattactcatttgctacattacataccagaaagtgagttagaaattagtgacttgtgatatttttaggatatatttatggctttaaagtatagaatataatcttcaatgaggaaatccaccagaccttggctgagtggttccagatctgaaaaaaaaaaaaagactcagttcctttgcgtgtgctgggtccagtaaaaggctggcgtgattgggctggtcccccccccccaccccccaa

SEQ ID NO: 44189 - DNA, 482 bp, Mus musculus
  source 1..482: mol_type = other DNA
cttccacaacagtggtcattaaagtcttttaccacttggtagttctccccttgaacgtgataaatagaatgccttttaagtcactgaatgcaaaacatgtgctaaaatataatagtaaaagacctcctgtcttattagttacttaaagttattattaaggagtgtggcataaaattgattctgtagaacaaaggtgattaccaaattcagtacttagatgagctatagctactcagggaggattttaattttttgcaaatgtatgttttccttaataaaaagattccagcatctgtttcatatcagagatgaataaaatatgtccacattttacttttgtgtttaattgttttaaaagatcatttagagaaaaaaaaacacatttccaaatcttttgttttcgttacaatggacttaaaagaaaatttttcttttgaaattggagccaacgtcaattcattactgggagcgtaagccatcct

SEQ ID NO: 44190 - DNA, 518 bp, Mus musculus
  source 1..518: mol_type = other DNA
tgccttttaagtcactgaatgcaaaacatgtgctaaaatataatagtaaaagacctcctgtcttattagttacttaaagttattattaaggagtgtggcataaaattgattctgtagaacaaaggtgattaccaaattcagtacttagatgagctatagctactcagggaggattttaattttttgcaaatgtatgttttccttaataaaaagattccagcatctgtttcatatcagagatgaataaaatatgtccacattttacttttgtgtttaattgttttaaaagatcatttagagaaaaaaaaacacatttccaaatcttttgttttcgttacaatggacttaaaagaaaatttttcttttgaaattggagccaacgtcaattcattactgggagcgtaagccatcctagatttaatagcataaagtcaaaacattttttttctttttgttatccttattttagctaacctaacattcctggaaagcaaggtaaactattttgtactttttac

SEQ ID NO: 44191 - DNA, 308 bp, Mus musculus
  source 1..308: mol_type = other DNA
gaaagcaaaacacttgatgtttatctcttttttggtaattcacaactttcctaatgcgtcttgtggtgaccattagccataaaattaatttcaatgttaattcataactatattttttgctactgtaaaaaatcataatataaatgtctctcttttctgaggattattgtgacaaaatgcatcttgtaacatatctctcttaagttaataaaagaatcatcctatttgtggatttaaatttgaaacgaccattgttttgtgtaattttcagatggaaggagaagaaaagagatgtgtttacctctaga

SEQ ID NO: 44192 - DNA, 452 bp, Mus musculus
  source 1..452: mol_type = other DNA
aatctgattcatagccattttcctaagtcaaacactatgtcttactatgaaagttaaagggacctggtgcatgcattataatattcttataattttctgattcactgaatattcctgttctcaaaatcaagtattctagagtactagaattagtcaagggatctgtgaaagatgatttcatagtacagtgatcctgtgagcttaaagactagctagctataaagtctatcagtccctagccttcagatcctgaatctgtgtcttaaaaatgtctgtgctcctgtttcatgtaccatgaatcggaagaaattggggcccgatttctgttacctgtagagaatatacattccaggtgtgagacgtcataagaactcctgcgaatgtctccaattggctgtcgtcctgggcaaggggcacgcgggggggggcccccagccagtatttaaaggccg

SEQ ID NO: 44193 - DNA, 771 bp, Mus musculus
  source 1..771: mol_type = other DNA
gtcctgagaacagatcttaatattctgcatgtttgccagaaccaaattggctttcggaatccaatacatctatttacattggtcccataggaaagattattgatgcataagagtcaggcttctagaagtctataaaataaaatagaatctaacatgccacttttatctttctttaggaatttcacagttctgaaactaaggaatagaaagctaacacatatatatttttttctccctgtccaatttttcaaaccacttcccgtaagaaaagtttaaaacattttttttttttggttttatgttagataaaagaggaaaatgagcctttatagaacactcagatcatatttatatattatttctagaaatactccttttaaaattgttcatgcaaaaggctcattgttcattgttatcaaagcacaatcagaataattttggctatctttccttacacaaagtgaaacagataagtcttttgtaacatttgagatttcagttgacattagtgaaaagtgaagaatgtaatttaagacatgtaaagtgaggggaattatttcatattagactatttacttaagaaattcttaactggtgaatttgttagagaagagacaactagcctttttctacttaaatattttaaggtgacattttggcaattacagctaattagcatcgctctataatataatgaacggtttttaaagacagagaagcggtttttcaaacagaaagttgagtgttcctatccattggtcaggggcaaat

SEQ ID NO: 44194 - DNA, 406 bp, Mus musculus
  source 1..406: mol_type = other DNA
ggtttctctgtatagccctggctgtcctggaactcactttgtagaccaggctggccttgaagttaaaaagtatacttcttatactctttgtaagtatttgtgttctatgaaattatacaggggagacatttagttattttatttcctatggaaaaaacttgagtacttatgaagttccctccgagtcatcccatgggtctccctggaaagacttaagggacaagactttcttaagattttagccttctggtgaccttatagcaatttattataaccaggaagattgtagttagttaccataagaataattgatgttcagttctgtgacttagagaactacataaacttgaatttgaatggcaggaaattcaagtgttccttgtcttaagcattgacccatgcagaa

SEQ ID NO: 44195 - DNA, 782 bp, Mus musculus
  source 1..782: mol_type = other DNA
ttgcaggagccgccgggccgcgcgcccaggcaccggcggtgacggacggagtcaccgccccctcctcccccgcgtcggccccgacggggggcagccgggagcccggcgcgcaagagggaggggcgcgcggaggcgcgagtcgcccgccccgcactacaggccacgccgcctcaccccaccccgggcgcgcgctcgccaggcggggccgcgctcgccggatcctccccttaaacgccctctccgggaagcgccagtcccggtccgagcggcgctacctccgctcgtgcgcgcgcgcgcgcccgcccgcccgccctcaggctccccgcgggccgcgtcacgtgaccgcgcccagccaaggcggcagcggcggccgcgcgagcatccgcagcggtggcagaggcagcgggagcagctgcgctgccagcgtgcgtcggaccggaacgggtgagcgccctcctccccccttgcctgctcgggcggtctcgcgggtcacccggtgcacaccgggcccctgccccggagctggccgttgccccttgagctccgcgtctgcggaccggtgtccccggaccccgccccgggttgcaccccgcccgttgctgctgctgttgctgctgctgcggacgccggcgcggggccggttgagctgctgtgccgagcgcggcgcgccctgagcgcggctttgcggagcggaggaggcgggtcctgcggggacgcgagcggccactcggcggccgccgggctctgggcgggggccggccgggcgccgcctcctcctcctc

SEQ ID NO: 44196 - DNA, 374 bp, Mus musculus
  source 1..374: mol_type = other DNA
ggtattgcacttacataattgctatatagtggttaagactaaaactgtaattactacactttttatttacacacaacatgttattgtaaccacgtggtctagaaactttaaagtttccaagtcttccgaccacttcaggtgtgtttaaatagataatagaatactattgaataaacatgtgaataaaatattacccacaagctcccctctccggagtagccgagttgggctagtccgctacctccgaagctcgcggggctcgctgtgtgcgcgcgcggcggaccccccgcggcgcgctcccgccaggctctcggctgtcggcagcgcgcgcgcgcgcggcgtctcggggctcgtctggccacgcctggagcgcg

SEQ ID NO: 44197 - DNA, 710 bp, Mus musculus
  source 1..710: mol_type = other DNA
tagtccgctacctccgaagctcgcggggctcgctgtgtgcgcgcgcggcggaccccccgcggcgcgctcccgccaggctctcggctgtcggcagcgcgcgcgcgcgcggcgtctcggggctcgtctggccacgcctggagcgcggggaagcgcccgcactccagtctgacggttccgggcgccgcacggtccggtcccccaaggccccgggcgccgtccgctccccgcatggcctccggcctggtaaggtccccgccgctaccggagccgatcatccttgggcggcgggaccgggaggccgagtctggcaggcctgggaggtagccccgagacccggagctccgcagctcgctcacctccccggagcgggacgccgtgcccgggttgagcggtgagcgctgctcccggagagatcccggcgctcggggctgaggcggagctggctccgggactcgccggctgggttcccgcggcgcgcctgcgtcacgcgggaggcttcggcgagcatctgcagctcggtgcggtgggcgggtccctcggcggctcgccctggtgcctgggctgggggttcctcccgatggtggggacccctccggatggaagctggggcagtgcccgagcctctcagccgggcggggtcctctcgatcccgggggacaggcaacgttgacgtctgatgtcgagagccatcctaggaggatccgattctg

SEQ ID NO: 44198 - DNA, 238 bp, Mus musculus
  source 1..238: mol_type = other DNA
tggtggggagcaagatctccggaacaagagaaagcccggggttggggttctggttttctggacaaccaaacgcttgtttgcttagttgctttaaaatgtttcaacaaaacactagtttgtttctagagatccctcaagttttattaaggctaacttaagattgtggggcttatccggagcggaaattcctttccgtttttgtgaatgacaaactcattaacaattcagaatgtatcca

SEQ ID NO: 44199 - DNA, 682 bp, Mus musculus
  source 1..682: mol_type = other DNA
gtcccccaaggccccgggcgccgtccgctccccgcatggcctccggcctggtaaggtccccgccgctaccggagccgatcatccttgggcggcgggaccgggaggccgagtctggcaggcctgggaggtagccccgagacccggagctccgcagctcgctcacctccccggagcgggacgccgtgcccgggttgagcggtgagcgctgctcccggagagatcccggcgctcggggctgaggcggagctggctccgggactcgccggctgggttcccgcggcgcgcctgcgtcacgcgggaggcttcggcgagcatctgcagctcggtgcggtgggcgggtccctcggcggctcgccctggtgcctgggctgggggttcctcccgatggtggggacccctccggatggaagctggggcagtgcccgagcctctcagccgggcggggtcctctcgatcccgggggacaggcaacgttgacgtctgatgtcgagagccatcctaggaggatccgattctggaacgactgcaaacaaattggtaagttgtttttgttttgacagtaaccaaagctcacttggcagaaagcctttcttccatccctgcctgagtgagccaggcgcgatgggatgtacccggccactctgggtccctgggtaaggactcgactggtcccggcctgaca

SEQ ID NO: 44200 - DNA, 337 bp, Mus musculus
  source 1..337: mol_type = other DNA
ggatgaagacagtttgcttgcttgcttgcttgcttgcttgcttgcttgcttgcttgcttgcttgcttgcttgcttgcttgcttgcttgcttgcttgcttgctctacctgaagcaaaattatagtatctaaaaggccagttataatttgaaattatataaactgatgaaaaataatgctaacttttgaataatttggccaagttgaggcaaaatgtccctgatggataattgttttattcaaaaagcaatgcaagaagcctagaatttaagctcacatgttccccactcgaaacagttgctacagcttccttaagttgaactttgaaaatgtataatt

SEQ ID NO: 44201 - DNA, 492 bp, Mus musculus
  source 1..492: mol_type = other DNA
cctatgggcaaaagagataatttatgaatagttcttgcacaacacctactacgtaataaaagatccatcacataatgttatgagatgtgttatctgatttttacaaactttcctaatctgaaagtggacctttcaatttgttttccaaaggctctgtagtaaactgttgaaaacagcatctagtcacttgttttctcactaaagtaactgaggagaaacaagacaatgggattgtaattaaacttaggcgaggtaggggaaaagccctctccactgtgcgcggtgcaacgagggtacccgggggcacagggcagctactgcaggttgctcagcggcatccgagactcccggtgcctcagggactctggccagtacccagacaggggacgcaccaggctcgatcggtccaacctctgggggtctcccagcctggactcggtgcgcggctctcctccccgaggctccggaagggaaggaggcgtataaaaagcg

SEQ ID NO: 44202 - DNA, 316 bp, Mus musculus
  source 1..316: mol_type = other DNA
attttcaaggaaaatggccttgctaagagctatggctcctgaactgctaatgtacacgctaaattattattttcttgctaagacgaattcggccatcaatgatggtaccaactcccaagatgtttggaagtttttgaaaaccttctgaggaaaatttttaaagaagcggtcctcgcgcactcaggctgctcccgccaactcttcccgaccgagccgaagcggcgccggctgctaggcgacaccactccccgcgccccgggatacctggagagccgtgagatgaggactctacgtcccagagtgccggcgcgttccc

SEQ ID NO: 44203 - DNA, 563 bp, Mus musculus
  source 1..563: mol_type = other DNA
aaactacggtaacttttacaaatctttttaaaataagcatatggaagttatgctatgataaagcttgtacctgctgtgtgagctccctcctaacccattgtgtcctcaggaacacccgggactcactgcttaatcacactgtgaaactctttatcctttttaaatgaaaatggcagtgttcaacggttaagagcattgactgctcttcctggtggctatgctctcttctggtgtctctaaagacagctacagtgtactcatatagacagatagatagatagatagatagatagatagatagatagatagatagatagatagatagatagatagatatagatataaacaaataaaatctttaaaaaaaaagtaacttgaaaattgtaaattcacatataaagtatttgcttttagggaactgtaataacagagtattcacattattatattaaagattacaagcattactcagccttcttttgaaaatagcctttaaaacagaattggtatgaaattgttcattctaatcacagaccacagcctgggcctcaggtcctctgtga

SEQ ID NO: 44204 - DNA, 698 bp, Mus musculus
  source 1..698: mol_type = other DNA
acaaaactgtaaacttgtttttaagaacattttattctttgaggttatttgattttttttttcaagaactaagtaagtaaaacgcgatacctgctgattaaacatttataaaaatattaattggaattataaaacaattgtggaaacataaattggcttcttcaattacctaagatagtaagggcaaaaatctccctgtgatttcagataggtctactactagaatatattttttattcaagcatcaattttattatttccttgtaattttagacagtaagtcaaatgaagctgtttcaagtcttttgttggattcccaagaaaaactcgacagagatttttgttatttctatgtacttgtttaatttttactctcattggaaaggttatcaaaaaacaaactgtacactgcgtggtgattaattcaaacaaattcagttttgttcattggtttttctgtcagaacattagggaatgtctgaaagtattttctaaacttctctgggtttccaatcccttacatttgaaacatgctaaaatgcatcctaaagtgatttattacttataacttaacattaattcccgaaaacatcatcgatactaagtagtggccaagtatacaacatccggttcttttatttttatttttaattggacatcaaaacacaggggccagaatgaggcggtcgcttccggta

SEQ ID NO: 44205 - DNA, 623 bp, Mus musculus
  source 1..623: mol_type = other DNA
taattataagcaaaccatcttttttctaaatttagttttatttccaagattaatactctatactatggattcaaaaaattcatgacaatttaccattttacttaaagtggaaatcggtgtttgttgagatttcaatccaaagtttgaagtatttcaaaacatgctttgatccaatgttcctcacttatactaggttctgattaatataggaaaggtgcatgaagattttcaaaactgctcattaaaatgtcttgtgggaatcagaggacttcccatggttttccacaaattctacaaatttttgagcactctggaaataaggtacccctacttattttaatgaatattactgtgttaaaatctgtttctatacataaataatcaattgtatcataattaatcaattgtatctattttagcttagttctatttccaaaccacatatagaaataacaactttcttataaaatacttacccaattttaattttgaaaacatgaagttatatttctttaatcagaacactggaagataaaacacagtgtaatatctacaagtagtgcttactatatttgataaatattggataggggaaataatccacttaggtggagtagccatca

SEQ ID NO: 44206 - DNA, 613 bp, Mus musculus
  source 1..613: mol_type = other DNA
atattccacagtgtaaattctgtatttactcttatacaatgagcattttaatattaatcttcaagaaaactgagattgtgtatctataattcaggtacttaattaattctagtcaactttgtgtttgctaaagaaagagatctcattatcccaacctaaccatgtcagaagggagaattccattatgcctcctcaaagccgctgtagaatgagtatttttaaataaatactccagagtctaagattagtttgacccatgatgcttgaacaacattggttctgaaaagcaaacttttggtcttttttttttttctaaaccagaaagtcacgactgtgaccatcttaaaaatgcttaatatgcaatatgttaataatgatatattaagcatgtatcctgggcctgtcattagtgtctgatgagaagctgttgtcagttaaatctcattgttttcacccaatcaaattaacaaaatgatagtggtataaaccggcacagtgcttcacatctcatgttcctgggagatcaaaggcttgactttgaagtgaagagtcagtgaccacatattttacagaggagctgattatttggtttatatattaaacctatgtcaac

SEQ ID NO: 44207 - DNA, 597 bp, Mus musculus
  source 1..597: mol_type = other DNA
ctggcagcaagctgctatagccactggacatgtgcctggggagaaacatgataattagtccacatttgtgggaaaaaaatagaagaatagtacgatattataaagtagctttcaattacggaaattgaattgtctagaaatccagtgatttttaaattactcattttgaaagccaatatttaatatcatcttgtaacgatattacttttaatatcacagaatttaagattgaagttcttgttaaatattcagagaataaaatccattaacattttctttttataacgacagatatttttgtggacaaattgattgctcagttatttaactttcttaaatctaattgcatcatactataaaatcaaagcaaaggattcttttaaaaattaaattcctgatatgattactctgattattcgcttatttctctaatcagtcacctttttaaagtatttttttttaaaaagtgcacttgaggaataaaattcctcacagatactaagtaattaattatacaaatattttcagtatgtcatcctccaataaaatgagagtacacccagttgatgtttgtgacatcatcttcgagtcggagta

SEQ ID NO: 44208 - DNA, 466 bp, Mus musculus
  source 1..466: mol_type = other DNA
gttgcttatatgcaactacatttgaatttgtttatcctattgtcaatagcttttgcgaatgactctgtgtgtatacacccagatatgcatgcatgaatgtatttgcatatgaatgcatccttttactttaaaatataagccgtctattatacaaatgattgcacattcttatcaaaggtatatttaaagttattaatatattttctaatggtgttgctttgaagatttttaatttacttaatttagtattaagagtcttaatattttttgatttctttaactctatatagtatagatgtaataaaaaggaatatgcttcatcatgtcaggaaaggcatgatagctgaactggttcagttaaaattcaaggcccatgactcatgtggcttgggccttgtaaagtcattccaggaactggctagccatactatctcaactgagttatgggccatttggcccagtatgt

SEQ ID NO: 44209 - DNA, 215 bp, Mus musculus
  source 1..215: mol_type = other DNA
cgcacacacacacacacattttatagctcctgtgtctgtctgtctgtataccatccttctactgttcagtagttaaaggactcccaaggtccctgagacacagcatgtggtctccaaaggctgacggatcttaccacgcttgcattcagggaaggggagaggtaggggaagcgttcctcctgctcttcccattccatggctattaccatgtattg

SEQ ID NO: 44210 - DNA, 457 bp, Mus musculus
  source 1..457: mol_type = other DNA
ttatatagaatatttttctgtctaaaagtacagtctgctttctacaaaaaaaaaacaaacaatgcagcaaatatgtaattaattatgtagttaattggggaggtattaatacagcaattcatagtttaccttctaacacataacctacttgtgtttttattttataaacattatttaaaatatccaatgaaagagcagcatatgtaacttagtctcccctcagttacatataataaactttcaagtaggtaggatataaaactactcattagatctaattttctgagttttgagacaacgaagttctcagaagctagaacttttgcttaaatatgagaaattaccaaaaaaaaaaaaaaaaacccttgcattttaaaaaatgaaaatgacaaaactctttctgtgagtcagaaatcctgagcaacaggcagagcacatcctgtgtagccatgacatc

SEQ ID NO: 44211 - DNA, 363 bp, Mus musculus
  source 1..363: mol_type = other DNA
tacttgtctctatgaattttcaataatagtaataataataacaacaacaacaacaatacattttgtcctaatgattcgtgtggaccaagaatgaggtggttattgtttggtattggtaaaatcaaatattcaagggccttgtaagggagagcgctgcggccgccacgacgccagcctttaggttgccggttaacagccgccgctgtatccggcgtctaacggatgaaataaaagctctttagagcaatacttcctttcaagttcttaagatgctaaccgctcggcaatgccagtcccactgtcgaggcgactacgattctgggaactaggccggggacgcgccctaccctgggtaaggaggag

SEQ ID NO: 44212 - DNA, 472 bp, Mus musculus
  source 1..472: mol_type = other DNA
aatggcttgttcttgatgtccaaaaagaaaacttttggaaggcctacaaacgataacgtttattgacatgttaattatcttaaaaatgatgaaatgtacttttgcatttccttgaaaaatttcaagtgtcaacgatcataaattttatgtcttgtcctgcttaaggacatccatgcatgaaagcatgctttgactatagatcctttgaaggagaatctgctacccttgaggctgtcgggactcagctgagaagcaaagatccaaagcttttctttcacaaaatatgtaaatagatggtgtggggctcccccgccgcgggcctagctctgtgcgctgggaggacgcagcgggcagccgcagtggactctgcgtcggagaggcggctcccagcctgcagacctggctcgatccttggcgccgtggccaccccctctcccccgcagcctgtcggggggacgcagcactctggttg

SEQ ID NO: 44213 - DNA, 695 bp, Mus musculus
  source 1..695: mol_type = other DNA
taactgaagaaggcagcctgctgtgttccagctgggatgggcgtttccctgccagccatgggagagaagcaagtctcccgctgcccccacaggtgcactgaccacccagcaggctacacagtggcccatcagccctagccgcaagggtcacagtgcatattgcatatacctagactcagccagtctagatttctgctagacagccaaacagcaggaatgatgactgtagtaaaccatcatttattaaagtaatacattttatgaatgtatatagttgctctgcaagaaacactttgacacagttttaaaaattgaacccatagaacttcaggatttgtatttttctgtcaatattgtataatctttatattattatataggaaataagttttcaaatttgctacatcatactaggctaggattaaaatttttgataggcattaattcataactagaaattatttaattcttgaaaaaactattctcatggaaagcaagctattcactgcgtcaaaaatcacttttgaaacacaggttttgtaaaagatatagtgtctatatacatatccagtagacaaatgttctttgctcaaaaacaaacattataacaaaaaggcatatcgtcattaaataattcaccacctcctccaggtcccgaaatgcaattctaattccaaagtagaatcaaagttgtt

SEQ ID NO: 44214 - DNA, 557 bp, Mus musculus
  source 1..557: mol_type = other DNA
gtcaattgtgaccagtcaaaaactttcattgaggacatctcttctctacagagtttcaaagactgatatctcgaaaaaaatatttttaagagatttaattatgttaagaggggtgatctgaagtcattttaaaataaaacatttaacttgactctatttggaatgaatccttatctggatcttggtatggagatcttgagccatagttggattcgaatctcggagtttagaacacacctttaatctgggctacacctttcatctaggattaaaggtgtggtggaacacacctttaatctgggctacaccttctgaattgctcctaattccaaattgttgggaattctgccgactgtaagtcatcaataaattcctttactatctagagactgtccataagttctgtgcctctagagaatacagtctgatgattgggtattacactgaattagatctgttacagttgtaaacattgctttctttagtaatctgtctctttaaggattgcaattatttgtggtgtgaaaacagattcaattatcatagattgtaggctt

SEQ ID NO: 44215 - DNA, 251 bp, Mus musculus
  source 1..251: mol_type = other DNA
gatgccttccatccagtcttgcatccgggcggaaaggaaagggcattagctatccccacgcaatttctgaggaacgcgtgaccgtcctcacgcatcgcgcgcgcgcggggcaatagataaccgaggttgccagcgtcttggcactagacgtttggcttgcgatctagagcgtgcaaagcgcgttttggggagcctccagccagtggtgggctggccacgcaggcgcgtggggccgcgacgagaaccccacg

SEQ ID NO: 44216 - DNA, 424 bp, Mus musculus
  source 1..424: mol_type = other DNA
tgataggcgagccccagagcgctgctcacccggcttggctcccagcgcgagcgcagcagctcctcctcggggcgccgggctccgctgttcctgcgtgctccgggggttgcgggctcacaccgctctccccatacccgacaaccgcgagaggcaagcggcgatcggcttcacgccccccggcggagaatcggggcttgtgcgggcactttgggacgccctaaggggcgggtgggagggacgaggcgaaccgcctcccttcgccgcctcccgggcgcacgactccggggccgttcgcagcaactcggccgccaccgcggctgcggcaacccctctccagtgaagtgagaagcggcgactggggactccaaaagctcccgcgtggggttctcgtcgcggccccacgcgcctgcgtggccagcccacc

SEQ ID NO: 44217 - DNA, 545 bp, Mus musculus
  source 1..545: mol_type = other DNA
gatattgaaaatacagtttgggtttctctgtgtagaccaggcaggcctcgaactcagaaatctgcctgcctgagcactcgtgccgagtaggaatcatcacacagcctttagatgttttcaaaactaaattgttgaatcaataaatgaaggaacccgggttgactactttaagttgtggaacttgaccaacccaccagggggcgcgctgacagcccccgccccgcccgccccgcccgccccgcccgtctctgcctcgcgcggctcggcgccgactccctcagcgccgccagcacgctctcagggggcaggtcgaccagctcctgccagaccgacttggtgtagaagtccaccgtgtgcgcgctggaaatggccagggcgcgtcgtgcagcgtgggcaggtccggggtcctgggcagagggcaggccgccgccatgacgctcatcctccggggctgcaggtggcgccaacatggccgcgcgacccctctcttccccgccggaagcggctcaggctgaggcagtcgagctccgagcacgcgccgggtt

SEQ ID NO: 44218 - DNA, 456 bp, Mus musculus
  source 1..456: mol_type = other DNA
taagtacagtaaactaaactttactgctcaccttgaaaaattacattttatttaatccacatacaatctcacttgggtcttcagtaaacacttaataaataaagtagagtagtctagtatttttccctttagagagtattttaatgtaatattgtatctatattacatacttgctgtagtagagatgcaagtatagacctgagatctgcgtaccgcaccgtccggttctcagtcaaaggactgagaagctctcggacttggcgagcttaggaacggcttccccgatcgggcccgagcccttgcgcacgctcccccggaaggcttgctgggggttcggccgccaagtgccacttggaagacggccgcgaaggcgccatctcggtgggagttcctggaacgccaacccggcgcgtgctcggagctcgactgcctcagcctgagccgcttccggcgggg

SEQ ID NO: 44219 - DNA, 361 bp, Mus musculus
  source 1..361: mol_type = other DNA
aaacacacctgtgtgttttaatgagaatagccttctgagacttaacccacaacactacagtgacatattcgatttaagagtatttttattactccaaagaaatctcattccaagtcctttgtattcctgcctctaaatactgtggaatggacaggcaggtagtggccagatgccaagaaatcctggaacaaatgatgttgagttgaattttaaacaaagaaataagtccaaagttatatgcttttgctttaggaaagagacacatgctttattttaaataagccattgggccctttgtgcaagtgtgaatttaggggtgacgcaactcaacccctacgcctcctgcaggctcggggctagt

SEQ ID NO: 44220 - DNA, 319 bp, Mus musculus
  source 1..319: mol_type = other DNA
ccgccggtggaaaccactgcggcagcttccaggggaagcccttgttccagaggaagcagttcccagcaggttggttctgtcggccaactgatgagcgcgctgcttaccttcccagaaaagaagcacctcctttaagtgaaagtattgggtggagaatgtcccttccatataggtacttcccacaccctctctgggctgaaacccggggctcctgctgcacgcgaaagtggcggcggcggcggcggctgccgctgcttgggcggcaaagggaccgcggctgctttaagaaccgcctcccaaagcaaaatttgtaatatgc

SEQ ID NO: 44221 - DNA, 248 bp, Mus musculus
  source 1..248: mol_type = other DNA
tcatgcatgctaattaataaaaccttttaaggaagtttgcttgtaaaggcaagtcattttcctaggcaatgtgctgttgagagtggacgttctaaacatgaaattttttcttaatctgaaaagaattctgtgcattctgaccattatgcttagggagcgttcctttctcagctccttggccaggcaggcgctcgcggctacctgccctgcttggcgccgcactgaagattcgccgcggcggaacagtt

SEQ ID NO: 44222 - DNA, 406 bp, Mus musculus
  source 1..406: mol_type = other DNA
tgaaattttttcttaatctgaaaagaattctgtgcattctgaccattatgcttagggagcgttcctttctcagctccttggccaggcaggcgctcgcggctacctgccctgcttggcgccgcactgaagattcgccgcggcggaacagttgatgctgaagccgagcgtcacttcggctcccacggcagacatggcgacattgtggtccagccgcttactctggacagaggtaagggagcggctggtccgtcaggccacacagtccgcaccgcttcgccctccgccctgcccagtcccacagggaaggcaggatgcgctcgggcaggggctcgcgcccggagcaggtccctcgccgggtcgcctccgggccccggctttggaaagctctcccagccagagcttgcta

SEQ ID NO: 44223 - DNA, 541 bp, Mus musculus
  source 1..541: mol_type = other DNA
cctggtgccttaggtatctggcccgagaatgaccaacataaacaatatcaaatgaagagtttatcttagcttatctacccagaattctggaacctggagagactgtccagaatgaagatgtaaatatgggaattatcatcatgtagatgacatttaaaaccatctggagaatgagaagatataaaatttgagagtttgtttctagaaatgaaacacttgtgtgtttcaaagaggaatcatgtgtatacaatactaatgggtagtgtgagctaccaagagcttattagaagaaataatgctcaactagtttgatattcctaactatagtactggtaagaactatgtcatggcttgactgttttgtaactagtacaacacttgccccaaagtggagaaatgaatgtcacttcaattaaaattatgacagaatgattaccctagtttcctttacatttttctttacagataaaaatggatatacatacatatatatgcatatatagttttaatagaccataatatttttttctgtagttatcag

SEQ ID NO: 44224 - DNA, 272 bp, Mus musculus
  source 1..272: mol_type = other DNA
agctggcagctgggacccatctgctttaccgctgccggtgaccgtcctcctcaggcggatgcgggggaaggtcacctggtccacttccttttcagggcagcagaagaaacgtgtgaccctctgacagagcaggaagctcagctactgtcatccccatgagatgaccatctttgtcaaacaggttttgaaacgtacacaaactgactcaatcttttggtaaagttcatgaaaatgcccagacagcccctgtggggggttgtggtgggatatgc

SEQ ID NO: 44225 - DNA, 273 bp, Mus musculus
  source 1..273: mol_type = other DNA
aaaacttggtacagaaccttttgttatttcaagatacatttgaactatcaatcaaaactggaaaaggaagcagaattcatattttaattgcactatctaaaattgggatccacctcatcttacagatgtagtaaaagagaggaaagagattatttacctgcttctattgaagctgaggcctgaaagtcatatgtaacctttgaaggactggctattgcctatgaaatctctcatcatgagtctatacttagaattcagttggactatatataa

SEQ ID NO: 44226 - DNA, 566 bp, Mus musculus
  source 1..566: mol_type = other DNA
tacaagttatataaacttagaaataatctaggaacaaaaaataaattcatatgttagctcttatatttaaaaattaagaaagtaaatgtcatcaaagatacattttctcaacatctgtgtataaaggtcacttggaagtcacagttttctaacaatttgattacttagaaatgcaactcaggctagcctggtctacagagtgagttccaggccagcctggactaaatgcaactgtaggctcttgaatttcaaagtcttttgggccttttaagaaaatatttatatttgaacctctaattttcaatgtcagacctggaaaaccctgaaaaccataaaggcttcgctatgtctccaagacgcctgcatgtatttatatttggtcctggcaggaaattcctgcacgaaactcctaaactatgaagattttttccttgagaggtttttaaaagcagaaatagacaaaagcatatcaatgtcaaattcatgagtataaattgtgtgtgtgtgtgtgcactgaacctacagccatccatccaagttcatgaatagtaatccactcattaatt

SEQ ID NO: 44227 - DNA, 628 bp, Mus musculus
  source 1..628: mol_type = other DNA
tgggtgtttgcaggaatgcaattaaccgcaggtatcccctgccagtaggcgatcacctcggtcaatgccaccggggccgtggagacgactccgacccccgggtttccccccgagttcctcgggaagagctccgccccgggcagacgcctcgcgcggcccgccgagcccgggaggaggcaggcaggtcagcccggtcccgcctcgccgcccgacccggctgcctctagagctctcggtcccgccggaccttccaggagcggcccagcccccggctgccagagccacacccgcttccctccggtagcgcccccgccagcgctcggcccccgagctcttcctgggccgggccgaagccgaggcccaggccgaggcgggagcgcgcatgcgcactgggccgcagggcgcctccccggccgcgatctcgcgaagttacgctcagccgggccgcggctgacggactgacgggcgggcggccgtgccgggggcgggagggcgtctgtggtaggaagagaggcccgctcggccgggctcgccccagtgcggctcacgcggtcgcatactccccccggcggcgtcccctcgccgccgccgcccccttcccccccgccccagctcgcgataagaggag

SEQ ID NO: 44228 - DNA, 493 bp, Mus musculus
  source 1..493: mol_type = other DNA
gcactctgacattgcacagatgtgagagataagtccccttagctctgatcgcagagtcagagactctccagctttaggtcgatggtgagatttgctgctaaatctgcctataagcggtgtagagacagcgtgaagaccgcaacaagatcttgaaagaataaaaaactcttgataattcatcgatcattttatcctacctgccacccccctggcgtctagaaagagggagggaagggcggcgagggaaagggaccatgtgggtatttccccaccctggcgagccaggtcctgaatcatccccttccctagaataatacggtcttgtacttaggatcggccgatcccgccctagaatctgcggagctggagggcggcgggaggggcggggcgccgcgcacctgagcgcggagggcggggcttcggcggtacttctccgccccctttcgggccgcagggactcggccctttccgccccgcttcgccctccctccag

SEQ ID NO: 44229 - DNA, 365 bp, Mus musculus
  source 1..365: mol_type = other DNA
aagcttcttacttccgagcagaaaaagccctttagtcccccaccgtgcgggcgggcaaggggtgaagctccattgcctagcagctgcagctgggtggagcctcgctcctccgccccacctatggatactcctaggatgctgtgtagatctgggcatgctcagtatcaaggcaggttttgattgaaagttaaaaaaaagctttgtattaggcttgcttcgtccgctgtggggatggagagactctaacagtactgggctgggctcctgagaggagccacctattatcgctcttctgagcagcgtaccttggttggaaccaatcaagagccggggccgggagatgatgggcggccgcctcctcactg

SEQ ID NO: 44230 - DNA, 658 bp, Mus musculus
  source 1..658: mol_type = other DNA
aacaagtgctcttgtgagtgaactcttttaaagtatcttttcagttttttgtgcaaatccaaaacggtttctttccttaggttcatattttaaataagaatccgaataatagaaatcagtaatattccagagatattcttgaactagaaactgtctaataacacattctcgaccatctctaatgctcaaaaccccctttggtgcggctgccggggttgttccgcgtgccatctgctcgcagcccaggtgctaaccagggttcacgtgtcacctggcggcgccgggtgctagggagccgccctggcaggtcccggcaactcggctcccgcaggttgctgggggcagggcggcgtccgcagcatcccgcgcgtgcggatcgtttccccggctcctgctgcgctgggggccggcgtgggtcggtcccccacaacaaaagggcgccccgcggagagcgcgccggcccgcgccgccccgccccggcttcccgcgtccgcgcccgcgtccccgcgggaaacgctcccgcgtcaccgcctccaggtacccggaagggggagggggcgggcgcggcgccgagcgccaagacagcgaggggcggggcttcgggccgtgccgccgcgccattggtcggcaccgccccgccggccgccgcgcattggtg

SEQ ID NO: 44231 - DNA, 291 bp, Mus musculus
  source 1..291: mol_type = other DNA
cttttctaaatgaagagaactgttgatcatatttcatagattgagtttatcatttaaagtatgggctcagttagatcctagtgtattgagcttagtaagcaactaactcttctaaagtgcatatgataagatgtatacttctcttccagcaaaattttagctgtatacgccaacaataatggttagttttttcaggcaaattttgttgagaatttgcaaggaataaccttgttcaagatgttttatcatcaaccaacatttcataggcattagctgctcagttattgccac

SEQ ID NO: 44232 - DNA, 427 bp, Mus musculus
  source 1..427: mol_type = other DNA
aaaccagatagagatgacattattttgctttttgtctagaacaataatatgtctgaaacccgaagccttttggcgccagggtttttcttcccccctcagcaaagagtggtgggggaaagcaaaacacttggggaatgaggtgttttcataacgtttcgcgacaggaaagctgcggattccagaagccgggattctgaatcctgcaccggggagtcctgcaccccggcacggggcgacaccggatctcgctggctccgggccgatcctgagtgctccggacgtcccgggaccggcgggtaggagcagcggcgggattccggtcttttgtctcggggccagagctcgaaacccgcagcgggagcccagctcagcgggccgggcggagaccatcgcacaccccgaggggcatgaccgatgatgggcgtgg

SEQ ID NO: 44233 - DNA, 436 bp, Mus musculus
  source 1..436: mol_type = other DNA
attgtcatgggtatgcaagagaaagccatgtcagtaaaattaaaaccatgctgaagttgtttacaaatgtaaacacttttatatgggtgtgcgcatatgcgtggggcatttatttatttttgataaacaattgcccaaggctagccaaatgaactcaagagatctatttcctcagtgttcagactgcacatacatggccacatactgtcaggccctcatgacatattttcaaaaattttgcttgcatgtatgtatgtatgtatgcatgcatgtatgtatgcatgtatgtattatgcatgtatgtatgtatgtatgtatgcatgcatgcatgtatgtatgtgtgcatgcatgcatgcatgtatgtatgtatgtatgtatgtatgtatatatgtataccacaggaacccaggtcctctggaagaggagcaactgcttt

SEQ ID NO: 44234 - DNA, 572 bp, Mus musculus
  source 1..572: mol_type = other DNA
gtagagatttacaagagctttcattttaaaaaggtttcacttttgaatccaccttgtcaaaagcaaggattttaaaaaaaacacacaacaaaagctttttcaaggaagccaattttttttttctcccggtgtccccgaggcacaggtgcggaggcgaggagaacgcatccttgcgcccttccagcccttggaaggctcgggaccctgccctgcgcggctctggatctccgtctgtcgcgcgcggcctgccgaggagcagcagcagcagcagcagcagcatcggcctccgaccgggacccgcccccgggccgcggcgcccacgcccaacgcggtccgctgccccggcgcagtgcagcagagagcacactccagccccgggccgggtcgggccgggccggcgcacgcgcatcgggacccgcgccctccgcggcgggaggggctgagggggcgtcccggaggaggtggcggcggtggcggtggcgccgcgtcgccctcatccgggctcgcgctcgccctcgcgctcgccctccgccttgccgagccccgcgaggctgaaacgctttctcccagca

SEQ ID NO: 44235 - DNA, 501 bp, Mus musculus
  source 1..501: mol_type = other DNA
gaatgtcatctgatttcctgtcaagaaatgtaatggaaattgtgtaaagttaaaaaaaaaattcttgccctttcctctccacaggatggggagggattcgaagagttaaattaggctttctgttcaaattgagaggtactatcaacttgacaagaaagcctgctaggctattttcatcccagctgctttggaacttaggcagcagggactcctggctgcttctcaagcctggcagcctcctctgtgggcccggccagaggtcgggaggcgggtcctgcccagcgagagacctgcgggtagccggccctccaccccagggcttcctgagagggaacctcgagggcaggggaggtgacatgacagctcgccatcaccacgagctgccagcagctgcctctgcgcgcccgcccagcagaagctacccggggaccgcctccttgcggcgtcacgtgacgggaagggggcgtggcccaggcccgggctgggggcggggctgcgaga

SEQ ID NO: 44236 - DNA, 453 bp, Mus musculus
  source 1..453: mol_type = other DNA
cgtcattgaatatctatctacaagatcaccttgttcgagttagaaacagtacaaaaactaacttatccacctcggaactttaaaggttttttaccaacttgtttgttttaaatgaggaaagcagagacagatggtctctggctgaaagaagccctttagctatgaatccagcgctcgtgcgctccctaaagcccatttctgctttgggatggtatacagtacaaatgacaaatacaattgatcatcgatgtacttctgctcaagtggtttaactaggtggggtttcgtccatactagaaatggctatgcccaagattctaaaaccgtttgcttgaaggcaaggatggggcggtaatcacgcccccgagcccgagcttccctcctagcggttgcagtggccaggggtctccgcccaccgctggcggggctccaccccaccgaggggcatagagc

SEQ ID NO: 44237 - DNA, 374 bp, Mus musculus
  source 1..374: mol_type = other DNA
tgtctggaagactccagaaatgtagacagtgccttagtatcgatctcaaattgtggcacatagccactctctgaaagatttaaaatctgatacctgagaacaggtgatttgtagtcaactgaaaaatagctgcaagatttcatgagcttaagggttgatttactttttcaggaagatgaaaaattggtatgctgattattttcattataaagcagtaatacgcaaaaatacgctctttacttccatcaaatggatgggaatcctagccaggatactgcactgtccggcacccgcctcccgctcccgttgctacgcaacgccgaggccagggggagggcgtcggagcagccctacgtgctgacgctatatgagcg

SEQ ID NO: 44238 - DNA, 415 bp, Mus musculus
  source 1..415: mol_type = other DNA
tagatctgtgctttatagtctaccttatcaggaaaggtttaaaggcaagacggagactaggactttccagagtcagattcccacaggtgttgacattcgccaaggcttactcctcgcagaggttcaattcccagaacctgttctagggatctgctaaaaacaaaaaccgcttggtgagtctggctattttgcctgtgttctgtcaggaaaggaagtcaagcaggaacaactatttatttaatggctccaacaacaaaaaagctcgaagcactcttgggttttgttgagtcggctccgcgttgaccccaggggtggctccccaggcctgcctggatctgctacccacccccgcagcggagagcccacctgctaaggaagggccggtccgtggggcggcgccctctgggcgtcggca

SEQ ID NO: 44239 - DNA, 336 bp, Mus musculus
  source 1..336: mol_type = other DNA
gcatctaatttagtgaatatatttttgtgctaatattattctaagccttttaaagctatgatgtaagaataataaacaataaagttttggtaatagtgatcccagattctggagggaactatgacgttgaggccagccaggtctacatagcatgtaagtcttttaaaaccaatctggaagttgagagatttaaaatgcaaaactcatggtaggttagcaaagtttgggtagatttttgatacaattcgccattttcattagatttctaatccccctcaaataagaattttaacaccgaggttgcaatgcatcctgggaaggaagtgtcacgctcca

SEQ ID NO: 44240 - DNA, 376 bp, Mus musculus
  source 1..376: mol_type = other DNA
acctctgggagctctcagaaatggtgacctcttaggtaatctaaattttcattcagcagtctgcattcctaatgtttaacagatagggctgcccagcccagacttcttttcaaaatcaggcctggcccttaaatggacacaagtggggtttatgttgtcctttcaaaatagaaaaggtaaaaaagaaaggaaaaaaattctcagtgcaattacagtgaagagtctcattttctctgaaaccataaaatacaaaccatgttgctttgcacaccttgtttggttttataaatctggacaagaaaaacaattctctactcaactctcattaaagtaacctttgttatttcaagctgaagtaggctgtgctttgtaaagc

SEQ ID NO: 44241 - DNA, 422 bp, Mus musculus
  source 1..422: mol_type = other DNA
ttaataacctaaacattaaattaaagtatgaaatatattcatctataaatactgaaaatatcactagacgttagaggtaaagcattaaaccaaatgaagttgacttacacttcattttcaatagggtgagcaagcaacatactcagtgcatagtcctagtccttacaatgatctggaataaagattttgactagaagaaaactactttcctaggtagtcactgagaagggaattcctggaaggaagagacaaaataagatgcagtttattttaaataaatttttaaaagctagacatggaaaacagagtctaagaaactcataagttatttgcatttctctaagatcaggctggcctcctctgttcactgagcgcagcgacactctccacagtgacaggcctcagaatttaaggcttagctg

SEQ ID NO: 44242 - DNA, 469 bp, Mus musculus
  source 1..469: mol_type = other DNA
tattttgacattatatgttaaacaaaggacctagactttaggtccagagctcagagagataaagggacaaaggccttctatagggaagtccccagctgccccagggcctgtccctaagactgaatatagtctttagaatagcaaccatcactagtccatattacattagagaatatgtctgataaatggatacaagtatcaatataaaatcacttcattcccatttgaaagggcaggctatcctggcagtaagcacataaatcaacggtaattttcacttctttttagttatttcgggataaatattaaagagaatgctctgtcctgttagtaatgggaagaaagacagtttccccttccaggggaactcagattttttaatcattcaacacagactaatgtttgatcaatgaatgatcacagcctttggtgtcacaaaacatgtactcatttaattttaatctcacag

SEQ ID NO: 44243 - DNA, 323 bp, Mus musculus
  source 1..323: mol_type = other DNA
catatgcaactggagccatggacccctccatgtgtactcgttgcaaagagtttacagttttaaaacccacaaaatatatttgaaatttgaatgtgaaactgtttaaaatgtgcctgttttggagaaagttgatttttcaaaagatattaaaattttagaatcttaagcctcaaaatatttgcagatctgagattgcatgtacaactaagatgttgcaaacataatgtagttgctctgtgaaataatgttcaaaggaattccactaaatgaatctggtgcaggagaagcctgctgtgcatgagtcccctactgtagtccagggc

SEQ ID NO: 44244 - DNA, 648 bp, Mus musculus
  source 1..648: mol_type = other DNA
aatacaatgtattgagtcatagtattaccattatattttgattttattattctccattaataatgactgaatttaataaccaatatgaaaagttattgaatatttgtcaaaaaccccaattgttacttagtacagataatgtatttgataatgatttttctgttattacagactctcttaagattttatgagatgcatagattaaggtaattttaaactttatgtttaaagtagtaaatctttgactgcgatttttcacaaacaacccaccgcggtcagagcctgctctgggctgggttctgccatgtcagactacaggaagtggtcagtgtgcattttggtttatgtaagtcgcatctaaaaaatatccagcagtggtattgatgaaatagttttactgtttttgaatactgaaataacatttttaaatacttgtaaagttgccaagttcttccaggaatttttttttaaaaattgtaaaatatgagatcataacatagtatatgaatggcaggaaattgatttcttagaaattagctcagactttagaatactaagaagtagggaaataatcaaatttaatcaataataataataataataataataataataatatatacccccacagtctgtattttacaatga

SEQ ID NO: 44245 - DNA, 254 bp, Mus musculus
  source 1..254: mol_type = other DNA
ataggaatagaaaaattttttttggctaccaacactaaagtgattttaaaaaaattataactggttctgatgagatcaggcatgttctgaaagggggtggtcaaggggcaaccctgcctggggacccacaccccccactttgctaaagccaccagggttgtggatttcccaacactgactctcgctttcttcactgttgctttgggccattgtaccttaggcagaggccagagttcctcggggttaagacctca

SEQ ID NO: 44246 - DNA, 549 bp, Mus musculus
  source 1..549: mol_type = other DNA
atagctagctagacagaataaattgcttgagtcaagttctcacagtgaaagcagtgtaagtcacgctgacttaatggtcttataagtgagataaatgccttaggtttatttgatcaatatatttgaattatgccttttagttgttttcattcaaagaaagcctcaaagataaactatagggcaatttgtttccttgcggatttaaatgacggcagtactgtaaattactgcacaaattttcagtcgtatgtggataaacatgcctgaaatcattattcgattgattacacaactggacaagtaattattattcctccttttacgtaaaataccatagcatcgtcgataacattttatgaaccagttgtcgccactggctcgccaggccagcgaactgcgccagagcccgagcccaagcccagcctccgcgcggagccagtgcgcaggcgcagcaccgggcggaagtgggggggcgggcccagactgtcagggtgaggcgccgagacggttttcgcggcgagccgggctcgggtgcagctcagaatcccg

SEQ ID NO: 44247 - DNA, 545 bp, Mus musculus
  source 1..545: mol_type = other DNA
tttctttctgataaattgcaaaaaaagtaaagaaagaatacagtgatttccttatgtttgaattcacaactaatctttttaggaatagctagctaggacagaataaattgcttgagtcaagttctcacagtgaaagcagtgtaagtcacgctgacttaatggtcttataagtgagataaatgccttaggtttatttgatcaatatatttgaattatgccttttagttgttttcattcaaagaaagcctcaaagataaactatagggcaatttgtttccttgcggatttaaatgacggcagtactgtaaattactgcacaaattttcagtcgtatgtggataaacatgcctgaaatcattattcgattgattacacaactggacaagtaattattattcctccttttacgtaaaataccatagcatcgtcgataacattttatgaaccagttgtcgccactggctcgccaggccagcgaactgcgccagagcccgagcccaagcccagcctccgcgcggagccagtgcgcaggcgcagcaccgggc

SEQ ID NO: 44248 - DNA, 403 bp, Mus musculus
  source 1..403: mol_type = other DNA
ttctacataatcaaactgtataggtcccagattttggtgttcttcagttaaacatgtgctcttgcttaagaattttccattcttcaaaggattgtcaagctttcctgtggctttctaaagttggaaaagtacaaatataatcttgtctatgcgcctatgggcatttcatttccatatatttcttacttaatgaagaacattctagaaggttagttggaaacaccatgggttttggaagcagacttcttaatttgcataatgtaacgtcatgccagcagaaaagcctttcttaagttatttttttacttttataaaatacaaagcacttaaattcatagttacttaaaaaataacgacggctgttttgttgcaagaaaaaaaaataataaccctgatgtattgt

SEQ ID NO: 44249 - DNA, 259 bp, Mus musculus
  source 1..259: mol_type = other DNA
tcaggcagccactttacggttcataatagcagtaatgttacagttatgaagtagtaacaaaaacaactttttggttggggtggggtccgcaccaaaacatgagaaaaggaattagattttgaacttaatagtttaccgatctgtttccaaacaacagatcctttacatgcagactctggagcgataaagggccttgtagtaactacagttcctataaaaaaaagcaagaatctgggtcgcgcagtacggcactgaggtt

SEQ ID NO: 44250 - DNA, 457 bp, Mus musculus
  source 1..457: mol_type = other DNA
attgcgcatgcgttgtttccttggttaaaaatgtaagctctctgaggacagagacattgtatctaatgcgacacagagaaattcacgccctcgttgaatgaacgaatgtaaaattagtctgatgagatgaaagtttattttaagtgacaccaaactacaaaatttcagaaataccaggttgctttcttggaaagtgtatttcatgaaataaaatggctggggaaccaggagtgatgactgatgacggagagaaagtcttgggaagcctttccggtttaagctgagacctcagacctggccgacccctggtgtgtggggtcagatcgcaaagatcagctccttcccaccgcaggattcccgggatgctgagccggttcgtgcggacgcggaaacaggcccaggctcgcccgccgccgactccgcccaccgcggtcacgtgacgaggggtgtgagaggg

SEQ ID NO: 44251 - DNA, 319 bp, Mus musculus
  source 1..319: mol_type = other DNA
cagattgaatcaggacttacttccacaatgtgtgttagaacagtaattatacaaaattatgtttaagctactttctaagtaatttcgcttaatgcttcataagttacaacccattactggctctgcggagcagggctgctgcgcatgcgtaccccggggcagcggggtggggacgtaaaggcgctcgcccgcgctgttcccagccttggttcgcttgcccgggcagcgtaggggcccagggggcggagcgcgccgtgcgggggcggagctcgggggggcggggaggggcggggctccgcggtgctggccgctcattggc

SEQ ID NO: 44252 - DNA, 543 bp, Mus musculus
  source 1..543: mol_type = other DNA
tcccccggatccaccgccccgggccgggggaggaggccgccgccgcgggtacggtaacagcccgccgccgctgctgctgctgctgctgctccggctccggctgttgtccttcttccttcggcgagaggccgctagaggccggggtcgaaggatcggcggcggccgccatccggagtgcagcgctggccacacgacctgaagccctccggccggggaccgcccgaccgccgcctgccttccggacccggcgggcgcggcctttcccgtgctcggacgcccggcaggttctgctgactcgcgagaaagcctctgtagaaggaggccgggtcccgagcgtcatttcctgcggcacgccggaaggcgaccctccgagtcttgcgagacaggaagcgcccacccccatgtccgccgcggtgctggctgggccctagcatcccgtccgaggtggcaggcggggaagagggggcccccgtctgagacgctggacccccggagctccggctctgcaggcctaagcccgccggagagtgggccctccctccc

SEQ ID NO: 44253 - DNA, 472 bp, Mus musculus
  source 1..472: mol_type = other DNA
ttttcaaatttggtaaactttcctcggaaaaggagcaaatgtttccagagtgcggcaaaggacaagagcgaggctccccttgctcttcgcagctgggcaagtgaccaaagtcagaggaccttgttcttctgacacgaccgagactcaagactgcctcgccgcggcgcaattggtggccttcggaggcaggcgaccccgcgccgccagctcggtgcagagcgcggggagggcagagggggggagggagggcccactctccggcgggcttaggcctgcagagccggagctccgggggtccagcgtctcagacgggggccccctcttccccgcctgccacctcggacgggatgctagggcccagccagcaccgcggcggacatgggggtgggcgcttcctgtctcgcaagactcggagggtcgccttccggcgtgccgcaggaaatgacgctcgggacccggcctccttctacag

SEQ ID NO: 44254 - DNA, 568 bp, Mus musculus
  source 1..568: mol_type = other DNA
cagctgtggctaaccctttaaaagttttccctttacagtccttttaaaacccaatgtaagtgattatactagattgtcatttcaaggttaggtgaatctcagactctgctattacacttaaagaggctcattattcaggtttctaagaacctttagtatcagagcatttttgagaatggctctttttctgagaaatggttgtagtcagcattttattttattattatgaattaaaccagttaacagattttgttgaaatttcagatgctttgtaatctcatttggcctttttatttctaataagcttcaattagatgatttgttaattcatattggtataaaagtaaaatttgagcaggtatgatttttgaaaaatttattcttttgtagaaatatttcaatcaggttgaaactcatgattattaatgtctgcatgagtacctgggcataatttcatacacttaaatattccagtgcttatgcaaagggaatttcgatgagcataacaaccaagctgtactgaattatgatgtaatgtgtactgaattatgatgtaataaagaatcag

SEQ ID NO: 44255 - DNA, 462 bp, Mus musculus
  source 1..462: mol_type = other DNA
attcatacagtacactgttctgttcctaccatctggcacctgatgggaaagaatagattatcacttctgtctcttcacagccttgtggtgaccttttccgtaactggttgccatcatctgcagacctagggatgctggcaagaaggtatatacagtcttatttgcatcttcaagcattgctagtactaagtaaaacaatgttaaaggggttaaaatatttgctggctacagatttctctttaaaaaggaggaagcttcctttggaattattctgaagtaatgctttctgtatatatatatattttatttatttctgtacgtatttatttatttttagagaaacaaaatttagcattacaacctagtgaattccaaccttttaaaaagatctacttgttttgtctttggtatctaaggaagaagcagaatagaatcccatattcttcttatctaataactcct

SEQ ID NO: 44256 - DNA, 267 bp, Mus musculus
  source 1..267: mol_type = other DNA
agaaccaaatcttcaggttcttttccaaggtgtctgaaaggaggcctaggagactcacctgagtggggtggctctcgggtgcaggtgggggacccctgccgggcccgggacgctgggtgcaggtacccacccattggaagcgcccagccctcaggctgccagccgcccgcgcagccgggtccagggatggtgggagggccgggctcggggtgcctggaaagcagggctgcgctgacgtcactgggcgcgcaatttggctggagcgct

SEQ ID NO: 44257 - DNA, 345 bp, Mus musculus
  source 1..345: mol_type = other DNA
caaagcagctgaatgggcagctttcttttctcagaagagataaaaacaaacccagctatcaggcctggttactgagtcataagtaaacgtttttttttttttttttttcttttcacacaaagataaaaataaacccccacttcccctttaatgattggaagtggcaggcatttaagggagctccttgggatttctttgaaagaaacaaccaaacaagacacttggctaattaatgtttgtttccttgttcatgaggagaagaagttatggtaacttattgctgaaaggaactttagccagccagccagccagccagcctatatctgtttactctagagggaggaa

SEQ ID NO: 44258 - DNA, 354 bp, Mus musculus
  source 1..354: mol_type = other DNA
actaaaagtgcatatatttgcacactgtgcgagccagctcccaatacattattttttaaattaatgataaaatcttaggtaattatttccataaaacaccaaaattacacgggtgtacttactccagtcaaagacttgaggcttgaatttagtgcctgcaagcatttagttgccacagtgagctgagtccacgcaggaaggaaccagatgagtggccccctccacttccctccaggaggaactctaggacctcagatttaggaggtccctaaagctagctcgcagtctcagcgacccggagaggtggaatttcgatttgaaactccctagccagggccggagctgggcatgctc

SEQ ID NO: 44259 - DNA, 444 bp, Mus musculus
  source 1..444: mol_type = other DNA
ttaattgtatttaatgaagtttttagggaattgttttcctaacagacccttgaagtatgcaattgttttaaagaaaagacccaaggcccaggtcgtttcctctcaaagcagctgaatgggcagctttcttttctcagaagagataaaaacaaacccagctatcaggcctggttactgagtcataagtaaacgtttttttttttttttttttcttttcacacaaagataaaaataaacccccacttcccctttaatgattggaagtggcaggcatttaagggagctccttgggatttctttgaaagaaacaaccaaacaagacacttggctaattaatgtttgtttccttgttcatgaggagaagaagttatggtaacttattgctgaaaggaactttagccagccagccagccagccagcctatatctgtttactctagaggga

SEQ ID NO: 44260 - DNA, 337 bp, Mus musculus
  source 1..337: mol_type = other DNA
tcttgaaatgaatgaatgaatgaataaataaataatacagcgtttgctgtataaagtgacaaataaatgcctttaatcagaggcaggcggatctctgagttcgaggccagcctggtctacaagtaactaactaactaactaactagtggaaacacagcagcctttaggtgcttcagccgcgcagaagcgcgtctgctgcctcgaggctcaccgctggccgttaagcggctgccagacgcctgtggtggcctcgggaggactgacgaggcctgaggtggcgtcctgaggcccaggactgccgcgaggcctgaggtggtgtcccgcgaggcccgcgggc

SEQ ID NO: 44261 - DNA, 665 bp, Mus musculus
  source 1..665: mol_type = other DNA
cttaaaatctcctctaagttttaaagaaaaatttagccaagaaaatcttagtacttaatgtctactcactgaaatcatttcattaggatactttttcaggtagggaattattggcccaaagatcctgaacatttttaagactattgggagtgctctggtgctctttaaaaaattaatttaccttgctgccagtaatgtataaataattaagctttattgaagtcttacttgagttatgtttcaacgaatcttactcttaaaaaatgaggttaacacttatagacaaggaaaatgttttcctttactttgctccttgttttcaaactaaatatgtctctaatagtaataattgtaataatcatttattttagatcacatgttattttagatcaaacacaaatggtaccaactcaagtttcctcttcaaaatatatatgaatattaattaaactaaattaattaatattaatctgttttctaagtcttggagtgagttaaaattagatatctgtaaaaaattattcacgaagatggtggaactttttaaaaaaattatttttttctaaaaaaatttatgaaacatattttcttttaaaatcaagaaaagaaaaaaagaaaaaaatagcacctggggcgtcccctgggatagcacaggctgcggctgt

SEQ ID NO: 44262 - DNA, 481 bp, Mus musculus
  source 1..481: mol_type = other DNA
ttcaaagtatgtacataaattatttcctttatctgtgcatttgtctagaaaaggcaagaggtacagtttccttactcatctttgactgcagagattaaaatttccagaaagtagttttcaaggttaacatttttatctaattggaaaatgacaggtacactttttaaccatagaaataatggtctcaactggaatctaggtttaatttgaggcttgcttagtctttggggctaattaatcgtcaaggataggaaacagtttgcttgatacaaactttgttttccctactcagaaaccacctaggtttttcaaggtgacatttctttacctataaatctaaaatatcatcaacttatactaagggaagagaattaattaccttgagtcccaggccagcctcatcttatttatatataagcagtaaaaattaaaacagtcctactcatgttcttaccatttattactaaataattataatatc

SEQ ID NO: 44263 - DNA, 441 bp, Mus musculus
  source 1..441: mol_type = other DNA
ctgcagagattaaaatttccagaaagtagttttcaaggttaacatttttatctaattggaaaatgacaggtacactttttaaccatagaaataatggtctcaactggaatctaggtttaatttgaggcttgcttagtctttggggctaattaatcgtcaaggataggaaacagtttgcttgatacaaactttgttttccctactcagaaaccacctaggtttttcaaggtgacatttctttacctataaatctaaaatatcatcaacttatactaagggaagagaattaattaccttgagtcccaggccagcctcatcttatttatatataagcagtaaaaattaaaacagtcctactcatgttcttaccatttattactaaataattataatatcgaggcttgtttactaaaccatcgcgagcttttcgttcgcactttc

SEQ ID NO: 44264 - DNA, 174 bp, Mus musculus
  source 1..174: mol_type = other DNA
tctagacacaacagctgctttcatgccagccctctaagcggcccaggaagggattcttggcggaggggtggcagcttggctggcctcaggcccccttggcagcctcaggcgttggctccgttcctttgccgggagacaaggaaattgccttggaagtccagcgtgggaagggcc

SEQ ID NO: 44265 - DNA, 384 bp, Mus musculus
  source 1..384: mol_type = other DNA
tccttcaggtcgtgtcagtggctcagtgcccttgtttaagttcctagaacttcaaatgaatgaggacaggccttctttggaatcaggtctttctctcacgaagtcatctggccagaaacaatggctacccaaaggcaggcagtgactgagctatcactatagaattccttcttcaagtaggagtcaagaataccctggtgatctaagcataaaaaggaaatagagagcacagagcactgtcttttaatatttgtgaggagcataaatcataatggtttgtatactacactatacaaatgatagactgttactttccaaagaaaaccgacttctttgagggtttcccaaacagttagtctccatagagccctttagccgttaata

SEQ ID NO: 44266 - DNA, 340 bp, Mus musculus
  source 1..340: mol_type = other DNA
agaggctagaaagtcctatttttttttttttttcctcccctgtaacaacaaaagaagttgttctatctgtagacctcaagttaaaaacttcagtttagaactaaaattcaaaagtcacttaaggtcctggctatccgctacattggaaggaaaagttaactttctttgctcgcgctggacctgaaagatctgtttgcagacacaccccgaggtctggagccctgggctccagggatgcgtgcatgcacctcatgcctccctcgcatcaactccgagcgaggacagtgcaccgggacgttggccccgaacctgcactgttaggcgggagctcccgcgcgct

SEQ ID NO: 44267 - DNA, 681 bp, Mus musculus
  source 1..681: mol_type = other DNA
cctgcacggtcccggtggcggcgtgggatccgcggggacctccggctcccggccgctcgcctgtgggcatccccccgcgtccgcgccggtgccctctgtcgctcgccgccaccggagctccctttgccggtgcgcctgctgccccgcacttaaaaaaattttttttttctggcgaggattccgagagcagctcgcggcggcccgggtgctcgcccacgggagctgcggggcgcggcgcggggcggggcggggcggcggcgcccagggcggggaggagcagcctcgctcaacgcggagccagggctcagcagcccagtcgctcccagcgtcggggcgccgggcgctcggccgcggcgatggcaggcgggcggcgcgcgcggggaggcgggcgcggggcgcggagcgcgcgggggcgggggcgggctcggggagccccggggtgccggacgctgtgaggcggcggtggcacccgggagcccggcctcgggcagcgccgtcgccgccgccgggggcgtcgccggcctcggcccctttgcgccccctcgccgcccactcccctgctgtcgcgcggcggcggcggcggctcctcccgcccgaggcggttgagctcggcgccgggggcgggagggggcggggagcgcgccacacggaagccgaagacaagagcatccggctcggctt

SEQ ID NO: 44268 - DNA, 385 bp, Mus musculus
  source 1..385: mol_type = other DNA
cagttttctcaactgtgacaaaatactctggagagtttgaagacatacccttttaacacaagttctgtggggacatttcacactcaaactgtgatatcggtagtcattcaactacctacactaaatgactatattcccttcaggttgttcatactcatttctttctgcaaagaaacatggcataaataaacagaaaaaatattcattaagcagatattttagacaggcatttttttcctggtatagcaattataaaaataaatgctatactgtgggaaaagcggtaaatcttttaataattgtcatgatattgtatagttataaagaaagatatgaaagaaagaatattcacagtgggtatatgaggtctttcagatctcagatg

SEQ ID NO: 44269 - DNA, 672 bp, Mus musculus
  source 1..672: mol_type = other DNA
gcaataaaaagtaatttcactttcagggacagtccggctttggagagcaaaacactttagttcccaaccacaggcgcgccgggcgggaacttacttcctctcaccaggtttagaccggggggggggggctccgggtgtctgggggagcgcacccaggtagcgcaggcagcggggcggtgggaggaccgaagcaccgcaggcaccgcaccgcaccgcgccgcgcagcaggctggggacagcccggggacagcccgcaggaggtgctcgggggcggggtgtccgctgcgcgtcccccggtgggcggacccacgccaccctcggcttctccccgcccccgaggccgcgctcgcccgctcgctcggaccccaggccgcagctccaggcgtggccgcagcagctcccggcgtggcggcggtctggcttcgggagcccggagaggccgcccaggccccactctcctcggtcaccgccaagacagcgccgcaccttccgcgggaggcggcggaagcccgggaaggctccaggcgagcgttgtgcttctcacggtcgactggcgtacgggcggcgttccgtccattcggcgagcctcgctcgctcgccggcttctgctgctgcagccgccgtcgccgccgccttcgagcggagtcggagcgacgggggtcacggcggggg

SEQ ID NO: 44270 - DNA, 237 bp, Mus musculus
  source 1..237: mol_type = other DNA
atctctgtctttcatagatccagaaagccatctgtttattaaattctaatggaaccatggaatccagggacttctctaccacagactaggtcacctaggctgctgatggagagctggctcagcggttaagcattcagttaaagcactcattagaatacatagaattatactctatttgagtggagctgctcagacaatctggtcacagtgtgtgctgcagacatcctgtgtacacag

SEQ ID NO: 44271 - DNA, 547 bp, Mus musculus
  source 1..547: mol_type = other DNA
tttagatagcttgaagctcttgtgcttaaggacctgaataaagggctgctagttggtcagccagcctagcctgcctcttgagttcctaaacagggaagtattctctttcttgctcaaagatgatatagtctggattttgagccagaagttagttatatattatttaattttttagattttttttaaagtttattttttatttatatgagtacactgtagctgtcttcagaacacaacagatggttgtgagccaccatgtggttgctggtgagctcaggacctcactcttaacagctgtaaaacatgcagactcttcatatgtgcaagataaatatgcttctgaaagttctattacattagaatattggtttaaaaatagtgattgtatattcagaggtgttttatcacaaagtctaatgaaacattgtaatgtttatgctaatactaaatgacagttgaagacagctgttagcactgtgggctttttagctgtgtttcagttaagtaaataccacatttccgttagtgccttaggaaaataaaggtg

SEQ ID NO: 44272 - DNA, 528 bp, Mus musculus
  source 1..528: mol_type = other DNA
gacatgtcaagatgtcagcgacttattgtaataaacaaaggagagctaagcagcgatttatttggttctgtctcaagattgtgaggcaaaactagttttaaacgtttcaaactaaggatgtacttacagagggactttcatacttagtctacacatttaacgtttataggcctttattctcagcactcaggagtcagaggcaggaggatctctctgagttcaaggccagtctggtctacagagtccagggctacacagagaaatcctgtctcgtgtgtgtgtgtgtgtgagtgtgtactgaggaaaatataattttgcactttacatttgaaactattgaacaaattttactttttattctaacaaagcctttaaaataacccagtctttttggccaccaccaaaaccgattatattgatgctccccatttttgagattaaagaaaaacaactgtttttttttttttttttttttttgagataaggctcttcatttattgcccatttatgtaattacatgtatcacca

SEQ ID NO: 44273 - DNA, 440 bp, Mus musculus
  source 1..440: mol_type = other DNA
tgtttctgtatgactcactgtgtcacagaatgtggtgaggtacactaattacatatattaaaccacttaaattcttatttccaattatcagtgagaagattggcgatattgcggtggctgatcacagggaccatgtactcaacagaatggcagcccctgcctctgagtatcacaaacattggcggaaataccgttccaacttggaagcccgaatgtgggatgatctgggtttaccagctgtggttcccagggaaaccgctgtagagggaccctggactccgcgcgtggcctgcaccgagcccctcctgtcgccagggggcgccgcagcgcgcgagtccccctcgccactccctcccggtcccgcctctagtcccgccctctctcccggggcgggggcgggggagggggaggggcggccgcttctccgcccggcgctcggc

SEQ ID NO: 44274 - DNA, 364 bp, Mus musculus
  source 1..364: mol_type = other DNA
gcctacacccaaaggttttggcttctaaggttatacccacgcacacatgaatctattcaccggagtgtgtgtatgtgggagacagttaaggtggttaccttaccttcaacctcctgaagtgattggttcattcactcatcctgcaatttacatagtatatgtattgcacactccctatcgtgatgaagcaatcgctgccggagctgatagattctagaggagcagttgctgcccaccaaatttaaggcttaggggtgttaattaatttacctaaaaactcagtttggagccaggacttagcccaatcctacctttttccactcattttataaacaagggacaatgtccctcaagtaggggaaca

SEQ ID NO: 44275 - DNA, 383 bp, Mus musculus
  source 1..383: mol_type = other DNA
ccgagaaaactaatttttttaaaggttttatttatttattatttatatgagtatactgtcagacacaatcagagcagtcagtgctcttaaccgctgagatagctccgctcccgagaaaactatttttgataaactggaatatttaggacttgcctggtgagttccgagctttgaaagattaaatgaagactcctttataaaaaaatcatttagtaatctattgataaataactttcccaaaggaaaaaatctgaccttaaaacaaattttgaaagattatattttaaaaatatatgtcagcactacgcttccggcccagcccgccacgcaggaggcggaaacccgtgcgtccggctccgccccccgcggcggagcgtgtcgtc

SEQ ID NO: 44276 - DNA, 393 bp, Mus musculus
  source 1..393: mol_type = other DNA
gagtttctcaactggacgcgattatggacgagaagtacagagctttaatggccatttaaatgggtctggaaagtgttcccatctggaaagtgccccccccccgggtgcattacattctaatgaattaattaataattacattctaattaatctatgcttttgaagaaatggagacggaccccagggcttcacccttttacagtgtggcaagacgctagccagaagccattgcttctgattacatattggttaatgactatgcattcaaatatttacagttttacctacatagtacaaatataggtgtttttcgtcccagaccctgcctgtccggcctgtcaccagacacagctgcactttattctgtcaaagtgactggcttttgtcaccgaa

SEQ ID NO: 44277 - DNA, 466 bp, Mus musculus
  source 1..466: mol_type = other DNA
agcaaattttggtaagtttcaaaagtgcccaggtgacgtactcagtcctgggtactttgaaatgcttactattgcgttatgcattatattatttttaacgtctacaatccagagagtgcaaaggatgacccatatagggaaataatttggcttgaataatttgaaaagtcttgtttggggcaaatgagagttctccgatttccttctctgtaagacacagagaatttattaaatgaccgccggccggtcggcaagccggtgaatgctccgggctcggcgaaattagattctccgggcccctgtagaattgccagcggtagctcggggcccgcgggaccacaggggttagcaaggagcccgggggcggggctcgggggcgggtccgctggcgcccggagcagaggccacgcccctcccgggagggctggcagctccagcctgggagcagttccggtgcctcccccgc

SEQ ID NO: 44278 - DNA, 397 bp, Mus musculus
  source 1..397: mol_type = other DNA
ttagcactattcgggacagttgtaccactccttccaagattggggtgcagctgcggttatccctgcgattgcatgttaacatggcgggaggggtccaggggcctcacccttcccaaaaattcatgactgtttgggaaagagatgccattttctttagtaaggtaccactgataaattactcttgcttcggtaccctcttagtggtttaggaggtttttactgtagagtgccatcatgttggccttcaaggcttccaatcagaagctttgattccagagtctatcatcttgaagtgtgtggggttatctcaaccctaaagctacaaacgcaacagcacttaccggggaaggctgcagcctcgcgcgtgcgcactgtctgcctgagcccgttgcgcatg

SEQ ID NO: 44279 - DNA, 302 bp, Mus musculus
  source 1..302: mol_type = other DNA
actggtgtacactactattactcttggtgtgaaccagaaagcattctccatttcttaaaccaaatgatgactgggatactgacacatgtctttaatacctacatagcagtttccaaaagtgctgatttaaaacaattcacaatttataacatgatcaagaaattctagttatttaattttaaaaagcagtgaaacagaaccactttccttctctttgatcttcttgccctggaagcagggctagctcccggtgaacaatatcattgtctgtggatcaataagaacttcctgcttcgcatgaa

SEQ ID NO: 44280 - DNA, 323 bp, Mus musculus
  source 1..323: mol_type = other DNA
tgctccggagtacgacgcagcgaagagaacatacacacaaagtgagttttgtttttgtttttggtcctggctgtcctggaactcactctgtagaccaggctggcctaaaatgaggtttttaaaagattaatttatttattttatttatgtgagtacactgagcaatcagtgctcttagatttttaaaaatcagtgcaaaatgtttctgcttttaactgtaaatcccttaacgtcaaattaaatcgaaggaaaatctttaagcaatttgaaataaattctgtgcattttaaagtccatagatctgtaggaacttcctgctttac

SEQ ID NO: 44281 - DNA, 329 bp, Mus musculus
  source 1..329: mol_type = other DNA
catacatgcaggcaagaatgtctattgaaaactaaaaaccacacattccatttgttgtcatttatttccttttctttttttttattttagacatagaaaaaacatacagtccagttttctgtaagtaacacacagggaaatgctttttaaataattaagagcactggtttaaaacgaaatcaagtggcaaatcttttcccttttcttgatcgtgcctttgctgggcaagaagggagagactctggagtgtctcaaatgtttaagcattttaaaataaatactgtatgcttattcttgggctgccagaatttctctcatcacataaatga

SEQ ID NO: 44282 - DNA, 393 bp, Mus musculus
  source 1..393: mol_type = other DNA
atcaagcacacaggagagatctctgaatcatatatcggcgtcaaaagttacgagccatgtaaccccagttaaataacttactgaatccaggcaaatatgctatatgcaaataactcaaaaaattcagttaaatgaaaacgcaaatatataaatatctatctctctctatatagatgtatatatatctatatctctcactagatagatctctcatctatagatatgtagatagataaatagtaagacagtctctatggcatgcggtatggcggggtcacgcccctgccccagccgcggctagcgcctcggaaccgccgcggaccttcggcggggtcccccgtcaccagcagcgggccgctgcgccctggtctccgcccctcggaagtgacgtag

SEQ ID NO: 44283 - DNA, 475 bp, Mus musculus
  source 1..475: mol_type = other DNA
acctttagatggcttctgagactgcaattccgggagccagattcgcagcccaagaatcttaatttgggatggtccctgccgtcactatttaaaaagaatctgttcaagatgtgttataacaaatcggtaacagtgtatgtaaattggaccacggagcagcgacgacagcagctctgcttttgtcctgcgagttggtcacaaacacatggtcctgtaccagcacagggctgaaagcctggcccagcttggactccaggtggcccgcccaccgcccaccgtgggcaccatctgcgcagcgttcccgggaccgcggtggcggagggcaggccccacgtccaacacgggctccctcaataccctgcagggcacgttgtcctgggagctagggcggagatcccgccccacggggcgggagcggcgcggagcgggcgtgttggtgggcgtgtcgcccggggcccgcccctctgtccctccc

SEQ ID NO: 44284 - DNA, 429 bp, Mus musculus
  source 1..429: mol_type = other DNA
tccgggcctcagaagctgccccgcctgaggcaaggacaatgggtcagcagtagaggtcacctatcaattcgacaccagaatgctgacttctgcagatttcatactatgagcccaaggtgtcatggaccctaacagtctttgaattttttttaattttaactttaattatgtgtgcacacagatttttaaagtcttaaaaaaaaatcactcatttgtatacaacgtggcgggatggatttaaaaatactacccagctgttaccacctcctgcgcgctccggcaccgggcggccgctaagccccgccccccgcctcctattggtccaggaggcggcgtcgggcgtgcgcgcgcgcacgccccgatgcccggatggcccgtggcttccggcgttctctccgcggacggtagggggcgcactctgctttgtta

SEQ ID NO: 44285 - DNA, 542 bp, Mus musculus
  source 1..542: mol_type = other DNA
aacattgtaaaagtggggggtccacgttttcaatcagtacgtttgcagatgagaaataccactctcatattgtaacagtgtgaataaaagtcgaaaaacaaaaccaaaaatatataatttttcacttcctcttataatatcttagaagtgcaataaatgtacttgcttcttaggttttactaaaaaaaaaaaaaaacttcgtgggtaaaaaattctgtggtttaaagtttttcgaggcaaatacgccaaaatatgtttaaatctatagacgacagttggtttctctgtatagccctggctgtcctggaactcactctgtagaccaggctggcctcgaactcagaaatccgcctgcctctggtttagacttttaaagatattttaaaatatgctttcagcggggaatctgcgcctcccagtaatccctgggagccaagggcttccctccagccgagttaagcaacccagcggagcgccgagcgcgcctgcgcggcggaatcacgtggctgcgcgggggcggggctgggaggagccgtggcgga

SEQ ID NO: 44286 - DNA, 299 bp, Mus musculus
  source 1..299: mol_type = other DNA
agttcctgaggaatgctggcgttccagaaatggttcagccagagctcatttctagatatttggagggcctgagacctaacatttttgaggtactggaacaggtaagtattcccacgcccaaaacttttaaaatttatgataataacagcaacaataataattgctattattactatcgtcaggcttttttattggatttcttaaaaaacggctttcctgcctggccggcaccacccagccacgcagtcactccccgccagcctgcggctggagacgaaagtcgcgcatgcagccaggcc

SEQ ID NO: 44287 - DNA, 506 bp, Mus musculus
  source 1..506: mol_type = other DNA
aaagctctgatagcatgattctcatattaaaggtgatggtgagaaaatattctaattacctagatcgatgtaagttcttgtgacatctataccaattattttaattctataaactatcctccattcgcgaactgcgtctggcagggtaatttggacagctggccctgcttaactgggagtgggaactgctgggaccacgcgaacaccgacggtctgggggcgttggcgactgtgcactcggaggccccgcgaaggcgtcagaggtttccaagcccctgagctccccgttacccgctggtcgaaacggtcggacagcccagccagcggggggcgaggccgaccgagggccacggccggagccggcgaccgagagccggggcgaggcccactgcgaggcgagcacgacgagaccccgcccccctccgccagggcccgcctcggccccgccccttcccgggctgcgctcctgcgcgccccgcccgcgggcggaagcgagagcgaggctg

SEQ ID NO: 44288 - DNA, 403 bp, Mus musculus
  source 1..403: mol_type = other DNA
aggacatagtatattatgatcgactaaataatgtatttagcatgtctgggtaattttttttctggtaacctataaaagtcaaatggaattttatttttatttattctttcaagagtttttctgtgtagcccgatactggaactcactctgtagaccaggcagagatctccctggctctgcctgcccaatgttgggactggtggtgcatgctatttttaaaaaggatgccgagcccggccacactacacagacaggctgcggtgcgcgcactgcggggactctgcctgcagcctcctgaacaaagctcccgcgggctccgcccaccgcagctccggtatttggccagctcttcgcccgccattagggagcggggccgtgccggggcgggagggcggcgcggagt

SEQ ID NO: 44289 - DNA, 379 bp, Mus musculus
  source 1..379: mol_type = other DNA
cctgcaggctaaagatcagtgctacctgatgaagcaggtgctcaacttcaccctggaagacgttctgctcccccagtagcagcaggaggtggtgaggtccttccctctctctcttcacaagagtgaggagggcctcagcaaggctttggagtgaagctttatttgttttatccatggaaagaaatcaactcaaattccaagtacttgttgggagagaaatccactgagtacaagtacttaaatcagtgtgtgagtttgatgtcttcagacaccccaactatggcagactgtggtcttgctactggtggaaacttcagtaggattccccaaagacgaggatcttctgtaagggagggacctggatttcagtgtcctagag

SEQ ID NO: 44290 - DNA, 360 bp, Mus musculus
  source 1..360: mol_type = other DNA
ttagccacatgtatataggatagccactaggctttaaatatttagtggcagaggaattgaaactcttattcatcataaatcttgatacgaaatacaatatctaatgaagtattcttgcatttttacttttatttcccttttattaatggaggaactagataggtattttactaatcacctccattgacttttctggtcatttgcaagaaaagtttgaaaaggatggttcaaaggctccctgtgctgtgctctgtggatgagaaattcacattgtgggcacagcggggctgtctcatcgtccaggctatagctgccatcggctgacctgacacatcagctgatcctttggaccctctgact

SEQ ID NO: 44291 - DNA, 369 bp, Mus musculus
  source 1..369: mol_type = other DNA
aggattcgatttagagaccaagctagctactaggcccctaccaaaacactgaattttgcaaggcgcttgcccccaattgaattgtggcaaccagcatagaccttccttcttaatgtcgcagggaggagcaaggagcgtaactccggccttggacgctcactgcccgtcctttaataaggtctcgcgagaagagcccctcgaggcgttgccattccgcccgaaaggcggcccgtgcgaagacagacagccggccgggccaacgggagcgtccctgtaaaccgcgactgcgcagagtgcgccgggcagccccggtgacctccgaccccgcctccccgcagcgccctgcgtcggccgcccccgccctcctag

SEQ ID NO: 44292 - DNA, 468 bp, Mus musculus
  source 1..468: mol_type = other DNA
gtgcataatgtctaagacaactgactgtttgacagtcaccctacattcagaggagaaattcatatgatgaaaatgtctaaatttattttaaattaggcttttatctacaaaatcctattatagcaaagtgatttaaacacattcttatgtcttctctctaatgtgacttaacctgtatgtcaagaagatttcaattaaacgttttgatgagtctctaagagttcgaggccagcctggtctacagagttacaacataaaaagaattgttttaaacaaatgcatgtttgataaactctctaatgttcaggactgacagagacaaggaagagcaaaactcatgcgtttaaatacattcaggatgttgtcaaaagagtgacaacacagagttcttctcaaatcagtttattcaggaacctaatctcagttcattggccttcgtcaaatgccctgatcttaggtcatggtgcg

SEQ ID NO: 44293 - DNA, 286 bp, Mus musculus
  source 1..286: mol_type = other DNA
tagctcccacgagagatgtctcacttgtgatggagattccacagcagatgtcaggttctggtgactgtgccctgaccgggctttcctcctcctcctcctcctcctccgaggagcagaacccaggccatgttctgctgttgactacactgcttgaaaagtgccaaacagacctttccaggtagatcaaaggtctcagggcgcctttcctgtgacatgagacccatagctgagaagcctgaaacagcatacattgcacagtgcttagtgtgagatttacgaaacagcc

SEQ ID NO: 44294 - DNA, 361 bp, Mus musculus
  source 1..361: mol_type = other DNA
cctccatccaagcagccagggatcaagcatggcgtcttctgagctggactctacagagaatcagattgactctatgggtaatcatgactgattcttattgaccaatcagaatttgtaggggcctgagtttgaccccaacacacacacacacagtttctgaataacccttcaaaactatatttgttcaaggcaggttcttgatctaggatttagatgctcagtgaccagaactgttatttcaggaatcatagaagtaaatcaaaaatttcctggttccctgagacttctatatagctctattaaggaaactaaaagtattctagagaggtgaatttcagatgtattatgatgtcataaaatg

SEQ ID NO: 44295 - DNA, 389 bp, Mus musculus
  source 1..389: mol_type = other DNA
atacaaaaggagcttttagaagtgaaattcctctttgtccctctgtagatgagctgtatatagatgatctgtatactgaccgaggaatagttccatcagctgtatttagaaaaccattacggaattcgttatgtccattaataagtcacggaggtatttgagatgcctttacttgctatgttaacacaaggaaagtctctcttactccattggtgggagtctgacagattaagagctgagcagctctggaactctgcttatggctaaggctgaacgttagacacagggcatgagcttgaccttaacctgatacatatctacgtgctaagaagcaaatttcagaatgttgcattttatgacatcataatacatctgaaattcacctctct

SEQ ID NO: 44296 - DNA, 458 bp, Mus musculus
  source 1..458: mol_type = other DNA
gtatagcatttctgataattaaaaataaccaccaactagttgtacaaatgggaggattttactgttctttaaaaactatagggctgtgaagtcaggatgattttatagtttgaataaaagcttgtggcacaggcttatcaaatagctcatgtcatttgttggacagtgcacagaaaatataaacaaaatatccagtgtgtctgtccacgggctttctgatgagagttttatgtaagaaacacgttaacagtataaaatgtggtactgagagttatggctatagacatcattatacctgattataagcatgctaaaatccaattggtgggattttttttcatgtaactatgatatattatacaatcagagtcactcagtatgtcccaaaagagtttcacagagtctttcagaggctaagccttaacatgacatatacctgcatgtgtcattcaatgtaa

SEQ ID NO: 44297 - DNA, 476 bp, Mus musculus
  source 1..476: mol_type = other DNA
aaagggaggcccattggacaggcctgccccagttacctaattagttccgatgacatatgtaacaggatgtttataaacgaatctcaggaaataagatgctctatatctttacacatcagtagagcccaaatggtatgaacttttattcccacttaaaaatatatgaaaaaaattatagtattccaatttggtgggaaaaatgggaaaattaagctttgttgcttaatactgccattttagatgtagagatgtcaagtaactgaaaataaaaactttatttctaacagttacatttctatagtagccaggccactcatggatggtgagtcaccttgaaagccacaaagataataaaagtctctttgctgtattgttgacgaggtcatagtttacaaaacagaacaaaaacatcttacaggtatttctatattccatgactccaggctttgagaggagtcacagaggactatgtcaca

SEQ ID NO: 44298 - DNA, 280 bp, Mus musculus
  source 1..280: mol_type = other DNA
agggtttctctgtatagccctggctgtcctggaactcactttgtagaccaggctggcctcgaactcaggggccaccttttgctttactgaaaacaggaactagggcggttgcattaaatatatacaaagggacctagttatctacttggataaatgtagaggcctctgctgtgttctttttaagagagcgggcagaggatgccctgctttcccgggagagtggtacctcccagccggcggagcgcctcctggatgttcccggaagctgaccggcttaccc

SEQ ID NO: 44299 - DNA, 358 bp, Mus musculus
  source 1..358: mol_type = other DNA
tgtctggtctagaaagtcaaaaagattaagaagttttgctcaaacagttctaactttgccactgtgggtactcaggggattgaaacaggagtttgtttttcagtgttatttggcaaaaacgtgtttctcggtgagcacgcatttctttcctgtatcgtggccaggaggccgcccgtcccagagcagcagaggggtggcggctttcccgggtctcctgggtcatgtcccaagacgggcctggggtgcggcgcgcagggtcgcgggacagcggggcagcccaggtctcgcagggcgcatccctggggagcggctccctacgtcacgtggggcccgccctgcgacggcgtgttgcaagctc

SEQ ID NO: 44300 - DNA, 542 bp, Mus musculus
  source 1..542: mol_type = other DNA
tcttccacattgtaaatgaggaccttataactaggtcctcgtagcatcttaatttaacagtttaatggtgaacaaggaacttgagatccaagatcatgcaatacaacattgaacgcacctagtgtcctctactgcgaagttctcagtataaccttgttgaggttattaatttattcaatatctgtgtgcctagatctaggctagattattattattattattattattagtagtagtagtagtagtagtagtagcagtaattattattatacagggtcttactgtgtgtgtagacccaggcagtcctcaaactctctagatttgaatctttatagtaggaagttacaacttccttgatcttttcagaattaatgcaaaaaccaattcgaatggatgtgagaataacatttttttcctgtattttctgtgaatgcacaatatttttgaatttccgtcaatgtgaaactggtgagtttgaatattacggttgtaagtcttgtttaggagtttaaaacatttttgaaaatccgatgaatgctaag

SEQ ID NO: 44301 - DNA, 458 bp, Mus musculus
  source 1..458: mol_type = other DNA
agaaaggaaagaaaagaaagtaagtttgctttttgtttttgagatgcaatggcactaccactgtattccagaagttataatattaaaaaaatctgatgtagcatgccctgcatacggtatgaagcgagaatctcttcccagcacgggaccccactgtcagagagccctcgcgggggaggaccggcaggtctgagtcgcactcacccaggccccgccagccgagcgggccatcgcagctgtccaggatcccgcaaagctctcccagcagtgcgggcggcaggtcgaagagcagcaactgtggcgacagcgcgccacgggccccgcaccggccggccatcgcggagtcccgggaccccacgcagagaagcagggaggtcgccgctgtcaccgcctttcacaaccgcggcacgacggctgcccggagcttgcaacacgccgtcgcagggcgggccccacgt

SEQ ID NO: 44302 - DNA, 499 bp, Mus musculus
  source 1..499: mol_type = other DNA
tgaaaatattacatttttagttttagaatagacagttcttcaatattttgaatgctgtctttgggatgagtcaaagtaaactcatagaaataattacaagtgggccggtttgagttcaagaccagtctggtatgagtctcacggcagctagatgcatattgagacccttaaaacaataaagataaataaagttagtggtttgtctttcaagatgaaggattatttaactttaaaagttaaaatgaaggcctaaatgttgctttaaaataattttacttaaaagtgcattcctggaccaagtattgaagtgaagaagagattctctagaggcctagaggaacttttaaagaaaatcctagaaaatgggagagagcaatctgtctcctactagaaagcaacctcctctcctagtggagacttttccatgggagcgatcgactggttcggcgctcgctgcagagaggcagttcggctagttctgtctggcggccatcccgga

SEQ ID NO: 44303 - DNA, 421 bp, Mus musculus
  source 1..421: mol_type = other DNA
gccagtcccaaataaatgttttactttttaagagttgctttggttatggtgtcttcacagtaatggaagtaaacaggcacacatgtggtacacatacatgcttgaatgtaaacattaacgtttgttgcctaatcaatcaatgaatgaggtaccctaagacactcttcttatctttcacaagtgttaaagagacttgcgtatctagcttgtgcaataatagcttgttttaccctttaaattcacgtgacgtatttaagttgtacaatttgatacatcctgtgaggctgtcacagacagggcccccggccaggcttggcccatccaaggctttgagatcaggaaattccttaaactttctcctgtaggtgtaggggtcagccaaagcctcgggatcccggcatgctgtgcgctggcccctgaa

SEQ ID NO: 44304 - DNA, 402 bp, Mus musculus
  source 1..402: mol_type = other DNA
ctgtttttattatttttttttaaaaaatagtgtcctttatatagcaaaagagatttcggtttcgcccattaaaaaacaggatctagttattgcttcaaggctgacaagtgtcattccataaatggaggagtcaacggttctcgtttacttccctttttgaaaaacaaaacaaagcaaaaaacgagcataacctattctggtttgctagtgaaaagatacaccagcattttgtctcattcagaattgaaaagtaaaaaaagaattatacacaaagaaaggagagtagtgtctagttctcatcttgagtatccacaaactattagtaagttaaggaaaaagaaaacagtcattaaaagttgcattgttaaactgtgtcccccgtgtttattttcactaaacctg

SEQ ID NO: 44305 - DNA, 399 bp, Mus musculus
  source 1..399: mol_type = other DNA
gctggcgggagcacgtgagccggggctccgggtggcaaccgggcgccgccgccttcgaggcaggaacgctgcctctggcccgcggccaggcgcctgggctcggctgtccgcctggcctgccctgggcctccgcaagtgcgagcgcgcgtgtacacacacgcacacgcacgcacacaccttgggctccgggtgcagagcgcagaggccagcagcttgtccctctgcatctgtgcagtgccgccgcctgaccccgccacccgaggaggcgcggtgccacccactgctctgttccttgctagagctgagctgggcgccctaccggatcctggcagaaactcgcccccctccctctctctccctctggggtgggggagaggaggcggaattctttccccgccg

SEQ ID NO: 44306 - DNA, 418 bp, Mus musculus
  source 1..418: mol_type = other DNA
ccagcacgggggtgcagcgcctgctccaggagtcagtcctggcatgcctgcttgccagtgaagtgtgtgtgcgcgcacacatgaattttcgtgcaagcttgtctgcgatcacacgcgtgggcccgtgtatctttgtgcacgcttgtttgtgcgccggcccgtgcactctggggggggtcgcaaggggcgctccgactccggttgaccctgaatgcttccggaaacttcgggcaaccggacagccgctcaggggtggcctccagcggcgatccggcaggagagcctaggactgctggcgggagcacgtgagccggggctccgggtggcaaccgggcgccgccgccttcgaggcaggaacgctgcctctggcccgcggccaggcgcctgggctcggctgtccgcctggcctgccctgggc

SEQ ID NO: 44307 - DNA, 410 bp, Mus musculus
  source 1..410: mol_type = other DNA
acgttctgtgtagtcagaagtcctgtagacagaaggtctataaagcttcaggttctgttaaatgcaaaatgtgattatttttccaaagggaaaaacgagccccagttaactgggcacaattctgcacccatctgctgaaggctccagccagaaacatatctatacattgatagctgtacattagttgtaggtactacaaaaactcaaagaaaaaactttaaagaacagtttcctttgagctcataatgcagactatgtgatggtctaactctgatcaacaactttattggattaagggtaagacctttcctgagaggagaaagcctctgagctccgtcattccctgatgtgaatcagcagcctcatgcttctgctgccacgcatgcctgtgagccacgcccactgctatg

SEQ ID NO: 44308 - DNA, 547 bp, Mus musculus
  source 1..547: mol_type = other DNA
gcgtgcatgctgtcccggggacaaaatgcggagcggaccttctacttcctgtccggaaatcagatccgtcacctaagtgcttgagagctctgttgaaccatagattttatacttaaataaaacccacacctgaagatctcagaatttgaatttctgttctagaactagggaaagatgaaaattttgactattttccccaaggtaataaatatgagccaacgtaaaattaaagcataggctaatttttactgtgaacttccacgttcgagttcacactagtctatcatgttggaaaaatattttattgagattatgaaactaaatctagccgacttttagaataaaatgcaaatgtgtcttacaaacaccacactgtgttcttttattttattttattttatttacaactctagcaattcattaaagagaacaagggctcctgcttatagaggcagcctcagttcgaactctgcagagtcagggcctggcgtccccaaacctggggctgcactgctcaccttgagaactctgaatcaggaccagtttc

SEQ ID NO: 44309 - DNA, 441 bp, Mus musculus
  source 1..441: mol_type = other DNA
gattaattgtggagtttagtgccaaaaaaaaaaaaaaaatcaaagttcctctttggacagtgttgtgtgtgtgtgtgtgtgagagagagagagagagactctagctggagcgaaaacttttccggcctgctttgactccatatatggtgttcaagtaaaatttcagggactgcccttttcactcactcacacatagtgggggattcccctccaggtgcgacccctgggacgggtattcagtaggcacaagagcgacacaggccaggacttttggtccttagctctcaggcgccggctctgctacgggttgcccacgcgcggaagccctgttcccgcagggctggcccggggcggtggaggcggcgccggaggcgggagttggcggcggccgcgtcccgggcagcgggccccgtccgcggccagcgcgctccgccgtcctcc

SEQ ID NO: 44310 - DNA, 609 bp, Mus musculus
  source 1..609: mol_type = other DNA
aagtttggtgacctcaccaggcatttctagtgttgaaaataagagacgcaaaggtccttataaaaacatttcaaaataaataaaacatttattaagtattgtttggataggttcatttctccaaatggtgacatttgacatatgacacatgacgacgtatgaggtcatcatacttattgaaaactgtgcagtaagagaaagtcacttagattttttcttttcattttttttttttaaagaagccaaacggaaaggcaaaatgaggctcgctctcggggtctctataccgctccgagccagccaagggtcgccatgaaagagccgagctcccttccacgcccgcggcgcggcggcaggagcccggggggaggcggcggtggcgagcgggcgagccgacagcgctcgcaggcgcgcggcggtgacaggcaggacctccgcggccgccgggaccagcgagcgagggagcgagggagggagcgcggtcacgccgggccgcgccgctcaggtggcgccttcccgctcaggtgagctcctcccgcgcctcccattggcggaggcgcccgcggccggcgctggaagggcgacgcagcccgggggcggcgcgtcact

SEQ ID NO: 44311 - DNA, 332 bp, Mus musculus
  source 1..332: mol_type = other DNA
tacaaagcttttccggggtctgaaaactttctgtgtttttgaaaaaccatttgtttctgcatcaagcgcctaagatttcagagactggggaccagcgcctgcagtagcccgactagcctgtggagtctcagtattcctaggaggagagcgcaaactgtcagctagagaagtcagagtttgcagacaaacgaatatctttgaccatccacacgtgtctcttcgggcggcaggaggcctgagtgatgacccagaagtggcgcaggcgagcggggtctaccgggtaccgcggccccgcccccgcggctccgcagcgctccctagtggcgaccgcc

SEQ ID NO: 44312 - DNA, 378 bp, Mus musculus
  source 1..378: mol_type = other DNA
tggcgaaggctgcacaggtagccttaggttggcagcccggtcacgtcttgggctgcctgtctccctaggcttgctagcttgaggcagctccagcagcagcgccatgggaggtagcaccctttaatttcaaggttgtagagttcttaagaattcttttgaaaactgcttcttcaacaggaacattttcttaacaatttgggctgaaggttgaggtcaccgctggagtggacaggccttgcctccccaggctgggcacttggagctggctccggggctccggggctccggggctcagaccgccttggctgatgccgggattgggtgccgaggcgccgcctccgtctctgcgtgcccgcgcgctcgctcccgcgttctcag

SEQ ID NO: 44313 - DNA, 308 bp, Mus musculus
  source 1..308: mol_type = other DNA
tcaagcgcctaagatttcagagactggggaccagcgcctgcagtagcccgactagcctgtggagtctcagtattcctaggaggagagcgcaaactgtcagctagagaagtcagagtttgcagacaaacgaatatctttgaccatccacacgtgtctcttcgggcggcaggaggcctgagtgatgacccagaagtggcgcaggcgagcggggtctaccgggtaccgcggccccgcccccgcggctccgcagcgctccctagtggcgaccgccctggcgctgtgggacgtgctggcattgccagctttgc

SEQ ID NO: 44314 - DNA, 273 bp, Mus musculus
  source 1..273: mol_type = other DNA
ccatattttacgtgaaatataatggcgaaggctgcacaggtagccttaggttggcagcccggtcacgtcttgggctgcctgtctccctaggcttgctagcttgaggcagctccagcagcagcgccatgggaggtagcaccctttaatttcaaggttgtagagttcttaagaattcttttgaaaactgcttcttcaacaggaacattttcttaacaatttgggctgaaggttgaggtcaccgctggagtggacaggccttgcctccccaggctg

SEQ ID NO: 44315 - DNA, 512 bp, Mus musculus
  source 1..512: mol_type = other DNA
caacttaactttttagctaacttaaaatattttttgaggtttcattcaacaaagtttttaagatttatttatttatttatttatttatttattataagtacactgtagctgtcctcagacacagcagaagagggcatcggatagttagtactcgtaaccactgagcgcctgagggcctgagttagatcccctcacgtgccgcggaaggtgcgtgagcaaaaataaatgtaaattaaagtgtgattaaaacttgaaaaagacgttcagagctgtccattaaccccaggactggccgggactttaaccagcagctgatcttgtgttcacagcacgtgcgctgcttcactctggagggaagatgagcggactgccttcctcctgcagcatcaggagcaggcctaaccagtggcgaggccaggctccgcgcggtcctagctctgtccagccctgcccagcgcccgggctctccgccgctccccaggccccgcccacggccgcccgtcacgtgacga

SEQ ID NO: 44316 - DNA, 356 bp, Mus musculus
  source 1..356: mol_type = other DNA
tgtgcacatagaagacggcgtccccccttctctcctcagggctctttttttaaaatatatataaagtatttgtagtagccacatgttctgtcacatcttccctggatcgtacaagtgcagaacttcctccgtgccgggcagaggcagacagctgaggggcaacagggcgaaaacaccgtggtagccccgtcaccacatgttgcctcaaggccacaggggcgctttgcactgagtcttcagcccacggtacttaatttatgaataaagccttatgtatagtgtctctaccagagagaggaattgtgtttcagattgacatcaaaagttgatatcccttgatttccatttaatgtgat

SEQ ID NO: 44317 - DNA, 504 bp, Mus musculus
  source 1..504: mol_type = other DNA
cattttaaaaatttagcagattcaaatctacttgctcccccatggggtgaccatgtaaggatttaaattaaaagtcatttgggacacgccttcgccacagggaggcgggaaagaggatgttttctttcaaataagcacacccacctctgctaacttataacggtttgggaggggccagccgcacgcgtggctcgaccccctcgacccagaccgttaggagagtgggaaaagttctccattatattgccgccctctcactgaggagtttcagattccggaagccctcgggagaactgttccagcaggggcggtgctcgaacccaccttcctccaacagtccaccggtgctaggacggaggggcgtggctgagggccgcgggcggggccccacctgcgcgcgcggagctgggcaggacgcagcagcggaggcccgtggggcggggcctgggcggggccttgggggtcgtggcgcaccagagccgggaggcgcccggagagggcggc

SEQ ID NO: 44318 - DNA, 471 bp, Mus musculus
  source 1..471: mol_type = other DNA
ctctagggaatctcatttgttacaggtgagatcacttctgtggtaaacatgtgaagtcatacttcataacttatctgtcatgtcattaacagaactgaaatattctattgtctaaaattctaataaaataactttctaagaagtcattggagtgggccttttaaaatctccattttgagttcatcgtgcttccttggaagcaaatccttgtaaggaatgcctgcttgagcaggacctgatcatacagcagtttacctcttaagttgtcaagttcaagtctccagtgttaccattttcaaaaacagaaacaagcgatcggcggccagcccgctgtccacgggtggccgtgggcgtcacctccttgccgcacgccggccgccccccgcccgcactggagactgcagcccagcgagctcggccgccgcggagtacgcacgcgcaggcgcgccccgcactcggtcacgtgctccg

SEQ ID NO: 44319 - DNA, 457 bp, Mus musculus
  source 1..457: mol_type = other DNA
aatggtaatcgccaccatcacgcaaatttagtaatatttaattccagaatttgtaaagtttaggcctgggttatggagtgtgatcttgcctcaaaagcaaaacaagtaaataaaaatacagcggattttttttttttttaaagagtccttaagcgtctggactcttgacacgtggaccagacccttctggagggagtggagagttggccggtcttctaaaagcttagaggaggtgtgcactctcccagcatgcaccacaggcccgccggccacgccccctgcgagctccagggagcacgtgcgcggtcctcctctcggaagcgtcccatgcgctttgcacgctgggagttgtagtcccccgggcccagcctgctggcggccgtctgcactctactttgctgctagcgcgggtccgcgcggtacgacgcggggggcgtgcctcgcgctgactcagcgg

SEQ ID NO: 44320 - DNA, 267 bp, Mus musculus
  source 1..267: mol_type = other DNA
ttctgttagcaaatagaggaataatatagtttcattgtatcatctcctaccaaaacagtttgtaagggtctttggagactcctgtgttatggtaattataggattctcaactccgccatcggtttcaagtttctctttaacaggaaatcagattcaaaccggcctccgttatcagtcggggaacacgactccggagctggttcctgaagcaaggtccggctccgggcaccgggacgcgctggtggcagaggcggcaggcgcgcggct

SEQ ID NO: 44321 - DNA, 447 bp, Mus musculus
  source 1..447: mol_type = other DNA
gcatctgactcagagcctcaggcagggcagctcgtttttactggttagaaagagatcttggcccataaagcatgatatattcatgcgtggaaatgtcccagtgaaactctctaattcgtacaatttatacgtgaaatatttcaaagcacacttgtgagctgaaggaagcttcatggagttgtgcagatctgacttagccaggtagagctgacgtcaagcccgtgtgacgtcatccgcgctaaggcgctggcctccaggggcctccggagggcaggagacgtcccggggctggaggtggctccgctgcaggtctctggctctggaagctcaggttcctaggcttggtagctgcgagccccgggagcatcccgccgccagccggctcgcccgccccgccgcgggcacgcgcacgcacgcagctgcgcacgcgcgtccccctcagaaccc

SEQ ID NO: 44322 - DNA, 115 bp, Mus musculus
  source 1..115: mol_type = other DNA
gaaaatctcagttttgttaattactgagaattactagcactccaggataagatgtcctgtccggagcctgaggcagcagccctggaaactgtccagtgggcgggctgttggcggg

SEQ ID NO: 44323 - DNA, 644 bp, Mus musculus
  source 1..644: mol_type = other DNA
attagggtggcatccaaccctggcaggggttgaccactgcactgagaccaagggggggaggttcctggaacaccttcctctccagcgacggctctccctgcaagcgaggtctgggctcccagtgggcgggggcgcggctccgggtgcgcgtgtctccgcgaccgccagggggcagcagcggccagtgggcggcggagagccgaggcgccggcgaccgaggcagcggaggaccctcgcggcgccggctccagatccgcgaactccgcggggctgaccggggcgcgtccgagcctcgccgccgccgccgcccttcgggtccccccgatcgcacccgcgtgggaactgccatcccttcggcctgcggggcggcggcagcggcggcagcatcccagccccgggcgccgggcaggaagggaggcggcggcggccggcggggcgcgacccccgcgcgggtctcaacaatggtgcgcgacgctcgggcgatccccgcgtccgccccgcggccgtagaggaagcggccgggagacgccccccgcccccagctcgcccgagtttgctcggctggcctcccgggctggggctcccgctcgccagcgcccagggcggctcagcccggagcatggtgccggcgcccggctcgctgc

SEQ ID NO: 44324 - DNA, 288 bp, Mus musculus
  source 1..288: mol_type = other DNA
aataattaattgcctcgttccctctccctagctacagagagagagagagagagagaacagacagaccggcaggcaggcaggcaactggtagaccagacactggtcctcagctctcagcagaatttagtcatttaattggactgctttgggaattggactttctagagtcaccaccaaatccaggcgcactgagttcgcagcagcagcagacgcggatctctacgtacggaagtttggggcagatccggaaagcgcccggctctgcagaggaatctaggattctcagct

SEQ ID NO: 44325 - DNA, 404 bp, Mus musculus
  source 1..404: mol_type = other DNA
agggcagagctgagctgtacaaattgtacagtcttaaatgctggttacagaacaggacttaaaacattttagcatgaacctgttctatggcaaaagttgtttgtttttaatgaaacaaaaccaatgtttaaccaacgttactcttggagaagcacgcttattattctcaagacatttaaattaacataagatcaccaaaatatattttattataagcatctgcttgtttgcggttaaaataccgcagtagtaaagatacatctgtctgttaaacaacccggcatgttcctttgcgtccccatggtgtagtgaagacaccagcactgggtagatctgcctgcctgagaccatgtgacagccgccggcaggggaggggctgaggctgggccagagccgcagccgga

SEQ ID NO: 44326 - DNA, 449 bp, Mus musculus
  source 1..449: mol_type = other DNA
attctcaagacatttaaattaacataagatcaccaaaatatattttattataagcatctgcttgtttgcggttaaaataccgcagtagtaaagatacatctgtctgttaaacaacccggcatgttcctttgcgtccccatggtgtagtgaagacaccagcactgggtagatctgcctgcctgagaccatgtgacagccgccggcaggggaggggctgaggctgggccagagccgcagccggagctcgtgcagcctgatcatcacatgactccacggccgtagccgcggcagcaggagcggcgggtccgtgggctcgccgggtgggctccgctcggcgcaagcagcaggcgcaaggggcggggaagggacccgtcgcagccgccgcccgccagccgctcccggggctcaggcgcccgcccgctccatgtcgcccggttgcggaagtgtgg

SEQ ID NO: 44327 - DNA, 518 bp, Mus musculus
  source 1..518: mol_type = other DNA
ttgcgtccccatggtgtagtgaagacaccagcactgggtagatctgcctgcctgagaccatgtgacagccgccggcaggggaggggctgaggctgggccagagccgcagccggagctcgtgcagcctgatcatcacatgactccacggccgtagccgcggcagcaggagcggcgggtccgtgggctcgccgggtgggctccgctcggcgcaagcagcaggcgcaaggggcggggaagggacccgtcgcagccgccgcccgccagccgctcccggggctcaggcgcccgcccgctccatgtcgcccggttgcggaagtgtggcggcggcggcgtcagggagcacaggaggccggggctcggccccctgcagcactgagctcacggagccgcgcgtcccagcgtccaccccgcgcccgccgcagcctgcatgccccgcgctgcgcctcggccggccgccgcctcctgctcgctcagcggctgcccggcgccggagtatcgagtgaaatctgccgtggcca

SEQ ID NO: 44328 - DNA, 311 bp, Mus musculus
  source 1..311: mol_type = other DNA
gttagattctagttatttctgcttcctgcttattacaacagagaaatgtctttagctaatgaattggttccttatttaaaccaaagtcagtcgatttggataactacaaattcattttttaaaaaaagcaaatatttatagcacgcgcctgcgcagctgtgccggccacctgcgtcgacggcgggggcggggtccgcactgcccagctggagctcgttctgggcttcgctcggccccgcccctccagagactcgcctccggattggcccgggcgggggcggggcccggagtccggaagtgcggctgacgtg

SEQ ID NO: 44329 - DNA, 703 bp, Mus musculus
  source 1..703: mol_type = other DNA
agcattcctttacgtggaattccagtttagcaagacatcctggattttatctgacaaatcttagtgactttgaaggcaggcgccccacgttcggcgagcgtgcgcactagactcgccgggcacggctttcccgccagtttctgcggcgagcagccgcggccgcgccggggtggagcgctgcgggccgcgccgggcggccggagcgggaaggaggtgccggaactttccccgccggccggggcacaacgtggctcgcccgcccgccgccatctttacagcgcccgccgggagcaccggggctccggaaggcgcgccgagcggacggagctcggcccgaggccccggcaggcctgggcgtgcggcaggagtccccagcccgtgaccgcctttcccgcgagccccgaggctcgcccgggcggagagcgggcgcggggccccggcgcagtggagcaagagcgcgagacggggcgcgcgcggagccgccggggccgggctgccggggtctcccggggggtgcggggcgcgtccgcggggacttccggggtgcggcgcggcgggcgggggcggcggcggagcggcttggcgtggcgtggcgcgcgcgggcgggcgggcgagcgcagctccgctcgggcagagggcgcggccggcccgccggagggagggagggagggagcctccgccctggggcgcccggcgcgcgctg

SEQ ID NO: 44330 - DNA, 433 bp, Mus musculus
  source 1..433: mol_type = other DNA
tttttaaagagtagactaagtacaatgatcaaaaattcaaaatgaatagaaaactgtttaatcatgaccttgatacatattttctatttaaaaggacgtaacaaatctttttaataaaatttgcaggaatgctttgttaaaatagccctcctagaaaataaggctaaattatgttaccataaaataaacatattccttagttcttagtaactatggtaatatgctaatctttcaatgactaatttagctagtttgaaaaattaacctaagaagtcctttcttggaagatcttatttggccaaaccttaaggacatgaccttctaggatgactctgtcagaatttgttagttgtagaaattcaaaatcctcttaaatcggatagtgtaagaaaattcttgtttatttttttggaagaaaaattatgagtcaccg

SEQ ID NO: 44331 - DNA, 359 bp, Mus musculus
  source 1..359: mol_type = other DNA
gaggctcaatttccccgtttgtaattgttgccttcaaatgcagctagccatgaaatttaatctaggggaatcgcgcgctaggcactgcgcccaaacctttggtttcagagccctctggcttgggctcaaaggaaaagccccaagtcacggaactgcgcgctttcctcagaggtctggggcggcggcggcgaccacgccgtgctgcggggcgtgcggggacccgagggggcagcagggcgcaggcgcgcacccgccgcgctccccgccgagccaccgcgccccatttggtacagacctgccggcggggcggggccggggacgccattcccacaatgctccggggcgtgccgccgccgtcg

SEQ ID NO: 44332 - DNA, 659 bp, Mus musculus
  source 1..659: mol_type = other DNA
aattgattaatctatttattagccaaaacctgctcattcatctaattagtttgagcaggcggtgcctgcttgacaccacttggtaataataataaaaaacccatatggtctgtttttaggaaccaaaatgtatcaaattgctgtttatagtgttaagcaaccataatagctggttgtgctgtagtgtgtttttacttatgagacacaatcacatgaaattgcctatgtgatgtataaaccttactttttcatacagttcaatataaatctaaagcctttatttatccctctatagaaataacttctaattaataatgagaaatacttgaaatggtactattggtactttttttgattaaaaaaggcactaaatgattcgaatggatttttatagagagctccctaaaccagtaacttgacaggaaaatgctcaagcatttgatatgcaatctatttacatgtagatgatttgacccttggaagagtattatacatatcatgacaagatcattagcaaaccattctttgctagttatttaagaccagcaattatgtgtagctagaaaatcagggtgctggttctcaatgagaaacaaattttcagcacaaagaagcaaaatctttgtcattaggtcagatgtagtaaaatatatgtcaaa

SEQ ID NO: 44333 - DNA, 451 bp, Mus musculus
  source 1..451: mol_type = other DNA
attgtctctcttctttaataaatggtgaagttatacatacaacaaaggattgtttttaaaaaaacaaaaaaagaataattaagtaaatatgttacattagcttaaagtattttgtagtatattatatataatagttttactacactcagtgactttgagtgcaggaacactaatggcatttttccagtaattaataaaatccactttcccttcccctttatttctgagaagggggaggtcgtccctgggtaccaacctacactaggtccagtcagggtatcccttgctccaggtgttggggaacctgcatgaagaccaagcttcatatctgctacatatatgtcccaatggtattattttttcaaaatatccctttggacacatggtatcttgatttttactaaacattttataagtaccatcttagaatattatttccattccctcaggg

SEQ ID NO: 44334 - DNA, 542 bp, Mus musculus
  source 1..542: mol_type = other DNA
gcatgtgcacgtgtgtttgtgcgtgcgttcgtgtgtgcatgcgcacgtgtgcttttccaacttggatttattaatttattatttagtttattaatttatttagttatttattaatttattatcattgagacagggtctcactgtgttgtcctggccggcccgatatacatatacatcatatacaaatacgcatacatatacattatatatgtccaatttatgggcataaaagatggatattaattttttttatgaaagccactgtttcattcgccaattgaaaggccttggaacactgactactttaactgtactctctaaagtttcccttaagtaactgcagctcagagcaccagccggctcagtccttcgcttgcagagaaaatgtaactcggaatttcctactcccgggcgccggctcggggctggagcctcacgtggccgcgggtgccaggcgggccaatgggcgcgcgcccgccttctcgccccgcctcgccgttccgccgcgccgggacatcgcgccccgccgcccgccgcaggcg

SEQ ID NO: 44335 - DNA, 330 bp, Mus musculus
  source 1..330: mol_type = other DNA
taatacatgaatacatcaatacatgtaaaagccaggattcccaagctttaggaccgtgcccatacttaaaaatatttacacggtgctgtctgatatcattttgctcactgctgtcaccatagcactgagcaggaaggtgcagaggctcagcagctgcctaggtctagcaccacgtctcagttcagattctgttcagattcatagacacagcgatgcataggattttgtgtgaccctggctataatttaagcccggtttacgttgcactgttgcaccatgagaagtgtaaactaacgaagagagagcaaactacctttcccctatttgaga

SEQ ID NO: 44336 - DNA, 244 bp, Mus musculus
  source 1..244: mol_type = other DNA
aaaaagcatttgaaatgcgcttcccaggaaagaacccgatacagagttaaaactgcttctttggagctgctactcctagtaagtttgggagttcaaacctaaggtggcctttagggctctaagcaggaaataccaggccgcagcccagcaagcggggagtggcccgggggcgtggccgcaccgcatagtaaggaggggccacgccccctttctgcgagcgggccaatcggagtgccggagcggt

SEQ ID NO: 44337 - DNA, 273 bp, Mus musculus
  source 1..273: mol_type = other DNA
cctgcctggcccgtgggagcaacaactgaggaaaaagccttttttttttttttttaagatttatatataaatacattgtagctgtcttcataaacaccaggaagagcagtcagtgttctctttttaaaagatttattttattatatgagtacactgagcaccagtcagagtctttgaaatatccaagcgtttctgaaaacatcggcggtcgcgaggcaccgcccatcagccccgcccgcccacgagctgcacgccgcgtctccttcgtgctgg

SEQ ID NO: 44338 - DNA, 414 bp, Mus musculus
  source 1..414: mol_type = other DNA
cctctccagagccttgggagaaggactttcaggtcctcatagctctgtgctctgggcagctctgagctctcagccctgttgctttcaatgtcagtcacagagtggaagtttccccaaagtggaaagctaccattgggaacacaaggggcccctgaggggcctccacctcactgcgcccactccctgcctccctccgaggtgggcgggagttcctaccccatctctgcttcccctggaggccggccagcgatattccacacacgaggtcctgcctggggtagtggagactggctggcattcctccagcactctgcagacttcctgggcccgaggcgagtgacaaacacatgccattgctggtctctgagggctgcttgactagcaataagagcctcagagttgattgaattttaa

SEQ ID NO: 44339 - DNA, 312 bp, Mus musculus
  source 1..312: mol_type = other DNA
taagtttgggagttcaaacctaaggtggcctttagggctctaagcaggaaataccaggccgcagcccagcaagcggggagtggcccgggggcgtggccgcaccgcatagtaaggaggggccacgccccctttctgcgagcgggccaatcggagtgccggagcggtgattcgctttttccgtaagaaaaacctctgcagggtccgcggcccccgctgctcgccggaggagggtcccggggcctaggacgctggcctggagcggaacgcgccggcaggcgggccggcccaccgggaggggggagcctggaaacc

SEQ ID NO: 44340 - DNA, 437 bp, Mus musculus
  source 1..437: mol_type = other DNA
aagacttatgctttgcttctggaatcaaaaaaagaaaaaagaaaaagaaaaataagaagaaaccactccttttcccgagcttttagggacattggagggtagagctatgatttatgcatcaccgatccatgttcagtagatattttactaattcagcaattatttattgggtttgttgactccaggtgaccttgggctccggactcataaatggataatgaatataaaagtacaaataaagaaacaaagtgtcacctacatgtcttgtgttgttatttcgcagcaactttaccgctaagtcttttgtgaaatattttaatgaatttaaaagaagcgggcacatccctcctgccagcaggtggcagcatcctcgcgccacgcgttctgggaggcgttttggctctcgcgccacgccgtaggccggcgtcccgtctgtg

SEQ ID NO: 44341 - DNA, 297 bp, Mus musculus
  source 1..297: mol_type = other DNA
tgatacatttgttgtattcaaaaacttgaactgtaggatgccattaagtctgtttatatttttggaatatttgtattacaattgttaataaaggctggtttaaaaacctgtgctcgggcctgggttggaaccaactccctctccccaggtacttggcaagcgtttggaggctcctgcatgtgtcactgaattattgatggacagtgcacttttaaaaaaatcaataaagaagcctttagaagtctgctcttaaggagcaaataagtcaagcccagggcttgcaaacacaagcaaata

SEQ ID NO: 44342 - DNA, 363 bp, Mus musculus
  source 1..363: mol_type = other DNA
gctggcaagtcaccatcgcaagtcctagcggtggcccctgcgcgaccgccttccctccctcccggaccccgccgggcccgctcactagcgcagtgtcgcgctgccggtagtagcgcttctgcggctggggggcttcggctcccgccatcatgccacgcagtccacgtggagagccgagctcgcggcgcgaggtgatgacgcagcccgcggaccgccagcgggccccgccttttggggaggccagctccgggcaccccgcatcctccaggtacctgtgcgccccacaggtgagcgggatgtgaggaggtacccgggctcgggggtcatccccatccatctctaggaagtccagctggaggaggc

SEQ ID NO: 44343 - DNA, 444 bp, Mus musculus
  source 1..444: mol_type = other DNA
ttttgactctcgaaatagtcacacaggctcagagcctatgagggagagccggggtccggggactggacctctcagggaccctcacttaacagcagaaccggctgctctctgaggagccggatctcccgtgggaacacggattcgggctcagtttccggatcggtgcgagagctggccatccggcagatagagtccccgagcaccccggccagcgctcggatcccctctatcggtgcgggctgccagccatatgggctgctcccaggcaccgggcctcctccagctggacttcctagagatggatggggatgacccccgagcccgggtacctcctcacatcccgctcacctgtggggcgcacaggtacctggaggatgcggggtgcccggagctggcctccccaaaaggcggggcccgctggcggtccgcgggctgcgtcatcac

SEQ ID NO: 44344 - DNA, 259 bp, Mus musculus
  source 1..259: mol_type = other DNA
agcaactagatgctgtgccgaaattgtctttgcagccactcccttttccttcagtttcacaaaggggctgtgggtgtcatgaaagacacgccccgcccctggggacacctgctcgtgctgggcagggcggggatgcgcagccgcggccccttctcctccgctcccctccccggctcccgccccgcccgcccgccgctccgggggggtctccgccgccgccgccgccggaaggagccgccatttgctaccgccgaacgca

SEQ ID NO: 44345 - DNA, 360 bp, Mus musculus
  source 1..360: mol_type = other DNA
gctcagcagtcaagagcactgactgctcttctgctcacaagctacagtgtacttataataaatctttaaaaaaaaaaaaaaggccccagcattctgagttcatggccagcctgggccagggttacacagagaaaccctgggtggccatgtgccatctttccatggtgttacactgagggactcggctccccatcaggctctggctcctgaactccagaggcacagcctttcccaggaagacctttaggctgctgctggaccaagaggagcacaagacatctggtgtggagctgttgtcacagacccaaaagccagagtcagccctagccctgcctactgttgtgggtgctagaccacttg

SEQ ID NO: 44346 - DNA, 374 bp, Mus musculus
  source 1..374: mol_type = other DNA
cacgtcatctcatctgtttatgcaatcacatatatatgtagcaatcttagtaaagactttgtaaaatcaagaaccagagggagggcattaaattgctgcccccccacagatagaaattatttattccctgttttataagaccacaattacctatactagttatctttgcggtggagtggaaatgttacagcaccattgacccatagtgagactgaagatgcgctcggctcggccccctcggcagtcagggtatggcagccagtcaatagcaacaggtcacgtggccgtcagggccccgcccccttccccagaacgtccggcgcccgccccgccccccgggtttccgcgcgcctctctggcagctgggtgagggt

SEQ ID NO: 44347 - DNA, 331 bp, Mus musculus
  source 1..331: mol_type = other DNA
cagcttacaactgtttgcaaaaatttaaaaagagacagtatggaggctcttatttattcataagcacgtttgtgttctaaagatgtagagcacaccagcgtctgtgccctgaatttctggcgtgtccacactgagtatgactgttccagagtataacagtgaaacgatggcaccattagaggtgcagagccatctcctcgggttcctagtctcgaaattccgtactcaggaatccagtctctaagacactgtctagaaacccttttttttttttttaagtttcctccaatgaagaaactaatcctggatgtcttggattagccacgagttt

SEQ ID NO: 44348 - DNA, 329 bp, Mus musculus
  source 1..329: mol_type = other DNA
acaaatggtgtccatgctgagggggttccttgtgtccagggagcaaaatccgcccccccccccgcaggtgggtatccaggtgtgagagtaaggctcagaagcccctggtttccaagttcactttagactcacccaggtaccctgcgaggggaaggggaaaggccctgggaagggatagcccatttcagcttcacggggacaaagagttctctctgttcctgtgactccaagtaccaggaaatccagtccaggttttgggagggaaatccagtcctggattttgtaccgccctagcagacagcggtggaggagagatggggtgggggggc

SEQ ID NO: 44349 - DNA, 446 bp, Mus musculus
  source 1..446: mol_type = other DNA
tgaacccaactctatgtagccaaggatgactgcttggattccaggtgtatttgagagtgtgactcaaatatcgaaggctggtctcaaactcatgaccttgaattattgagcctcctgcatgactccttcttaaaataattttattggagggcaaatttgttggtaatatattatcatatatgtgtatataaaaatatgtacatgtatatttgtgtgtatataaatgtaaatatgtacataattatatatgtacatacataaatatctgtgcgatatatgtatatttttatgaagaagcatgcttctgtatagtatattttgaaaagatattaagtaacttccaaaaaatgccatacattgcaagaaatatagaggaggggaggggcccaatctcgccgatgattggttgttgctcttggccaatcagaaacagctattgattttta

SEQ ID NO: 44350 - DNA, 351 bp, Mus musculus
  source 1..351: mol_type = other DNA
gtaaaggaaaaaaagcccttgatttattttaaaggttttgtaattctacagtgtcgggaatcaagccacggccggccattgagtaacggcttgcctcggttgatggcccaagaggtcagagagaggccgctgtctttggggaccttcccgggagggctcatcgcgcgtccgccagacggcgccgcggagctcgccatccccgctcagagcccgagcctgtgccgcagccagcccgggagcggcgctgcgctgcggtgtgagagccgggcggaggcctgagccctcggctgcctgggagcgcgacgcggtgccagggcttccccgcccccgcgctgcggtctacaaagcccc

SEQ ID NO: 44351 - DNA, 620 bp, Mus musculus
  source 1..620: mol_type = other DNA
ggggaccttcccgggagggctcatcgcgcgtccgccagacggcgccgcggagctcgccatccccgctcagagcccgagcctgtgccgcagccagcccgggagcggcgctgcgctgcggtgtgagagccgggcggaggcctgagccctcggctgcctgggagcgcgacgcggtgccagggcttccccgcccccgcgctgcggtctacaaagccccggagtccgcaggcgggaggagtcggatccccgacactgtcgggctccctcccgcccagctcccgcatcaggccgtcgccggcctcatgaggaccccccggccggggcggagaaccgggcactgcccggaccgcgatcctgccgcggcctaggtcagtgcgctggcacgcccggcggccgaggtgtgggcaggagcggcgtcctcctggcctcgcgcatcgtgcccgtggctcaacgaggccacccgagggtcaccgaggccgggcacccgcgagcgcgggcgcgacaccgtgccttccctgacccgccaggtgcagtacagccgcccctccgcagcaccctggcccggctgctgcccgtggggtgggggtggggtccccgagggctgcgcacccaacaagccttgg

SEQ ID NO: 44352 - DNA, 331 bp, Mus musculus
  source 1..331: mol_type = other DNA
ctggaccccaccctgggctttggggtcagggactgggggggcccagaacctttgttacatgaggtgggtggctggacccttcatgctcctgcggcagccaggcccaccactgccagtggtgacaaggtgcccaaggcagcaacgggcagcataataacaaatagataaaaatgtctttgttaattcagtcccagccatctgcattagagagggtggagtgggtccctgtccctgtcccatctttactggcccactctgtctttgctcaaagtgcaaagtgtactctagagagtactccctacaggtccggattggaccctgctttatagag

SEQ ID NO: 44353 - DNA, 272 bp, Mus musculus
  source 1..272: mol_type = other DNA
gactgagggacagctcctttgccaaggccctcagaggggaagaggacatggtcccttcccctgcccccccactggccaagtgctccagctctggaactccagccccagataacagtagtcctacagactgtagcttttaatttaataaaaataaagtgaaatatgtccttgcatgcctgaatggaccctttctggcagagctaacgctgggcgttgcaataaccctgcaaagccctcaacgggcaggggggcggattcggcagtagcaactc

SEQ ID NO: 44354 - DNA, 95 bp, Mus musculus
  source 1..95: mol_type = other DNA
ctagtcaccagcccctggttggactgcgcctccagattatcacccaccaaggggaggggtgctctcccttcctttctgttgctaaggcccggacc

SEQ ID NO: 44355 - DNA, 346 bp, Mus musculus
  source 1..346: mol_type = other DNA
actcaggagcccttgaaatggccaggaacctggggagctgaggttctcctggggcacgggtacctaaggtagcagaagtccctccacctccaccttcagctggccagagctggagacgaggaagcctctccaagttgctcaaggaacttcatcagagagagctgctgtcagctgcaattcccctgagccctgtcacagcccagctccaaggggccattcatgtgacctcaattccttgtgatcatagggtccttgagatgaaaacctaagcatctcagtgcacggtgggatctaggtgtcctagctccaagtcctgctggcacggcacagggaggcggggctctct

SEQ ID NO: 44356 - DNA, 313 bp, Mus musculus
  source 1..313: mol_type = other DNA
caggacagccagggctatacagagactgaagaacagtgtacttacatatagtaaataaataaataaatctttaaaaaaatcggaggatccgcacctatatacatagaacaattaaatgtatatatttaaatttgtcatgtctgcacaacttcatggagtctgcaccggtctcaaacaggtgaccgcccggcagccgagggggtggagccatccccgccggccccgccccgccccgctcgcgcgcctgagggcgggcctccggtcacatgacggctgcgcaggtgagcaccgcttccgggtcgggcttcggagt

SEQ ID NO: 44357 - DNA, 225 bp, Mus musculus
  source 1..225: mol_type = other DNA
ctttctttcttttcttccgatgtggaaactgggagaagaaaagaacttctattattatattatatttacttctattatatattatattatagaggagtaggcaagacctgcctgtcttttctccatgccatgctcattgtacatctgagggaggatcacctcctgcgaaggaaaccccgcccccgcggctccggcgcgccccgcccaggcccgcagcgcggctgc

SEQ ID NO: 44358 - DNA, 506 bp, Mus musculus
  source 1..506: mol_type = other DNA
aaagtaagaggattaaccatactgtatctctcctccagaaagattggttgctgactggacacaaagctactactgaaaagtgagtgaactattaatgaaattgatgaccgtcatggagagttcagtcagactgtgagccagcgctttttcatttaagatgtccagacttttgaagaatgggtttcagattattatatgcatatcagaaatataagaagcatgcttatactaacaattgttagttgttgacctgaaattaacttcaataaaaaattgttattatttatttattttatgtgctggtgccctcagaggccagaagaggatagaacccaggtcctctacaagaggactgtgctctctgaaattaaaatttaactagggttcatttttctattctttaaatgtttactaaatcttgctattgtttacaatgtaaccaatctctaggttttctaaagcaggaattatgaaactcctttcatagactattaagaacgaaagat

SEQ ID NO: 44359 - DNA, 435 bp, Mus musculus
  source 1..435: mol_type = other DNA
actgaaaagtgagtgaactattaatgaaattgatgaccgtcatggagagttcagtcagactgtgagccagcgctttttcatttaagatgtccagacttttgaagaatgggtttcagattattatatgcatatcagaaatataagaagcatgcttatactaacaattgttagttgttgacctgaaattaacttcaataaaaaattgttattatttatttattttatgtgctggtgccctcagaggccagaagaggatagaacccaggtcctctacaagaggactgtgctctctgaaattaaaatttaactagggttcatttttctattctttaaatgtttactaaatcttgctattgtttacaatgtaaccaatctctaggttttctaaagcaggaattatgaaactcctttcatagactattaagaacgaaagat

SEQ ID NO: 44360 - DNA, 525 bp, Mus musculus
  source 1..525: mol_type = other DNA
attctagtttaatttgtccaaggattctaccttactcatttgtaaattaaacaacgataaaggttaaaagtaaaaacatcttgcaaaacgtatttttttttttttgtgccatgaaaacagaggccatgtggtggcctattacatagtctgtcggaccagatggtctctcctggcctaaagacagaccaggttgtcagtgacagagaggtcatgtgacgggctggcccctcccgtggcttcggaaggggcccctcccgagggaggactgggagccaccagggcggcccagatccttccgcggagggtgggggaggggtaggcgcgctcccgcatgcgcactgcgtcccctccgctgctgtccgctgggcgggggcccggccccgcccctctcccgtccgggcagcggcggcggcggcggcggcggctgcggcggtggcggcggcagcgacggcggcggcggtagcagcctgcgcggtgccttctgggaacggaatccccagggctgcccctggcccctatggcgca

SEQ ID NO: 44361 - DNA, 229 bp, Mus musculus
  source 1..229: mol_type = other DNA
cagcagggcaatcatgcgttcaagtgcatgcacgtcccaggctcgtaggtcgtggaggccagctcctccagggagtcacaggacttcgcggtgcccattcgacgtcccctgcgcgtgcgcgcgcggacaccggttgcctccgcgcgcgcgcatgacgcgaagccgtccgggtccgctcagggtaggctcctggaccctgccccccccccaggaggggccggacagcata

SEQ ID NO: 44362 - DNA, 401 bp, Mus musculus
  source 1..401: mol_type = other DNA
tttcgagtgcagggaggtctctgcaccacatgcatgcagtaatcatgaagaccaggaaaaggacagcctggcctgtgttctccgcttagaggataacgtcgaatttatgataattttatcaccacctcttcaacgctgggattacaggagtggacacaccaccacacagtgttgtgtaccgggggtgaacccagcggtttgcacatgctaagcaaacgcttactaattcctaagtaataaaggttcgcgagccacatcctttgtggctgatggacagccacattaatttccattgacactaaagtttgctcacagggatcgctttacagcggccgacttcaacagttcaaaggaccctctcggagccggccgacccagagtgccacgctagcccgcaccgt

SEQ ID NO: 44363 - DNA, 276 bp, Mus musculus
  source 1..276: mol_type = other DNA
tccctgaaatccttcaagccgcctgcactacagcagggtggggcgggatctatgtgaagtggtgaactggacacagcctccctcccttaagtactgaaggtaggagagggggacaacacccctcccttaaagactgagccctggaggaacagggtatccagtattgtcctaaagtcctgtcttcaagtcaggagcctcagcctcccaaacgctggggttgctgggattacgagcaagcccagtgatggtgtgaggacaggtcactctctcctcccc

SEQ ID NO: 44364 - DNA, 333 bp, Mus musculus
  source 1..333: mol_type = other DNA
gagccaagaaggtggtttaaaaacagcgctatggcctgagagatctgtttaagggaagactctctcgagtctttctcaggtgggaaactgaaatagaggccctctctctgtgtccagtcacctcacgcagctccctgggggagtttctccagagaggtactctacacagagcaccactgtcctcagtgatctgtgaatgcacattctgcacttagaactctgaagccgaagaccgaggcttctggtttcagagcctcttcgtggacagccgatccagggatccgcgccggggagggggaggatcctgggggtcctgggggtgccataagcccg

SEQ ID NO: 44365 - DNA, 294 bp, Mus musculus
  source 1..294: mol_type = other DNA
tgtgtatctgattgaagacagtgacagtgtactcacatatataaaataaataaatcttggcaccactcctgggctgcctcagatttggccaactcacaggtgcttcaaaggcgctcgcccttctgccagtggccctcccccaggtggactctgggcagccagcacaggcgtggctaaaacggtttccgtatactgaggagcccatgcatgtgagtcccgggggagccctccaccccctgcaggggcctgatgggcagcgcagctggccaatcctaaggttcagagggtaggtct

SEQ ID NO: 44366 - DNA, 230 bp, Mus musculus
  source 1..230: mol_type = other DNA
aggaagaggaaactttaaagtgcctctttttttttttaagcaggtgtggtgacatatacttttattctcagacacaggtagatctctgtgatgcacacacaaaaagtcacaattttttttttctttttgagaccaaggctctaacctttgtcccctggtctggcagctcatttggcgccaagttccacctgaactggagatgtttggccgctgtatctctgacaaaaagg

SEQ ID NO: 44367 - DNA, 466 bp, Mus musculus
  source 1..466: mol_type = other DNA
aactgcatctttgaaaggacataggaatgtgatttctgcaaaacaaaaaccatgagctttatttggggtctgggctacatagcgaagccagcctgggctacccagtaagcgtgctgtgcacatgaaggctgcagagtacacagctggcctcggccaggagcgcggggattccggggccccagagggaacgcggtgagcggggcagcgggctacgcgcgggagcgcgcgccgaggggagccgaggcgggatcgcgcgcgcctaaggggaggcgagggcgcgcgccggcgagcgagcgcccgcggtccccgggaggcgcacacaggaagcagggacgcgagcggcgcaggacgcgctgacgaccacgccggacgtggtgacgtagcgcgcaggccgcagcggggggcggactccgggcctttcttccccgctcccctgcctccccgccccgggcccggggagaccccc

SEQ ID NO: 44368 - DNA, 299 bp, Mus musculus
  source 1..299: mol_type = other DNA
actaggagcctcggctcagaaaatatctcagttaccacagttactaacatattaaaaggaattacatatcttccaactgtttctattgcttggttaaatttagaaccatacagggcttttgtagaattaaaatccctggggattttatagttaatagacgttaggaataatatatgtagcttcaaaatgatttttgtaccggtgcacgcctttaatcccagggccagcctggtctacaaagtgagttccaggacagccagggcagtcagaactgttctaagaattttagttcactgcca

SEQ ID NO: 44369 - DNA, 355 bp, Mus musculus
  source 1..355: mol_type = other DNA
tgatgtagatgtatgtgcagatgcatgaacacaatgcagtgtccatgtgcagttcatagggtcaccatggttacacatgtgctgcggattttaaagtctaagtgccatctcattatgattttataaagaattggttctgagtcatgtgataataagttttttttttaaagatttatttatttattatatgtaagtacacagggcatcagatctcattggtttcggaccttcggaagagcagtcgggtgctatgatttcaaagagggtttctgttgtgagaagacatcgcaaggcaactcctctaaagggtgcagaaggaggagctgagagttccacatctggatctctgatcgca

SEQ ID NO: 44370 - DNA, 418 bp, Mus musculus
  source 1..418: mol_type = other DNA
tgcagctgaacatatgcagcaaaaaggagctgctgctgctgtatctttaaaagctgtcctcagagcagtgtggaggcaggcattcagaggaggtgggggggggggggctctcctctcctctcctctcctcctgtctgcctgcctgtctgtctgtctgtctgtctgtctgtctgtctgtcagagctcttttcccagaaggaatttcttccggcaaaattccggcaggcagaacgtctccattagtgagctctttctttctttaaataaaagtccttacaaaaattggcattttaaaatagcactgttgatttctctgtacaatatacactatggaaattcagttttcaaatgttaaatatttttttatctttaaaatattttaaatattaggtttgctagaactttgcttatgagaatc

SEQ ID NO: 44371 - DNA, 448 bp, Mus musculus
  source 1..448: mol_type = other DNA
ttgcacagcaactaatttggactggcttacagttcagagggctagtccactgtcacagtggcaggaagcatagcagcatgcatgcattcagggagcaagtgagccactcactgggcctggcttggttctttgaaaacgctgagttcatatgcctaccatatgtgcttctatatctctgcaaaggctaactagcctgggacagactctctgatatacacacacttttttttaatgaagtaaagataaatctttcctcccaagatttactaactagattttgagggaaacacaaaaagagtttgtttgtacaaagattgatttattttatgatgcctgcagatgtcagaagagccgtcagatcctctggaagtagcattactgatgttctgagctgccctgagagcccgggaacagagcaacggctgctcttagttaagccgagccggag

SEQ ID NO: 44372 - DNA, 413 bp, Mus musculus
  source 1..413: mol_type = other DNA
cctacatgcgtttagtgtaggtcctctggaactagagtcgcagagctctgtaagctgccacgtgggtgctgggaactgaacccaggtcccctggaagagattctcttcatcttagggacctgccagtgagaaagtctttcgtggctgacagaattctgaaggccagcctggtttacagagcaagttctgggagagccaggcccacacaaagatacctatttcacgtgactgcgtcttgaacaggagtgcctttcctgctgtgggtatagcttggcagtctagccacatagttagcatggcaaaacccttgggtagaatatgcctattcctgataagccagaactgacctgctctgtgtaaacactcggagggggatgggaggagtcagggtcgagccctgccccagacctcct

SEQ ID NO: 44373 - DNA, 291 bp, Mus musculus
  source 1..291: mol_type = other DNA
ggggcccctcgttgtctctctccctgtaccccagggaggcagtggcggtacacagctcatcccagcaggggtccacccggactcctcggaggaacgtactgtgcatgcccccactgttccctgctccctgcagtggacacttcagtctctggaagccaaagagggatacccaaagacccaagtataatggtgtctcctgggccagggtttccctttcagccagcctgttttggatctggaacctggcggggctaggctgacccctccctgatggggggcgggaccccaggg

SEQ ID NO: 44374 - DNA, 296 bp, Mus musculus
  source 1..296: mol_type = other DNA
gcagatttctgagtccgaggccagcctagtctacagagtgagttccaggatagccagggctacacagagaaaccaagaggagggatggctactctgctctcacctgacagctggagaatgacaatgtcatggtttaacattttgtaatcctaaagcaaggattttatcttctaaatatgttttaaatctccctgagaaccatatgctagatatgctagctttaagtctaagaacttttcaggcaaagctctcctcccagaaggcaattttttaaaaaaacccagtactgcgcatgc

SEQ ID NO: 44375 - DNA, 391 bp, Mus musculus
  source 1..391: mol_type = other DNA
aaggcactgaggacttcctgcctagcaccaaacaagggtgctctggatcaggccagggtccgggggccgcagaggtgccgcggggcggggacagggcggcgggcgccgttgaatgagccgcggggcgcccatccatccccgtcagcgccgcgctcagtgctagtcgcccgaggccccgcccgccctcgttccctagcctgtgtatgggaactcatgctgccccaagacctggcgtctttggggtgctgctctccagcttcacacctgagccaggggtgtgtccagggtgtgtcacggtgaaagtcaccttccttgcccccagctgggcgggagggggcgcgcggggcgcggccgggattggagcaccgcggagccccgcccccccaccccg

SEQ ID NO: 44376 - DNA, 374 bp, Mus musculus
  source 1..374: mol_type = other DNA
gggatggctctaccccccgagcctgcctctcctgcgccccgtgccaggcgagcagggctgggcgggtactaaggtgggctccatccctgagcccaaggcgggccccaggtgggggcgggtccatgtggccactccttcactccgcctcgaccggccacccctgcccccaccctaggctagggaggcactgtctgggtttccccaaggaaatcaggcctccccgagcgctaccggctctagggagcgctagaggacagggtgcccggggactcccactctcggaagcgccaccccccccccccgcggcacttcagtcaggggagcagcggtgcgagctcgccagtgcactgacgggggagcccctagtgctccat

SEQ ID NO: 44377 - DNA, 305 bp, Mus musculus
  source 1..305: mol_type = other DNA
gtgtctggtgaaggggatggctctaccccccgagcctgcctctcctgcgccccgtgccaggcgagcagggctgggcgggtactaaggtgggctccatccctgagcccaaggcgggccccaggtgggggcgggtccatgtggccactccttcactccgcctcgaccggccacccctgcccccaccctaggctagggaggcactgtctgggtttccccaaggaaatcaggcctccccgagcgctaccggctctagggagcgctagaggacagggtgcccggggactcccactctcggaagcgccacc

SEQ ID NO: 44378 - DNA, 301 bp, Mus musculus
  source 1..301: mol_type = other DNA
aacaaaaactacaggacagtcctctggttatgatggtagaggctctgagggctgtcatgtgtgagagcctgcttgtaaagctcagacacgcgcgtgtgcgtgtgtgtatgtgtgtggtgtgtctcagtgtttacctcagaaacagataggaactttgccaaggttgcacaactggtggctatcactagggtttgggacggaattcgggactcccggagacttccagaattccctgccttccaatctctggcccggagaaagtccctccagtgtggttctgtgtcgtcagagcgccagggag

SEQ ID NO: 44379 - DNA, 373 bp, Mus musculus
  source 1..373: mol_type = other DNA
tccagagaggttcaataactcatgacctcagagaaggtatccaagcagtaaggcagtaaatagtagattctagtataacggtttaccctaaggatacatcctagggcgcggccagagtgcggccaacgggcgtccgcgtcgttgtttggacgcgtgtgcacgtacgtgcgcgtgtcggcgctcacgtgggtacgtgggcgcagagagggccggctgtgcatccggcgtgggcggcaaggagcgacctgccccgcccgttgggtccccaaggtcacctcggctcaggcctgggctcccaccctcccgccagcccggcagccagcgcagcgccgggcctcgctccctgtgcgtcctgcgggggaggaggcgcgga

SEQ ID NO: 44380 - DNA, 460 bp, Mus musculus
  source 1..460: mol_type = other DNA
aaaaaaaaaaaaaaaaaaaaaggtgcttcaattttcaatttctgtaagtgctacacacacagtgcctggactgcaagtactgggagaaagaacttagatttgagctcagaacctactttgttcgtttcaaaaccagaaatgctaaaaaggaaaccgaagccaaattaatacttttttttggtgttttgttgaagtcagagtttctatctcagaaacgttgtttatgcctgcaaaaccttgacaacgcacaataatcctgtacttattgctgaaatatttcagaactttggagacaggagaaccttactcgtgaagagttgccactggctgtccaggaggccgaaagggcgggctcttcctgtcgtcactgccagctaggggcgcgggagggcggagcgcgcgaggccccgcctgctccacgggtgggggtgggggcgggtctcgcagccgattggctgcc

SEQ ID NO: 44381 - DNA, 263 bp, Mus musculus
  source 1..263: mol_type = other DNA
aagaagcctggatgccttcctccctaggttcagagaagccagaagggagtggcacaggaacacctgccacatgcttgcagcatgtggcccagtataaactgtgaagattttacatcatcaagcgcccccctcaggagggaggacagaacaaagcttggctcacccttcttccagcctcaggtgggcagacagaggtagtcctatctgatgcctggatggccaggttggtccagagacccttctagtcagagggctctcctgta

SEQ ID NO: 44382 - DNA, 168 bp, Mus musculus
  source 1..168: mol_type = other DNA
agggccagctcccagctgctgctgtgcgagtgcatggccctggagaactccagcacgaggcagctgaggcagctcatacatctccctcagggtgagggagaagagcagaggaagccagcttcacccccagtcttcttctgagaaatcacccagaacctttatcaggga

SEQ ID NO: 44383 - DNA, 366 bp, Mus musculus
  source 1..366: mol_type = other DNA
ctaccaggaaggagggtacatgttttttgttttttttggatgtacctagaatgatataaaagctaaaaaaataaagttgcttcagcctcagttgactgactgagctggcttggtcagaccccgcccaggcgccacagcgagcgggctggtgtgggctcgtggctccgcccggccgtcggggggcgctgcctcctcccggacggcggggggcgctgcgggccgggcggcggggggcgctgcctcctccgggacggcggggggcgctgcgggccgggcggcgggggcggcccgggccggcgcggcgagcggctcggcggatggagagtctggccgcggccggcggcgccgcctcctcgtcgggccggg

SEQ ID NO: 44384 - DNA, 268 bp, Mus musculus
  source 1..268: mol_type = other DNA
ataggaaatctttaaaatggctaatattgttatgaggatctcagtcatatcttactgcagtgtagaaatgaaagcatgcatttctgtattcatatacagctcccacgtgatggctcacaaccagcaagagatcacaaatgtgttacttgtatgtacatgtgggcaaaataaactcacacacataaaaacaaagaaaaaagaaatttgccatgagatcttgttttatttgttggacacatacacacactgtcagtctctcgaagtgaca

SEQ ID NO: 44385 - DNA, 364 bp, Mus musculus
  source 1..364: mol_type = other DNA
ccccgggaagcaatttgactcaatatgactttgccaacttgacacaagctagagttgtctgggagatgggagggcccagctcactgcaggtggttccacccatctctgcttcaggttccgtcatgatagaccacactttcactgcaagttgctttggtcatagtgtttaccatgtcaatgggaagcaaagatgccaatttgtcattagtttcctgtgctccagcaaggaatgacagtgatttatgttgagaaatgaattttgttgtaaatttgtccagaagatggggccatgggcacacagagcctgagcctgggccttgacggatgtgggccatggggcatttgcttatcagcacagaaaatc

SEQ ID NO: 44386 - DNA, 370 bp, Mus musculus
  source 1..370: mol_type = other DNA
cagtcccaggggcagctgcccattggaaggacagtggcagttagctgtaaacatggttcctgagagcacaaggacagtctgatccttactggtgacatcattcctgaaggacaccaggcttatttttgagctgaaatcaagccctacaaactactctagaggttctgagcaaggcttgcttaagtaagaaatcctgactctgtctgcttgaattcagaaagtcttttccttctgatgtgtttggggtcccagccccacctaccccagagtgcaagttgcaaagtctggaactggaccatgggctatgtgtaatatgtgtcactgaacatcagtgatgttatatgtcttttgatcagaacaggtcaatgac

SEQ ID NO: 44387 - DNA, 335 bp, Mus musculus
  source 1..335: mol_type = other DNA
ctgtgacatcattcctgaaggaaggcatcaggtttattttgagctgaaatctgagagtcattcaggtaactctagaggttctgtagaaaataatcaagaattcctggcttttgtaagccaaggacatctgcttttccaattcaggtctgggagtcctgatttgtctggggtcccaagtacaggttaccaatagattttgattctgtagagtgcaatatgcagagacacaaggtgagtctgggactcatgtattctgacctgattccaggaagcaaggattgtttttcttggcatggataaataaagtcaaagaacattgtatgacttttgcccca

SEQ ID NO: 44388 - DNA, 370 bp, Mus musculus
  source 1..370: mol_type = other DNA
gaccatagggtggctggctccacccctgctgatcagcctgtgacatcattcctgaaggaaggcatcaggtttattttgagctgaaatctgagagtcattcaggtatttctcctagaggttctgtagaatataatcaagaattcctggctcactatgctcatatctgctttaaatcccaattcaggtctgggagtcctgatttgtctggggtcccaagtacaggttaccaatagattctgattctgttgctgttccagagtgcaatatgcagagacacaaggtgagtctgcaaagattataagagaatatatatgtgttgtttaatatcagatgacttctgaccaaaagcctgttaaagttgagagtcatt

SEQ ID NO: 44389 - DNA, 280 bp, Mus musculus
  source 1..280: mol_type = other DNA
tctagagtttctgagcaaggcttcatgtctgcttgaatccaggcagccagagagaggataaagtcatttccttctccatccaagaataggttactaatagtttctcattatgttcacaacctcctagattgtaattacagagacacaagctgagtctgggactggaccatgagtcatatgtaatggcacacatacatgtattctcacatgagtcccataagagaatagacctatgttattcgtcttttcgagatctaaggcattaataattataaaaaat

SEQ ID NO: 44390 - DNA, 352 bp, Mus musculus
  source 1..352: mol_type = other DNA
tggtagctcacaaccatctgtgtatgtctggaggcagtgtacacatatacataaaataaataaatcttagaaaaaaaagtcccttgcatcccctgcccaggggtgacctgggaatgttgctcgattggaccttcctctggccccatggatgacatgtctatgcaggtgaggttcttcccatttgatcatcacttgtgtgggttgacaagaacaaacaagagtcaaaggcctgtttagggtggtcacagtgtgtctgggaagctactatattaggaaggtaccagcaaacttggaccatggggccggtcaaagttaagagaatagatctgtgttattgaacagacagaggtgt

SEQ ID NO: 44391 - DNA, 244 bp, Mus musculus
  source 1..244: mol_type = other DNA
tgcatgtactttggtcaagaaagcccagttctacattttgcaatgcagatggcccagaccttaaggtagagggaaggcactgggtttcttttgagctggaatcagaatgccattcaagtttctgaacaaggcttcctgagaaagtaagcgtctgcttgaatccagaagtcatttcctgcctgacatcaagacatgatgtgtctggctcctaggcctaacacggtcaccaatcatttgaaggcta

SEQ ID NO: 44392 - DNA, 383 bp, Mus musculus
  source 1..383: mol_type = other DNA
ccgcccaacaaccaccaaggttccggttggttttgggtgttgctgtttgaggctctctactttttagaagttgaaccagcctcctctagagagactctggagtcagcactgtggagatcatttgtcatgatggaaactcaccatctccagagattggcaagttcaggccaagccagcaaatacattaattaaagctctctaagggctgatgagctggtattcattcctactggaattcaggatttcatcttttttttttcaggtaataaaaattaaatttgttgacaagcttaataagagagctcagatcagatctaaggatccctctcctgaaaggtctaagtggctttgtcagagtgacacactggctgtggcaatgcacc

SEQ ID NO: 44393 - DNA, 485 bp, Mus musculus
  source 1..485: mol_type = other DNA
gctatttaatcttaaaaggatcctcgtcttttgtttctgttgagacttcatccacagaagtaacaaacttacactgtaagacagcaaactcagcagacttgagacaccaattgttttgcatgtttttagcagctaaaagagtaatttactttggggatattccttaaaatattactttttactctctgtatagccctggctatcctagaattcactctctagaccaggctggccttgaactcagaaatatggctttttaaatctttattttatctcttacattgtttaaaaattattagtatgttggtctcaaacttgcatgtcaacttagactttcatttattctattagtctgcaaataattactgactaaatggcatacgcagaatactgactagaaaacattgttgggaggatccaccttccatgtgggcaggtactgtccaatcagttagggaccagaaaggtgacttcctcttaattct

SEQ ID NO: 44394 - DNA, 474 bp, Mus musculus
  source 1..474: mol_type = other DNA
tggaatttaaagtcctgcatagccactgcccagctaaaaactaagttcttaagtgtaattttaccaaatctctgtctgacagttttgcagaaatggtctggttcagatagtttcactaattttcttccaattttgttccaacaagagaaagtaacttatgtactttctcatgcggtcttcatttcgaatactgaatatagtaactctatgacaatttttcaaaatctctttatgagatattggtaatatctctaaaatattcatcttttgcaaaggacttgtttctgagttcaaagccagcctggtctacaaagtgaattccaggactatacagagaaaccctgtctaaaaaaagaatcttgttattactaatcaaaatcaataaaaaggagcagtaggagtcgtctacacctgcgagatctgcaagcagtccctccggcggcgcaggtccatgcgcgcgcagggatggaggcc

SEQ ID NO: 44395 - DNA, 248 bp, Mus musculus
  source 1..248: mol_type = other DNA
attcaggtccaaaattgagtccttttagtaactacttctttgacaaaatactggttttatagtatattctactttcaaaaggtatgagcttttgtttgttttgagacaagctctcaatatctagcccaggctagctctatagagtaagaccttaaagcacaaagctatgaagctcagccctttattcccaactgcacacgcaaaattcactgtgttgaggttttgcagagtattttaaactttttcag

SEQ ID NO: 44396 - DNA, 322 bp, Mus musculus
  source 1..322: mol_type = other DNA
aaaggtatgagcttttgtttgttttgagacaagctctcaatatctagcccaggctagctctatagagtaagaccttaaagcacaaagctatgaagctcagccctttattcccaactgcacacgcaaaattcactgtgttgaggttttgcagagtattttaaactttttcagcttggcgcgtccctcggggtcaaggccatgacggggcggcccctaccgccccagccaggcccgcgccgccgtgcccgtgagaacagctgctcggctggctacgaagtagaggcccgcgcgcctgacccggaagcgcatgctggtcccgccc

SEQ ID NO: 44397 - DNA, 468 bp, Mus musculus
  source 1..468: mol_type = other DNA
gacaggtggtaaagttcttaacatcaggcaattggatgactattagtggcttttgataagattgtatacaaaaccagtcaaaggattttcaaatagattcctcgcctcccccagggcgccaatgtctccaagcaggggggagaggcgcgcccctaaagccacggatgcaaccggcgttgccgggcgtctttggcacaggactgcaatcccggactcgggcgactgaactcgaggccaacctgggtttgcggcaggcacgtctgctgtatacgccgcagcgtcccaccgccttccagggcggcccctacgtctctcggggagatcgcccgcgagcgtgctcaggcggttggcggccaacggcttgctaacgcggatcgcgaaggagccgggaggccccgccccttccgtagagatctcttggaaacggcgattgcgcacgcgcggcggccggcccgggcattttgctgc

SEQ ID NO: 44398 - DNA, 504 bp, Mus musculus
  source 1..504: mol_type = other DNA
tagtggcttttgataagattgtatacaaaaccagtcaaaggattttcaaatagattcctcgcctcccccagggcgccaatgtctccaagcaggggggagaggcgcgcccctaaagccacggatgcaaccggcgttgccgggcgtctttggcacaggactgcaatcccggactcgggcgactgaactcgaggccaacctgggtttgcggcaggcacgtctgctgtatacgccgcagcgtcccaccgccttccagggcggcccctacgtctctcggggagatcgcccgcgagcgtgctcaggcggttggcggccaacggcttgctaacgcggatcgcgaaggagccgggaggccccgccccttccgtagagatctcttggaaacggcgattgcgcacgcgcggcggccggcccgggcattttgctgcgtcaccagccgccgcccggcctcgccacccctcgcgcgcaccgggttgagggagccgctctccgcgcggtgcattctgg

SEQ ID NO: 44399 - DNA, 222 bp, Mus musculus
  source 1..222: mol_type = other DNA
ttttttttttttttttgccttatctacaaccaaaccgaagaaatagcaaaggttcagtggctcctggaatcttgagccttcacctgtcaagttctggaattacatctttacataagtaggtgactctaaattacccctcgagtgttatagtttcggacctgctgggccgcctggaaacttcctacggcggaggttgccccgccccagctgcaggaccggcgg

SEQ ID NO: 44400 - DNA, 504 bp, Mus musculus
  source 1..504: mol_type = other DNA
aggaccaatcgtcatgaatgtcatgaacctattgatgagagaggtcctatcaaaaccaaacagtaagtttttcttgcagttgtacacatggggtaataactggtagtaaagcaacattttcctacagtactacttccatttctgttgtattcagttattgaaaatgaagatacagaagttttgaaaacttttttaaagctgtgttacattatggattctctaaaatttacaggtttttattttcttattgttatataaagaaactttgttatattaagttcagtaaaaggaaaatatcaaaaaagaggattatttgttcttgagacttttttttgtttctctgtatagccctggctgtcctggagctcactctgtagaccaggctggcctcgaactcagaatgcccgctgggcccggcgagacaatattttttattgcagagatgatgttctgtgacagcttaacttgaacaagattgttttccaaatacagtaaagcatggag

SEQ ID NO: 44401 - DNA, 304 bp, Mus musculus
  source 1..304: mol_type = other DNA
aatggtctcttaagatcccttatgaaaaagttttaaggcaaagcttttgaaaagcagtacttcctcttcataaaaatgggtacttagcacacactatgctaggatgtattttgttgaaatctatttgcaaggaggtatttctatagtctaatgactatttacaaacagctctggacagctcaactcccaattctgagctctgtgacctaatcctgtgtcaagattaggacagaaggttacacaggtcacctctttctcttggaaactgatattttaaaggtcatttccaagtattaatatagtt

SEQ ID NO: 44402 - DNA, 297 bp, Mus musculus
  source 1..297: mol_type = other DNA
atacgacactgtttcatgaaagctaagccataattcctgtctaggccttgttggaaaagggagatgggggcgcacacctttgatccctacacagagaaaacagaaaaatatttgggtcagtttttaggctagattcagatcttgactgtgtgcaaggtcctgcagccaggacagtgatccaggcaggaccaggttgtccctaccgctaggacccagattcggatcggggccgggcactaggacccggcggccgcggcggtggagggcggtgctgccggccccgtttccccgccccct

SEQ ID NO: 44403 - DNA, 404 bp, Mus musculus
  source 1..404: mol_type = other DNA
gctgggcctgggcaggccagcctggtctacaaaggactgccaggactagtctgagctctgagctctccactaagcttgatgtctttaaatatatatatatatatatatatatactatttcatttatttctttttgtatgtgcatatgagaaaaatttttggtagctggttctctccttacttactaagacatttttcaggccaagtttgaaatcttgtagctgagatctcagacaaaacaacaacaaaaaccattgtcttttattaataataggttaattgtcttttcataataatcagaacttgttcatggagaaacagggttacatttgaaaaggattagacctaagaattcttctttctagcttgaactaagcctatgaaactcagtgacgtaaggagcag

SEQ ID NO: 44404 - DNA, 474 bp, Mus musculus
  source 1..474: mol_type = other DNA
tgagcatgctggtatccatggaagctagtggccatagaggtgactgtgagtcacctcatgtggatgcaaggctgggcctgggcaggccagcctggtctacaaaggactgccaggactagtctgagctctgagctctccactaagcttgatgtctttaaatatatatatatatatatatatatactatttcatttatttctttttgtatgtgcatatgagaaaaatttttggtagctggttctctccttacttactaagacatttttcaggccaagtttgaaatcttgtagctgagatctcagacaaaacaacaacaaaaaccattgtcttttattaataataggttaattgtcttttcataataatcagaacttgttcatggagaaacagggttacatttgaaaaggattagacctaagaattcttctttctagcttgaactaagcctatgaaactcagtgacgtaaggagcag

SEQ ID NO: 44405 - DNA, 323 bp, Mus musculus
  source 1..323: mol_type = other DNA
atctcaaagccctgtttctagatttctgagttcgaggccaggctggcctacaaagtgagttccaggacagccagggctatacagagaaaccctgctccatgacgcctagcaatgaagcgcggcgggctgtgcagcccgcaccgcctgcctgtaagtgtgcactggccacccctggccttcgaacatggagcctggcgcgtttccacgaactccgactgcgcagaggccgatcctctccccgccaaagctctgacgcgcgccggtgtcccgacgcgggatccgagtcgtcccggactggcccctccccggacctggccccagga

SEQ ID NO: 44406 - DNA, 430 bp, Mus musculus
  source 1..430: mol_type = other DNA
tagccctggctgtcctggaactagaccaggctggccctgggattatcttctgtgattacaaacaaactatggaatttgaatatgtacacacacctctgatcccaggattgggaattcaggctagcctggtctataatacacagagaaattctgtcttaaaaaatagtatatatatatataatttaaaaaatttttctgacgtgtgaactagttagttcttgcctctggaaagaaaaaaagtttaatgttttcatcacaaacaataaatgtttacctccccgaggccagcctggtctacaaagtgagttccaggacagccagggctagagaaaccctgtctcatatatccatatatatgagatataagagaaagaaaccctctttcttatatccattaggatgactgttctcaatttccacactgaggcct

SEQ ID NO: 44407 - DNA, 430 bp, Mus musculus
  source 1..430: mol_type = other DNA
ctgtctcgaaaataataataataataataataataataataataataataataataataataataacaataataataataatgagcacaagtcatgttgttaatcccagcactccgcgggctgagctgtctcaaactataataataaaaaactgatatacagtctagagtttgaggcctgcaaaggttacatagtaactcgtagacacattctgtccaaagaccagtgagggctgtgtgtcactcccccaaactactttaaaaaaatacttcttttatcttgccagccagccatgactacataatgaaatcagagactctgtttacacaggctctctgggtgtgtgacttagttgagatataatcagtacgtctcttctcgcgtctcgcaccacgtgctccgggcgcggaccagtcattggtcggtgtcc

SEQ ID NO: 44408 - DNA, 308 bp, Mus musculus
  source 1..308: mol_type = other DNA
catggatgctcatcccagagaaaagtaaacacgggcctttaggcaagtttaaaaggccctgcctaattgctctctgaggctaaaacaggaaatctggtgtctgaagcaaaactgaactttgcaaacgcttaattcagagatgaaggaatatttatttaccttgccagctttaaaacatatttaagactttggaatagtccactggaaattcgatcttgattcttattataattcagtagaaaacccatagcgttttggttttttactttaacgggctctgcccgccccgccccgccccgccccgcccc

SEQ ID NO: 44409 - DNA, 270 bp, Mus musculus
  source 1..270: mol_type = other DNA
ctgaagctgaacagagctgaacctctttccccttgacccagattcttctgcgtctcagctgtcctggagaactgactagtgggaaaacggaccacgtttcctcctaactccggggctctgcagttcagggaactaaagaattctcttctagaggaagtgaaccctccccctgctgaggagagagaagaagttcgattcagacctccacagctgtgaaggggttaagaggcagagccaattacccaggttaagagtcctctataaagggga

SEQ ID NO: 44410 - DNA, 470 bp, Mus musculus
  source 1..470: mol_type = other DNA
ttctggcccgttctcagagacctggtctctggtgagcgttctcagagacctggtcatgcttaggtgtgtatatgtatgtataaatatgtgcatgcccacacacatctgtaacagaccaccttttcttttccaggagttgaagaatgctttcaacatcatcacacaaaaaaaattaaacagaaactcttttatttatttatgtttcccccaactttggggcaaagttagtccatgtactcctgactgtcctagaaatcagtatgtagaccaggctggtctcaataatcatgttaccatgaagctgaagctagcctggtctacacagagaattccagcccagccaggactagggcccctaagacttcattcaaatcctcaggctggtaacaagcaacccaacctgctgaggcattactggaatttagggcaactgcacttaagtgaagagggagttcaagtaccttgaggta

SEQ ID NO: 44411 - DNA, 243 bp, Mus musculus
  source 1..243: mol_type = other DNA
accaggtctctgagaacgctcaccagagaccaggtctctgagaacgggccagaactttccacaagagagacagggtttctctgtgtagccctggctgtcctgaagctcactttgtagaccaggctggccttgaactcagaaatccgcctgcgccagccggggagaaaatgccttacagctggatctcatggaggcatttcctcaagggagtgtcaagttgacacacaccagggcttaaagcca

SEQ ID NO: 44412 - DNA, 406 bp, Mus musculus
  source 1..406: mol_type = other DNA
tatacctcactagatctatgtagttggctaggttggtctcacaaacttttttgtttgtttttcaaaattgtagaccagtttgaataggcctcaaactcagagatctacctctgtttcctggatgctgggactcaaggtgcgggaccaccaccagccggatccacaacttttaaaaatatgggtgaaagggggctgtttttgcacatgacccaggttccagggaatccaacgccctccttgggcattgggcgcctgcagtgcaagaccgtctggtgagtatcgatataaagccaggtgaccttcatggaagataagatcaatgtatttgcaaaggccctggccaatgtcaacattggctgatgggtttgctctagcaattggcccagctctctcctattcatagggc

SEQ ID NO: 44413 - DNA, 376 bp, Mus musculus
  source 1..376: mol_type = other DNA
actatataggaagttaggccagcttaggttataaagcatacctttaatctcagcacttcagaggccttgtgttcaaggccagcctggtctacctagctccagggcagccaggacagacacaggcatatctctgagtttgaggccagcctggtctacagattagtctaataactctatttttcaaattttttgattgggaaatctttaaagtaaacatgacacatacatgcaaatccccgtactggggttatagtccttggctaactagttgaattccaagccagctagggccaaactttccactgcctagaggctacagagactggactatggtctagggaccgcctagccacaaaggaggagccttgcctgtcag

SEQ ID NO: 44414 - DNA, 229 bp, Mus musculus
  source 1..229: mol_type = other DNA
gatgacagagctgagtttgggcaacctaagacatctcgtgacacactctcacaggagagggcagatgatcctcttggccacttgggccacactagatagaagtcatagacgctgggaatacccaccgggcgagtcccagtgcttagcctcgtaaaagcttggcttcaaagtctaaagttaattttgcttaaaagcccgtggcccccgctgattggaagcgatggctgcc

SEQ ID NO: 44415 - DNA, 310 bp, Mus musculus
  source 1..310: mol_type = other DNA
ccctacactggggttgggggagtcccagcttcagacgttacatcatggaaggtggcgggttttacccgtggatgcaacaggctgaaaggccagctgggagcagggggtggactgccagtccccgactcccaagcaggctgagagaagaggttcttagccagcataggcttctcagatcacagaaggtgatctaagaaggtggcttctatcaccttcaccttggtcttcgaattccctcgggcaagagagatattcatttaaatgtccgcatgacacatgtgggaatcccaccgctctgagtcaggcctta

SEQ ID NO: 44416 - DNA, 310 bp, Mus musculus
  source 1..310: mol_type = other DNA
ggggccatagacgcgtcagggggcccagctggtgcggtgatcacggctgctcttaagccagcgatgaaggctggggttcagcggctggaggtgaccacccctcagccagaggtgaccaccccacagatatcggtgttgtggaagaaatagccatgtctaattttgtgtcagaagttgaaagtacaacttctaactcctatcctaagggacgcaggtcccacggagggctccgcccgactaggggggcgggagcgggccctctcgtccagcccagcgctgaacgtggctaagctttcggtcgccccaccga

SEQ ID NO: 44417 - DNA, 336 bp, Mus musculus
  source 1..336: mol_type = other DNA
tgccgggcaccaggaggaacataattgttcttcccctggacggctgtagttgcctagcaccctaaatacatctcaagaccttaaggcgtggtgtcaacctgtttaaccacagtccccaaccagcctgcgatggggagttgagttcaagccaatacatacctaatgacgatcatttattaatttggtacaagaaggaagttgttttaaaaactagtttttttgtttgtttgtttgttttttttttaagaaagaaaaagacctgtagctactccaaggggtcctcgctgcctcggaggcgctcctaaagctgcctgctcgcgcgagagtttgcggtgg

SEQ ID NO: 44418 - DNA, 343 bp, Mus musculus
  source 1..343: mol_type = other DNA
agaagttctgaggtgttctacctcactgcagaatcataaggcccaggacccaaagactgaaaggttccttcatattaagggggcttttgtaagacttagactccatatagttcacatgtaatttcaagatttcttctgttcactgatgtcacctccacggccatgaagtcattaaccaaagacattctttaagaaagcattgcgtcagtgacctaaactttatcttcagcattctccggagaacccgttaactgagttctcacctcttccattttgggccaatggtcgaggcgggcagagggcggggcctcgccgaggaccctgggctgggcgcctgtgccgg

SEQ ID NO: 44419 - DNA, 369 bp, Mus musculus
  source 1..369: mol_type = other DNA
tttctaaaagtaaattttggctagtagtagctcactcatgcatgtctgtaatctcagcaaagaacaaacaaaccatgtcttatgtttggtttggtctggggtaggtagcccaggctggcctggaactcgtggcaaccctcgcctcagacttctttccataaatattagggaggaaataaggagcactgcaaattcaaggcctgaattgtcttgtcaaagtggatgaaaagagcctctccttctaaagggctctgagaaacttcctgtgccgttgacacgcccacgacgtcgcctctgcgtctacgtatcaggtcctgtgaccacagactcgctcccgatccctggcaacggcgtgacgtgaggggaccc

SEQ ID NO: 44420 - DNA, 529 bp, Mus musculus
  source 1..529: mol_type = other DNA
cttttagttggtttggtcattgttatcgtagcaacacaaagatgatgtagccaggacagttcttgaatacacaatcctcctgcttcaggttccagagcgcaggaatcttataaatgattcacacctggctctaaagcatcttttataaattttaccgggagaaacagttactaccctaatctggcagggtactcttcacggaggcttcctgaagcaggagtcttttagtctcgggtcgccacactccgagtttcctgggctcgggagtcactgggggagcgagacccgactccgtgccatgggcctgcgagagacccctcgggccgcccgactgcaacggagggcacagcgcggtccgctggcggagctgcggaacccgcgcgcggggtagggggagcccgggccgccctggccgtcctggcgcggggcgagggcgccgaggcctgggcagcctgcgcggacagcgagcaccccgaggcccggccaaggctcgccgccagggagcgctgcgggctcccgctcgcccgcc

SEQ ID NO: 44421 - DNA, 247 bp, Mus musculus
  source 1..247: mol_type = other DNA
tggtgtgggaaataagggtctaactgaaatccctccttgaggcctttggcaaagcagcctcccacaagaaggctgggtcccccttcctcttgcagatgtcagaggggagccctgttctggctcctctcaactctccagggatatgggctataaaatatttaagaggaaaacttcagggcagagggtggcccctccccagtcaaggccctgcgactccgccccagagcaggtgggctaaggggaaacc

SEQ ID NO: 44422 - DNA, 160 bp, Mus musculus
  source 1..160: mol_type = other DNA
gggtcccaaccaggctggcctcgaactcagagtgaagacacccagctaggtcctgtagcaagagatgagtctctccttcttagccggatggtgtgggaaataagggtctaactgaaatccctccttgaggcctttggcaaagcagcctcccacaagaagg

SEQ ID NO: 44423 - DNA, 273 bp, Mus musculus
  source 1..273: mol_type = other DNA
taggtgtctctgagtttgtgaaccaagtcaaaggctggcctttcaaaggagagtgaatctgcgtattatctcgaaccgttcggtacattaaagatgatgtgtaagctcctgccatgtcattttcatgtgccaggctggtctacagagtgagttccaggacagccagggctacacagagaaaccctgtcaacgtttcttttttccactgtgacactagttgaagagaaaactggggcgccccctggtggttccgggaatgcgctccggcgttcc

SEQ ID NO: 44424 - DNA, 391 bp, Mus musculus
  source 1..391: mol_type = other DNA
tatctcagagacacctagaagcttaagtttcaggaagcagctagctctgtattctcacgaataagctagttacatatgtactaatgtgaattgccctttaaaaaagagagtatctacaacaaatactatttgactaagaggtaatgtaattgcatccctgcagcaccctagcccatgactgtgagtcacaggtcgggaggctccgggatgctgaccacagctctgctgaagggctgggaggacagcaggccacgctgcagaccagctgccccgcggcgacctcgtcccagcgctgcaccaggtctggcacccgagccgtgggcgggacacccagggtcgccccggagcttcacagagcggaggcccagctagcccccgccggcgcccccgt

SEQ ID NO: 44425 - DNA, 323 bp, Mus musculus
  source 1..323: mol_type = other DNA
gtgctgggaatgcaggcatggactgtcctccctggcctctagaatagtttttacatgatatcatataagtaaagtcactccagaaacatttgcagtgactgacctttcagagaactgggactttgattctacatctattatatagagaatgagataagataattttgaaagttaatgtgtatgtatatatgtgcacacacacactttttgttttgaaacagttctgaggcactaagattaccgggcaagcactctctcactgagatacagccctagggtagtgcagaagcctgcagtcctcctcaagtggagacagggtgaca

SEQ ID NO: 44426 - DNA, 439 bp, Mus musculus
  source 1..439: mol_type = other DNA
tgctgggacccagagctttgtgcaacttgcacaagcaaggactgcagagcccagcgttgcggtgcattggcggcctcagcagacgcctccacaaggaatggccaggctaaattgtaaatcttaacatctacttcagtaaatgtgaaataaataaataaataaataaataaataaataaataaataaataaatgccgccccgcccaccgcccggcccctcccaccgcccgggccggccccgcccctagccttgcgggcgtctgtgggtctgcagccgcagggtcatgggtggggacagctcaggccctttcaattccggaaccggcgcacgcctcaggacctgagtcaccaactgtcaccaggggcgtgagcctgcgggtgctcgcggactacgactcccagcatgctctgcggcagccgcacttatcagggacaggagc

SEQ ID NO: 44427 - DNA, 647 bp, Mus musculus
  source 1..647: mol_type = other DNA
tcactttcaaccactcaactactggttaataggagggggtcgaacctgtgcggggaaaccccattggatttcgagtccaaccgcgcgcttacagaaagggtccgcacgggtgactgggtgcgagcggaccggtgcagggtcgcggcccgaggctcgtacccagagccgctcccgccacaatgcttgaacctgggtcgaagaatcggggctcgccagccgactcctaaagagacccctcacctgacccccccgggtagcaccaggggtgctgggtgcaccgggattccacgggaacgtacgtgccgggggccactcggggttacggggcggagctgcagacccggggctcccggcttccccgtggagtggaacagtaagccccactgccgctgcgagaccaagtcggggagggctccgctgtcctacagccgcgtcctgcgagacccggggaagcagccgggctgccgctgcggggaagtccgccgagcgcgctcgggctcgcccgcctcccaccgccgctgctgccggggtgtccgccgagcgcgctcgggctcgcccgccaccgctacgcagggccgccggcagggggcgctccgccggccggggcccaggcggcgggaggcggcggtcgtggcggcgctgagcgg

SEQ ID NO: 44428 - DNA, 334 bp, Mus musculus
  source 1..334: mol_type = other DNA
ctttcacctgctccaaggcaccgttgatatgaaaaagttctggcaggccacgaggacagcaacggaggttcgatagaagcgcaggcagtgcgtctccgcgcccgtccgtagcgcagccgccagggctggagccccacctcctgtgcggccagaagcgcgttcctgccactagggggtgaaaaaaaatcctttccgacagttttcttttgagaaagaggaaggacgggagcgggcctctcttctgcctcttgagctcggaagaaaggtttcctgagccgaggtagggcgccccccccccacctcattaataatgtagtgatgttcatgcgccatg

SEQ ID NO: 44429 - DNA, 221 bp, Mus musculus
  source 1..221: mol_type = other DNA
ttgtgactcaaagctcagctaaaagacagaagggagtgcaaaggcctcctctcaccttttactgtattttaaaagcccttgctttgcttgggctctaaaactaatgcaagtttttgtttgtcaccctggaggttaacttctctgtacccttaaagaaaacattctattcagctgtgggagtgagggcagacaggcataagtctcttccccctcataaacag

SEQ ID NO: 44430 - DNA, 553 bp, Mus musculus
  source 1..553: mol_type = other DNA
ttagctgagctttgagtcacaaaagaattacatggcattctgagagactatttgcaaaagggcgtcagaatctttttactgcaaattgtcccatttttggaaaataaagaatccttccaaaactcaccttgccgggtccgaggaaggggcaggtggggggcggcagggcagctcctgtccctgataagtgcggctgccgcagagcatgctgggagtcgtagtccgcgagcacccgcaggctcacgcccctggtgacagttggtgactcaggtcctgaggcgtgcgccggttccggaattgaaagggcctgagctgtccccacccatgaccctgcggctgcagacccacagacgcccgcaaggctaggggcggggccggcccgggcggtgggaggggccgggcggtgggcggggcggcatttatttatttatttatttatttatttatttatttatttatttatttcacatttactgaagtagatgttaagatttacaatttagcctggccattccttgtggaggcgtctgctgaggccgccaatgcaccgcaa

SEQ ID NO: 44431 - DNA, 308 bp, Mus musculus
  source 1..308: mol_type = other DNA
cctcaaactcagtatgcagctgagggcgaccctcctctttctgcctccgacacacccggtctgatgtggagctagggcctccacccagagctgcgaccaagctggcctcctgcctgtcaaagcttagagagtagaaagtacaggttcggggtgaagggaccggcaccctgggctctgtatcccttcgagctcctccaggaggaccagctctgcctggaccactggtttgcactcagtggtcagggccaggcgggcactgggaaccatgctgcccccccagatcctggtatctcagcactcggaggggg

SEQ ID NO: 44432 - DNA, 203 bp, Mus musculus
  source 1..203: mol_type = other DNA
attcagcatcaggaaactattgcaaaatgtaataattacttcggccctctatgatagagatgaagactggagtattagaactctaataacgtttcgcaaggaagaatattgaacgttctctccaatcccacgtgggaggagcagctgctcccgcctcttaagtgggcgcggcgctgccccaacaggcaggggcggggcggggc

SEQ ID NO: 44433 - DNA, 221 bp, Mus musculus
  source 1..221: mol_type = other DNA
actaagtgtacgaaggaaaaaaaaaaaactcaggtttgtgtgccttccattccagggtgcacctacgacgcctgcaggagcagatggagaaatgaccgccttaatggtgcgttcacagcgccactcctacgtaccactgcgtagaacctgacgctgagcggagttccggtcctactagcacgcaagttggcgtctctttcttccgcaggaagcggaagaac

SEQ ID NO: 44434 - DNA, 345 bp, Mus musculus
  source 1..345: mol_type = other DNA
atggccagctatgaacttggattcatacccataggcactggagcgtcctccagaaaggaggacagcccttgaggagcctcgttgccacagtttgccagtaacactgtccgcctgtcttgcctaccacagacagtttaatgtatttgtggtgaggaaatagaaatcctttctgattaaagacatttttttttttttacttaaaaaaaaaaaaagatccatcactagtaatttttactacaagccacacctattaatagtagtaaatggaagtgtttcccatactggaaacaggtgctggtgttgaaataatacgccctaagggacgacacacgggccggctcggaa

SEQ ID NO: 44435 - DNA, 397 bp, Mus musculus
  source 1..397: mol_type = other DNA
gtactgaaaacttgaaatgatgcagctgtcctggaactcactctgtagaccaggctggcctccaactcagatgccttcttaagagacaatagtgctattttattctagtctagtaggaatctggcctttttctattagcaggccatggtacatgtataaccagttttgaccagccaggccggtcgcgccggccgacaggggaagctggagctgtgaatgagaggtttttcccggagagaccacgccggggccaccgcgtgcccggcgattccggcgtgcgcagacttgggaaggcaagtcctcccagggcctggcggacgggcgcgaggagcaggcctggccgacagcaggactcattgtcccagtgtgccctgcgcctcagcccgcgcgctcgcag

SEQ ID NO: 44436 - DNA, 243 bp, Mus musculus
  source 1..243: mol_type = other DNA
ctggagcaggatagcaaaaaaagttacagaggcctaagaccctgttgttcttttcactgtcacagtgccgagtggtccggggaacccaggtctacgatgggaagtttgccatctttgtcatgttgaactaccttggtggtctaaaagtccactactctttaagcagtagagggtcccggggagagctggggcacctgttccagggcctaggggagtgaatcaggatgtcctaccctcccccac

SEQ ID NO: 44437 - DNA, 327 bp, Mus musculus
  source 1..327: mol_type = other DNA
tcccaaattcttggaatctctcctgatagaggacaggattcatccaggactcctgaagccagagccccagaggcaggggaggagccttctgccacttctagatcctggaggctgcccctgtgtcccgggccccatgacctgtggggccttggcagaggattgggccttccctgggacaccctctctctctctctctctcacacacacacacacacagttgggcaggagggcaaacacatctgcctacagggatgctgtagcctagcgcgcgcgcgcgcacacacacacacactctctctctctctctctcacacacacacacacaca

SEQ ID NO: 44438 - DNA, 418 bp, Mus musculus
  source 1..418: mol_type = other DNA
cagggtttctctgtatagcccaaatatcttaaaagaaaagttcatcaaagttccaggtcagcctggactacttgactatgtttcaaaataaataactatctgatagacttgatcagttaaattgtgttggtacatacaatgtactaactacagtgcttcatctccagcgtggtggcctctatttggaaagacgcatttacaaatggtttatttcttctatttctaattcctacacttagaacacatatttcaaagaaataaatccgtcttaaggtggtttagcgccgcctttagtccgtctactacgggcaagagagaacctctccaagtcgtactctagggagtgtggataacttccgctctggaactatcgtaaaccggatgttaatgtaacattttaatcttccgccggaaggtt

SEQ ID NO: 44439 - DNA, 449 bp, Mus musculus
  source 1..449: mol_type = other DNA
ataatggaatctttatttttgcgcatatacccatgcatgttcatgttagcagataatatagacggctgtgatgtcattcatttatatgtagttttcaagtatgttattggatctaaaaaaaaattttaaaaagcatttttacaaagcatgttatcaacaagttgaaattgacaagcttaagataactgacatttagctcttgagagaagtttggctgccactgaagcagtgactcctgactggccaagcagtagccaacaaaaaaaaaaaggaaataatttttcagcacctattttatacggtacagactaacacctgatacaagtatccagtcagtaattagtagccagctgctatccttattgctactaatattaccaatagatagattccaaagctgctcctgggagctctcgggagagcagtaggtaaaaatgtcccttaccacc

SEQ ID NO: 44440 - DNA, 555 bp, Mus musculus
  source 1..555: mol_type = other DNA
ctctagagaaatttcaatctctagtaaatgattaagagtaatagcaaatttttctatcattgtcctttaccttttatatacaagactacaatgtttatacttttgtgtttaagtagacgctttttaaaaaattcatcacgcagactttggtgcatgcttcctccggagttccggatcagcatgagaccttgtctcaaataaaacatggtttttcagaaaggcgcgggacaaaaccctgggttttccccgggaatgtggtccccattctcgtggccacctttcaaggcccactgtctagataccgtgctctggtcaccagtgtgtgaccccggtccccgggaggcagaggcctgtaccatccaggacccggcgacgccccgccccccagcttcgcaaccccgcgacccggcgacccggcgacccggcgacccggcgacccggcgacccggcgacccggcgaccgggcgacagttgacagtctcaggacgcctgcatgtacacgtcacggccgagccccgccccgccccgcccctccgctctgggccgctctagccc

SEQ ID NO: 44441 - DNA, 298 bp, Mus musculus
  source 1..298: mol_type = other DNA
acaagataaaagttgtttaaccagactggccagccagtgctgggattaaaggcgtgcaccaccatgcccagcagggtctttactttcttaatttgacacagaaagcaactcatggagatcctcccgattttgttaaactgagtatcccgggttagcactgtgctgagattgggagtgccacactcaaattcggaaatttcccaatactggttaaaatttccacgcacatgcctgtcagtgatgcagctcacatagcccacccaccacggtaggcgggtgatcttgcgagccgccccgg

SEQ ID NO: 44442 - DNA, 429 bp, Mus musculus
  source 1..429: mol_type = other DNA
attgccagcaacgactctattatctagccaaagaatattttccagcctggactagagttccaggacagccaagattacacagagaaaccttgtctcaatgtgagtatgtttccaaaaagcaggcgagagtgctggagaaacagcacccaagccgctcttgcagagaccagagttcagctccaggggaacctcagctccagggaccatttaaaataaaatacattattctttttcttttaaagattcccaggttttgctttttaaaagagactctcttgtccaggtggaattttaatctcacccaaggttccggcctgcggagcctaaaccaggaactgcgggaaagttgtgcagctgccccgcggctcgcccgcccagggcggggcctctgaggcgggagcgcgatggtccggtccgccctcgtgacgt

SEQ ID NO: 44443 - DNA, 365 bp, Mus musculus
  source 1..365: mol_type = other DNA
cttgggtgagattaaaattccacctggacaagagagtctcttttaaaaagcaaaacctgggaatctttaaaagaaaaagaataatgtattttattttaaatggtccctggagctgaggttcccctggagctgaactctggtctctgcaagagcggcttgggtgctgtttctccagcactctcgcctgctttttggaaacatactcacattgagacaaggtttctctgtgtaatcttggctgtcctggaactctagtccaggctggaaaatattctttggctagataatagagtcgttgctggcaatccaggtttcccctcctctggagggagaggaggaaggcctatgcaaatgaccatcccttt

SEQ ID NO: 44444 - DNA, 231 bp, Mus musculus
  source 1..231: mol_type = other DNA
acaaggctttgttgggggatgcaggatgcctgggtccccagtcctgacaggtaggaggaactgaaaggctctgccttcagactctacctcattctagtcttaagaggatggcgcgtccaaagtgatgatttggagattggagggccggccaattgctgaccagtcgctgggtggtgctttcctgggaagggtcgtcaggagctgggcggccccgcagcggccgcgtcttcc

SEQ ID NO: 44445 - DNA, 207 bp, Mus musculus
  source 1..207: mol_type = other DNA
caaatacttgaaagaacacaaggctttgttgggggatgcaggatgcctgggtccccagtcctgacaggtaggaggaactgaaaggctctgccttcagactctacctcattctagtcttaagaggatggcgcgtccaaagtgatgatttggagattggagggccggccaattgctgaccagtcgctgggtggtgctttcctgggaagg

SEQ ID NO: 44446 - DNA, 250 bp, Mus musculus
  source 1..250: mol_type = other DNA
tgagttcgaggccagtctggtctacaaagtgagttccaggacagccagggacgtgtaaaaacatgtagtgcatgcaaatagcattaaagtcattttgagacttgaattgttttaaaaagtcctggctgtcctggaactcactctgtagaccagactggcctttgttttaaagtagaacatattgtctactactgaagtactaatatttccccacttctcaatttgagagggaccggaccgggctttggca

SEQ ID NO: 44447 - DNA, 248 bp, Mus musculus
  source 1..248: mol_type = other DNA
agactgggaatcctaattcaagttttcatgcttgtccagaaaacatactggctgaatcatctttccagtcctgcttttatctttaataaatggtaaaaaggaaaaaaaaaaaaagcctgcaaggctagactgacttaaacttccaatttgatcacagtggctcttctaggctagcctggtctacataggcacagcagcagcagcagcagtaacagcaggagacatctggtcttcagcagagaactctg

SEQ ID NO: 44448 - DNA, 351 bp, Mus musculus
  source 1..351: mol_type = other DNA
gggaccggaccgggctttggcaaggccaagaagttacctcgccggccgctgaatccccagggctgccccgaggccacggggacaggtgaccgactcgcagtgcgccgatctttgcgcaccccaacctgggcggccgagagtggtcggcgtgccgagtagacctgcccactttccctggggcttctttgcccatgccaacacgcgccctagggtgggccttgagcctgcgaggactgtctgggataaggcttatgcccaaactttaagagcccatgactgtgagcgtcttacactcgcctgaggactccacttccggcggggaggggggcgggaccccagcccgctcacgcc

SEQ ID NO: 44449 - DNA, 365 bp, Mus musculus
  source 1..365: mol_type = other DNA
aaagccttacagttctgttctctaaaacgttaagttggtaattatggttagggggcgtccctcctcctagattagagaagtgggaagattgagggggcccgccccgtgatgtcatccaagctaattgcatttagctccctgggtttgtagcccaagggggtgcctgcggccaacagccacccgtgtgcctaggacattccacccctttgctctcctcagccctgcagggtggtgagtagttaacacctcttaagcgattgagaagagccccgggaggtctccagtccttcagcctcagtacagacggcagaaggaaagtgcagtgatccttcaggatcagcatcaaatcccattggcagcccagg

SEQ ID NO: 44450 - DNA, 402 bp, Mus musculus
  source 1..402: mol_type = other DNA
ccgccgtaagcgagctgaagctcctcgtcgtcgctgctgaaacggagatgaagggcggcacgcagaggagccagcgaccctgctcgcccagacccttccctgtcggctgtccagccgccggactagctagccccctaaagagacgcgaccttccacgccgccgatccgccccctgtgaacgcggcgtaagggccgggccacggctaggggtacctggttccacggagctcagaacctagtccagcgtaacagaaccccgcactcatctgcgtgctgctttgcatcaaagccttacagttctgttctctaaaacgttaagttggtaattatggttagggggcgtccctcctcctagattagagaagtgggaagattgagggggcccgccccgtgatgtcatcc

SEQ ID NO: 44451 - DNA, 198 bp, Mus musculus
  source 1..198: mol_type = other DNA
taaatcaggtagctctacctccaattgttggctccgcagccaatcgcggccgctgacgacacgggggccggggctataaagggcccggcccgggcttgggcccccccagctgcccgccccggccgcccgcccgccccgcccgtgcgcccgccgcccccggcccccggccccccctcggccgggcagcccccggcggga

SEQ ID NO: 44452 - DNA, 307 bp, Mus musculus
  source 1..307: mol_type = other DNA
ttaatttactttcttgaggaagttagtgaattattaaagctacctctcaagcaatttcatcccttcactgatgcaaaaacttacccaatttttaaattagtctaggaaggggtctgagctcagtccctcaagaaatgggagtccttcccttctaggagcggttttagtttttaaacttctgcaagctctagtaactttttaaagtttcacggggcccatacctgccagcttcaggagcccgtccggcttggggcacagcgctggctcattatgggagcgccgccgccgctgactaatgggaagagcc

SEQ ID NO: 44453 - DNA, 139 bp, Mus musculus
  source 1..139: mol_type = other DNA
ccttgattttaaaaattcgagtgcggggtcttaaccccttctgggttatgtttgggacatattcagcaaaacatgcaaaaacttgtggagctccacgggctcttcccattagtcagcggcggcggcgctcccataatga

SEQ ID NO: 44454 - DNA, 433 bp, Mus musculus
  source 1..433: mol_type = other DNA
accaacttaacgtttagagaacagaactgtaaggctttgatgcaaagcagcacgcagatgagtgcggggttctgttacgctggactaggttctgagctccgtggaaccaggtacccctagccgtggcccggcccttacgccgcgttcacagggggcggatcggcggcgtggaaggtcgcgtctctttagggggctagctagtccggcggctggacagccgacagggaagggtctgggcgagcagggtcgctggctcctctgcgtgccgcccttcatctccgtttcagcagcgacgacgaggagcttcagctcgcttacggcggggatgctctagcaccgcctcctccgcgcccgccgcgcaagtttccccccccccggtgaccccggaagtggaagtaagcggggaggcggagccgggggagctgctcctgta

SEQ ID NO: 44455 - DNA, 404 bp, Mus musculus
  source 1..404: mol_type = other DNA
tctggccttgaactttgaatgactatacttataggtgtatatgccttcacctccatagtgctgggaaggacaggcctcaccatcatgcctagacttctttgtagcctgggaactgagcctgagttcgtgacacatgctctaccatagatctgcatgcatttgcttgcctagtaggcacaaaatcctgggtctggtgccagaactgcataaactagatgcacttgtgcacaccggtggtgccagcacttgtggaggcaaaatgacctgcagttcagggttatcctcagctacatatggaattccaggccagcctgggctcagatctctgagtttgaggccagcctggtctacaattacatatgtgtgcccttcccttcagattcagtaagcaactccggtcggtc

SEQ ID NO: 44456 - DNA, 222 bp, Mus musculus
  source 1..222: mol_type = other DNA
gaccaggatggcctggacacatggtatgtctgtcctggccaccatgaaacaacagcaataaattgatggtgtttataatttttctagttggaattagtcctggaagcattcctccttagtggttccctagaaggctgcttgaggtgcctaaaatgctgctctcattctcttcttgagttcagagagcttctgctaccctagtaacagaagtgtagtggacag

SEQ ID NO: 44457 - DNA, 375 bp, Mus musculus
  source 1..375: mol_type = other DNA
ccggtcggtcctgttcctctgtgaaccaccagcggcacacgggagaaaggtatttctaactctcgcctttacctggttttgccatctctgatgaaaagaggaataagatacggaaccactggctaatccaggagcaagggagcactcaacccacaccttctgcgggtggctcgggaagagagaaccagacggcgcctgggttgcagagggctccgggaaccctgaggtccggctcctggctcgagccttccaggcagcggccacgtggccttgtcctggcggggggctcacctccccctgctagcctggtgacggcggccaccctgcgggggaggggggcggccggagccggggcggggccgtgcagcaggcggg

SEQ ID NO: 44458 - DNA, 301 bp, Mus musculus
  source 1..301: mol_type = other DNA
gtctgagtaagccaccccacttctcccctttcccaggaaattggggatgtggggcagctgcagtcaacacaagcttccaggtttccccctttgggtgagcagaaagtaagttcccccaggccagacttccagatttcaggagcagaagctgaactagtgagtcctcagctctggcaagcagtgtcatgaggctgcagagaggggcagctgccatccctcttagttcccacctcctcccagaggctgcctgggggtgggggtggggccgccctctgccaaaacctaacttcagccaggcagg

SEQ ID NO: 44459 - DNA, 148 bp, Mus musculus
  source 1..148: mol_type = other DNA
gtcttcaagcctggcttcccatccgagacagggctgcactcggatcagggcccaggaactttccggtcctcagacctgagccgcgggtctgggcatccccggaccctgggtcttgcggaggaggcggagccggagccggagccggtgc

SEQ ID NO: 44460 - DNA, 398 bp, Mus musculus
  source 1..398: mol_type = other DNA
gcagacctgggtttgtacacacatgcatatgtacatgcacacacacacacacacactcataacattaaaatcagagtttgttgagatgaatcagcaggtaaagatgtttgctgacaaacctcccaggagctgtcctcaagagcatacatggaatgcatatatgcatacatacataaatttttaaatacactatttcacaggtttttttaccagcactctgtagctgaggcctgtaacaaaggcattttgctgattataaaatcccagagggtgtttctagcttgcacaacctgaacagatctgagaacagtaagtctgctctgctcccagctttgaaaagccagtgacactgtatgacccatgattctagaagaatacatagacttacatctgccagc

SEQ ID NO: 44461 - DNA, 367 bp, Mus musculus
  source 1..367: mol_type = other DNA
acctggaagttaaactcctagatcttgtagttcatctcttccagagcaccaggggactagaccttatctaaaatgttcaaaaaagtttcccagatgattcacctgcctgtctcctagagaaatggctgactgtcacaggtgataagcaggcttcatgcttcttaaagaccctggttctaattttattcatttaagcaaaagacagattggctaaaattaatgaagtaaatctaaggccaccttgaggctctgtctgctcaagcaggaactaaaatctaggcttgctgcagcaccctcaggactgtgtagctagccagagacttcagattttcagcagcagctgcagcattatttaactcgccagttt

SEQ ID NO: 44462 - DNA, 375 bp, Mus musculus
  source 1..375: mol_type = other DNA
ctttaaagatttgctgaaaattaatagttacttgtaaaaaccagaaaaattattttttaaatttagttttctatgaagacgaagaatcacaaaatacctatgttagagttcaaaaaattaactatttaaaacctaagatagtctttaattatagtggtaataaaactatcttttagagccagagctccaagggtttatacatttgcttttgtgttcataaatatggttaaaacagaaatatatttgttatgttgcaaagggagactgagacttccttagtttacacttaaaactctaagaaagtttagcatatgcaaggcgtagagtcacttcctggtttaaacaaaagctaccctgtgggcaacatctcccgcc

SEQ ID NO: 44463 - DNA, 691 bp, Mus musculus
  source 1..691: mol_type = other DNA
actgaaatttcagagatatgtcatctaaaatctgtcttcaattcacctcccatctcaaacaaaatctgaaaatagtttttaactttaaagtatatggataagagtaatttttatttttatagttcaaacaaaaccaagtatttctatttatttaattgcaaagtctcctgatatttaaacattatttttctgttaagttatctaattgcagcagacattagatagaactgttatttgtcctgagatcttacaaacaccatttcttagagaaattggtattcatgaaacactatttagatttagtttcaattactttcaagaaattcaattaattagtatttttatcttttgaagccacaatgaatataagtatttcataaaataattttcttacttaggtacaaactaacttgagatattgagatccaacaacgctattgactaagtcatttaaaatatttgaaaaaagatagacccatgtttcaaatgactaaaatgccttcactaattggaacagttcacaagagaagaatatgagttcttgtcagagaattggaacttactgcataaaatatccatgtattgcttaaacttattaatattaagtttctatggccaagaaagacaaaatgtgtttttctagatgtaattttagtttaatatcttctatagatttgttagaatgaaacag

SEQ ID NO: 44464 - DNA, 518 bp, Mus musculus
  source 1..518: mol_type = other DNA
tttgaaactcatacctaactaaatattttcaatctaacttttttctataaatttatcataaccctaaagcaataatttttgtcatgattaataagatttaagaaatcatatttatagtagcaagctttttttctatgcttagctgacaacctgtatttaccaagaaacagatttttatcttttcagctaaaatggccaatcatcttatactaagaattatttgctctttattcataaaagacaagggtcttttcctagtgttatgtgcttataatgcatgaaagcgcactgtactccttttttaacttatgcagccctcatcatataacaagggagggagcatactttattatatgtttctgtcaaaacaacttaaacctaacttcctaaaactatttaaatcacttcaggatttctgtacaatcattaattcatctaaacaatattgttctatgcaagttcatcttcatgttgatctgcaggaaaattgcccaataatgttacatttcacagtttct

SEQ ID NO: 44465 - DNA, 308 bp, Mus musculus
  source 1..308: mol_type = other DNA
aatacctaataaaaatattttaaaacctgagtgactctccaataaaaatttttaaaaagaagttaatgcataaaaattgctttcattaatagtatttatgaagaagcaactatagaataaatgtgagtagattttatggagagacaagtctaatttttaaatcattttctacattttctatgtacatttggctacaggagtagattctaactgtttctaattatacttctgtctcctaagctagagcagaggatgcagatgcatgtacagatatctctgtgttctctctcttttgagctgacagttga

SEQ ID NO: 44466 - DNA, 524 bp, Mus musculus
  source 1..524: mol_type = other DNA
ctaggtcccccagcataaaaataattttcccttgtggacattccctgggggtcacagccccccacccgtgggactcgcacacacagtggtcagacgggtgggcagctcagggccatctgtgaggggagccgagtgcgccctctgctggcctgtgggtgtcatggcggcggcagtacgcgccctgacttttcccgggaccccacggttgggcggggacggcgtcagctgagacgcgggagaccatagtggggtctcacctgagtgccctttatgactatttttatagattataatacgtgacacagtgatgggcggggcctgcggcggctgcagtcttctgcccgcagcgcccctccggatgaggtccccgcccaccgcgcagcgtgagcctcagacgctgcctctgtcagttacgggcagagggtctcccattggaagcctctgccagtcacggctgggcgggcgatggcactgttccctgctcctggaaacagggagtggagaagcttctcgattggaagccc

SEQ ID NO: 44467 - DNA, 284 bp, Mus musculus
  source 1..284: mol_type = other DNA
taattgtagattctgacaagttgacaatgagtaccaaccatcacagattcacctgagatcattctggcaactgcttttataattacgtaaatgtattacattacattaactcttatgtgttactgagcctgctgggtaagctagtttcgcccagggctctgcgtatggtcactgtatagtctgtgctggtctagaattcacagtcctcctgagtcctgaaattacaggtgtactgtgcacagtagaggctaagaaaaccagggcttgatttggatgttaagctg

SEQ ID NO: 44468 - DNA, 357 bp, Mus musculus
  source 1..357: mol_type = other DNA
ctaagagcgagttctcttttgccataggaatactggagattgagctcaggtcctaggactcattaccaataattgcttttaaatctttggattacaaaattaccatttgtaaaagggcaaaacccatatttcttgggtttaatctttttaaaaattttgagtatgaatgtttaatgaaaagtgcatttaactggtgttcttagtatgaaacttcatactttgttctgaaagttctctttaaagtagagagaagtctctgtttcctggaagacagagcgcactaagctggacagagcagcttccggcgcgggtcgcgttgccgtggagacgggggaggagccgccgtcggcgcagggc

SEQ ID NO: 44469 - DNA, 299 bp, Mus musculus
  source 1..299: mol_type = other DNA
acaatagagaatcaggcctaagtgcagatgtttctagggttacatagtgtaaatctgttacaaaagatagtttgcaaaaaagactttattaagtcattacaaaggggaaaaattacttttgttgccttcaagatctgaaaaattaaaaccattgttctttggcagttcttggattatccaaaagccaggctatcacagataattgtgacacccagaccaccccgctcgcgccggcgtggcgcgggtcccggacagcgcgctgctggctccgcccctcatgacgcgtgggaacgcggcgc

SEQ ID NO: 44470 - DNA, 308 bp, Mus musculus
  source 1..308: mol_type = other DNA
ttttgtttcaagatctgaaaaattaaaaccattgttctttggcagttcttggattatccaaaagccaggctatcacagataattgtgacacccagaccaccccgctcgcgccggcgtggcgcgggtcccggacagcgcgctgctggctccgcccctcatgacgcgtgggaacgcggcgcgcagccgcctttgagcccgggcgccggctcccacggcaccggtcgcgacgccatccggcccacgcggaacccagcgcggcggacagcgccgcccaaagcagcttctgccaggcaccgctgcggacaccc

SEQ ID NO: 44471 - DNA, 630 bp, Mus musculus
  source 1..630: mol_type = other DNA
cacagataattgtgacacccagaccaccccgctcgcgccggcgtggcgcgggtcccggacagcgcgctgctggctccgcccctcatgacgcgtgggaacgcggcgcgcagccgcctttgagcccgggcgccggctcccacggcaccggtcgcgacgccatccggcccacgcggaacccagcgcggcggacagcgccgcccaaagcagcttctgccaggcaccgctgcggacaccccaggtcctgcgcgctgcgagggcggtgcctgggtcccccgcggtgcttggcggggggggggggggagagccgcgccggagggccgggcctcggttacggcggctgaggagagccagcccgagcggggggaggggggcgcaagcgcaggccgcggccagcgacgccgggcctggagcgggcgcggggggacgcggcggccgaggcgcagggccgcccggcggcgggcgctcccagcaagggtacggcaagcgcggggccccggcctgcgtgcgaggactgcgcgctaccccgggagcgcgggcggcagggcgcgcgcggggggcggcagaggcgcgaggcgcgcgggcggccggcgggcagcaggcgggcctgcgccggctctaggcggccgacct

SEQ ID NO: 44472 - DNA, 521 bp, Mus musculus
  source 1..521: mol_type = other DNA
tcgagggttgccttgaacacaggagatccttggtctcagctgtatagccctggctgtcctagaactgtagagcaggctggcctcgaagtcagaaatccgcctgcctccctttgataaaaggcacagttctatttgtccactttagtggctgtaaccttattttacacaataaaaatgcttttatatttatttatgcattcccttataaatggctctctctggaagagtgtggctcgttgagtgccacactccttctttagggttcctggtaaacaaaggcttccaagtatctgcgcgcactctgatggtcgcaggtccggcggggtggggccgagctgcgcgcgaccctcggcgcgctccgggaagttggcccgagcgaccgctctggtcacctcactgcgggctctatgacaccgcgctggctggcgggacagggaggagtcggcggagaaggcggagaccgcccatctccgagagcgtcggcgcggacttctcgcggaaccgtgtcgcgagcttagcag

SEQ ID NO: 44473 - DNA, 289 bp, Mus musculus
  source 1..289: mol_type = other DNA
tttctagttccagaattcaaaatactgtgaccgagaaattaaaagcagtatttagattgctctctttagggtaagggaattttcctcaagcctcataggaaaaactttgtccggggcacaggttagagcgctcaggtctaggatttgaacggccgtgcaaagtttggaatacgtgcttcgctcctcgcctggccgcacggtccgtggtcaaagtggccggcattttgccgggcggctggattccctagttttcttacaaaacacgctccctggggcacaaagcccaagt

SEQ ID NO: 44474 - DNA, 575 bp, Mus musculus
  source 1..575: mol_type = other DNA
ggttgaggctgcagccccgggccccgcgggcggggtggggaggcggaggatcaggctgcatcctcccccaagctagggagccggatgcgcacgtgctgagtcggggcgaccgagaccccccacgccgagcttgggggggggggtgttgttggtatcgccccctccttctcctccccccaggggtgaaagtgcaagaggaagtgcagccgctgccatctttcctccgttccgaacgcacggagcctggggccgcagcgccgccgccactcgtgcctggcccgctcgcttcggccgccgccttcgccgggctccaagactcggcctacgccaccgcccctgtgcgcgcggaccgccggcccccaccccggctcgcgctttgcaggggacgcagcgcgcgcccccagtgggcccgggaaaagcctcggagcgcgcgcttgcgcttgcgcggcggacccctcctcctccccgcgcgcgcgcgcgcgccttttggccgcgcgccggcgccgcctggcgggcgggaggggaggtggcagctggcacctcttcaatgtggggggcagtgccccgctgggtct

SEQ ID NO: 44475 - DNA, 664 bp, Mus musculus
  source 1..664: mol_type = other DNA
cccagaccaccccgctcgcgccggcgtggcgcgggtcccggacagcgcgctgctggctccgcccctcatgacgcgtgggaacgcggcgcgcagccgcctttgagcccgggcgccggctcccacggcaccggtcgcgacgccatccggcccacgcggaacccagcgcggcggacagcgccgcccaaagcagcttctgccaggcaccgctgcggacaccccaggtcctgcgcgctgcgagggcggtgcctgggtcccccgcggtgcttggcggggggggggggggagagccgcgccggagggccgggcctcggttacggcggctgaggagagccagcccgagcggggggaggggggcgcaagcgcaggccgcggccagcgacgccgggcctggagcgggcgcggggggacgcggcggccgaggcgcagggccgcccggcggcgggcgctcccagcaagggtacggcaagcgcggggccccggcctgcgtgcgaggactgcgcgctaccccgggagcgcgggcggcagggcgcgcgcggggggcggcagaggcgcgaggcgcgcgggcggccggcgggcagcaggcgggcctgcgccggctctaggcggccgacctttcttccggaggagcctctagcccggggcctgggtgaggggccaggggtcc

SEQ ID NO: 44476 - DNA, 545 bp, Mus musculus
  source 1..545: mol_type = other DNA
gcgccgtactggctgcctgcagctgctgatgtgggaggcgcggcggcggctccaggcggcggagctggaggcagccgcgaactggagatgcactccaaagtgttcggagacatcctggagcttccccgagctcatgacggccgccaagttcctgctgatgaggtcggtcatcggcttccctttggacatgaccaacggggcagccatggcaggcagagcccgaggaggctgccagggccacaggtgctgctattgcgggccaagcttctctgcctgtgttacccggggtggacagccactaactagcaagcgaggccggggacgccccaggaaggccaacctgctggactccatgtttgggtctccagggggcttgagggaagcaggcatccttccatgtggcctgtgcggttcactgacgccaaccggctccggcaacatgaggcccagcacggcgtcacaagcccctccaaggctgggtgagaatgggttacccatctccgaggaccttgtgagatctgtggcaagatctttcgtgacgtctt

SEQ ID NO: 44477 - DNA, 463 bp, Mus musculus
  source 1..463: mol_type = other DNA
tgaagttttcctatcttttcttcttttagaatcacattagctttccactatgataaagtctataaaacttacttcatagtgttatttttttcctccctacattgtggcaagatcaaaacagagtttctattcttggatttgccccagaaggtagtcttggcaaaccaccctgttctctcagtttactggcttgggctccaacctaagttatgtggatgtggtttaactgtagacacaaattattgcaactagatttcctatatacaatgtttgtgtaacatgtattttcaggtcctactatatatggataacccaaacctgaactggccctagcaaagtacaatttaaatatattgcttccagacagataattctctgacacagtgactctgtactcaaggtctcacgcggagctgctgctaagcaaaacctctctgccgctgaaaaacacctcggctgcagc

SEQ ID NO: 44478 - DNA, 368 bp, Mus musculus
  source 1..368: mol_type = other DNA
tgcctgtcacactgtacagtgagtgacatatagcggaaacagcctgtgtcataaccctgtgtcggggacgggggtccctagtctagtccagtgtaccggcagcccacagctgggggccctcccaggcacctgctgggccctcagttaggaagcagggttaccctgggacactaccaagagcaaccactgaagagaccagcccagatctgtggatgtttctggggaacagcctcctgtgctggagggcagctcttcaggctggtgacatgcgctgcctgtcctgcgcgctgtgcggtggccgcccggccagctccaggcgcgcctgcacttcctccctccctcattcagggtgggtgggactgaaggac

SEQ ID NO: 44479 - DNA, 571 bp, Mus musculus
  source 1..571: mol_type = other DNA
agccggctccagctgcctcgaatcgagtaccgcattcacagcgggaccgcacttcggatgagcaggaaacaagcagcccagggctggacggcatcccggagcagctgtgcccggttgtacagctgtgggaaaagacttggcctcgaacgcacagtgagctgcaggcagcgaagagaggcggtcccgcccccgaggctacgggagtcaggacgagccccgtctggaaggggagcttgtgcgcaccccacggatgccagtctgaccttccttctgggacctggacagagccagactggatgactcctggcccttggcttcagatccctgagcctgggaagggggtcccatgcctcccgggcccgccgtcccagctcgtcacctacctgccgccgcggtagagcgagcgccagcgacgccagctgtccgttcagtcttagagacgcgtcagtctggtcacctgacgcggagccgcctctagtagaacaacttccggttccagccggaaaaggctggtgtgcagcgctgctctccggcccaggcgcccggctggtaagttccgccccgggacagg

SEQ ID NO: 44480 - DNA, 451 bp, Mus musculus
  source 1..451: mol_type = other DNA
ttacaagttcatctaattagttttaaaataaattaccatgtatttattaagtgtctctgtatacatgtgaagttgacaggcttggcagcaaacatctttacttattacctttattattttgatactgaaatttcacagatttggctagtagagtcttcaagaggttacctggcaacagcgaggtatgcccggcgttcttcttctttataaaacagaacaaccactgaccttactttcttgtacaaggcattccaaactggtatttctagaacgaatgaatgctatgattagcacgcgggcgaggcgagctcgcccatccaccgagctgcccctgtcccggggcggaacttaccagccgggcgcctgggccggagagcagcgctgcacaccagccttttccggctggaaccggaagttgttctactagaggcggctccgcgtcaggtgacca

SEQ ID NO: 44481 - DNA, 336 bp, Mus musculus
  source 1..336: mol_type = other DNA
gctgtcctggaactcactctgtagtccaggctggcctcgattcttgattttagtcacagaataagataactatgttagaacatctagattttggtttttttttttaaataaacaatctagagatgatttaaaacaagaatattagacaaagtttactgggagtcctggacccaaaattccaggaacccaggtatttggcctccatctctgcacctgaagagcagagccgcctctagaggtcgccagtcgccagcaggcgccagagatgggaggggctccggggcgggtccccgtgccaggtgcggtttggtcctcccagggcgccgtaggcggtgc

SEQ ID NO: 44482 - DNA, 503 bp, Mus musculus
  source 1..503: mol_type = other DNA
ctaataaattcttgtattaatgatactaagaatcttcgatccctcaggtcccccacagggggatgcaggctcacctgccatctggcgtttgggctttcacactggcaagcagaagctgaggacggaagtcccttcttgttctacagaatgaggtgtgccggctctccacccccccccctgcaacagcacagctatgcagctttgtaggagctgcacagcatgtttttatatatggaaagctaaaacaccaatttttctagttatttttaaatataataaatgcacttgctactgtaaaaaaaaaaattggttacaagttcatctaattagttttaaaataaattaccatgtatttattaagtgtctctgtatacatgtgaagttgacaggcttggcagcaaacatctttacttattacctttattattttgatactgaaatttcacagatttggctagtagagtcttcaagaggttacctggcaacagcgaggtatgcccggc

SEQ ID NO: 44483 - DNA, 375 bp, Mus musculus
  source 1..375: mol_type = other DNA
accagctggcagtttcatctatataatgggtataactactagcttcacctccaacagagacgtagggcgtcatactccaagaatagaaggacctggccccctgagccattttatctgtggcactctctttggagaatcccaacagcctttgggaccaggtgggctccagagccccagcgcagagtacaaggacaggttctggaggtctcctctaagtgggagggcagcccggggcaggtgactggacagctccgcggacacgatgagtggaggcgtgggctcagcaatgcatccctcagccaatcagcagcctgcccagccggtggatttggccctgacacccaggggctgctgggcatcgcttccgctggagcc

SEQ ID NO: 44484 - DNA, 362 bp, Mus musculus
  source 1..362: mol_type = other DNA
ttagagaaaagtctccaccccagtgctggggttacactatgtgtctactggttcaagctggttagatcactgggttaagtcactgaatttcagagccaccgccagtgagtgagtgttagaagctccctccctggatcaagggtgggtcctgcctactgtctggaggtagacaggtgggggtctccttcagcatgcaggagagccaagctgatgggtgcttatgttacccctggatgttctagcatcagcagccagctgaagtgtagcgggtagccacttagcccttgccaccttcaatatgggaatctcagcaggttgaaatggctgatgacatcactggttcctgggagctgaggagctgg

SEQ ID NO: 44485 - DNA, 337 bp, Mus musculus
  source 1..337: mol_type = other DNA
caagctcagcctagtccattaggttgattagcatctttgccatggaggcggggcatcccagggaaatgaatccgaggcattccttctaattcattcccaagctcaggatcaactggttgggagctcagctgggaaagagattccctgtgggctgcccaggtaatgtcctaactcacccgtctccccatctgaggcgaacagatgtgtctgtctgtcaggacttgttcaaggcggagtccagcaaatagaagtgtcacagctgatatacctggactaagcagtccattccagctggctggtggcaggctgggaggccagcaggggcggggcaggctca

SEQ ID NO: 44486 - DNA, 323 bp, Mus musculus
  source 1..323: mol_type = other DNA
ttttgtctcatctgtataagggaacagtcaaatctcattaagttgttatggatattataatctgatacacaacaccacacacacacacaagaaatacgttggtgcttttatggtttttagggcggctccacagcctccaggatgacagggaagctttccctccagggttcatactccctatttagaactatcctgtctggaggggctgtcaggaccgctcagggcttacggtttgtggcacattccggactttggcttgcctgtacagtggagtcttttggggctaaaaaatttggcagggcggagccagccatctggctggc

SEQ ID NO: 44487 - DNA, 284 bp, Mus musculus
  source 1..284: mol_type = other DNA
tttggggctcaaatccagatctatgaattggcctattttacatttctgaaacagccagagtctgtcctaatcaccctgccctcaggaggttgagtgaagtaccatctctgaccagatactgccagccttttctaggtaaaaaaggataggtagtattcctttgtaagaatttatatttattattattattatatgtgtgtgtgcaccgcgtgtgcctgtacaggcacggacatgccagctttgatcggaatttcgttcaaagacatcaaaagcgtataaaggag

SEQ ID NO: 44488 - DNA, 586 bp, Mus musculus
  source 1..586: mol_type = other DNA
ccggagctcgaatccccaccccggagctgccgccagcgctctctccaactgggtcctagcaggccccgaggggtggcgccaggcctccaggccagccccggccaccccagcttcccccgccgcctccccgggagcggggcggagttgcccgccgccgccaaccacccggacgaccgcggcgcgagcgccaacggccaccgggcgcgcgccgcggcggccgggcctgcgccccaagagctggaaaagagccgccaaccgatcgctcgatcgaccgcacgcccgctccttcgccctaccagaccggggagggggggagggcgcgccagttaggggcctgactccccggcgacaagacaggcgcgcgccctcacgtgatgggggcggaccggccaaacaagatccggtcacgtggaccgagacttcgatgcgctggaggcctcggcggccgggccgtcgggagcgctgcgtgcgcttacggagacaaagcggtggctgaggtagcggtggcgcgggcagcaccggccgcaaagccgacgcccagcctgtcatcgtctgttgaggcgcggcgtgtcgtgtcgtgtcgcgg

SEQ ID NO: 44489 - DNA, 535 bp, Mus musculus
  source 1..535: mol_type = other DNA
ttgtgggtgaaattactcacagtagatggcctcgggccctcgggccttcccaggcctgggtcctgtggcgtgcaccaccagatccgatcgggcgttgcctgcagccgcagcgcgctcttggaaccatgtgctgcctccgctgccgctgccgccgccgccgccgccgcccgcccgcgccgcgacacgacacgacacgccgcgcctcaacagacgatgacaggctgggcgtcggctttgcggccggtgctgcccgcgccaccgctacctcagccaccgctttgtctccgtaagcgcacgcagcgctcccgacggcccggccgccgaggcctccagcgcatcgaagtctcggtccacgtgaccggatcttgtttggccggtccgcccccatcacgtgagggcgcgcgcctgtcttgtcgccggggagtcaggcccctaactggcgcgccctccccccctccccggtctggtagggcgaaggagcgggcgtgcggtcgatcgagcgatcggttggcggctcttttccagctcttggggc

SEQ ID NO: 44490 - DNA, 340 bp, Mus musculus
  source 1..340: mol_type = other DNA
cgctggcggcagctccggggtggggattcgagctccggagtcggacctagccactcgctggccgagtgaccttaggcaagtcactcgtttacagaaagatgattattgtttttttttcctttgagttgcaagaagtcataacaattgctcattccctgaaattaaattcgggaaggaaggttccctgaacttcttctgtacagaaacacgtgggaaagtttgccaccgggaggaaactgaggcctacatgtcatatgaagcctcaaagccctttcctttcaccatagcctatggtacaatggcacccactagttaaatggtgctgccaaaaccagttaat

SEQ ID NO: 44491 - DNA, 391 bp, Mus musculus
  source 1..391: mol_type = other DNA
caggcaggctctgctcccaaacacgattagagcttgtctgtcctttcctcaggggtgggcaaggcccagactgtccatcctggagccaggtagagccacccaggtgagaggtctgccatcctgaagacttcactctgagctacaggaaacaaccctggggaattgaaaccaaattcccatcttgagggacaggtgacccaacagtccagagtcaggtccctcatcccagagtcaggtccctcatccaacaaggatgtgagttgcccatgtgggacccagacactggctctggctcccagatggattctcctgccgatgggtgggaaggaactttctggccggaaatgtggccatgtccagccttggcagggtcagccaagcttttcctacc

SEQ ID NO: 44492 - DNA, 448 bp, Mus musculus
  source 1..448: mol_type = other DNA
ataaaaataaaaatgcttctgtattttaattaatgagagaaagctccgtggccacccactgttgggttcaagtggctgctctgtttcggaagccacctgacaccaaggatgggctagagaggtgagggcttaagcaccgatcttctctgggcccctcccatgctggacccacgcgaaggaccagcctcctccctggtcatgattgggcccagatagcgccctaggtgcccggtcgggttcccgaccacgctgatgcgcttacaagggagctagcctttgtccagccgggtgcctggagcccggcagcagggacctggggttcaggtggggcgcgggcctccgggcgaggccgctcgcgtgtggggggggctggccgctgtccgcggtgctgaagcggtgggagcggcggggaggcgggcccccggcgcagcgcatctcggaccccagc

SEQ ID NO: 44493 - DNA, 354 bp, Mus musculus
  source 1..354: mol_type = other DNA
ttaaaaatgaaaataaatttcccttgtttctagaagccaaatttggtagaactaatgacaggcaggagtcgaaacatctcgttaagaatttattagttagcttccttccctgagggctgcacacacatctgcacgtgcatgcacagtggcttcccaagcttgtagaactctctagttaataactcaatgatgccctcatatgcctttgaaggaggtattatctttccccattgctcagagttgcgtggcgagcgcaccgcgctcccagcgcctggcacaggagggacaggggttttagccagagcggcggagggacccacgcgcacccgatctctgtcgctcacgtgagggctc

SEQ ID NO: 44494 - DNA, 308 bp, Mus musculus
  source 1..308: mol_type = other DNA
caaccaaaaagagactaaatatttaaagaccctctttacttagtgatgcaccaaatttatcaagtaataaatactggtcatttttgaaacaaattgtgtttccataatgttaccaattgcagacgtcactgcgatcggagacattgctgcgatcagaggggattcccttacggggtcccgggagatccggctggctgtccagtctctcgcgccggaagttcgaaccagtgtagcggtctctgactggctagagagcgactcaggaaacaactatctacactaaccggcaagcagaccgcgtgacagtc

SEQ ID NO: 44495 - DNA, 272 bp, Mus musculus
  source 1..272: mol_type = other DNA
tggcaggagatctgatgctctgcaggcaccggccatgcacatggtgcgtgcagtttcagggaaaaaatttaaataggaagaaatgctttttaattcaaagaagcttagtggataatggattaaaaatcccagaggaatatagttcggggggaggggagaggctcattcagtttccctcccataactgaaaaactatctaaactcagcagagatctacgggttcccgcgggtatcaggggacagagatctgatttaggtctcgggccgggcta

SEQ ID NO: 44496 - DNA, 215 bp, Mus musculus
  source 1..215: mol_type = other DNA
ccaagatttgttactactggaactctttcaagagtttcaagaactaggaagcttggcctctctacgtggtgacagaaatctttcagggcagagccgcggacgaccctctccaagaaagagagggcccttcagtacctcgaaggactacgcagttcccaggcgtttgggaaaagctgggtgggctgcaggactgtcacgcggtctgcttgccggtt

SEQ ID NO: 44497 - DNA, 389 bp, Mus musculus
  source 1..389: mol_type = other DNA
ggctgccagtcagtcctggggctagaggtgtgcaccccacatgtgacccccgctctttttcattacgttaattactgctaattaataactgctatccaggtccatatatatctgtgttattctcttgaaagtgtgacctttgacagtttgctataaaaatagttgtaacaaacatctcatttgaagatgactagaggcatgttacggtctcaacatcttcacaagtgatctctctctctctctctctctctctctctcgagagagagagagagagagagagagacagggcaagtagccctgcagccctggaaacccaggctgtgtctggttgatttgggccgggtccagcagctgccccgcctccttggcagaacagctgacgccagag

SEQ ID NO: 44498 - DNA, 334 bp, Mus musculus
  source 1..334: mol_type = other DNA
acactctagcacaggctggcctgaaacttgtgagcgcctttgctctattttattctaacttgaacaaactaggtgcagctgaatctaagctgggtttacaacgcctagcaaccgttgccatgctagcattacaaaaactagtagctttaggtttagggtttggtttttaaagaaaacatcagcgatctctggattagaggccaaactacagagctctctgaatcccagaaggctccgggctgttttgagaactaccacaattgttgagctttagagaatttggttcagccctcagctggcggcgtggggtccttcagggccctaggcagggcac

SEQ ID NO: 44499 - DNA, 494 bp, Mus musculus
  source 1..494: mol_type = other DNA
ctttggcttgtggaccccaaggtcccccaaactggcatttcaaagtcataacctatagcctgaagaatgcctggcagccaggctgatgtggaattttccccattccacggttgcctagtgggactctgacgtggcccatgtgccacccgatggccagctggttctgcagtgcccacagctggggttaattccaaattagttccggttttcctttaggatgaaggacagtctgaactctctagaggaggtatcctcaagtgactcggcccagggatccctggctcatcagagggagctaggaagacctatgttccactggattctgaggagctcccagtaggacaatggaccccttggcccatcggagacaaatgggcgcaatattgcgccccagggagctgaatacagcttctgtgcctcttgggcaggcggcggccgtggcgcccattggctctggcgtcaggggccgggccaggctgctggcctcacctggc

SEQ ID NO: 44500 - DNA, 345 bp, Mus musculus
  source 1..345: mol_type = other DNA
tacatgtatcagtaggaaaactgaataaaatagttactgtttcggaaaggtgtcagtggcctgtttcactaacctgctttgcagaaaattcatgccaaggcagcctgtgttttccccagagaggtcagcctactcagtgtggcggctcccctgggccaccggcttcatagagtgttgaaactgtgtgtgccgtgccaggcattctgctaacacaggactcctaacttctagaggtctggagccatttggcaaataagctctcctggccagcaaacatacattttcaactcccacttgtgtgtctcaggacaagggattctcccttggggcgggcctcccttgggg

SEQ ID NO: 44501 - DNA, 324 bp, Mus musculus
  source 1..324: mol_type = other DNA
atgaaagcatgcaatataagagatttaaggccatatttatttgaatttatcggaaaccagaagtgtcagattccctggcttactaggggccatagcattgcccctctgaaatcccagaggattcagagtgtccctactgtaaagtaggaccctacgctagtgccagagcttaagttgagtctacacatgatgactgttataattaattagtccttgcgactgtctaaggtagtcatgtctgggagagttttgcattaactgctcagagaaaacaaccaagcctaggagaggggcttggatgttgtcacccgcgggacccgtcct

SEQ ID NO: 44502 - DNA, 285 bp, Mus musculus
  source 1..285: mol_type = other DNA
ctttgcaatggaactgaagggtatgaacttcttccaacatactgaagcttagggatctctacccctcaggagtagagctcatctttcacccatggaagatgacgcatcttccaactctcccatctccaggtcactgggggctagagagctctgagaggggctcccagggaagaccagtgcctcctttgcagctgctgcatctggcagaggccctctgggcctgccatttccacttaatctcagttacaggggaggcgcctgagccacacccaggagtgggggggc

SEQ ID NO: 44503 - DNA, 322 bp, Mus musculus
  source 1..322: mol_type = other DNA
agcctctgtggacagactggtgacagtcccaggctttacacagactgttattaaccatgattttatgtgtctctagagccttgctgtgctggctaagcttgagtaatcgctaggagatgctcaggtaggctgcccagccctctttgatgatgaaggacttcatgttcagagaagccgggcttcctctggattattagaccctgggggtcctgtattagccaataaaagtctgcgtgcaccccttggcccaagggcacctagaacctttctgagctcttaggtagtcacccagggctgtccagccagggagccagctagctgc

SEQ ID NO: 44504 - DNA, 288 bp, Mus musculus
  source 1..288: mol_type = other DNA
atctggctaggcagctcgacgcagagacctgggtcttagtctttaccatgcctgctctgcaggtagagggaaaagattctgggcttgcctcaagcccaataaataagctaagggtgatcagaacttctgctaggtcgtgcgcgtaactcagtggcacactgagtttgggggtcaaccgtcccctcttggttaggatgaggatccagacccaagtagggcctctgcgcgtctcgccccgcccctcgggctcctttaagaggcgggtcttggccgccagccccggggcct

SEQ ID NO: 44505 - DNA, 147 bp, Mus musculus
  source 1..147: mol_type = other DNA
tgacaaccaattttacatatgtgctgactgattttaatattttattacaaatctttgcccttttatcagggtacaatttgtaaaaggctcaggtttcagattgagccagctaccggttctcaggagccaccaggaccgccccctccg

SEQ ID NO: 44506 - DNA, 509 bp, Mus musculus
  source 1..509: mol_type = other DNA
gcagaagcagctgttacctggccacaaaactggcagtcttgtcgacgatgttcctgacctccgggggagggtaaacctttgacgatgcttcttcttcaattggctgtgaaaacagagaataaacgctccatgatactgacaggaacgtctgtcctgtagactgcagactctcttgggttagcaaaaacaggaatctaggggaaagaatgattttcagcgcgctgactcctgggacttgcagtccgcagtgccacagcgcccgcgcggaggggaggaacgaggcctccagcaggcctgcaggcagggagcgcggggcacgtacctctactggcggcggcgggggtaccgcctgcacgggtccggcctgcatgactgcgacgctcagggctgccagtccacctcggagagagaagccgcgggagcacttccggtcccgccctctcgccccgccccgcctgctccgtggcgcggtacgccgttgccaaggcagcggcctgggctcccaactt

SEQ ID NO: 44507 - DNA, 223 bp, Mus musculus
  source 1..223: mol_type = other DNA
cagcttctttgtgctctcagaaaacacttcccagaagctagactgaaacttgctcaggaaattagagatctaattaaaggtgttagcaccaagtgtgtctgtctggctcacagaacttcctccagagcgtctgaggctccgagaaagttgggagcccaggccgctgccttggcaacggcgtaccgcgccacggagcaggcggggcggggcgagagggcgggac

SEQ ID NO: 44508 - DNA, 455 bp, Mus musculus
  source 1..455: mol_type = other DNA
caataaaatgtccctagactacatagtaaagttctgatatatatatatgtggtgtgtgtgtgtgtgtatgtgtatatatatatatatatatatatatatatatatataatttggttttgccctggctgtcctgaactaactctgcagaccaggctggcctcgaactcagaaattcaacagccaggtggtccatggaggcagagaccttaggacctctagggaagccctagaccttctgcaaagccagacgagctagtcagggaaggcgggcccttggtgacggttgtcccgccccctcacgtcggtccacttggcgccaggctggaggaggggcgaggctcgggaccctcggcacccattgggcgcgtggtgggagctccctgggtatccgcccccagctttgtggcagccaatgggcacagtgcgtgggaggggcgtcggcagcgtcggcggag

SEQ ID NO: 44509 - DNA, 520 bp, Mus musculus
  source 1..520: mol_type = other DNA
tctgatatatatatatgtggtgtgtgtgtgtgtgtatgtgtatatatatatatatatatatatatatatatatataatttggttttgccctggctgtcctgaactaactctgcagaccaggctggcctcgaactcagaaattcaacagccaggtggtccatggaggcagagaccttaggacctctagggaagccctagaccttctgcaaagccagacgagctagtcagggaaggcgggcccttggtgacggttgtcccgccccctcacgtcggtccacttggcgccaggctggaggaggggcgaggctcgggaccctcggcacccattgggcgcgtggtgggagctccctgggtatccgcccccagctttgtggcagccaatgggcacagtgcgtgggaggggcgtcggcagcgtcggcggaggccgggcggctcaggcggctgaggtggccgctggcgctctggtggcgggcgcggccgatgggccgcgcgagcccgcagcaggcgggagcctgtctgg

SEQ ID NO: 44510 - DNA, 342 bp, Mus musculus
  source 1..342: mol_type = other DNA
atcttctggtgtgcctggacacagtatacttacatataataaataaaatttaaaaaaagattcgttcctcccctcagtgggtatttcagaagttgtttgactaaaaactgccacaccggccaggttttgctggtcgaaacaacaacaagatagggttgcagtactatcaacggagggagctccagccaactgtagactagtctggcctcgaactcacagtagtggctttaaccataaagcccacgcccgcagcgcccggtaggcagggctcaggaggaggcgtggccacttcacagtggctgtggggcgtggccgccgacggaccggtagcgggcggtgctc

SEQ ID NO: 44511 - DNA, 293 bp, Mus musculus
  source 1..293: mol_type = other DNA
taggggcttccaaagagtgtcagccattcctaggcacccagaggaatcccttagaccctctggcacactcttctctttacccattggcaatggacaggctggagaaaggccacccctaaggtgacgttcaaaagggccccggccccccttctgagaaacaggggggcacaggctgaggacccctctgaatcccgaaaaccacagggcggttttttgttgttgttgaagacttcattataattttatcaatcaaattcttagaagaaggaaaaatatagctgttttctctgtct

SEQ ID NO: 44512 - DNA, 351 bp, Mus musculus
  source 1..351: mol_type = other DNA
atgatggatcgctatctttcagagaaagtgaaaccttgtaaccagtacttggaattcaagcctagtctagctgagtgacttgcctcagacaacacagcgacacagcgtgtcacaagctttgaacccgttctctcttgctccaagggtcctaaaggaccctgtctacagagagagaggcacaatctttggggcccaagtctggctctgtgcccagagcctggtggtttccgctcacaggggtggcctcccttccaagaaggctgaggctgcggtttacatcatccttgggcgtggggcgcatggcgcccattggccgctgttggccaatcgccccgtcgggcataaagtggc

SEQ ID NO: 44513 - DNA, 466 bp, Mus musculus
  source 1..466: mol_type = other DNA
agaccctctggcacactcttctctttacccattggcaatggacaggctggagaaaggccacccctaaggtgacgttcaaaagggccccggccccccttctgagaaacaggggggcacaggctgaggacccctctgaatcccgaaaaccacagggcggttttttgttgttgttgaagacttcattataattttatcaatcaaattcttagaagaaggaaaaatatagctgttttctctgtctcccatttgatccaaggccctctggagtccagcccataatgaaggtcttggccgcaggtaaatccatgcgccgggcgccgatttaagagtcccggctgcgggcgcgccggcagcctggggcgctgggcgagcacccgcgggacacccgcccgccgcgccactcggacacttggggcgcccgcgcagtccgggcccgccggaggcgctgggtggcggccgggagcga

SEQ ID NO: 44514 - DNA, 308 bp, Mus musculus
  source 1..308: mol_type = other DNA
tatgttaggtctcaaacccagacaaatgcctatttaacatctcagggtcatcatgaccactctgtaaacactacagtagaattacggtgagacttgcaaagcccccaggactgcaaagcgctctgtttgagtccaggccctcccaggctccagcctcagatccgcagtcctcgaaggctccaggagctccccacgcaggctccgcccacagcccgggtgggtaggctgcctgctgcttaggcatgaggagacaagccgaggggtgggctttgccaggaaaagccgttggcctctgctgaggtaaaggc

SEQ ID NO: 44515 - DNA, 283 bp, Mus musculus
  source 1..283: mol_type = other DNA
aaagttacttttataagagagaaaatcttttgtttcaaggcaaatgttgtcttccttgccattgtgacaaggtggatgggaattggttttggaaaataaatccttatcaatttcaaggtactagatagtcacagttggagcagaaagtttagctctccagccccagaagcttttgatcttggatgcgctcctatgcagcagctgtggcccctcactcacagcctaggcttcagttaaagtaaatggtgccctgcatccagaaagccaggccgtctctcacaga

SEQ ID NO: 44516 - DNA, 479 bp, Mus musculus
  source 1..479: mol_type = other DNA
ataatgacaaataagacagcatcctttttttctaattattcttatttaacaaatacagggataaatttcatttacttgtcttctgataaaaaatcaaggtcatgttaaaattcatctaaggaagtgaaatatctttgaggatttgttaggacttaatttataactgtaattttctactaccatgaatcataaaaatatctcaggatattttatagcacactatatttacatgcacggtattaagttagttttatattgactatacttgctggggatataatatcactactgttcttagttttaatagaaagtagagtaaggaaaagaagcctgaaaaatctttctaaaccttgtttttcgcccacatcctggggcgtgaccaacgagccaggccccgccctcgcccatccccgccccccatcccacagcggacagcgcgccggagcgtgcgcgcgcgcccccgctctcagctccgatcg

SEQ ID NO: 44517 - DNA, 319 bp, Mus musculus
  source 1..319: mol_type = other DNA
atcaagattctcaaaggcaggtgagttcgaggccagcctggtctacaaagtgagttccaggacagccaggaaaaaaaaaaaaaaaaaaagattttgatactctgaggtttatttacttctttaaatgtatagataacatataaaaaaatatgttttattatgcataagacccttggttcaatcaaaagtaagtttggaatccttcctgaagttcttgtatctgggaagaccagatagatggtctaggtcttatcaagatgaagcttgccagcaaaggcagaaaacagcctttgtggcaatcccgagggagggcctgaag

SEQ ID NO: 44518 - DNA, 424 bp, Mus musculus
  source 1..424: mol_type = other DNA
ttacaggctgcaccagcagcagcagctggctattatttctttggaaaaaatgtatcctgttcttaaaatagctatactcagcctttctgatttaaacaacatactccagcatctgcgaggctgaagacacagtgagtttttaagtgtacaatttgctaagttgaagacctccatttgtgggatcttcctgtttactaacctaagaagtaaccaccatcactacacatttttaactgttttagagcgttcggtaagtgaactatacgagctgtgattttgactcgttcaaacttctctggattaaatttgaaaactaggagggtggccaagggggcggtctctgtggggcgtggccgtggcattccccacctccacagttggcgccgggggcggggccaggcagagcaggttggcttcctttctg

SEQ ID NO: 44519 - DNA, 286 bp, Mus musculus
  source 1..286: mol_type = other DNA
ggccagagcgctccaggagagctgtggggatcatctcaagaccccgaggggaatctccgaagccggggttcttggctttaaagcctacgctctggagaacagccactcccccaaacctacatctggagtaggttcatgcagccacagaaactcaggttccctgcctctgtataaaactgagaaataagtcttatcaaattttggttatgaacattgtaataaactgttaccctgtgcacattatcagtttctttaatggttcaaaatgtcgactctgagatacaga

SEQ ID NO: 44520 - DNA, 412 bp, Mus musculus
  source 1..412: mol_type = other DNA
aatccaaagagcctttaaaaggaaggagacctacttttaacgactgccttgctgaaatctgcccttgaaactagcaaggacggcaggggtcggagttccaactcaccaccgacttaggttcagacccgtaagtcctctgatgtctcaggagtcaggagcaccagacctggtaagacttgatggcgggcccaaggtcaggatggcccaggccctcaccccctcgttgatgtgctcgtagatcgcgtctgcgccctgatcgaaggctcatcgtcggcgacgacatgttgcctcactgccgtctgtatctcagagtcgacattttgaaccattaaagaaactgataatgtgcacagggtaacagtttattacaatgttcataaccaaaatttgataagacttatttctcagtttt

SEQ ID NO: 44521 - DNA, 522 bp, Mus musculus
  source 1..522: mol_type = other DNA
tctggcttttctatagttaaagaaaattatttttattttatgtctatgacttgtgcctaaggcttctctggaactgtaggctcccgacacccacaagtcctggctactatactgatcaatatattacatctaaacaatcgtagtggagattctgttgaaagagtattttcattggaccaattcctctcccaacaataaagctaccttgatgtctattttaaaaacaaaggtgtatagatgcacatgcatgtgaaacactcatacacataaaacatgttttctggcctcccaggggcaccaggtacacacatgggacacaggtatacatgcaggtataagagcacttgctgttcttgcaaaggatccaggttctattcctagctcagcaccagcacacttgtgatgtaacacataaaacaataaaaataaatctaaaagttttttttttttttaattaagagaagaaaagagagctaagcctctggcacttgctgccaaaccttgcagcctaagctactgata

SEQ ID NO: 44522 - DNA, 391 bp, Mus musculus
  source 1..391: mol_type = other DNA
aatgaagtattaagtattagttacagtcttagaaatgattataagttaacagaatggttgttaaaagattgacagaaaattattccagcaatgaaaaaagtactatctgatttattcaaactcgtggactcagagggtgaccacttgatgactgcagaggttgagcccctaagtgacttactcagcgagctatgattgctctcacacactaggccactgatgtcacaggctgatccagtagtcacagtaactttgctttgaaagactaaagaccgaatcagaatttaaaacctacattttgtggctttcctaaggtatttttagaaaaagtatgtatcttaaggcctagttacgtaattagaattttaataaggagagtcataaattcttg

SEQ ID NO: 44523 - DNA, 392 bp, Mus musculus
  source 1..392: mol_type = other DNA
actctacaaatccccagaaagttgaaattttcctaagcatattatacatttgatgacgttaagctacgggcaatagctgagttcgaggccagcctggtctaaaaaaaaaaaaaaaaaaataaataaaattagctttctatatgtattaagcaagtttcataatctcaacttaacttcgtgtttttaaagtttgaaaaatattgagtcagcatatataattaagtgtcaaaggaatttcggccggatgtcccactgcaaccggtgcagtcccggcctctacaggtttcccgggaaaggcgccgcccgctccttctcaaccagtcttgctagagtaggagtatagccctcgtcctccaggaggcggaagcggaagtcccgctcagtatcttaga

SEQ ID NO: 44524 - DNA, 416 bp, Mus musculus
  source 1..416: mol_type = other DNA
agacagtgaagagaaaatgttttttgtttgttctctgtatagccctggctgtcctggaacccactttgtagaccaggctggcctcgaactcagaaaaagagcatcctgcttgctcagagtcatctgttttaaatggttaaagagacagttctgcctttaaaagctcttggaggagctgagtttggatccaaaatctcctttaaactccagttccaggatatttgaggtctctcttttaaaaattgttatagattttgttcttttgaatagacaaatattgtctgttgatgccttgacacagaacatgtgtgaggtcctgggctccaagtttgtgaacaattttaagactgtctttagtttatcctcagaatgtccaggacatacaactcccactagtcctgcccccagccactggg

SEQ ID NO: 44525 - DNA, 244 bp, Mus musculus
  source 1..244: mol_type = other DNA
atgtttgcagacaaccagtgagttggaggccagcctggtctacaaagtgagttccaggacagccagggctcaatgtacttacatataataaataaataaatctaaggtgacacctgcctaagtccagcgagtccaatgcaggcggatcgtagtgaccagcctgatctatataggcgacacttgtgctttcttgagataccacaaactcactcgagtgagtcggcggagggcccactaattcaca

SEQ ID NO: 44526 - DNA, 431 bp, Mus musculus
  source 1..431: mol_type = other DNA
aaaaaacgattttctttccttactaatatatttcttttttttttaaaaagaattatttattttgtgtgtatgagtacaactgggaactgaactcaggtcctctggaagaccagccagtgttcttaaatatttctttttttctgcaatgcagatattattggtttaataaaaatgctagaatagaagttttataatgttttaaagttatctattagatagaacaatgaattttccaagggcagcagaaaaagtctcggctgaagacaacgttgaaagagatgaactttaaagtcttccaagaccctttcgattccatggtgtttgagaggcctggccagggattctggttggcccgcccaggccagccggctctgctaaggcccgccaggttgcaccctcgaccccgcccccggggtgtgcgtccaccggaa

SEQ ID NO: 44527 - DNA, 333 bp, Mus musculus
  source 1..333: mol_type = other DNA
tggagctgcatcttgtctcttgcacacggcaagaggagactccactttccagtcgtggccactggaatttttagagagcatgcccagggccgctgtagtatctggggaacactgcaccgccagctagaaggtccccatatccatcatgcaacatacagaatcccttcgtgggtgactgcagtcttattctgactaatagggctgacgcagccccgcccctctcactgcggagaagccggtcggcccggggccgcgggggaggaggtggagagggtggggccctcctccccagccccccactgccgaggggccggaccgggccaccgcggatgc

SEQ ID NO: 44528 - DNA, 380 bp, Mus musculus
  source 1..380: mol_type = other DNA
acaataataatttaataataattaacaaataaaggttaagagcaccaactgctcttccgaagatccggagtttacatataataaataaatctttaaattgaaaagcatggtccacaaggccctgagataggcttcctcagtgtgaaaaactttccctctagctgagttaaaattaagcgacagtaggggccgtcctgcaggaagagcacccagttatctgagtccacccgggacggaggtgactctgcagtccccggcccctatcgcttccggggaggccactgtgatgccttagggcctaaggcccgagaaaggcacggcccctttaagagcgcagctccgccccttcctggccggatccaaattccaggggggcgggg

SEQ ID NO: 44529 - DNA, 376 bp, Mus musculus
  source 1..376: mol_type = other DNA
ccttctctcctaagggagaggagacagttctttttccaagcattcgttgaatgagtgagtcttgttcaatcctgaactcctccagtgggacggaggttgggcaaacccagactttccgaaccctcagagggtgcacccctgggacagactctgggacagacccgtggatcttggggcagtgatgctgagcagacttctgttgaaaagtggcccgcaggcccgggacggagtcccagtgtcctcggcctttggtgccaggactgggtctgaccccaagtggcctgattctaagagcctgggccagggcgacccgcctggcagtcactgggccgcgaccctccccgggaggggcggggcggacagttacctcatcgcc

SEQ ID NO: 44530 - DNA, 564 bp, Mus musculus
  source 1..564: mol_type = other DNA
ctggggaaccaactaggtcctccgagggggcagcttggtcgggccgggccaggcctgggggataatggggctcccctcttaagccggcgcccctcaaaactgggaggagcgttccacgggaaaccggccacggcttctcgagccggatgggctccaggcccagccgcggtccccttcgggccctcggaggccctaggcccggcccacgtggcgagagacccggagcacccggcccgcctggacgggctctgcacgcctcagctaccgcgaggccctcgcgcgcaacgcggccgcaccagcccgcctagtgggggaggggaagggaacgcggatcccccacccccacccccgagctcgtcgggccgcggcgggaaacccccagagacgagcgcctcccagtctgggtgtcccagctgtcgccggcgggaccgcgatcccactccgttccccctaggcgccgcactgcgcaggcgcgaaacccgcaacctcggacgctaccatcgggccaggcctcgggggtggccgaagaggagcgaaccggagctcttcggctcttcgctcccg

SEQ ID NO: 44531 - DNA, 558 bp, Mus musculus
  source 1..558: mol_type = other DNA
tgtgtcagtaactccagagacctcagagctacacaccctgcctaccttgcagggaagccaggaggacagaaggaaagaactcaatttcccccgaccgttactggggtcgggcgcggcattcccggcctccctcccaagccgtcccctcccccgcccgctcaggccacgcgtccaggggcctggggagcatgtcctcccacccccacccaccgagcaggggggcccgcccggtaagtccggccgccggttccaggccgagccctcggtgcccgaaacccgctgcacgcacacagaggcgcgtgatcccgcccgccgattcaggccggccgggatcccttcccccagccccctccagggcagactcttcagagacggtccctagagccccgcgcctcgcgccaaggagctctcgggttcgtgggtaaccctcgctcactggcgcgctggcccccgaggccgggagcgaagagccgaagagctccggttcgctcctcttcggccacccccgaggcctggcccgatggtagcgtccgaggttgcgggtttcgcgcctgcgca

SEQ ID NO: 44532 - DNA, 503 bp, Mus musculus
  source 1..503: mol_type = other DNA
ggccgaagaggagcgaaccggagctcttcggctcttcgctcccggcctcgggggccagcgcgccagtgagcgagggttacccacgaacccgagagctccttggcgcgaggcgcggggctctagggaccgtctctgaagagtctgccctggagggggctgggggaagggatcccggccggcctgaatcggcgggcgggatcacgcgcctctgtgtgcgtgcagcgggtttcgggcaccgagggctcggcctggaaccggcggccggacttaccgggcgggcccccctgctcggtgggtgggggtgggaggacatgctccccaggcccctggacgcgtggcctgagcgggcgggggaggggacggcttgggagggaggccgggaatgccgcgcccgaccccagtaacggtcgggggaaattgagttctttccttctgtcctcctggcttccctgcaaggtaggcagggtgtgtagctctgaggtctctggagttactgacacaca

SEQ ID NO: 44533 - DNA, 335 bp, Mus musculus
  source 1..335: mol_type = other DNA
aagctcagggccctcacctgtgaggttgttgagtctgagaatggagtccacttcacctcatggggacatttccagcccagcctggcctctgccctgacgtgacctccagagctgcatcaccactagcagcagggactggagcggacagttgtgcctggcatcttttacatattccctcagccagacgctcgcccagccagtgactgtactgctggtgggctgggacagtctcagtcacagtttatgactaccagtgagagttgagactcacctaaaaaatgacttggccaggcatacctggccaccgttggcccagtgccagggccctggctgga

SEQ ID NO: 44534 - DNA, 474 bp, Mus musculus
  source 1..474: mol_type = other DNA
tatgtacatatatgttcatatacacacatgttcatatacacacacatgcacacgtgtacacaaacatgatatgcatgcatacaggcatctcacgtgtacacagacatacatgcatagtacataacatgtttacagcgccgtgcatgcatacaacattatccatgcacacaaatagtctatcatgggcaaactcctcgcacctgctatgccgcgtggaatgtgcctgaggccagtccttaccttagggaatgggaaattgaggccgccagagtgcacgcgggagcacctgagcctcgggtttctgacgagggggcgggtgcggccagggcctcagtttcccagtctgcggctcaggtgggcacctggagggcgtcctggcgggggcgcggacggcttccgggcggggggcggggggcgaggggcgggcgaagccgagcgcccccgccctgctccgcccggaaccggctctgcgcg

SEQ ID NO: 44535 - DNA, 605 bp, Mus musculus
  source 1..605: mol_type = other DNA
ccatacacatacaataaaaaacatatatgtatgtacatatgcatttatacatacatatatttttttctttgtttctggaactcgctttatagatcagactagtctccaccgctgtaaatacatatttttaaaagaataagttgctctgcacaaggctcagtatgctgtccctttggtagctgcaggactccgccccgttttctttaaacctgtatacatttatacagatcttaccgctttggctagccgctaccacgagcctagcaagagcaagactaccgcagtggtggaactcgcgcgtgagtcacgacctagggtcacggcgctcggccggtgtcagcgccgacaaaccggactcagaggcaggacccgtcccgccctcacctgtagactccacacctcgggtggcctcaccgcgcctgctgtgggggcggagccaggtggggcgggggcgggctcccgcgcgtgagtggcaggccgcgcatgcgcaggccgcccggctcggaatcctagcaggcgtcagccgggcggggcggcgctgaggagggcgggccggggcggaccggggcgggccggggcggaccggggcgggccgggcggcgagg

SEQ ID NO: 44536 - DNA, 246 bp, Mus musculus
  source 1..246: mol_type = other DNA
agcctgagaggtatatatagctcagtggtatctctaggagcattaggttctggggtctggctccagcacagcactacatctagtgttttcttttaaagttattaatttatatcaattaatttatatgaaatagggtttgatctatagccccagctggcctagctagacctccctatgtagcccaggctgtgagtactaccctgcgcaaatctcattttctaaagactcattttgtgaaaatttccc

SEQ ID NO: 44537 - DNA, 456 bp, Mus musculus
  source 1..456: mol_type = other DNA
aaatatttgcaaatatttaaaaggagattgtgagtctcatagatttgctgagaaaggaaatcctaagagaattaaaagtttagaactccattagaatctagataacttcttcaagtggacgtgtcccggcgggttgcaaactgccactgaccgcccggggcctttcgcggtccctggaggtggtagggcgcgagcaccgagtgcgggtggccagcagtgccggagctgcggatgaagcatccttggacggaaggacgaggcctttgacgccccaatgactctgggcgcccgggaacaggttgaggatcttactctccccgtgactcagtcgattgggcggggcgggcgaggcctctgggccccgcctctcgccgcaggcgcgcccgccccgcctacccgctcccctcggaggtggccgcggccgagcgcggggagggaggacgctgcgggggcggg

SEQ ID NO: 44538 - DNA, 411 bp, Mus musculus
  source 1..411: mol_type = other DNA
gaggtatatatagctcagtggtatctctaggagcattaggttctggggtctggctccagcacagcactacatctagtgttttcttttaaagttattaatttatatcaattaatttatatgaaatagggtttgatctatagccccagctggcctagctagacctccctatgtagcccaggctgtgagtactaccctgcgcaaatctcattttctaaagactcattttgtgaaaatttccctctggcctgagaggacagcctggcaatcctcagccggggtggggacgtctgccgaagatccttggactccagcaaccagtggtcgccaccggcggagaacagctgtgcagccacgctggacactcacgcggacggccacgaccctaaaggctgggcgcggcaggaggccacg

SEQ ID NO: 44539 - DNA, 323 bp, Mus musculus
  source 1..323: mol_type = other DNA
ttgattgactggaagtatgtgccacacatccacctgcttcatgtataaatattgtggtggagtacatgcacaggaagttcaagaacaagtttctagagttggttttcctttcaccatagattctagaataataactctggaagtcactatgtagaccagaccattttttcttatcctgtttactacagaagaaacagaaacgtgtaactttttattttggactgggtcccacgtagactaggctagcctagaccatgctacttagtcaaagtctggctttgatgagggcgacctgacctccttgcctgtagtccttaaggacc

SEQ ID NO: 44540 - DNA, 205 bp, Mus musculus
  source 1..205: mol_type = other DNA
tcctggctggaaactgctactcaccagtagtatacatgaggagcacaggattcatcaaaaggtaaagtttgaaatattacacagtgatccaaataaaccctcattttatctggacagtgtgcagctccctccacacccagtctggctgggcatgcaagatgctagactttagaggcctgtagatctatctaaaaagcaggaccat

SEQ ID NO: 44541 - DNA, 496 bp, Mus musculus
  source 1..496: mol_type = other DNA
catctttttcagagggtctcagacccagtagtactcttctagaagttagctctcccacaaaggcagacttcactatgtgaatgaagcaatctgaacttgatccaggcctgcaggcgccagtcaatgggcaatttccacctgcctaatgcctttctaggctcgagggcaagcagggccaggctttggacccagagggccaaggtccctctacattcttgcccacattttgtgtctaaacacactgctttgtattaataattctgtgtgcctggacccacagaattatggtattgtctgataacagaatagtgtaatagtgatccaattaatttgtaatattaatagtaatctgtaatttcctaaggggtgtctattaacaaaactgaggtcacaaaacttttagtatactccatttaaggagaaatctatgcttactttgatatgcatacactactatattaggtgttttagagagcaaatatagatcaatacatgc

SEQ ID NO: 44542 - DNA, 597 bp, Mus musculus
  source 1..597: mol_type = other DNA
ctcttgcagtgttaaacaaaattatagtgacacatagtttgtattttttttctcgagttctgaaatgacatgattggactaatgcttttatgtcacagaaaggaaaatgcactgtatgaaaaaaacttaatgtgataacacgcagtggtttgcactgcattgtttctttaaattaggtattttctcttaaaagatataatttgtctttgaaactaatttagcctcaaaattttacatctaaactttttatttctatgtaatacaagataaggcttaatatacacaaccccgctgcgaactagtagcaggagagatgttgttttcctttagaacagcaacactgtacattctagtctggcagctgtcagtggccccagggcaggtctgcccgcaggtgagttccagcctccgggcagcgggccggcctggccggtggctgccgtaggtagtgctctgggcccagggcgtcctctccctcgccccaggcgcccgcctgccctccactgagctcagcccacggcgcccgacgccctaacggagcgggcgggggcggcctacaggcccctccccggcgcccggcggcagccgcgcaagcag

SEQ ID NO: 44543 - DNA, 304 bp, Mus musculus
  source 1..304: mol_type = other DNA
gccattaataattactcaataataattacaacgacattgctctagcctcataaatttcctttttaaaattttctttgggtggctccacccacggaacagcggggcctgagggccggcgcgtctctagaggacatgaagctgtttctatgaggataaaaacttcatcggactaggctggaattcagagacccacctgcctcggccacccgagtgcgtttttttttaaagatttatttatttattatatgtaagtacattgcagtcgggtgctctaaatcaccaaattttcgcatttaaaacccaa

SEQ ID NO: 44544 - DNA, 445 bp, Mus musculus
  source 1..445: mol_type = other DNA
tcactttgtagaccaggctggccttgaactcaggatcctttggtccagagcaactgcactctgtctggaaacaatatatatgattatttatatagagagtccagattctttactgttattctatttcatttccaagatgttggctacaatctattacacagattttgtgacataccactaagttctttacacttggtcttaatcaggctgagtctcaatagcggcagtgcattgaagccaactaagtactactgaaaatgcagctctccagacatgtagatgcatctgtgctcagcacctacagtgttcaggatttcaggcatgtcctggtgcccaggcccctcgcctccacagggccgtgaccgtggccgagtaactgaccgtgcgcgactccgtggtcagacccaggactgctgcgcgcactagctacccacagcgcaccgcg

SEQ ID NO: 44545 - DNA, 370 bp, Mus musculus
  source 1..370: mol_type = other DNA
catgaactgctcttccagagctcctgagtatgaacatataagtgagcatctctgtatagccttttaaaaaagaggttataaataccattttgcagtatagaaaatcccaactagtgctcttccgaaggtgtacttacatataataaataaataaataaataaataaataaataaatctttaaaaaaattccaactattaatactatgtgaaaacatggatcataaattacagtataatgcagggtatggtggtgcacgcccctcggcaaccaaaaacaacttagaaatataaaataattttctttaggaaactacgggatgaaattctcccgcagcgctgcgcgcgcacgtgacccggtcgcatgactcc

SEQ ID NO: 44546 - DNA, 347 bp, Mus musculus
  source 1..347: mol_type = other DNA
aggtgctaggaatcaatcctggatcccctggaagagcattttaaatgtaaagtgaagcacaaagcaggttctcattaccccactatcacatcaaatatttcattttactttatttagaagatctaggcaatgcccaggccgggctagaactcaagcttctgcctctgccagttgcgcgctaggatcacaggcttgtgcgctgtacaccgggctaggctggggttgaaatttccgaggcgcctgcgcgcatacagcttgcaacgaggacctacgggcaggcccgcctctcgtggatctggcttctgcacgtcagaggcgaggcttccggcctccggggcggggcttcc

SEQ ID NO: 44547 - DNA, 224 bp, Mus musculus
  source 1..224: mol_type = other DNA
tgtacccttcctgtagggctcccagctctggattaattgtattaagagactgaagagagattgcagcttgagtcacacaattcaactctgtctttaaacatatgtatatatcagaaaagagctgctgatgtcaagagtgtctccacatggagaacacccccaggttgactcctccctggtccagttctgcagccccatgcggcttgttaccaggtgccagctgg

SEQ ID NO: 44548 - DNA, 495 bp, Mus musculus
  source 1..495: mol_type = other DNA
ccctgctcatgctggacagagagctgcctgccactgccctggacctatggctgctacaagcccacgttagctatgatggccattatgagccagccaacgtttgtattctagaagccatagctgaagctgttgtaaacaatttgttgttttaaccgcttctggtcagaggaaggagagaaatagctattactccacattgggacctgagccctgagctctgaagtggggcagcagcttgctgagaacagcttttcacagccttcctcgcaaaaattggctccaaagaccaggtgacacctgtgcaagcacaagcaggtgacactttgaagagctaacctccagaaagtggaaaggaggtgatcgccagtaccctcgagggccctccctgggctcagagcaaagggcacagcggctgggcgctgatgggctcccgaagcccccgccccggccaggccgtcgcaagcgctctggagggcggtccgcgtgagagccagc

SEQ ID NO: 44549 - DNA, 420 bp, Mus musculus
  source 1..420: mol_type = other DNA
aaaataaaaataaatacatctaataaatatttttaaaaattaaaaaaaatcgagtgtcactaatatagctttggtttctgatctgcttaaatggcataatggggcataggaacatttctgacaaaaggactcaaaatccttcctaatgtaactataaaggaattttaataagtttaatctataaaatccataaataatgctgttccagatgaagagccactggaattatttttctcacatagaaaccatttctgtttgaggcatatactaagccatcttccgctactccaacctatagggttgcagacttaactttccaaatggaacgccagctgtcccaatattggaacctctgcatacccaggggaagtggcgcccgccctcgggggcgaggaagagaggccgagactccgcccccga

SEQ ID NO: 44550 - DNA, 337 bp, Mus musculus
  source 1..337: mol_type = other DNA
ggtgcacgcctttaatcccagtccaggacagccagggctatacagagaaaccctgtctcgggggaaaaaaatgatttaattcattattaaaacaggaattgagagctctttcagaatggctcacaaccatttgtccaggtgacacggacgctctcttctcgcctccgaggagactgacccttaagtaataagtttcagactgagtaattaggcaattttaaaaaggagcaatacccccagcgctcggggagagcagcatgagccaggcgcccagcggttgtcccgggaaccggaggcgtgactccgcgtttcctcggtccagaggcggggcgcacgg

SEQ ID NO: 44551 - DNA, 239 bp, Mus musculus
  source 1..239: mol_type = other DNA
tgcttgcaaccaaagccccttggtcccaaattcagagtgaaacagcatcatgtaggcctgccacgtgccagggtttctggattccagatgtggagcaagctgggtgcccaggatatgtagggagagcagcattcggtcactccaatcctgggtcctgtggggctcacagtgtctgtccattgtcagatggccagcaggccagaacggattcaggccagagaccattaccagggacactt

SEQ ID NO: 44552 - DNA, 268 bp, Mus musculus
  source 1..268: mol_type = other DNA
tcaatcgtgtcaaggggtgaccatactggccaatcttgggaaaacctggcatacttgccagtggcagctaattttagcagggcttggacctgagcattgctgtcatccacaatagttaaaaaaaaaaattgttttacttgcaggagaggacctgaatcttcccagcttgtatgtgcactggagccccagactgtgtggctgtgcataggaggatagtgggctagctccagccagtcctggccctggccctgtccctgaccccgtggca

SEQ ID NO: 44553 - DNA, 493 bp, Mus musculus
  source 1..493: mol_type = other DNA
gacactatttatcaggttgtaacttgagcagaaagattactagatattttagatgaaatataaaaatactttccacaactgataggtaggaaacagttcaatagtaatataattattgaacaaataatccttaaaagatgtgtgtgtgtgtgtgcgcgcacatttatagccaaaatagatgatatacttaaatgaacattattttgcatacagtttacatatgctaatgaatacttaaaaaaaatctgatgcctatgtctgaagaaagtgacagtgtacttataattataaataaataaatctttaaccaaacacacagagtgtggagccagtgcggttccaggctggcagccactccttagtgtgataggcaccaaggcactgacctgggaccaagctggcagtcactgtggtgacagggtgacagagtggtcaccatggtgacactgcatggtggctctaatgagacaatggtcaccatagaaaccacagg

SEQ ID NO: 44554 - DNA, 429 bp, Mus musculus
  source 1..429: mol_type = other DNA
ttgttaaacatctgcaatgagcaggacttatcacttaccaacatgtctacaaaaaaggtattttttgagtcacattggaagcctttgtacaactttggataaagaggctttcttcagaaatggttctcagccatggtcagtgcaggtgaatatagctgacacctctggccgcctggcttgtcgaacaagtgtgtccaagctgagtggccatagccagtgacgtttctgatttttattattgcaagagaaaggatgaagggcctttcttttcgagcccggaagggaacctgcgccaaggcactgccacgcaggcggagaccgagcctcctggcgccgacccgggcggacgcgggcgcgccccgccgcttagctacccgtccgcgcacgcgcgtaccctgccttcgggcctccgaggagcggctggagcaa

SEQ ID NO: 44555 - DNA, 639 bp, Mus musculus
  source 1..639: mol_type = other DNA
gggggccttgtggaaatccacctgtgccctccttcttcagggccactttcaagagactggaaagaatggaggctccttttcctggccagggcagagggaaagggctgcccaggctatctgggcaggatggctgtgagctctcagaagtcacaggagtccctgaaagagctgagcagccgcagggagagactcgggaccacctccctatggagggcgactcccaaatggggtgcagttccctcctgcacaactgcggcagcagaagagtcagcccattggcttgtccgtgcagggcgcgggcctagagggtcagacgcagtgcgtgggcaccgtgtggtgcagcccatgtgctggcgggcgcagtgcgggtgccggcgcgggcgcgacgggcatgcgaggggagccgcggtgcgggtgcagggtgcgggcgcagtgcgcgtgcaggcgcgggcgctagtgcaggtaccaaggggcggcgggcggggcgggcgcggcggcgacagcggcgcccgcgcctctgcgcgcgtaggtgtgcggcgcgctcctggcggggacagagcgagcagatctcgcgtgcgctcgccgcccggcgcagcccagcccggcccccgcccggcgccgcgagccgaggtgtctccc

SEQ ID NO: 44556 - DNA, 538 bp, Mus musculus
  source 1..538: mol_type = other DNA
gggggccttgtggaaatccacctgtgcccctgggggcctggctccaaacaccaagaagggggccttgtggaaatccacctgtgccctccttcttcagggccactttcaagagactggaaagaatggaggctccttttcctggccagggcagagggaaagggctgcccaggctatctgggcaggatggctgtgagctctcagaagtcacaggagtccctgaaagagctgagcagccgcagggagagactcgggaccacctccctatggagggcgactcccaaatggggtgcagttccctcctgcacaactgcggcagcagaagagtcagcccattggcttgtccgtgcagggcgcgggcctagagggtcagacgcagtgcgtgggcaccgtgtggtgcagcccatgtgctggcgggcgcagtgcgggtgccggcgcgggcgcgacgggcatgcgaggggagccgcggtgcgggtgcagggtgcgggcgcagtgcgcgtgcaggcgcgggcgctagtgcaggtaccaaggggcggcgggc

SEQ ID NO: 44557 - DNA, 311 bp, Mus musculus
  source 1..311: mol_type = other DNA
ttgacagatagctatactccagtgtgaatatagcagttctgttttgtaggctgcctgaaacatttgaagtaatgtctcaatgcagattttgcaaaaaataattaatttacgtggagccatgtttaaacagggtttctctgtataaccctggctgtcctggaacttactttgtagaccaggctggcctcgaactcagaaatctgcctagtgctggtttaaaagcctaggtagtttaaaaccttttggcctctgggggcatcaagcatgcacatggtgtacagaaatatatggtggcaaaacattcatgcata

SEQ ID NO: 44558 - DNA, 281 bp, Mus musculus
  source 1..281: mol_type = other DNA
ccagaaggatcctgtaccagaaggtactgagggagacggtcagattgattgtgtgtcaaccttacataaacgttttcttaaaatgtctatatgcacgtattagtaacggcacgtgtatacacacatgctatacatacggatgcacacacgactacgtcaagtggccgtcaaacatggttggtcggttaccgccggtagtaacaagcgcggaccggaagttccgcgtcttcgctgtccggggggagccgttaggcgcgcacgccggaagtggccaatcagcc

SEQ ID NO: 44559 - DNA, 174 bp, Mus musculus
  source 1..174: mol_type = other DNA
taccaatttagctacattgaatgaaccagaaggatcctgtaccagaaggtactgagggagacggtcagattgattgtgtgtcaaccttacataaacgttttcttaaaatgtctatatgcacgtattagtaacggcacgtgtatacacacatgctatacatacggatgcacacac

SEQ ID NO: 44560 - DNA, 313 bp, Mus musculus
  source 1..313: mol_type = other DNA
aggtgatgttgtgtggcccagggcccttctcctcagccagcccacccgagcccctgggaccaggtagctgcatgagtgccttgaagcaattcagccctggcaatagaggccaaggtcctggcctgtcttggtgatagcaaccatgtacctgggcccaggttgggtgggacttgccactcagagcccctaaccagggttgttcagaggactaggccagggccaggaccagggatccaaggaatctctggtccctaatagcaactaccaaagccaggccagtgtctggtctcgcagaggaacagctctgcgtgca

SEQ ID NO: 44561 - DNA, 310 bp, Mus musculus
  source 1..310: mol_type = other DNA
aaggtcaagcatgcctttcagcactaaaccagtctggacatgcctttaatctcagcatctgagtttgaagccagcctggtctacagagtgagttccaggacagcacacagatcctaaggacattccctggtaaggaattctcaaagaatgggccttattaacatgtgtaacaaagtctgattttcgttttctgggaactttgtgaaaatcttcatagtagctgaaggcctgataacatttatctcctaagtggcggctgcctccctttagccaaaacgcaaagtacttccaggaagtgacgtaccttcca

SEQ ID NO: 44562 - DNA, 395 bp, Mus musculus
  source 1..395: mol_type = other DNA
agctaggagaagtgctgcctactggagggatgctaccacccatagtgggttaggaatggaggtacacatagacataatcactatatgatatataatgtatgacttgatagtaattaaaactggataaaaggccagcttgcaagaagccacgggtgtgataatacactgctcaggaggctgtgtaaactaagctatctttgaatttattgtgactcaataagtcctgcagttgtgaaatgacacaatgtgttctcttctgtagggtgctcaaaagaaaggtttattttatggggaccagaagaactcacaagccctgggcagcttcattgggccggactgcgacactgcgcaggcgcatgttccgtttccaagcgggtgcgcaaacgctgagcagt

SEQ ID NO: 44563 - DNA, 390 bp, Mus musculus
  source 1..390: mol_type = other DNA
tgaaattgaatccagcaggctgcccacaagaaagtgtgctgcaaaatctggcttgacctcaaactcagagatgagcctgcctctgcttctgctttaaggtgtgcactcacacagccaggctctgaggggaacatttcatattagtgaagtgtaacaggttacaggctctggagccaggaagatccagggtggttcacactcatgttattcaaattattttgtgctttaccaacccaacattgttttggatacaaagcccgtgggcctcaaagtcgcagcgccttaacaagcttcggaagaaacagtgagcaacaggctggctttggccagatgcaaagttctgcattgggacgtcacgtcacgcccacagcctgtgccgctcctctgggg

SEQ ID NO: 44564 - DNA, 472 bp, Mus musculus
  source 1..472: mol_type = other DNA
ctctggggccgggctacgcgttgacgccacacgccggggcggggctgagaagcccgcttcactcgggcggcagacgggctccgtccagggctgggaggctcggcgcttgacacccggagctcgcggccgaggacgggcgtgaagccggacagagccgggctgggtcctccaggcgggcggagattggcggacgcggacttgcgccgggggtcggggggccgagcgctattggctctggcggcggagccgcgtggcctggcggcccgggagagccccaaggtcgcggcgtgtcacgtggaccggtcgctccctctggcccgcgcgctgcgctgaccccagcaggccgccgtccttgtgttcgccgtgcccggacacggcgctgaccttggtgcctgcggcagccccacctgccggtatgaggtaaaccaggctgtcggccaaggtgacactggtttccctagaaacacccacg

SEQ ID NO: 44565 - DNA, 450 bp, Mus musculus
  source 1..450: mol_type = other DNA
ggcagacgggctccgtccagggctgggaggctcggcgcttgacacccggagctcgcggccgaggacgggcgtgaagccggacagagccgggctgggtcctccaggcgggcggagattggcggacgcggacttgcgccgggggtcggggggccgagcgctattggctctggcggcggagccgcgtggcctggcggcccgggagagccccaaggtcgcggcgtgtcacgtggaccggtcgctccctctggcccgcgcgctgcgctgaccccagcaggccgccgtccttgtgttcgccgtgcccggacacggcgctgaccttggtgcctgcggcagccccacctgccggtatgaggtaaaccaggctgtcggccaaggtgacactggtttccctagaaacacccacgaactcaacttcctgactgtaagatcagtgacgtcaaaggaacacct

SEQ ID NO: 44566 - DNA, 360 bp, Mus musculus
  source 1..360: mol_type = other DNA
ggatgggagcctaaggctgcccaggcaagggcactgccctgcagagcctccaggtctgtactgagccctgagtggtaagcacaaagagagctgagtgggtgctgcgatacccctctctcccctagacaagaggtgtggcaatcacacacctgagaagtgcccaacacatggcttgtgtgccattctgtgtgtgtcactgccatgttgggaattcacaagtgtcaagatgtccacttgaccatatacttaaggtcattgtgtatgtgtgtgtgtgtgtgcacctacatgcatgcatacatgcacgcacgcgcgcgcgcgcacacacacacacacatcagcttgaaggtcctgtgacctgaa

SEQ ID NO: 44567 - DNA, 473 bp, Mus musculus
  source 1..473: mol_type = other DNA
ctgtgtctaaagcagacgctatggtgaagggtcttccacaggctttgtttatgaggcagggcctcacacttacaggcgtgtgctgaccaggatcgtgtttaaatagcttcctcctgaagatatatttggaaagtaggacatttaaaaagtatttcataatctttaaaatgtgggtcctggatctaggcccagggatgcctggcctcaggaccccgcccgaccttgaagggccgctcgaccttcactggggaagaccaggggccccgacgcgttcctaaggacagccagattgcgtggccaccctgcgccgcaaccatctagtaggagcccgcgggcgggaacctgcctctgcgcgctacagcgcacgcgcgcctcgcgccccgccccacccgcgcccgcgcccgcccataggcctgtcgcgccgtccgggcgcgcgactcggtggtgggcggggcccgaaccgggtaaaggaa

SEQ ID NO: 44568 - DNA, 312 bp, Mus musculus
  source 1..312: mol_type = other DNA
tcaaaagaaacaattcaaattttgagacaggtattgtctagctggagataaatttctaaaacaatggcttggaattaagctttgaagctggaatctaagacaaatgactacattcgatgatcacaaaaataataaaaccttttaaagttgtgtgaatgggttggaagaatttaactagacacttattcctaaattttcacaatagcttttgcacaaaggtaactctacttaaacttgttgcaattgaagaaaaacaacagctgtgccgaacccacctccaagccggccgccgagaggcggcgcgaggcgggc

SEQ ID NO: 44569 - DNA, 416 bp, Mus musculus
  source 1..416: mol_type = other DNA
ctggtgtgtctgaagacagcttcagtgtacttacatataataataaataaatctttaaaaaaaaaaaaaaacccaaaagttatttgtgtgaactccattcagggagtttataaaataagatggtattctggtttctttgttttagaaacacgggcttatttactgaaggatggtgtactcgtccctgaggattaataatctagtagcattagtgatcactagctggggtatgctctggaaacccggggtagccgcagaacgccttgccggcgcggccagcgacgtcacctctgcgccccgccggcgtggtgtgtgtgggtcttccggccgggaggcggcggcgggcggggcggagtgacgtcacgggaggcgcgcgccggaagcgggccgtgccgcacggaagccgcgggggcggg

SEQ ID NO: 44570 - DNA, 376 bp, Mus musculus
  source 1..376: mol_type = other DNA
gcaggccgatttctgagttcgaggcaagcctggagcctggtctacccaggacagccagggctatacagagaaaccaataaaagaaatatctattgggctagagagatggctcagaagttaagagcactgactgctctatgcatatggtgcacttatacatgtagacaaagcacttgtacacaaaatagatgtttaaaacgttttaaaagaagcatcctgccaggcgtggtggcacatgcctttaatcctgtctaaagaaagaagaagaagcatcctttcttactgagcctataatcctagctactttggggaggcgaattccagcctgcccgtaatcttacagacaggtatggccaaacctagcttgggaagagct

SEQ ID NO: 44571 - DNA, 386 bp, Mus musculus
  source 1..386: mol_type = other DNA
aactattacaaagacttgtttctgcagcaaattcgtgaagttttggaggcagaagcaggtggatctgagttcgaggccagcctgttctctccggttccaggccccagctttggcacccgccgccactaccaggaccggccagctgggggagcgggttaaacccgcgctcgaggccacgccccaggggcgctgacgtcagtgtcttggagcccgcgcacgcggctttgggcggggctgcgtggtgacgttacgcgtgcgcggctcgctgctgtgaccgtaactttaagcacacgtgagcgtcctcagctggcagccatggctggcgggtccttcctagcatgtgctgcgcgccggctgagctcggtccctggggagacacgtgccac

SEQ ID NO: 44572 - DNA, 349 bp, Mus musculus
  source 1..349: mol_type = other DNA
tgagattcaaagtttgtgtcactagaaatttaatgagaactaagccacccttgcaagctcaaggccctgggcttgggaatgaactattacaaagacttgtttctgcagcaaattcgtgaagttttggaggcagaagcaggtggatctgagttcgaggccagcctgttctctccggttccaggccccagctttggcacccgccgccactaccaggaccggccagctgggggagcgggttaaacccgcgctcgaggccacgccccaggggcgctgacgtcagtgtcttggagcccgcgcacgcggctttgggcggggctgcgtggtgacgttacgcgtgcgcggctcgctg

SEQ ID NO: 44573 - DNA, 419 bp, Mus musculus
  source 1..419: mol_type = other DNA
tcaggaatgtgaatatccatcagaatgctttttaccaggctggcctcaaactcagggttgcatgactctggtccaacggttgatccttggagactgactctgtcccttcgggatgtggcccgcctccctaatcgcgaggcaggctgggaagtcggccaccctaaagagccactcccgcgcggccctgaagggttcgggagaggcaggtgtgctcctcccgccctgaggaggcatggaggggcccggggtgaccctgggtctcttcaggggctttgggaaaaacagggaatcgccctgccctccttgggcccagcgagtgcctctaggcggaaggggtctccggagtgggcgggctccctaggtccggacgggtggggcgcggccggggcggagactgcgggcgggccggcggcgcggtg

SEQ ID NO: 44574 - DNA, 228 bp, Mus musculus
  source 1..228: mol_type = other DNA
ttgatgtgctcaattcacacattgattgcttgttgacaatgatgcccacggcatgctgggtgacactgtagactcttgtaggccatgtttcctaaaaggcctagagaacatatacttttctgtaaagtttagaaagtatccggattaaatttatttgttgtaggtcagtgaagcaaaactagatgaaattgctttttatggacattcagttcagcgtggaattcatga

SEQ ID NO: 44575 - DNA, 447 bp, Mus musculus
  source 1..447: mol_type = other DNA
tatagaattcagtagattacaaacatacctactgctgggttaggtggtattgcatgagaccataggttaaatgcattttgacttaatttatgatggattatttgcttattggtctatggatatatatagtcatactaattagttaaatagccatttctattgtcttttatcaacaataaatgttaacttctcctttcctggatgaagaagtttaactgtgaggaaattaaaacaacttgcttatgaacacattgttttattgcacttgctgctgtggaggcttgtccttgtcctcctgccaccaggaccacagggcccggggtcctccctgatgatgcaatggattgcaacactgcagagttggatggaaatggccacggcctccgctgcctgtctttaagctttctcaaaactgtaaacaacttcagtaagctttgcagaaggaag

SEQ ID NO: 44576 - DNA, 348 bp, Mus musculus
  source 1..348: mol_type = other DNA
gctagaaataatttttctgaagaaaaactgtaggtttatttttcttttctccaatacctaaaaatgtgtcattgtaagcaaaaggcttgcagctcatgaaaccatattgcacctgcagtcagtggagcaggaagtgcgctggcgtctgcggaggctcaagtacaagcacttggtcttcctggctgagtcctgtgcctccttcatgaaggagcaacactcgcaggaactgctggccgagctgctaatgcacgacagccgtacattggtgaccatgatgacaatggagcctgaaagcttctgtgtctgggcaacttctgaagttaacacaggagttctggttagacctga

SEQ ID NO: 44577 - DNA, 217 bp, Mus musculus
  source 1..217: mol_type = other DNA
agaccagcctggtctacacagcgagttcaacagacagttagtttaggggccacttgactgtgaggacgctaaggcagggccttctccaggtcgtcccggcttctaaacttggtatgtagaccaagctagccacgaaacctctcctacaggacctgtgaaaggcccaaggggcggagggcgtggcctccgtccgggagcactgggccacctagcttcc

SEQ ID NO: 44578 - DNA, 305 bp, Mus musculus
  source 1..305: mol_type = other DNA
cagaattttctcagtgaaaattcacagaaagttgtagtgagcctttctctgggccttagctctcagaccagcaagtgctctctttctgagggtggtcccaacattgggaacaggccaggtccttggaggccccgtcactgactgtttgcatgtgtgcacacccaagctctctgtcccttggagacaggcagggctctcagacctgcaaggatgaaccccgggtttctccgtgacactgaggttaatccggctcatccccagaccaaacccgtggcctgggttggggctctccgaggtcccgccct

SEQ ID NO: 44579 - DNA, 571 bp, Mus musculus
  source 1..571: mol_type = other DNA
ccgtggacgctggcactgggggctgcggtctctagggcgcaaaggccgtggacgctggcactgggggctgcggtctctagggcgcaaaggccgtggacgctggcactgggggctgcagtctctagggcgcaaaggccatgaacgctggccctgggggctgcggtctccagggcacaaaggactgggggctgcagtctctagggcacaaaggccgtggctggctggcactgggggctgcagtccccccatccgggaaatggagtactaaagattctgtttaacaaaccaccttcttcaagaccttaggtctccagcactgcttgccacctgcttggctcaaggtgagtgtgagggcactgtgttcattcccagacacacatgtgggcacacacgcgcgcacacatgcgtgcacacacagatcccgggtgctctcactcatataccaggagcggcctctgccaaacttaactgactcaagccagtccggatacctcctttattgtttggaaacaaaggctcctaggctcagaatctaggtggcagtcagcgttcctgggagctaggaagctca

SEQ ID NO: 44580 - DNA, 447 bp, Mus musculus
  source 1..447: mol_type = other DNA
gaggcgcggctttcctttggggcgctgagagggcttcccctgacacttcgtattcaaagaggccatggctggcgctgacagtcagtaagcacacagtcactctgggtcatcccccccttccttgcaagagaaatcaaggaaatgtccatggggcacagtgcccagcaggacatgcacagtatgggcccttctgggaagtggccttccaatgtgctctgcacagcactcttagaagaatttttagaaaactccagactcgagtggattgcctttgtctgtgatgggttccaacccaaccactcaaagtgacacttgtcacatttgtcactccgctttcataataaacaagtattactttttaagtgggggaaaaaatgaccacccttacaaaggactttttaaaaatggcctccattgtggcccgaaggaagtgttgtagcccatcta

SEQ ID NO: 44581 - DNA, 292 bp, Mus musculus
  source 1..292: mol_type = other DNA
attgacctttagggccattctggcccagagctctggccactggatgaggcaggactcagactgcatgcacagtcggaggtccccgggaactgctggggttcagctcatgggtccctgggctgcatggaggccaaggacaacagattctcaggctctgggaggtctcctgcaggagattggaaggcctgctagacagttcatgattttaaagcgtttattgtcatggtggagacaaacagccccttttacagtgggccaggcctacctggctgttgccaggtaactgccaggt

SEQ ID NO: 44582 - DNA, 378 bp, Mus musculus
  source 1..378: mol_type = other DNA
tcttctaaaacagtctgcctggtgcacccgtgggatccagaggtggcacaagctcctggcatctgttctactctcagggtcctctgggactctccagggggccatcctgagtgagcaccgaatgaaattctgtccggtcccttcccttagtgaatggacatcaccaaaaggagagagccgcgctacaaagctttcactacccacccaggtggtgggcaaatcagtcactacagagctgttctgcgtttttgcccaaggtcacgtggccccttgggcgtgcgggatcccgggcgctgagttgggcgcggactctgtccgcccaggatcggggctcttggggctcgcctgtcgcagcacggtcgccgcagaggaccactg

SEQ ID NO: 44583 - DNA, 509 bp, Mus musculus
  source 1..509: mol_type = other DNA
ggtgccagggcccctggggcaccatgctactgcattgcaggggtctcctctgcccctgaggaattgctacgctgctgctgttgcaatagctttaaaggacaccgccctgtacaggagaggggcagttttgtcaggaaaaagtatcctggtttctaaagtttctaatttccatctaaaatcccagacccagccccctttaaattttaaagtttcagaagcaaattggtaatgggtagtgttgattacccggtagatataaaatgccaaaagccctgggaacctgctgcattttgtgggccagcacgcctagaggtttgaaatcctagtactgctgagccctgagccaatcagatggcggcagggaggcgcacccccctccccacccccgcccgcgggaaggcgtttccgcgtctgcctgagcagcggtgcccggctctgggctgcggtctgcgggggagggcagatggagggcggccgcgcggggcccgccactcgcgcctggcttttcc

SEQ ID NO: 44584 - DNA, 194 bp, Mus musculus
  source 1..194: mol_type = other DNA
cactgtggtacagtacagttttcagctgttgctagaggttggtcgctctgatctatttcagattgcccttaaacatttctgaagttttccttgtgatataaaagaatgaaaatgcagaggagccaggaggtgaactacggatttcttcctttgaggctagcagcttgctgacagagttgggcacagccagccag

SEQ ID NO: 44585 - DNA, 397 bp, Mus musculus
  source 1..397: mol_type = other DNA
attcctggcaagcctggctttttcttgaaggcacaatatggcagtggctgcaccgagcagatagatacaatttctacactagaaactgatggaaattcctttgaaagaccatgcaatggcatgccatcattccctgtcagaaatcttgctctgtcctcatctgagaaaggctgttcaggagatctaggacttcctcctggcagaacctccccaggtgcacttacgtagacatgaatactggggcccccgaggtatttagggttaaagagctcatcccttgggtcagggtgtccagcacctgaggtgaccggcagggctccggtgcgcgggcggtccgtagcgattgccggagccgcctcgagggggccctgccgcgggcgcgggcggccagccagga

SEQ ID NO: 44586 - DNA, 505 bp, Mus musculus
  source 1..505: mol_type = other DNA
agcattacttagagctctgttgtgacatagttcaaatgagttgtggtactctttcacagagcttataaaacatttcccagaggaaggctacctgtatataggtatctcagctgaagtactaacaatgcccttgggagcatggtcaccatggtaaccagagccaggtagtcaggcatctttacttgcttgaataagttagtgacatttttaaagttttaaagaaactgtatttggaacttttttttaaaaaaaaaatatgatcctgagtttttaaatacgagtataattcatagctgttgattgaatacctatcattatagactatattacgatttctaaagatgatgagcgctccatcagctagtgggtttctcctcatggaggccccaccgcggaggacaactggggaaagctttcattcttgtattttgtttcttataatttaaacagaacattgcaggttttattattattattaataattcatttatttacttacatcaca

SEQ ID NO: 44587 - DNA, 420 bp, Mus musculus
  source 1..420: mol_type = other DNA
ctgcgctattgcgcctggatttcactccagtctgcactggaactaaaactcgttgtgatactaatcatgcatgcttcagttattttaacgcagatgcgtccgctaagaggaacttctcatctttaaaaagaaaaaaactgtccgtggtgcagatttaaacctcgagctctaaggttctccagacctcaaccctggaaaggccagcttagccagccatccaggcagagtccctggagtggctgggactctagagacgcaaggtggcctggaacagggcgtgcgcacagagagcaggtgcccggtgaagacgcgcgcagcgcgcccccgtcctcgttcccgcttcgtcgggaggcgcgggccccggagcggagcctgcgccggcccaccccccaccctcgccgttccggggcgtgttatcgg

SEQ ID NO: 44588 - DNA, 504 bp, Mus musculus
  source 1..504: mol_type = other DNA
gaacatgctcattccacacataccagaaatacctcaaagatatgcttttacatatttggcaaaggattttaagaatattttaatcccaataccattttaaatttttacaggtataatccttgaaaaaccaaaatgttctattctgggtttaaaatcctttttaaaaaaaattctaagactactacattaagagggctttgaggtttgcctaagcacccccattacctggggctaataagaatgtacaggttcctttcagtttctattgagatgcagaattattacttcactacatatggttttagaggtaaactactaagtaaagtgttcaaagttttaaaaacattttaaacagtttttcaaaatcagtcatcgtttccccgcagccgccgggacgtgactgggcaggcggtgggcggacctctccggccgcaccatccccacggaacctctgtgcccgcgcccaggtttccccgccgggacgctcagggagggacttttgtc

SEQ ID NO: 44589 - DNA, 401 bp, Mus musculus
  source 1..401: mol_type = other DNA
tattgaatattgagtaatcacagtcatgttttttgactttaacaaaccatacagatggcatgctctctctgggctatccagcgcttaaagggagcttcccctgaagagcatgctaatttcacaaaacagagcctgacagctattttttctagtttttttaaaaaaaggaatatatatatatatatatatatatatatatatatttggaatacatacatatatttggaaactattttgatttaattcagctcactagagctgtgactaatgcctaaacatcactctctagagagtaaagccttcttcacaccgtggtttcgaggaggaacactcctcttactggctgtggctcagcatgatcaagattctctttgtgagctgtggttcacaaagcccagttg

SEQ ID NO: 44590 - DNA, 554 bp, Mus musculus
  source 1..554: mol_type = other DNA
catttcaaaaatgctttaatcttaaagaaaattttaacaaacagaatttcttagacagctctaataatttatccttcactcttgcaggaacggaaagtctaaacttctttctatagatgtatggttaagagctttctaaagcagccatcagagcgctatactgaacagcattttctgaaagtcacgacatcacctgacatgatggctttaaaaacaaaaaaatattcttcaaaagtaaggcatgaaaagtatttacctgataattttgagtattgacccctcagtgtatctttaatgcatttaagcgactcataagcccctgggcatcccaggtactgggattacaagcctttgttgtttgtttgtttgttttcaaggaagaaacaagtaactcttgcctggttgaagttacaacagttcctgtagagacctcagggaagggtcactgttctgggagcatttaggcaccccgcgcaaggcagaggcagagggccagcgacagacgtctattctctgcgcacacgcgccacacacgctggttggccgcctggccg

SEQ ID NO: 44591 - DNA, 309 bp, Mus musculus
  source 1..309: mol_type = other DNA
agtgtacacaggcttccaggcctctcagctggctgtcaacaccagttggtgcctcccgtctccagcccttctctggacacagagggtgtgcaacctaggaaccttcactgaattcagctttctcggatccagatagtggaagcgggaaacatttgtcttatttgggtcctgaattaggagcaaaagttaggtagccttgcatgcaaaggccctggcttcaagctcctcactcaccgcagggagcatagcggtaagaggtgccaagcagaggctgcaggggcaaagtcactgcgcttgtggttccacccg

SEQ ID NO: 44592 - DNA, 320 bp, Mus musculus
  source 1..320: mol_type = other DNA
ctaacctgtgctgagttggctcaaaataactcatctttctattttgctggcactagaataacaatgagcagctcttacttgcacctggcccaggaacagggtctaaaacagtaatggagatccaccaaagccttgggatgctggctcacaacccagctctgtgttctctgccacagatcctcagaagcaggatcataggcagttctgctacggctcatgctcaggagcacaggtcctcgtgggaggcaaacagtgattgttgccccagctcgctccggatggcagctggggtgccttctgccaactgaatgaatgagtca

SEQ ID NO: 44593 - DNA, 253 bp, Mus musculus
  source 1..253: mol_type = other DNA
gcagctcttacttgcacctggcccaggaacagggtctaaaacagtaatggagatccaccaaagccttgggatgctggctcacaacccagctctgtgttctctgccacagatcctcagaagcaggatcataggcagttctgctacggctcatgctcaggagcacaggtcctcgtgggaggcaaacagtgattgttgccccagctcgctccggatggcagctggggtgccttctgccaactgaatgaatgagtca

SEQ ID NO: 44594 - DNA, 271 bp, Mus musculus
  source 1..271: mol_type = other DNA
tcctcagaagcaggatcataggcagttctgctacggctcatgctcaggagcacaggtcctcgtgggaggcaaacagtgattgttgccccagctcgctccggatggcagctggggtgccttctgccaactgaatgaatgagtcacatttctagaaaaatggacagttgagcaggtccgggtgctatcagctgagccctccagcggagccaaagccaggcggtgacctctgggcggggctaggggaggcgagcctgccgacagctaggttctc

SEQ ID NO: 44595 - DNA, 318 bp, Mus musculus
  source 1..318: mol_type = other DNA
gcctctgtgacagccctgagttcaagttcacgaacccatatatgaagttgagcactggggaggcagtgacaagctagtgagtgctaagaaaaggccctgtctcaagttacacacacacacacacacacggggtggggggttggggggaatcacgtgaggctcaggagtagcctcaggctcgccgtccacgacttacttacatcagggaggtcaggggaaaacgtggcccttgtctctcctgggacatttgatgcctgccttattcaagtcaccaataatctgtctaataggccacaggcttctactgaaggctggtat

SEQ ID NO: 44596 - DNA, 318 bp, Mus musculus
  source 1..318: mol_type = other DNA
ctgaatcagctgctgagtggtaacagagtatcattaatagtgtcaggctacaggaggtggcctctttaggcccctatgagtaatctaaaacgatacatatccgtctgcagatgcagacagcctggtggctcctgaggttgctgcagaagcagccgattcctcagcctcaagaagacaataaaaggtctcctcaaaatgattgattttttttttcaggaaatcaggggttatatttccaaattactccttgtaacaataatagttaccggaagaaggacgccaggtggcagtagcaactggctccaacgggcaagtggc

SEQ ID NO: 44597 - DNA, 543 bp, Mus musculus
  source 1..543: mol_type = other DNA
ttgttccaaagctggaaataacaaggttgcctacccaaaatgcattttcaaagacataacatttataaactggatagtcttcctaccctgctgtgaatatgtactttatatattgcttattaagtatgtctatatttaataattctcagagcttatgaagatgtttcacagtgtttttcactgaaacccaggttagtgagcattcctgaccatggtgctatgactgcaactcaactcaaactcaagtcaccgtgatattctattgttagaattaaatatgaaagtgatatgatcataagtcattggaaactgtaaacattcctcattgtccatactgaaaatgttgactatttaatgatttaaagccatttgtagtggctataaattttgaaaattacagatctttatgctgagcatacttctggaaatgggatctagaaaccaattatgtgatagcctagtacacagagccctcagagagatggccattgccactgctgactattaaaaagacgttgtcatgtgaactattggttctgaatc

SEQ ID NO: 44598 - DNA, 482 bp, Mus musculus
  source 1..482: mol_type = other DNA
aacagaaagatacacaaactgtagcttaatcccaaacaaagcttcactttttttttttttaacaaagcttgacaagatgatttttattgttttgtggccaacatatatatatatgtgaaaatttagttcacaactgagctagaattaaggaaaaaaaatccctttgttataactggaaactacttcattatccacataaggaaaacaatgaaaggtaacattttgaactgctaaacttttgttttagaagaaactatgctctgcaagtaagattatttaaattagtaataaagcaaatagcaaaaacatatgataagatcctatcctaagaatggtagaaattagaatattcaagactattcacaggaatcctctttgtaatagttaacgcttcaattacagaagaatataaaaaatgttattctttctcgtgggatcaaaagacataaaaactcttcaaaatctattattgatcagatcct

SEQ ID NO: 44599 - DNA, 750 bp, Mus musculus
  source 1..750: mol_type = other DNA
atcagaggctgcagtcctgtctctacgcaggcactccgtgcctgacacgccagggagaggtctgcggcgccgtggagctccacgctggcgtgtgcacacaggccgggatggaaggcgccatcctaacttcttcccaccccctagggtgggcatcagtaccttggggtctgagcccgaacgtgggagcccacgggtcccagtttcagggactcggctgtgcgcttgcagcggttgctcttagacaccggggaaagtgccttacagtgtcccgggcgagtgagcctgtgtcccgaccgcccggctgtcccggctgtcccgcgcgtggcgctgcggcagggaggcccctccccctccccgccggccccgcacgtgccgcacccctgcgggtcgagcgcgggtcccgcagtggcgcggttgagccggaccggcccgcgggcaaagcgcgggccgccgcatcccgcgcggggcagcggcgtgatgctgcgctgggcgccaaggggagggcccgggcgcgctgcgcgcgggggtggcggcggcgcgccgagcgggcccggcgcgggcgagcgggctgcagccgccggcggcgccagcaggtacggccggtgcccgccgccgcccggctaccctcggcggccgggcccgagccccgtgcggctgcaaactttgtgtgcgcggcccggcgggtcgcggagttgccgtctgaaggcgggacccgagggcgggcgcgggacgggagggtgcctccctctg

SEQ ID NO: 44600 - DNA, 855 bp, Mus musculus
  source 1..855: mol_type = other DNA
ttggggtctgagcccgaacgtgggagcccacgggtcccagtttcagggactcggctgtgcgcttgcagcggttgctcttagacaccggggaaagtgccttacagtgtcccgggcgagtgagcctgtgtcccgaccgcccggctgtcccggctgtcccgcgcgtggcgctgcggcagggaggcccctccccctccccgccggccccgcacgtgccgcacccctgcgggtcgagcgcgggtcccgcagtggcgcggttgagccggaccggcccgcgggcaaagcgcgggccgccgcatcccgcgcggggcagcggcgtgatgctgcgctgggcgccaaggggagggcccgggcgcgctgcgcgcgggggtggcggcggcgcgccgagcgggcccggcgcgggcgagcgggctgcagccgccggcggcgccagcaggtacggccggtgcccgccgccgcccggctaccctcggcggccgggcccgagccccgtgcggctgcaaactttgtgtgcgcggcccggcgggtcgcggagttgccgtctgaaggcgggacccgagggcgggcgcgggacgggagggtgcctccctctgacccgctcagtgtccccgtcagggtcccgaagccgcgtgccgtgcgcgcaggccgggtgggctgtgggacaagccgagcgggaggcgagtcgcaagcgcccccaagtttgcacggtgcggggcgaggggcgcgcgctccgggctgccgcaggtggcggcgcggtgagcccgggccaggtgccccggcagcggggcggcgctgtcgtgcgggacagccgggctgccaggggctcggagccgggtcggagcccgcggggggctgctc

SEQ ID NO: 44601 - DNA, 351 bp, Mus musculus
  source 1..351: mol_type = other DNA
gggaaagttccctcggtgactccaggactgtccatgttttagctacctacgattagtttttttaaaaaaaaaaaaaaaaaaaagctcttcagttcttgggcgccggggcgggcaggctctggagtggcggcccggaggctacacctccccttccccctcccgggccctaggtgcctttgcagcacctagctcggcaaaggtttgcttagatttatcgccaccgcgcgggctaaatctccctcgttaaggcctgggcggtgacctcaggcctccgccctcacgctgcgtgcagcgcgcgctcagccgccctctacacgcatgcgcaacgcgggccgagccgtcacttcgcgc

SEQ ID NO: 44602 - DNA, 384 bp, Mus musculus
  source 1..384: mol_type = other DNA
aagttaccttttagaaagcacaatttaagggatactataagaataatattaaaagtagtttgaggataagatcacttaaaatcttttcatgtccccttccccacaaaaaagttgcaggactgctgcataataattcagccttcataaagaaacagtttaataataaggaacacccttaaccccagaactcaggaggcaggggcaggaggttctcctagcctaccaacctaggggaaacagcatatatacatttggtgttgtccgactgcatttaaaaataaactctgtgttcctagaagcagcacggagctcactcttaattgtagctaaagctaattctgggagactgcgctttctctccaggagactggagcctccggacta

SEQ ID NO: 44603 - DNA, 247 bp, Mus musculus
  source 1..247: mol_type = other DNA
gtatactatgttcatgtgtgtgtgcactctgtacatggatatgacatctataaacgtgtggcatgtgctgtacacatgtgtgtgttcattctctatacatgtctggtaatgtgtaccctttcaaaagaaactacccctgtatcagaattccagtggatggaatccctgcggatggatgaagcagggcctgagccaggattcgccccgaaacctgggttttgctgggctccatcctgtggagcaggag

SEQ ID NO: 44604 - DNA, 191 bp, Mus musculus
  source 1..191: mol_type = other DNA
aggcctacctggtctacaaagtaagatccagccagggctctgtttcacacagtaaccctggattgtggttgtatattctgacagaaatttctttcttttataccaagaaagagaaacttgggggttgaacagccccgagctggctcgccaatgcctttgcttcaggcagacaaaggttgccatggcgagcc

SEQ ID NO: 44605 - DNA, 255 bp, Mus musculus
  source 1..255: mol_type = other DNA
gtttcccttccctcaggaaaacaaaaagaattccactctacttcctcttgcgtctggattccatactggagtttggatccctcacagtgactctaagttaatcaaaatctcatccactatatggtcttctgtatgatcaatttaaaggctctggacagagggttggagttatgaaatcacttagtagggctaacactaagtgtattgaatcaagctcactgggtgagatttcttaggagaaattaatgtttaacc

SEQ ID NO: 44606 - DNA, 510 bp, Mus musculus
  source 1..510: mol_type = other DNA
gccgtgttggcgcgtgccggcgcgttccggagcatgccggcgcgtgccgggctcgcgttggcgcgtgccaggctcgcgttggcgcgtgccgggctcgcgttggcgcgtgtcgggctcgcgttggcgcgtgccggcgcgtgccgatttgtcctggagcgtgccggcgcgtgccggtttctggaagcgcgtgctggtttgtaggcgcgtgccagcgcgtgcaggcctgtgttggcgcgtgccggcttatgttggcgcgtgccggcctgccgcgatcattcgtctctgagcggcacggccctgtcggttggggcggagccttggcgaaccccagcgagccgcggggccgagcgctgtccatgaggagcgctgtccacgcgctggggccgggttcgggagctgtccactggccccggtagcgcgcacgcagcgaccccgtgtggcgaagtctgtgctagccctccgcggtgggcagctcctgcgagctcgcgagcacgaatggcctcgggctcg

SEQ ID NO: 44607 - DNA, 292 bp, Mus musculus
  source 1..292: mol_type = other DNA
ttagatttcaactcttaagcatttggcctttttttttttttaatagagaagagtcctatatgacctgctcttctagaccaggaagctgtagggcaggtgtcctgtccaacataccccgggaacccaggttttcggactgactgtactttaagcatagacatgaggggcttagcactgttggatgccacactgagaacagcctcaattctgttggattgactttatatttaaaaggattctatagcatgaccaccctgaagcctctgctccccggggagcagccctattcgga

SEQ ID NO: 44608 - DNA, 409 bp, Mus musculus
  source 1..409: mol_type = other DNA
cgattctggatcctgaggttctctagccgttcctgttcttgcccatcagagcgaaggggggcagcagagggcccccgctgggcctcggggcgtggctgcaaggaccagccgcgtccctcgtcctcccggtcgtcaggggtgcccagtcaattcctgccgtgttggcgcgtgccggcgcgttccggagcatgccggcgcgtgccgggctcgcgttggcgcgtgccaggctcgcgttggcgcgtgccgggctcgcgttggcgcgtgtcgggctcgcgttggcgcgtgccggcgcgtgccgatttgtcctggagcgtgccggcgcgtgccggtttctggaagcgcgtgctggtttgtaggcgcgtgccagcgcgtgcaggcctgtgttggcgcgtgccggcttatgttggcg

SEQ ID NO: 44609 - DNA, 313 bp, Mus musculus
  source 1..313: mol_type = other DNA
cgcatgccaagccattactttctttagaatttacatataaatgcaaaaatgacaaagacttgtttgaggttcatttttttttgcaatatgaattttaagttgataatattgacttatctgaaatctttagtatatgaatatattcaaacatagattgtatacatgatttttctggtattgtcaatttgaactgaatagacattgtgattctggaacctaggatctaggattttccacaaatttaacaaacacatgggttttacttagcatttgacaaatctcttgtctacaaggggctttggctcttccaaga

SEQ ID NO: 44610 - DNA, 639 bp, Mus musculus
  source 1..639: mol_type = other DNA
gctgatgtatatattataatacaatcatcataagctacttactacatctatactctcacatgctgatgtatatattataatacaatcataagctacttattacatctatactctcacatgctgatgtatatattataatacaatcataagctacttactacatctatactctcacatgctgatgtatatattataatacaatcataagctacttactacatctatactctcacatgctgatgtatatattataatacaatcataagctacttactacatctatactctcacatgctgatgtatatattataatacaatcataagctacttactaaaactttaagcattttcttaagctactgttactcagttggacaaatgaggcatcaagaactaaggcctttagttgaatttgaagtttgtcttgattattacaatctactgttccttataagactaatttattaagtccatttattttagtttcttgagtaaagatgtaaaattcagatttatgtatcccaatttaaaaatcatttgcaacattaagatggagggataggaagccctggttcttgttccacagaagcagtgctgctcacaaagacagctcagatctcccttgggaggaactttcca

SEQ ID NO: 44611 - DNA, 550 bp, Mus musculus
  source 1..550: mol_type = other DNA
cagcttctcgactttctagaagttacttttaagaagttactttttagtggtagcctatctgtactagaaaacttatttcgaaggggccgatcaaattagcccggcacggcccgtctgggctttactttcacgagggccccacatgaagggcctctcaggcttccctccttcggctactcacacgcagctggcgaaactgaggctgagaaaggtgaggctcggacccgacccgccgtgagcaagcccgagtttccttgtccgggcccggggctgcccacgacggtgtcgggcggccgcagcccagttcccttccgaatggccctcgggacaggtccggtcggtcttccgccggcgcggccgcgcaccggggcggtggcgtggcgccgggggtcccgcgcgctgcaagcatggtgggcgcgctcccgcccgggcgggagagcatcgtgccacgccaaccccgcgagcccgcgccccccgcgccacgccctgcgcccaggccgcggctcctcccgcgctggcggccgccgagcggtccgggcggcggcgggag

SEQ ID NO: 44612 - DNA, 418 bp, Mus musculus
  source 1..418: mol_type = other DNA
ccaacaagctattcattgcatcgagactcttatagttgtcatggtgtttaatagtcaaggttcaagagcatcttttaagccacttcattaattcaggaacttgagattttcttcttagtttcataagggacaaagataacttcaaggaaggatattttttaaataaaaataatagtcattatcagatccagctatatagtattttacatacagctgacccatgagtttaagatctcatcctaaagtgggagagatcttcctatcatgatgtgatcagaactaagtgaaacaatgaaacagagaactcctatcttgctgtcacagctgcagttgtcaacttgacatatctttagttgataattaatgtagtaaggttccacccactgtgggttgtgccatcctagggaggtgaggcctt

SEQ ID NO: 44613 - DNA, 418 bp, Mus musculus
  source 1..418: mol_type = other DNA
agcaaagaaggctactgcaggactcccctctttccttaaacagaaagttggggttcagagacagagttcagtcacagaattttgcgtacaactgctgtatttgaagggcggaacttcatagcaaacttgcagtgaggcctcagcacctgctgcctctgctgatttctcagaaaaaggtgtgctctagttctaacaaagctggggcagaaactgaggcgctagaccgtcgcagcctagtcggcccgcctcgccccgcgcagccacaggtggccaccagccggctgggcaggtgactcggtgcccaccgcggggcgcgcgccccgcccaggtgtgctccggcgggcagcgggggcgcgcggagaggcgggcgctggggagcggcgcgcgggcacggggcggcgccgcggtgggcgcggct

SEQ ID NO: 44614 - DNA, 470 bp, Mus musculus
  source 1..470: mol_type = other DNA
ggcctaggcggccattggtcaggcaaatgttatatgccccagaatgtaaatgagctaaattctattggcttttaatttagcaattgtgacagttatttcttacaatttaatttccctttagaacagaattgttttatgattcaacagttgtgtatatttaatacccttcttcttagtattaattataaagaaattttcaataatagaggcactaacttttcaatgagcataccttatattaaactgtccacaatcctaattaaaccattgcatttagtgtaataagaatgtttagcatgaaggcttcttttcaacatgatctatttataattgctatatcagtagctttcaactttattctaaataaaggttaaaagatgtcttataagtagaatgatataacttattcttctctggttgatttacttcactcagaaggattgcacggtgctgtacagtgcaagatttcc

SEQ ID NO: 44615 - DNA, 549 bp, Mus musculus
  source 1..549: mol_type = other DNA
tgcaacccaaactgggctagaatgctccacaggctccagtcttgggcccagggggtcgacaggggtcacaggaggcctgggtcttcttagagctttccatggggctctaacacagcatgcatgtctgtgtggatacagggatggttgaagatttgttcagaggcccaggcttgggaacaaaagaaacagccactccattttttatccagggtttaaaggctgaagaatgagagctctcagcactgtctcgtgctccctgttctagagaagccaggggactacctctgccctcaggaggggcaatcttgactgtccaggcactggagagatccaggcccagggtgacacctgtgggaggtctgatggcagagcgcctccaggttcccaccactctctggggcgtgcggagggtgcggaacccactcaggccaaggcctagaccttcggtgcctgggggcagacagcgatctctgaggtgagcccagggagctgcccatgttcacagcttccgggaaccaaggacctgccacgggcaggaccgaccgttgg

SEQ ID NO: 44616 - DNA, 546 bp, Mus musculus
  source 1..546: mol_type = other DNA
tggaagaaactagctttccttcaattagtttccaatgctactgtaacaaaacttgttttttacccattctctctgtattttttcaaattctgtaaaaactgtagtaaggccacgaggcatattgaacttaaacaatgctaattaaaggaaatttaatcttgaaaatcaccccaaaaataggttgtgtttaacactgctctgttagaatcatatgtttggtaagaaattcataattagtcatgactatgaaagccatcagccacctggaggacattctatgatttattaatgattattcatagcttcagacctacatagaaacctaaggaggtaaaggaatttaaattccttctgctcacttggcaggaaggaatagagtgctgtccatccctcagatctttaacttggagacaaagttatcagaaatcttttgaatctgtatattgccaggactttgcacggcttcagaaggaccacaccaggccaaacagtgccacgtgtgttaccttggcaacaggtgttcaggtcatgcaggtcctgatacca

SEQ ID NO: 44617 - DNA, 430 bp, Mus musculus
  source 1..430: mol_type = other DNA
atccactatggactaccatcacaatttccatagatgataaatagtgaaccttgacaactattgtgcagttattttttcttaagaacattcaaatgaacagtgctcatttttccgacagtgaaagaaaatacatttctgtgaatagcctgtatgaaatttctgtgaattccaaaaatcattataccttctttctcaaaatggcaaggaaaaaaaatggaacaaaataataccgttgtctcttaaacagacaattcatgactcaccaagcctagtttgttcacacaaaccactgtatattgagtacccgatcacctggtgtcaatgcctttatccttgcaatggaatgaattagggtataatctgggtgacaggatacatgtattcataaacatgtaagaaacatatgcatatcaccttacagccaacggtc

SEQ ID NO: 44618 - DNA, 408 bp, Mus musculus
  source 1..408: mol_type = other DNA
tgtgtgtgtgtgtgtgtgtgagagagagagagagagagatattgtctattcacataatcctaaagactattatgtaattaatgttatgcaaaaggaactgaacaaaacaaaaataatcctccacccagaatactgtgggagggaatgaaaaagatgatacgcatagcgttatggacttttcttacaatacattctggtgaaataataatagcataagatcattttagctggagcagttaataactggttaatgccagggccccgcatccccacccccggccggcaggtgcgcagtcccggcggcaaagttgggcgccgcgcgagcccagtccgcgccgccctgcgcccgctccactcgccgcgggctcgctgggcgtggggagggcggcgagcacgcaagccgagcga

SEQ ID NO: 44619 - DNA, 294 bp, Mus musculus
  source 1..294: mol_type = other DNA
cagattgacagttgtcacttttaaaaaaagaaactctaattgctcattttgaatatacaaaaacaactccttcaaataactaatgtttcagaaaatttttataggtcttttagatactaatgaaattattgaaagcaaagtattgtaatctgtttcacagtacttgcccgaggttgcacgtgaaatgaagtaaaatgtactcagagactgttagtaccagcagtacatcagcagaaagtcattttccgaacgctcaggtcgcacgtagcactgcgccggcgtagtgacgtctct

SEQ ID NO: 44620 - DNA, 382 bp, Mus musculus
  source 1..382: mol_type = other DNA
aatttggataatccttcacagtatgctagaagtttgtcacctatatggttttaaaaatcatatttttttgttttatgtttctttaaacatcattaatatatgaatcactcaatgtgtatatatatatttgttcagattgacagttgtcacttttaaaaaaagaaactctaattgctcattttgaatatacaaaaacaactccttcaaataactaatgtttcagaaaatttttataggtcttttagatactaatgaaattattgaaagcaaagtattgtaatctgtttcacagtacttgcccgaggttgcacgtgaaatgaagtaaaatgtactcagagactgttagtaccagcagtacatcagcagaaagtcattttccgaa

SEQ ID NO: 44621 - DNA, 207 bp, Mus musculus
  source 1..207: mol_type = other DNA
gttccaaattctaagtgaacttacttggcaatttgcctccttgtagaaaatgccatgttcttcaacatgcatgcttaagatggagggttcttgatgggatctgaaggacccttggctgccaagtcagcatggagaactgtggttggactcctaggtcctgagggagcggagtcccctcagaatgtctagtggtggccaaggccatcc

SEQ ID NO: 44622 - DNA, 520 bp, Mus musculus
  source 1..520: mol_type = other DNA
ttcagacattaggtagtccgctcttaaatgtgtcttcccaggggagttgagcgtttctatgtatatatatgtacatcctggaaagttccccaggatgctttctgccattaggcctaagtaaacaagtatctcttagcttcaacatctttataatcagagacatatagaatgttcaaactaaaggccgtaagggtgtaatatggaatgctagcaaatatcttctctggcactatatttttgcaagatgctactagataagcttccccgggcagctccctggaatgttactatgctaatattatcatcaaaaaaaatttcaacgtgaactttttcctggggagagagagccttggcgctcaaactctcggccgtctcaatcgctagctaccaaagcactttgggagtttgcaagtcccgccctttgtaagtcccgccctttgtaacgcccatgtgcccgctgtcactcagcggggacgctggacctttctttccttcccttacggtgatgaaacgcagggta

SEQ ID NO: 44623 - DNA, 447 bp, Mus musculus
  source 1..447: mol_type = other DNA
gaaatctttccttctgtcaaaggaattccacaagaggcaggaagtttttcaattatattcccaaaaatctcactaggaatcttctaaattatctcggaaatgtttgcttgcaaacaagtctcagcacacagtgcgtgcgctgcaagacccctctgtggacactgggagtcctggcgagcgcaaccacatccctgtgctgtgaggacagagctgagcacgctggtccctgtgcagggaagggcagagctgcctctcctacctaaaggcgcggtgccggctcctccagtctccggatttgaatcttttccggaaggccttaccctgcgtttcatcaccgtaagggaaggaaagaaaggtccagcgtccccgctgagtgacagcgggcacatgggcgttacaaagggcgggacttacaaagggcgggacttgcaaactcccaaagtgctt

SEQ ID NO: 44624 - DNA, 501 bp, Mus musculus
  source 1..501: mol_type = other DNA
ttgagagaatttcactctgaagatcagtctggcaggcaaatttcaccatgtccagcatgacagctataggaaagaattgctgaccaatcctaaaattacctttctaaatttacatcttaagtttgtctagcaaaatgtggtttggaaatactctctgtacatttacaagaggatatattaacatacagctttcaaatgtatgtacttaataacacagcttgtttcttttttaaaagttatttttatatttttacattagtttttctactcaagtgtatctcttttaaatatttaatgcaattcattgtaatataattttcttggttaatcactgtaaatagtacatgatctttaaagttctttccccagtattaggataactttgtaagagcagctgaggctcttaacctctgaagcatctcattatttcaggaatttacagcactgcacaactatttttaaatttttttttagccctggctgtcctaccaggctggcctc

SEQ ID NO: 44625 - DNA, 307 bp, Mus musculus
  source 1..307: mol_type = other DNA
ttgtggcacacatatatgtatttttataaaaataaccatatgaaataatgttttccttagggcttttccatgttcctattaaaagggataacatacaagttacttattcaaatctaaagatctggatctaggattcatataatatttttcagttcacccactcatctgaaaatttcatgatttcatcactcacctcaattttattaagtactttttcaatacttcaagaacaattcctaagcgataaagttttattcaggacttttacatatgggtaaatatttgactaagctgtcctcgtcacccc

SEQ ID NO: 44626 - DNA, 354 bp, Mus musculus
  source 1..354: mol_type = other DNA
agcagggttagacaatgtaaaatatgatgcacctttaaaatagttgtatagcaactgtagtttcgatagattggcaaggttttgttttgatttttttgctaacagttacaataaacaccaatacctcagaatcatttttatacatatatatatatagcttattaactaaataaaagtaaatgggaggcatcaattgtatcctgcattggatgctgaagaaggaactcatttttctccgtcaggcgcagactctgcaagagttggtcagactcacccttccagatttgtgtgtgtgtgtgtgtatatatatatatatatgattgattatagtgtcaattctaagccaagatatgt

SEQ ID NO: 44627 - DNA, 265 bp, Mus musculus
  source 1..265: mol_type = other DNA
catttttatacatatatatatatagcttattaactaaataaaagtaaatgggaggcatcaattgtatcctgcattggatgctgaagaaggaactcatttttctccgtcaggcgcagactctgcaagagttggtcagactcacccttccagatttgtgtgtgtgtgtgtgtatatatatatatatatgattgattatagtgtcaattctaagccaagatatgtatcccttagggcctagactctggggtctcagcagtgctgattt

SEQ ID NO: 44628 - DNA, 423 bp, Mus musculus
  source 1..423: mol_type = other DNA
cgctgttacagtttaccctgataaattcatagggtgccaccgagtgattgtgtcccctgcaggacataccctgacctttattttctatctattcaaaacctgactaaaataaataacataaatacgttatctttatcacatctcctactgtagtttcacttctatagtaaggcaacttactacatggacaacagggcagtctgtctcgccagctgcagggcaacacctaagctgcagctattgactccacagtgtagacttcggtcacatgacaggaagcgcggcccggcgcacggtacgcaaaaagcgctggcggagcgctagcggggctctgcgagcaatccggttgcacggcagggcgcgggttcccggatgtcagcctcccgcaggctccgccccgccccgccccgcgctcgctccgcc

SEQ ID NO: 44629 - DNA, 374 bp, Mus musculus
  source 1..374: mol_type = other DNA
aactgacacttcttaaaggattttattgcatatatctactagtagactacgacaactgctacgttgccacgaaatgttaacttcacttcccagaaaccttgcaacggactgcacggaggatgctcttgtttctgctggagcattgaggtcccgcagcagcttgaggtccccgcgctggatctcgtacacctggataacgccggtgccccgggcaaagttgcccatcgtcacgaatttggcactgcagggcagatctgaggcttctcgaagactgccgttaccacaacgactttacatagacacagtaaagactggccttaggcccctggcatggaccccgcctaggaggaggctggcgcatgcgctgtacaacc

SEQ ID NO: 44630 - DNA, 249 bp, Mus musculus
  source 1..249: mol_type = other DNA
aaaacaacacaaaatatgaacttgtacttttcatatcttcactcatttaatttttgaaactatttttcaccctccaaagattaatctgaggtgcacagtttggtccggagtggccaacccggaccccggggggctcccagaggctgatccccagcctcctgggacctatgtagcagaggtctgcttagtctgtcttgaggccccaattaaataaatagttaattaaaaaatcctcctgcgcacgcgcac

SEQ ID NO: 44631 - DNA, 350 bp, Mus musculus
  source 1..350: mol_type = other DNA
ggtaggctacgaaatggctaccctcttccttacctttcaggttaaagcgtaatgttctacaatcggagtaaatatcttctggacgcccgggccccgccccgccccgtcccgtcccgtcctgatccccaccaggagctgatccccggagagcggcgggaagaccggcctcttcgccggccgcgcctcctcacgactgctcagcctgcccggcggccgcgtgacgggagtaaagccgtacacgtgcgtggttgtacagcgcatgcgccagcctcctcctaggcggggtccatgccaggggcctaaggccagtctttactgtgtctatgtaaagtcgttgtggtaacggcagt

SEQ ID NO: 44632 - DNA, 380 bp, Mus musculus
  source 1..380: mol_type = other DNA
taaatagagttattttgatttatggcaataacactaaaacttaatagcagcaactgggtaccatctagaggtttatatttcttaaggagaaaatgtgaaagttttctctactttcccccactcgtcatggccctagtgaacgaggctcaataacccagccgctgccccgggatccagtccccaaacacttgtctgtggacagaaaacgtttgcagtcgactttatccagttctggattagaagaaagaaaaaaatgaaacaaaatgaaatctgttcattttcctactgaacctccaggagggactcttggctcaagttcgtccctcacggaaacacttcagtgtgaacccagtaggcctgagaccagcccagagcgctct

SEQ ID NO: 44633 - DNA, 459 bp, Mus musculus
  source 1..459: mol_type = other DNA
tgttacagatataaaaccaaataatctttatggctatctttagtgccctaagtagccattaaggacccagctgtcaggattggcatcctgaagggatgggtctcataaattatatcctacaaagcgccgcaaatgcttattgaaacatgtttttaggccaacctgaatcaatgctcctgcatggaaattattacttgattcaaaataaacactattttattcctactaagatgacagtgttagtttattaaattaatacgttttatctatgaactattgcgtttattacctcctaaactatagtctttattttctcatattatcgaataacacaccatcatttgaatcttagaaataatcaattaaattttaaattcaataagaatctgtcattgtatatgaactctttactgtccataccaagttcctgttgactcagaaaaaggcagccaattagaa

SEQ ID NO: 44634 - DNA, 465 bp, Mus musculus
  source 1..465: mol_type = other DNA
tacaccccaaaaccaatagtgatttgtttctagggaagcgaaacaagcaaggtaacagacattgtattttacagatatctcttaactccaatttgctgggctaaccggatgttacacctagcaagttccgggagggcccggtttaccggactcggctctgcagccccaggcctcccgcccggtctgcactcaccccggggactgcgcccgccgtcagccgctgcctgccgctgcgcccgccgcgcagaccgcgttcccgcccggcggagctgggagctgcaggccgccctggactcccgcagccacggctctgccgccgggcggcagttcttagcagccgccctgtgcggcgtgctcctccgggcagggctgtccgcattgctcgacagagagcccgcgcgccaccgtgcagcgccatctttgcaagtcgggcgcgcaaaatacgctgcttctaattggctgcct

SEQ ID NO: 44635 - DNA, 295 bp, Mus musculus
  source 1..295: mol_type = other DNA
cctccgggagtctagcagagaatccagtacaaatactggcagaccccaataatttcgaggaaagtcttgaagtctttcatgagcggagccctgagcgaattaactccggcatctgcctgcggccagagctcgcttcgcgcacccaccgaagcgggcagcatcgatcgtggtcagtgcagcagttgcaaaaccagaagaagacagaacggacgatcattcattcaccacgttgacaacctcgcctgtgattgacatgggggggagagaagatctgctttttttttcccctcccact

SEQ ID NO: 44636 - DNA, 382 bp, Mus musculus
  source 1..382: mol_type = other DNA
ccagccgcagcgcagcggagctctgcagcttcgccgcgccccgggcgcacggctaaagaaagagcctcgggtcccggggctcccaggccccggccgcccgcaaggtctggctgcttgtaaacaagcgctgggcttcctccctcacttcgcgcggcggctggggctgagggcgcaagcatttcctttcctccgccacttctgacagcgggggcagaacgcccgggcgaccgctacccctccgggagtctagcagagaatccagtacaaatactggcagaccccaataatttcgaggaaagtcttgaagtctttcatgagcggagccctgagcgaattaactccggcatctgcctgcggccagagctcgcttcgcgcacccacc

SEQ ID NO: 44637 - DNA, 502 bp, Mus musculus
  source 1..502: mol_type = other DNA
atgttaccacagaggacttgctcaaccgtgttcactgctgctctgttcataagagccagcaattctgtcagtgaatgactggtgtggcacattcaaaaattctgaaatttatgtgttaccccctgaaagacaaatacaatattctcttgtatgtgaattttgactgttatgtcatagataagcatgctacaatctatataaccacagaagttataaccacgatggtagaagcttcatataatgtaatatatgtgtgtatatatatatatatacatatatatatataataagttgatacatatgtgtatgtacatctacatgtacatgtaggtgattatatgagaatgcaatctatatgcatatgtatgtatatatatatatgtgtgtatatatatatatatacacacacaagatggtatatatatatatatatatatatatatatatatatatgcaatgtaaatgaaaatacatggaatgagttacatctaattgaattgtt

SEQ ID NO: 44638 - DNA, 217 bp, Mus musculus
  source 1..217: mol_type = other DNA
ttattacagactggataatttactttggtgtatttttaaaaatatgcccgctctaggtgggcatgcatggtgtggaggccagcggaggccacctgcactccttgatttttaatccgaaggtttggaaggagggagggacaaaacgggagccagatgtgctcttgtctctaaaacccggagcaccggagacaagcctccgccgctgggaagacgtcat

SEQ ID NO: 44639 - DNA, 376 bp, Mus musculus
  source 1..376: mol_type = other DNA
caaaactaaactaaaattaaaggaaagagttttgttctttgttttcgagatgccaagttcaccactatgcgctaagtgaaagcattatctttcttagaccaggctggcctccaacggacctcaattttaaagtctgcatttggcaacatggtgagttcctgtttgagaaaattcccgccaggctcctagggctgcatgcaacggaggtttgaaacttgtaggtgtatccaccctaggaatgacacactcctgtacagccggcccggccgcgccctaggtcccgagacaacttggtcagagccgccggaacgaggcgagagggcgcgcccgggtccgcgccggacagctctcattggccggctgccgggcggggact

SEQ ID NO: 44640 - DNA, 378 bp, Mus musculus
  source 1..378: mol_type = other DNA
gtccatttgcagctattgcaacatcaagttgctattcctgctgtccttagagcagcctcagagcagagctccccggtcggccttagccaatccgctagggggagtccgagcgaagtcctagccagcaggccaggcggggcctagtgggaagctgagtgcagacagccctcggcccggtcgggctgcccagcgcgcggtgtgctgcgtgccccgcgacgctgccgccctctgggccgcgccaggccccttggcctaggcttccccactggttcgccggcggccattttgggtggaagcgatcactgagtggcggcggcgcggcggctgcgtcagcaagggcggtggtggcggcggcggcggcggcagctgcagtgacat

SEQ ID NO: 44641 - DNA, 473 bp, Mus musculus
  source 1..473: mol_type = other DNA
ttctgggttgaagagagaattcaaggccttaacaatacacttttactttaaacagcctgggatacgatgaaattttgcctgtactccctgcactggggaagccgaggcagaaggagcactatggccaggcaggccagcctggcagtagctccttctctaaacttctggtgagacaggctgggcctcctgagcctcagagtctcaggacggtcgggggtggggggagggagggagctcgacccacacctggtcccctcgcccaacttctgcccgatgcccagattcggacatgccctgggggggagcaccaagcctggaaccaccctcccagccgcggagagcgatccgcggagagcgcgccttgctatccgcgtgggcctgcgtggacgccaggaccgcgaacacccagctggcacgcgcgtccgcagggtcctgcagggggcgtcctccgcggagaagcggcaagggcggag

SEQ ID NO: 44642 - DNA, 486 bp, Mus musculus
  source 1..486: mol_type = other DNA
tccctttttatctgctgtggcccgggaagatagtaaataaatggcatttttaaaaaatccattgaaccatctttcagactggccaaacacttgactgaactgttggcgtgccaagtctggagacccggacgcttgtgtttcagcttaagttacatggcagacacgccaccgtccaatggactcgccccagagggcgctagtgcacgcagtggctcacccttggcactgtgcatagtgccacgttgggtcgttccggactccctagcggagggcgggcaccaacctccgagggctcccctcctccaccagctgaggagaagaactgccgaggctcccctccctctctccccgaggcctggacagtaggaccgatggcctcacgccccgtcgggagagcccagcctcactctctttgctgtgcctcccggagggtgggagtgggcggggcgagctcaagccccgccctccttcctaggctgcagcctc

SEQ ID NO: 44643 - DNA, 556 bp, Mus musculus
  source 1..556: mol_type = other DNA
aaaagaacatgtgttctatcccagagcacgtgcccacaggggctgacgcggatcaagtttggatcgtatccactccgaatcggtccgccctgagagtgggcttggccggcaggtccactggcaggtttcgcaaggggcccgcccgcgcgcccctccagccggtccagggttacgccgccagctgcggtgccccgccccgccccgccccgccccgccccgccccgccccgccccgccccgcgcggcccggctctcacacggtcttgcgtgactgactcgggccgggcgggctggaggaccgcgcgggaggagggagccagagcgcgggcccgcccgctcctcaccgcccacaggccggcgtccatcacccccaggtggcgggagggcagagtgactccgcgggtctcccgcggctcctacagtgtccttagaagactcattgggccaggggcgaaccgtcacggcggtacgccctgccactgggcagcctcgctgcgctcccgccccgcccgccgccgcctcgccgctccttcccggtccagctgggcggggactgc

SEQ ID NO: 44644 - DNA, 300 bp, Mus musculus
  source 1..300: mol_type = other DNA
gttaagaccatagactcatattaggttagtaccaaaattaaaattatatcttaggaattagagactgtgcataattaaaaataaatagttaaaaacatttaaaatttttattatcacacgcatgtactaatatgtcaatgtatttacattcatggagaaaatatcttacaatgaaagggatttgtttttgtctatcactatagagtaaataccttagataactatgtctgaccagttctggcagtgtgctgctgggtccacatcaccctgagtttgactgcatgctgagagcacacacag

SEQ ID NO: 44645 - DNA, 279 bp, Mus musculus
  source 1..279: mol_type = other DNA
ctttatgtagaatgcatatgccattttaaaggtaatgatagtagttaaaaacattaaggattttttgttttttttgttttttaaatgggaaagataagccagccggcccaagtggccaaataagtagtggcggtccgcacacttgggcgggcccggggcgggccctgcgaagctgaggcgggtccggaccggctggaggcggggcctggggcggggctggtggggcggggcccggccaggcagggggtggggcctacggggcctggccggagctcgcca

SEQ ID NO: 44646 - DNA, 427 bp, Mus musculus
  source 1..427: mol_type = other DNA
tgagacaggaataaaaatcctgcagctttgtctgagttttctctattgtatagaatcgctcaaatgcacaagttgattggaaagatgtatgaaaatgatcatcttctccaaacaccaacacaattctggactgatttttgtagaatgacttctcgtcttaagtaggcttcctcttttgttggcttacataaaaagggaagggaatgaaagtcttttattccgggcaaaaaggacaagctgctgaatgttgtccagccggtttttcagcagaatttccatacgtctgcagtaggaagctcaggtctgtggcccggagcgctgcctcagagggtcgggaggggagggaggacgtccccagcccacacttcagtgcccgcaaccaaatggcgaacgtcgttccacacgacggcgcctgcgccgcggcgcg

SEQ ID NO: 44647 - DNA, 454 bp, Mus musculus
  source 1..454: mol_type = other DNA
ctccagtcaaagggctagacagttctctgagatgaatgagacaggaataaaaatcctgcagctttgtctgagttttctctattgtatagaatcgctcaaatgcacaagttgattggaaagatgtatgaaaatgatcatcttctccaaacaccaacacaattctggactgatttttgtagaatgacttctcgtcttaagtaggcttcctcttttgttggcttacataaaaagggaagggaatgaaagtcttttattccgggcaaaaaggacaagctgctgaatgttgtccagccggtttttcagcagaatttccatacgtctgcagtaggaagctcaggtctgtggcccggagcgctgcctcagagggtcgggaggggagggaggacgtccccagcccacacttcagtgcccgcaaccaaatggcgaacgtcgttccacacgacggcgcctgcgc

SEQ ID NO: 44648 - DNA, 473 bp, Mus musculus
  source 1..473: mol_type = other DNA
acagccttatctgagaagttacataattatgctagtgtcaggataccattacaggagtctgacttcaagttgccgggcacctgctgaagaatgcttccgggaccccgacactagcctgcgcttccctgggaacagagggttggtcggcgctcagcaaactgggtcaaatatgtacaagccttgctgaaagaagccataccaggtcttcccacccccacagtcccccaggatgcggaaggaggtgacaggccaccgccctccggccttcagccgtggtccaatggccgtagggcagggcacgcttagcaagccgcggctcccgggccccgtccccgccctgttcccggttctcggttcccgagccgactcgccgccgcgatctccgcgccgcttccccctcccgggcctgcggccgcgccagcctggggcgtgcacgcgcgcccgtgtgtgcgcgcgcccggctcggacccgcg

SEQ ID NO: 44649 - DNA, 379 bp, Mus musculus
  source 1..379: mol_type = other DNA
agccagtactgtgttttctcacaccaccatacatgcatacctggtcaaagggtgtaagccatgtttcaaggtgccgtatgttgtaacagttctgaactctctctacttatcttttgaatatatatttatggaatctggatgtttgaagaactatagattttcagatgaacaaattgcacaaagaaattacagaattctgttaatagttttataacctaattgttaaaacactaagaacaagtagatttttagtgtcaagaggaagttagatttaccagccttgtttagttgggtgactatggcaacagttgcacttttttttctctctcggtaaagagaactacagttcccaagagtcggcaccgcctcgcgatgtggc

SEQ ID NO: 44650 - DNA, 617 bp, Mus musculus
  source 1..617: mol_type = other DNA
gctgcgcctgtgcagctcccacgcgtgggattctccggactggcggctgtgcctgtcgctctgagcagtagggacatttccgctccggtgtccggaggcggcgggctggagggtcaggggctgcgcacgctggcgccaggctccaggtgtgacgggagcggaggggaggtcgcctcggccacgctcgtgcagcgtgcgagacctgattccaggcccccaacttctcagccctcgagggaataggaaggtgggcgcttaaggggcgggccgggctccgagcgacctccttgtggggtcctgctccgaaaggcgccggcgtgtcagggagggccaggcctcccggggggtctgggcggccaggcccggggggcagggagggggcgagccgggccctggggagggcggccagtggaggccgcgggcagctgtctgcccgagtgcggaattcgcagcatctccgagtcccggcccccgcctcccgatctacacggggcgccagcagctcgccgctggacggccgccggcgaggggcctcggggtgcggccgggggcctgcggcagtcctgccctagagggcgtggagaccggagggcggtgaagcggctctaggtccgcct

SEQ ID NO: 44651 - DNA, 521 bp, Mus musculus
  source 1..521: mol_type = other DNA
agttacattttcacttttgctttgtaaaacagacttttgaaatgcatgaaacttatttgtaggctaaacagttccaaaattaaaatcttcataaagttaagaaagaccctcaagtaattaagactttttttcttatttctgagtctcaagactcctgaatcaaccaaaggttggagagtctaagaccagatggtaattttactagtaagatcacaattaattggaaatgctgttaggaatcacaaatagattttaataataatttttattgcgcctgagtctggggggcgaggggtccgctcccgcccgctcgccagggaaggcggaaggcaacgctcggcttctacgacagggggaggcacggggcagccacgcggggtcgtccccgctctggggtcgctagctctgcggcggccgcgccaggccctgtcggagctgcgcggcgactcccggtctggccgcggccctcccgccccggcgacgccgcggtggattgtgggctgggggctgcggcggcctgg

SEQ ID NO: 44652 - DNA, 355 bp, Mus musculus
  source 1..355: mol_type = other DNA
ctgtgttgtttaataacatttccatatggaataatgaaagctctctcttttctagagaataatttagaaattctcatttaccttggctgaataacttctggaagtgcttggttacagaactattgggcacacctcagggagtccccagacgggtgccaaccaagatctatctcttaaggataataagtcattttcacttgctttgggtcctcttgagaagagctccctgagcttcggttttctcacacgctcgtggcatctgcaaacagcaaggctgcgcctgtgcagctcccacgcgtgggattctccggactggcggctgtgcctgtcgctctgagcagtagggacatttccg

SEQ ID NO: 44653 - DNA, 297 bp, Mus musculus
  source 1..297: mol_type = other DNA
cccttaacaactttcattttaaatgaaagcctcttgagatgttttagctgctaacattaatattcaactttctgactttactttggaaaagttacactgactcaggggactccggaggtcgcccggccgagctcaccagcctgggacgtgagaacacagctccacaagctgagcgctcaggtgaggctgcctcgtcgcctagcaacggtgaagctgcccggctcaggggtctgagcgccatcaggcaggcgcctcatcagccccgggccagaaagggccgtgtcgaacctttgcggg

SEQ ID NO: 44654 - DNA, 323 bp, Mus musculus
  source 1..323: mol_type = other DNA
catttgttttcttttaaatcaaatatggtggaaacatgtaatagtgttaggacctaataaattttgtccctcctgcgcaaggactgagacccgactttccaaggacagtgatttctctagagtcctcgaacccctttccagtatctgggttactgcgacagtttactgctttttaaaagcgcatcacggagctgctgcaggttccaggagcccgggaacagactctgggagagaacgcggggctggcccgcaaaggttcgacacggccctttctggcccggggctgatgaggcgcctgcctgatggcgctcagacccctgagc

SEQ ID NO: 44655 - DNA, 572 bp, Mus musculus
  source 1..572: mol_type = other DNA
tgtttcgaggaggctctgaaaaagaaagttttctatcaaatttccgaagaagcttttaggacttgacacctttgggagccccagctgggaattggcggcgcctcccctcggtgcggcgcaagagtcccgggtcgccgcagggcgccctgcgcgccgagagctgcacccccactcccggctccgctcagcagcccgcgccggcggcgaccgctggttgtggggggctggggccccagggagcatcaaggagtgccaggggccagcacgccccgagtcctcggcctgggaagcctggctcccacagtgcggcagagcctggcggcgcgcgcgcgcgagcaggaaccggttatcgacgccactcctccggagcgcggcccgggcaaggggagggcgggggccctcgggcgagccttgggacccggggccccctctgtgccagcttagcgcgcgaccggggcggggccggcgcgcggggagggggcgggggcgcgcggaggtaacccgggctcgccattgcccagctgccccctattggaggccgagccccgttctcgcctcgcgttcacataccc

SEQ ID NO: 44656 - DNA, 319 bp, Mus musculus
  source 1..319: mol_type = other DNA
tccacaggaccaagggaagtcctctgctgccatgggagctctgggggacccagttaactgatatctgtctcagtcaggcgctggtagagcttccttggaggtggcaccatccacaggagctggacccttctacatcaatcattaatcagcctactagctaatctgataggtcaagttgacaaaaagtttgggctgaataagcactcattgcagatatcaggaataagtacatgtgaactgagctcataattagtcatgtttgtttgactgataaggctggcttctgtgtatcactcaaagcactcatttccaaggcaat

SEQ ID NO: 44657 - DNA, 356 bp, Mus musculus
  source 1..356: mol_type = other DNA
tcttaagaatgtcaagggcaattttctgaggaacatccttagtgaggtaacccaatcacaaaagaagtcattagatatgcactcactgataagtggaatacttcattcctccttctaatagggaatatgagtctatgccagtgcctggcaaatacagaaatgcagtcaaagatggcctagttggccatcattggccccagtagcatttgaaatgtatataaagaaaatatctaataataataaaaagaatgtcaagggcatttttttaaaatatctatgttcgttttccatttccctcaagaaatggtgcaccaattttgcagaggaattgatcatcttaagacgacgcggcttta

SEQ ID NO: 44658 - DNA, 345 bp, Mus musculus
  source 1..345: mol_type = other DNA
gagactgtactgtaaacatttatgtccagtttagccctccttgaacctggggcaggctcctggcagtgtctctggcagccgctggaaccattccagggaatggtttacacttttttttttttaaagaagaagagggtagacgctcgtcctaaggcccgcccgccgaggaggcggggctcccgcagactcggccaatggcggcgaggcggacggaggttgagccgctgaaccgcggctctggcagggctcgctcgggcgggcgggccggagggggacggtcgctgggcgctctgccggggagggggcgctgctccgggagggggcgggcgtcgtccgcccgggaag

SEQ ID NO: 44659 - DNA, 311 bp, Mus musculus
  source 1..311: mol_type = other DNA
cattgcagatgatcctgtgaaacaagcaggacagctaagacggggcctggctctgcatgtctttgatttgggctgtctttgctgcagcaccgaatgccctagggtggaccggaagaccctcccttgttttccaactatcttaaagattttcaatcagaaattctaaatgtatacataccaccatacacaagtgtttatagctactttttattcatcgtgaataatgaatctgctttaaagacaagaccagaatttagtttctccttgtctgcagcattccatgctggcatcaagagggcctcctttaatgc

SEQ ID NO: 44660 - DNA, 516 bp, Mus musculus
  source 1..516: mol_type = other DNA
gttgagggcgtgccgactcggccggcccacccagctctaccgtagcgctctggcgggtcccgacttctgaagtcgccgagcgactgagacccgagtggaaccacgtggagacctcatcgtgtctttgatggcttcataacctgaaggggccagataggcaccaccctcaggccttgggcatctatctaggtggctgccgctactatgtacgctgagagcaaaggtcaggtgcacttgggtttcccatgccagtgctggctggcaaattctcaccaagcgccagagtttacactagaccctggatctcagcagggtttgggactcaccgcgcgctccagtgaagccttaggttttctcacggagagctcgggaagggcccgggggcgcagtcccagcgggacctgggcgccaactggcgggagggttcgagttcggcctttcccaaacttgggccacggggcgggagcgcggccttcccggcggtgacgcgcgcggtggcgcggcggcagggggcgg

SEQ ID NO: 44661 - DNA, 217 bp, Mus musculus
  source 1..217: mol_type = other DNA
taaatgtatacattttaaaggttcacctatattatagtatcatgctacacgcttattatagctgaatattgggtaattatgtagataagtatttactaatgcgattgatcatgtcctcatgaagtagctacagcttagaactgagtagtaggcactgctcatttaattgcaagctgcgcatttcactcggcccccgtagcggaccggagctcagccg

SEQ ID NO: 44662 - DNA, 340 bp, Mus musculus
  source 1..340: mol_type = other DNA
ttgaaagtctgcagttaatcaagtacacagacctaacttttattggctttctgaattataaatataatcgtgggaaaaatttctcttcctttgtggttaacagtttatgtgaacatataaaaatccaagttgttgttgttgtttcggtctgcagattgtcaatcttaacatttccagaaccactgacttacttctttctgcggctgtaagtaagacttctgaaattcaatctccagcgctcgaaagtcaatggcatcctttaacttctcttccaagctgttgagggcgtgccgactcggccggcccacccagctctaccgtagcgctctggcgggtcccg

SEQ ID NO: 44663 - DNA, 534 bp, Mus musculus
  source 1..534: mol_type = other DNA
gagctgagagtctgacatcttcatctgaaagctgctagaagactagcttccaggcatctaggatgtgggtcttaaagcgcccctataggcttgtgcaagcataagagcctatggggatacaaacaaacaaacaaaaataaaagatttttttcttggcttaaacacttgtctgagcagtcttctctggtgaataccccacaaaggaatgtgtttgcaaaaaacaaaacacattcaattttttattcccttggttttttctctgtgtagccctggctgtcctggaactcacactgtagaccaggctggcctcgaactcagaaatccgcctgcctttagaaaaacggtttacctggtaaagcccttgacaaacaaatataagaacttaatttctatggtgagctgccagcaccggcatggaggggtgccctgcagtgagacaagcctgccccggctcagggctgagcattcttactgcaggagcactcccactgcaggactgcgcaggcctgcctttcccggagtaaagacgtaact

SEQ ID NO: 44664 - DNA, 458 bp, Mus musculus
  source 1..458: mol_type = other DNA
aactggtctttgaaaaagacgtgtcccccaaggaaatgcttctcataattacaggactaagtccatgaaacaattgttcgttaacctaccgctctcaattattaactgtgaactaccactgaatgagtattatggtggtcaatgatcatgattatagaaaccttggaagtttacctaaggacagagtcctacgaagtgtaaagatttcacactttgctcagcagataactattaatcagttattagaatggtcaccgcccgtctaactagtgtatttaaatccctaggcagtcaaaatattttacaaagtgaataaactaggaatagaatttggatcccgctccatctcaggcacagggaggggtggacagtccgtagccacatctccgcgcgcaagctgcgcagccggcgtgcggcagacagcccctgacgtcacacccgcgccggctctccagcag

SEQ ID NO: 44665 - DNA, 269 bp, Mus musculus
  source 1..269: mol_type = other DNA
acaggttctgtggaaggtgtgccgcataatgccgctaagctagctgcagaaccgctagacatctcactcactggtctgagtgacagacacttcctatgtctagtgtcttactggtcacttctgattggtcaacccgctcaattagagatgaactgggttctccgccatgttgaatagcgcgccgtgtcattcaaatgcttctagaaaccgcaggcttgtatcagaaactctgtgagctaggtggcagcgcctgcacgccgccctgggcg

SEQ ID NO: 44666 - DNA, 333 bp, Mus musculus
  source 1..333: mol_type = other DNA
ggctgtcctcgagctcactctgtagaccaggctggcctcgaactcagaaatccctgatttttaaggaggctacaacggatccaaggcccagggccatgtagaaacagggtgtgccctcccttttccgagcacagaccccatcctaagggcggatgctggggccccaggacgaggcccctgaggttgcgagcaacgcgcgcggcgctcaaacccgcgctgcctgggctgcacttgactgacagctcactcaagccaatcctctgtggaaagaggcggcgtccgaccaatgatggcgcggctgtggccggggccgaccaatgggcgcgcggcctg

SEQ ID NO: 44667 - DNA, 362 bp, Mus musculus
  source 1..362: mol_type = other DNA
tgtgaaattatatatagttttatgtcaaacttaccactcaatccctatggagttttttagtcaagacaatgcatttacattgctttacttcaatttatagacaactgtcacttagctgactctcttcagccaggcgtggcggcacaaggcgggaattctgctctgggttacagagtaaaccccctgggcacgaacgcgccttgcgaactcgcgtcgtagcgctgagcgcaccgggctggaccgcctctgcacacgcgcacagcggcagggccgctctaggcacgcagcgcggtcctgtctcgttggtaccggcgctgacggcgcccgccctgtacgctggagcgggaggctgtcctgcggcg

SEQ ID NO: 44668 - DNA, 325 bp, Mus musculus
  source 1..325: mol_type = other DNA
actgtgtctcaaaataaatagattatatatatatatatatatatatatatatatatatatgtaaacttttttaacccccaatgtagtgctgtggcagccaatagttgtagtagtagtagtagtagtagtagtagtaatctattaaaagttaaataccaattttaaaaatcacttgaccttcagtgttgtttgttaaaagcgttggtccattcagtaattatgtgacctacaattgtcacataaaatttgtattatacttttctaatggaattttccgatcccgaagggctgagacaccccttgtgtggagttcagttacaagctg

SEQ ID NO: 44669 - DNA, 472 bp, Mus musculus
  source 1..472: mol_type = other DNA
ctgcacttgactgacagctcactcaagccaatcctctgtggaaagaggcggcgtccgaccaatgatggcgcggctgtggccggggccgaccaatgggcgcgcggcctgggggcggaggcccaggttccaaacgctccgcggcgccagtctgaaccggtttcaaccggttcgggggagaagcggctgcagcggccgcggcaggagcagcgggagcttcagcatcagcaagagcaacagtagctacagccccggcggccgtgcctgttccagcctttgctgcagcagtcgtgcaaccatcccgagctcgggtgggggggcccggcgccggagcggcgtgaggagccggactgcaactggcggcagagcggccccggccgtacggactcgcgctgctgctcccgccgccgcctgtggctggagggtcctgggctcggacccccccagccgggcgggagcagaatagtaaatactg

SEQ ID NO: 44670 - DNA, 638 bp, Mus musculus
  source 1..638: mol_type = other DNA
gaggatccatgagcctcacagaaccgcacggaggtggggagcgagccgcggcgttgccagcatctgctgacccgcgccgcttcccctcgggggtgcgggagatcaggaggcgccgcgccgcggcaggggacggggcgggccatccgtcgcggctccggccgagtctcccggagcgcggagcccgtaggggcgggagaggccgcgtacccgcgacccgcccgcagccctcacccgcctccccccgcggcggcgggcggcgcgctccccttccggccgctgacagagatccggctgggcggggagggcgagcgccagcggctccggcagggcgtgcggcaggaatgagtgcgcgaggcgcctctcttcggctccttcgcctgggcggaaagagccgagcgcagcccgagcgctccattaaaatggcggcggcggcggcggtggccgcggcgtctggtcggtggtgaagtgactctgctgcttctcccgccgccggcgcctaggcgcccctgaggcctgcgctcccctcccgcccgctcccgctcccgggcccgccggccccgcggctccccgccccgtcctcgccgccgccgcccgccctcgtcgcttccccgccccgccggcaggccggccccctccct

SEQ ID NO: 44671 - DNA, 289 bp, Mus musculus
  source 1..289: mol_type = other DNA
ctcggagcttccccttggaccaaatggtggcatcccgctctgtcctgccagagaatagagcccagctggtctccatctgagcagccaggatgccatccaagaccaggtgagtcctggtattcaagttcttaagacactattattcaccatataataatgggtaatctatctccaccccaggattgggtggtcatttaaatacaatatcagttatctggatctcccggtagcacgcgccagaagtcccttctggagctcgcccaacttcaggaggagcctgaagccgtag

SEQ ID NO: 44672 - DNA, 341 bp, Mus musculus
  source 1..341: mol_type = other DNA
tgatcagttgaactgcttcagcagtttgaatgatgtaacttctcgaagacagcttgttttgctgataagcagaacctattttatttgttaaaataatctcctaagaaacactttccagatgtcttaataaacccttattgtgtcgatcttttgtctctagaggatcactgcatggaaaaaaaaaaagcattctttcagtaaaccctcgcgggcctctgcttagggacctgcgcagctcccatcccaaggggtacgagccctgggcggagtctcggtctagggccagggcggagccttaggacggcgccgcggggggcggggcaggctgtggccggggcggc

SEQ ID NO: 44673 - DNA, 450 bp, Mus musculus
  source 1..450: mol_type = other DNA
gcagctcacagaagtccacgccaccactgctgcatactgagatacagtgtccacaaggaggacagagtatactgggtttgcatatgtatctacttggacaaccattagtagatccaaataaatcttttctatcttctcagaagcaacctttatgtgtagagggtgtaggagcccaccaggattgtcccctccccctccacaaagatggagaaggtgaagccaaaaggtctggccaaagaccttttctgtgatatgaaagtatctctctaaaattcacttttggagcacacagcatggagcactccttccttagggaagacgttgcaaggcagtgactggcagaaaggggccccttccagaggtgaggaataaatttctgctcagtacaaagtatccatctatggtccttggaagttaagcatatagcaggcctgtgatctaggaaaatgc

SEQ ID NO: 44674 - DNA, 327 bp, Mus musculus
  source 1..327: mol_type = other DNA
tatagacacttgatttattttaaaagaaaaagaagccatgatctggtctaactggatgtctgcatgtacaagaatgcagacaggtccatatggacactgtctataaattctcaacagaggaatctctaatgaccaagaagtgcttaaagaaatgttaaaagtttatatggctaagatcaaaatctgaagctatagcccctgctggtaaggagtgggagttcaaacttgtacaaccacttggaaatcaatctggtggtttctctgaaaattggcaatagttttttctcaatacctggcatatatgcaaaaaatgttctatcatatcat

SEQ ID NO: 44675 - DNA, 365 bp, Mus musculus
  source 1..365: mol_type = other DNA
ggagcacacagcatggagcactccttccttagggaagacgttgcaaggcagtgactggcagaaaggggccccttccagaggtgaggaataaatttctgctcagtacaaagtatccatctatggtccttggaagttaagcatatagcaggcctgtgatctaggaaaatgcagcgctgccctttctgccatgggtttaccccctacctacctggttaggtcaggcctgacagcacctggttgcttagataccctcatccagctgatcgaggtgagtttgccttcctgccctcaggccacggtctggagctcagcagttccatggttctgtgaggtcactgagagaagaatcaggacttgggtctgtc

SEQ ID NO: 44676 - DNA, 318 bp, Mus musculus
  source 1..318: mol_type = other DNA
tctacctgcacattgagaccacctccccccagtgggaagggagatcttttatcgaaaccataacattgagagttacttatattctttttgatatacagcttacactgaatacaaacaggtgccttccaagtttaacactggaacatttgcaaagtgacagggaaagatttattcttttcatagcgctgaggacctagtcgctaagagacatgacgcctctgtgcagcggtgggctgcactctggcaccgcccgcacccggcggcgttgcgattggcccgggcgcgtcgatcaggccccgcccctcggcgctcttgctg

SEQ ID NO: 44677 - DNA, 513 bp, Mus musculus
  source 1..513: mol_type = other DNA
atattaaaaaaaggaagctaagtaggttcatttaaaaatgcaagataagttcaacattaatggaataacccataattgcataccatacattctaatgaaagtatcaccaataagtgttgctttaacacgaaaaatacagcttatctaattgtatctattaggttttagtacttttaaaagagcaccagattttccaataagagaattaaggtatctatttatccaaagaaaacacaggttcctgaaactctaattctgttttaaatttttaaaagttgcagacccatttgttactgatttaaatcaaagcaaataaaaactttatagtcaacctaaacgttaagttatgctagaacaaccaacttctggagaggctgtaaagcttttctgggccaacgtcgcgctcggcagcagacccaagctcgtcgctttgaagcgggtcaggctgtcccgccccccaaaagcgaaaaggcagggaagcgccgcttttctttctagctcctgcatccgtgg

SEQ ID NO: 44678 - DNA, 288 bp, Mus musculus
  source 1..288: mol_type = other DNA
tactgttctggccaaacgagtcttaacccttttcggccctgggtgggaacggggaagagtacctactgcgctcagccgttgtgttcctacacggtgacctgtaaggctgtccgcctggcagcctgcactccccctagccttaaagggtcggccggcaaaggagcctccgacggactcggcacctaggtcgtagtagctgctgccagaaacgtcgatgagggacgtcccgtgaccacacgccttggcctgacgtcaggcgtgggcgggggtcgtgcctggcaagcgagg

SEQ ID NO: 44679 - DNA, 598 bp, Mus musculus
  source 1..598: mol_type = other DNA
attaaggtatctatttatccaaagaaaacacaggttcctgaaactctaattctgttttaaatttttaaaagttgcagacccatttgttactgatttaaatcaaagcaaataaaaactttatagtcaacctaaacgttaagttatgctagaacaaccaacttctggagaggctgtaaagcttttctgggccaacgtcgcgctcggcagcagacccaagctcgtcgctttgaagcgggtcaggctgtcccgccccccaaaagcgaaaaggcagggaagcgccgcttttctttctagctcctgcatccgtggggccggcggggcgcccgggggaagaacgggcggtcgtacagccagcagactccagacccgctctgcactcgccccgggccggcagcgggaagcgacgcctccccccctcacactcactggtaagtggggccggggccggagcccggcccggggccggccccgggaattctgcgagactcccagggtttggggggcggcggcggctgggaggccatctctccgccagctccgctccggctcagggaagcgactgagcgcctcgcttgccaggcacgacccccgcccacgc

SEQ ID NO: 44680 - DNA, 499 bp, Mus musculus
  source 1..499: mol_type = other DNA
gaacgcgggcgctggcgctgccctccagagcacccggacaactctctggcgcgggggcggcgaaaaccccgggcgggcctcgggcggccaaggagcgcgcccggtgcaccgcccggcccgcctccggccgctcggccagcataagcggcgtctcacgcgcggagtcgtcgctgcgcgccctcacggagctcccggcgcgagcgtgcaggctgtggtaagcgcactggcccgcgcggggtcgcgcgcccgccgcgaggctccgccccccgccccgggtaggcggtggcgcgagtgacgtaagcagcgggaaatccccccccctccccccacgttccgccgggcggtccgccccgccccctgcccctgccgcggcatcctggcaaggcgacgccaggacactagtgaggtccgaggacaggcgtcccggctgcggaggctgctcagcctcctcactggttggctgactgacgggctagctggctgactgcctgcctgaccg

SEQ ID NO: 44681 - DNA, 595 bp, Mus musculus
  source 1..595: mol_type = other DNA
tcaacctaaacgttaagttatgctagaacaaccaacttctggagaggctgtaaagcttttctgggccaacgtcgcgctcggcagcagacccaagctcgtcgctttgaagcgggtcaggctgtcccgccccccaaaagcgaaaaggcagggaagcgccgcttttctttctagctcctgcatccgtggggccggcggggcgcccgggggaagaacgggcggtcgtacagccagcagactccagacccgctctgcactcgccccgggccggcagcgggaagcgacgcctccccccctcacactcactggtaagtggggccggggccggagcccggcccggggccggccccgggaattctgcgagactcccagggtttggggggcggcggcggctgggaggccatctctccgccagctccgctccggctcagggaagcgactgagcgcctcgcttgccaggcacgacccccgcccacgcctgacgtcaggccaaggcgtgtggtcacgggacgtccctcatcgacgtttctggcagcagctactacgacctaggtgccgagtccgtcggaggctcctttgccggccgaccctttaaggc

SEQ ID NO: 44682 - DNA, 453 bp, Mus musculus
  source 1..453: mol_type = other DNA
tggataatcttaagcttaaatcgtgcaattcctttctagaactctaaagtatggacaaatgctaacatcatagactgaacgcgggcgctggcgctgccctccagagcacccggacaactctctggcgcgggggcggcgaaaaccccgggcgggcctcgggcggccaaggagcgcgcccggtgcaccgcccggcccgcctccggccgctcggccagcataagcggcgtctcacgcgcggagtcgtcgctgcgcgccctcacggagctcccggcgcgagcgtgcaggctgtggtaagcgcactggcccgcgcggggtcgcgcgcccgccgcgaggctccgccccccgccccgggtaggcggtggcgcgagtgacgtaagcagcgggaaatccccccccctccccccacgttccgccgggcggtccgccccgccccctgcccctgccgcggcatcc

SEQ ID NO: 44683 - DNA, 485 bp, Mus musculus
  source 1..485: mol_type = other DNA
gggagctggggattcaatcccgggtccctgacttggccttgggggcgcgctcccggctctggagcccaggcctgcgccgtcagcctgctctcgccagcgcgctcccgcacgcctcccctagcccgctgcagagctctcaacttggaggctcagctctcgggcaaagtttcccgagcgctgccacgagctacgggctagcactccggccctcggcgtcccctggcggggaggggaagtgggtgactgggctgaagcgtccgggagcactctgcccccagcccccacttcaataatttttcattttagggtcggggggggagtggagcggggcgcaagtcttgctcccctccctcctccctccgggccacgccacagccgcggcgctcgctgcggccactggtgagctagccgccccagaggcccgcccctccccccaggggccgcgtctggcgcctgcggagccccccgccccgcacctcccccgc

SEQ ID NO: 44684 - DNA, 421 bp, Mus musculus
  source 1..421: mol_type = other DNA
attagagtttcatatttgtctgtattaaaacttttttgctagaaatttggaatcctacctaatgtcagaatatttcataatgaaaaaggattcagtgtgccatatttatgcattatttaatggtatgcaaattaaacagcaatactactacattaattatgatattactatgatttatctttgattttctttgaaaatgtatgccatctgaaaactatgagcttctgaaggtcaatgttaagcacactttttaaaagacaacatacaactgcggcagtcctagggccctctggattggttttttttgtttttacgttttattaaaaaatataaataaaatggcacactcttgtcttcttggaggctactgtcagaaaacagacgtcggctgggcggcgcatgtccgccccgcccttggggg

SEQ ID NO: 44685 - DNA, 363 bp, Mus musculus
  source 1..363: mol_type = other DNA
gcgccgaggcagccccggagcaggcggccgcagcggctgggcctcgcccgacctcgccgtgtcccagtctggagtcgggatcgcccacccagcgctcgccgcccacccgccaggcacagcagcaggccatgctgcgactccgccagccgggcctgcgctctggtccgccccttcgagctctcagacagcgaaagctgctggatcaaactcggttttgcaaaacatttttattttgtaaagcagctgtaaaggcgagccagtagcctcttggaccaaaggttcccggattcggagagccccacctgaaagctgttcgggagctcccccgccctggcacgttgcggggccctccccactcccacc

SEQ ID NO: 44686 - DNA, 575 bp, Mus musculus
  source 1..575: mol_type = other DNA
tatatatatatttatacgaatctagttcctacagtgtgtaatacatacttctgcagcagcagaatatcactcatatttgaagtttttctccaccttttgatgggaaaactctgaacttttatgcatcaacagattttcaataaatactttgagtgaataaatgaataattcagaaagtaaccagtctcattccccaaacaaccgtgcttgactcttgggagaaaaagacagggtttgaaattacttttatcctttaacatttattttcaccgtcataatcacacagaacatgattttcactatttgaaaatgtgaggtcggctaactagtagcaattatgttcaacatctcagctaaatgccacaaagtcataaattgggacttgagaatacaagttaagctgatttatttataagctttaaaatcttctcaatgtgtacttattaagtctatgactttaagatttctagatgcttttattgcagaaacaaggggaaattgacaaataccttcccgaggtttgcctgaattgacagtgcccgagggcgggcccagggctgcagggcggagccgcg

SEQ ID NO: 44687 - DNA, 469 bp, Mus musculus
  source 1..469: mol_type = other DNA
taaaaaagttactcatgctgtttcaaataatttgtttgtgttccaaattgttttttgaatcacataatcatctatgtacattgttaaagatttgaacattataggagggcataaaatgacagttaaaagtaatgtatatttaacatattcgcatgaaaaacacttgaagtttgttctttgaaattatctgcatatatttctactttaagaatatttatgaaagttggacaagaaatagtctttctccccaacagacttgtagtagaaaagatggctgtctgtaggtatttttttttcctttaataaaatcctattttagctactgagaaatagacctgcagtctttttacaatttttaagtattattttatttttccaggctgtcctggaacctcttcagagtaatgaaataacatagtttacttcttttaacttctaaattgtaatgcttttataaacatggaagatt

SEQ ID NO: 44688 - DNA, 318 bp, Mus musculus
  source 1..318: mol_type = other DNA
actttttgtaatgacatataagcctagacataaatttctttcagatttatttccccaaatttatttatttattttgtctgtattaactatagtcaaaactagtatttaatgcagcttaagtttttcttcccatactaacatatgtttctaaagttttaaactcattctatacttggacaatagctccagaaggtcacttggagtgaccatgtgcctactctcctgcgtgggggagggtgagaagcacccacccccacccccagccgcgagcgagcgcggggaccgggcagcggggagcgcgagcgcgggacgagcgcg

SEQ ID NO: 44689 - DNA, 564 bp, Mus musculus
  source 1..564: mol_type = other DNA
tgattcataacagtagcaaaattaagcaacaacataattttataaccacagtcttagtgtaacaagtacaacattcttgtgttcttcaagcattcagaatattgtgacaaattctgccaatctattaatcttttaaaatccaatcttcaatgagggcaataagaataggaagaatatcttattcatctttgcacaatcttacttactaacatattacagtgatcttaaaaatagtagaatcaaaagtgacttattctaatgccaaattatcatatggtaactattaacaaacgttttcttaaatctatatttagaaatgagtgaatgagtaaccatttctaagttaccagaataaattgaatctctcacaatttctatgggcttcctttaaatatatctaattaaaaacagtacaacactgaatcagcatacaatatacatgatgtattgaatgtacaatttatttacatatgcatttggcacactaatgaaatcaacaagaggattttgctagttttattttttgacagtcaaggtcagaataatcctgaaccgtcaggcctg

SEQ ID NO: 44690 - DNA, 577 bp, Mus musculus
  source 1..577: mol_type = other DNA
ctgtgtagcctggctgtcctggaactcaggctggcctcgaacttataggtctcttaaagtatagtaactaaaacttaaaacataactttagccttcgcagagaaaatggctgtttttcttttattgaggtttttaggtaagaaactaaagtgctgtttgaacagtcttttttataaagatttgtttgtaagttgtgtatccttaaagaatttctatatacttaacatatttctagtaaccttaaaactcaataacttatgttttccattttacagatgggaacgtagaaatgtagtaactttcgttttaaacaattaaatgacagaactaggcctagggcagtcacttgcaagtgcccagttacaaggctgtctgggtatgcctagaggcctgcccaggttaatctgcaggctcttcagacaggccttggcaggctccaccgctgcagcctctgccactgggcggcctctgccactgggcggcctccgccagactctggggctcccagggctggctgccgggaggcggcccacaggctcgcccggcccctgggaggagcccggagaggcccacctgg

SEQ ID NO: 44691 - DNA, 602 bp, Mus musculus
  source 1..602: mol_type = other DNA
tgagtcactcttgaatcaagctttattaaatactggccaggaatgatggacgaattccagagtatggcaccatattgcatttgtcaggggcatgaaggcaaatcccacaagggtatgcactttctgcctttgtggaatcaagggcaaaccttgtgcagtttgggcaagcttgttatctttcttgaacaacagccttacaaattagagatttgctgtgtagcctggctgtcctggaactcaggctggcctcgaacttataggtctcttaaagtatagtaactaaaacttaaaacataactttagccttcgcagagaaaatggctgtttttcttttattgaggtttttaggtaagaaactaaagtgctgtttgaacagtcttttttataaagatttgtttgtaagttgtgtatccttaaagaatttctatatacttaacatatttctagtaaccttaaaactcaataacttatgttttccattttacagatgggaacgtagaaatgtagtaactttcgttttaaacaattaaatgacagaactaggcctagggcagtcacttgcaagtgcccagttacaaggctgtctgggtatgcctagaggc

SEQ ID NO: 44692 - DNA, 407 bp, Mus musculus
  source 1..407: mol_type = other DNA
tggcagctttaaagaggatatgcaccctcactgtgacagaagctcaggctgggatagtgtgattctatatttctgcctgtcgcttcctagaaatgatacaaaacaagtgtattttcagctgaaagaggattgtgcctttgccaagggcaccgggtatgcagacctgaaaatccaggctcctggagaagcagaagttattttattttctaaaggccttgagtacttccacctgaagcttcttcataaggtcctgaacttgcatctagctagttagtcatatgtcttgctctcgaaatttctgcatccaattcagaacaggctgcctctcctgaactagtctgacttgcacttggtggcgcgcgcgagcctctcaacgccctggcatccctgtgctctgggaaccgcgc

SEQ ID NO: 44693 - DNA, 495 bp, Mus musculus
  source 1..495: mol_type = other DNA
gctgaattaagagcaaatttaatataaagccataaaattaaaagtgagcatatataggtcttagatttgcactggttttgaaagcatcacctcataagaaagtaattttgagattttagaaataaagcacttttggctagtgtccaagagtcattgtcactttaaaacaaattgctgattgtgacaaaaatatattaactcctatgtgcttttgtctcctactctgagatatgctcacagacagtgatctaaagcacacttaatacaaataagaattgcacattttttttttctatcacacatatatatattatttactcagataacattattttctcttctgtttgaacatggtatattttaacaacattttataagacatctttttttgaattttgagacaaggtctattggaaacattatatgcctgcttattattttatttagacaaaactatggtgggtttctgtctcacaaaaatacttgccatgtacc

SEQ ID NO: 44694 - DNA, 524 bp, Mus musculus
  source 1..524: mol_type = other DNA
cctgcacaaaattcatgaccaagaatccatactgctgttcatcaaagccatggagggatgttccttactggcttttgatctctaattgagaaaatgccttacagttgatctcatggaggcatttcctcaactctgtgataactccagctgtgtcaggttgacacaaaactacactttctatatgcctgggatacagtaggaaataaaatatttcaattttctgttctgttaaaatagtgaaatggctgtatagttatatcagcattgcagagttgatattgtgatcatcacaaattgtgctgttctcatatagtaaatactgcatattattttgttgctttaaaaattagccgtagatgatgtgattaatctatgatgattagaccttgtgctttttagatatatctataagtttaaaaagctgtgcagaaacattcaagaaactccaggactgtgaagtttgcagtgttaccttagccttcagaagaacgtaattgtcaatctttcataaatattttatgaaa

SEQ ID NO: 44695 - DNA, 404 bp, Mus musculus
  source 1..404: mol_type = other DNA
ctgaaagctgctctccagccacttctcaaattgcatttggtgacttcgttcttaaaaggcatatagattcctgaaattccaccattatatgcctaatttaatttggacacacacggggttgggggtggtgttaacaaaataaaggaccagttctgttaatagctttaatttattctcccaggaatcacttgttgagctaaaaggaatttaagccatttctgcaaagtctaaaagctccatggaagtgatatttcgatattagttgtgcctgtgaatcagggtaccaaggggcctaatgcagaggataactgggcccctagaccccaacgccaaaaggcgcgccttcccgcgtggttggaagcctgggcagggcgcttgcgcctccctctctgtggctgctgctg

SEQ ID NO: 44696 - DNA, 210 bp, Mus musculus
  source 1..210: mol_type = other DNA
cacaatctgtcagcctgtgccagcccagaaagctgagctcacttccctgcagggtctgaagtcctcctaccttaggcagccttttttttttttaagacaataaagtctgcgggcatataacttcaggtacagctgcccgtttccacctccaagggggaagagggatggaatcgatcatattctatatcccctggtacaggatggatgcag

SEQ ID NO: 44697 - DNA, 318 bp, Mus musculus
  source 1..318: mol_type = other DNA
atgtgcacctgccccgtgttcaccttcgggcgagcgtcacgctctgagcgacgttaacttcacgccggcacatgaagctgagagctccccgaggattgtgaccttttaatggtccgtggtacccggtgggtgggcctggctctgttctgctgagagcaagtccagcttcctcccggcgcaggtagaaaaccgaataggaagcggggccgaaagaggaggaagtccctccttggccggctcacctcggcggcgcactcctcgcgagatcgccgaggtcggctcgtcggccgccgtagcccctgctagggcagcccgtac

SEQ ID NO: 44698 - DNA, 496 bp, Mus musculus
  source 1..496: mol_type = other DNA
aatgcttttatttccttttgatttatgactcaaaattactactattctaattattttagagtgacattaggaaacatagaaacttacaactgaatgaatggtaaattattcaaggggttctcaaaaaaaaaagttttttcttgttttttgttttgtgcgcgtgtgtgtatatatatatatatatatatatatatgtgtgtgtgtgtgtgtgtgtcccttgcctggagagccaggatgattcatggattcattctcagcaatgaattccatagacacaaacctagatctttaggtaagaaccaaataatcgtgagttgttcagtatttatttactgttacatttattaaacacattgttctaagactttctttagcgcgcgcgcgcacaaagggctttctttaaatctatacattttttttaaggtagtacttatttttcagcaattacagaaagcctgcaaggattgctttcccggcagtttgcagctggccaatg

SEQ ID NO: 44699 - DNA, 492 bp, Mus musculus
  source 1..492: mol_type = other DNA
cacggatcagaaatcctgcacaccagatttacaacagttgtaaagttacaatatggagtagcaatgcaataattctatggttgggtgtcaccaaccactgaaacgttgagatcttcagggtccagacctggtactgtgctgtcggcccaacacacagtcacctccacttccactttcatgaaactgaagttgtagagtcttggggtgtaggccaccacatctagttataagattcttgggagtcctctggctcttaagtaggaagagagcaaccttgatactttctaaatactgtctatgaaagcctaattaaatggagattaactgattttatacttgtcctaattttagttgttgttaactaagcttagattgagacgggccgcgcgcacacgggagcgcgaacgccgtcttagccaatgcccgcgcgtcctacgggccaatgagtggagggctatcgtttgccccgttctctggagctcaggactcagg

SEQ ID NO: 44700 - DNA, 335 bp, Mus musculus
  source 1..335: mol_type = other DNA
agaccagatgagtgacttcactgacttccacctggctctatttgtgtcaccgagggagagaaaaagcataccatctgtgtcttaagaggggttctttttactcccaaataaatacaattaatttatattaaacatctctgagtgtatcagtgtttcatgttgcatgtgagccttaatttcaaagtttaagtgaaatactaatgtggaatttgaaccttattcaaagtactctgtagaccaggctggcctcgaactcagagtaccgttttctaatatcataatatgcgggcggcacttctcggcggcccaaagatgggtcaggccacagagccatg

SEQ ID NO: 44701 - DNA, 492 bp, Mus musculus
  source 1..492: mol_type = other DNA
ggctaacaaagccatcaggacttttgaactttggcgtaaaatttgatgacagtccttaatatttatcataaagaacatttttttaatgttacaagtaccagtactccagggccttaaagtatttggaggctgggaatgagaatgtgacctttgtaaaaatgggaaatagtaaatattaagacaggtgttttctatcataaaatgcacaaaaattgtacatctccagtgtaggtcatgttaaaattaaggtacgtacttttgtttgtggcacaagcttttaaacagctctcagtgtgagtgctgaaaaaacaattctcccaggggttatatactttttaaatttgggaaatgacctgctgtgcctttggtaccagatacagcctaggcgattctataggggttccttagttatctacataacgtatcataaactggggcgcagacctcgggatgctccacgacctccgtgcgaatggcgagggcgccgagcct

SEQ ID NO: 44702 - DNA, 712 bp, Mus musculus
  source 1..712: mol_type = other DNA
gtgattcacattctaggattcagctaaattccctataatgacaaggatggctagagtctttagtctttagtaaggctttaacatagactagatagctcaataattttaagatatttccaccagtacataaaataaatatacagtagcattttctgtttcaattgtagatgaatactacatactaatttttgcctttataaaacagtaaatctattttacaagcatgtcttttaaaatgcaaaaatattatagctatctcataaaatttatcagtggccattactattttgttaaatgactgaaattgttagtatgaaggaacattttcatttttgtccctaaagattatttatatccaagaatgtatgtgcaaattgaacttgataggttttttaaaaaagaaacgtggtcccctcgggaggcaggcagatttctgagttagaggccagcctggtctacactgttgtagaaattctcaaagaactaagtttttaaaaagatcattttaaaaggatatcatatcaggttttaaaaggatatcaatattgatcactggtgactacaataactaagtattgccttcagtgagaaaattttaaggagctaaaaagctttcactttaaaattagtaaaaataaatgaataatggatggaaattacatgatttcttagctttctttccctattctgtataattgaaaaggaacgagat

SEQ ID NO: 44703 - DNA, 358 bp, Mus musculus
  source 1..358: mol_type = other DNA
ttttagctggtttctcaatgcttgccaaagcaagtgagaagtgaacttcaatacatgtttatgaacttgggtcataaaaaaggttttcaggagtctctatagtcattaatactgactgaatcataaaggagcttatttcaagcctgagttcctgaattcagtgtgtgtatacaaataaaaaagacaaaaattttttaaagaaaatgagcgtgctttgggataagaaacttttctatatgaagctgtggctgggccaggagggaactgcagagcacccggtccccactgcaggccagcagccgaagctgcaggttaatggggaagctgcttccggcggtaccggaagcacgacggggac

SEQ ID NO: 44704 - DNA, 368 bp, Mus musculus
  source 1..368: mol_type = other DNA
tcctcgttgtaagaaaacggagccagcttttaacagcttcaagtttatttaaacttatagtcgaaaactaaacattctgcagattttcttatcgtatgttttttaaaacgtgaaaagatgaaaattccaatacatttaaccgtttcactcaaaagcttcttccgatcggatgtgtgacagacaccttactccacagcttagacagtgtaatagtgtaaaactacaattatagacttgttttacctcttaaaggaaagtctgtataagaaagcctttttctgaggtcgttagacagccgcgattccgctgcagcgcgcaggcacgtgtgtggccgcctaaggggcgggtccttcggccaggagaccccg

SEQ ID NO: 44705 - DNA, 351 bp, Mus musculus
  source 1..351: mol_type = other DNA
ccaagtgctgggattaaaggcatgtgccaccacacctggctacccgactcctaggaagcctgaatcatccgggatgttgactcatcagcctgaggtgagtgaaaaatagtgaaccaattttgccagagctccgggtttttgcctacctcattccaggcctgcagtctagaaagggagggaacttgaaagtgtcaaataaatgttttgtttttctttctctgaaaataagtcttttatctaaaaaaatccgtaagacctaatacactaggtgggggtggatcccagctccaaaccccgccgcgccagccagccctcccctgccgggaaggtgagtcacgccaaactgggcgg

SEQ ID NO: 44706 - DNA, 341 bp, Mus musculus
  source 1..341: mol_type = other DNA
gtgtggactgggccattgcccagcctgagcattctcagtaaacagttctagattaacttttaaaagatttgtgatagcctgacactaatgtcaggaatattttactttcaaaagcatctaaatttattaatctgttttctaccttaagaacaaacgtgttcacacaagccagtcatttttctagtgacaaactatatgtagttaatatacggttacatagtaagtcattaactgctagctttatacaaaaacgttgtttttgctcactaagggcctcagtcaggccttggcttcgtggcggcggctccacctgcgcgacgcgtagcgccaggccgacgggg

SEQ ID NO: 44707 - DNA, 505 bp, Mus musculus
  source 1..505: mol_type = other DNA
cattctgaacacttaaggattttgcaacccacataagtgagcatatttcaggaagatatccccatttcagtgtggttacagccatgagatgcatgtacttttatgcattgattttatatatattacatcttcaaatgccatacgtatttaaatatattttagctgattaaattggatttagcagactgaaagtttaataaattctgaaaaaatgggaaattctggaaccatttatttttatggctattaaattgtgccattttcatggggtaaatgatatagttattagtatttattaaaagattgaattggaacaggtaacaattaatctagatttggaggaatctagatttttagaaatgtaaaggaacttccaggatgcaaaatatgagttctccacaaccttgaaattgaagttattaacccatttggattagtccattaactgttgattttagagtttcaagtaaaactgaaacagccactgagaaaagtcaagtcggtg

SEQ ID NO: 44708 - DNA, 358 bp, Mus musculus
  source 1..358: mol_type = other DNA
tccagctgaggctgcagtggctttaacagcagcttttacaccataataaggtcagttcttagtcaaagacaaagtgattaacccaccccccacccccagtcactgggtctgggggcttatacaaaaaggaagtcacacccttaatgtgaatattcttatctgagcctactgccttgagcccagtgacaagtacttgccaaatttttataagtggtacaaacctgttgaactagtctgagccctggtgctgagccagagagcagtggtccaaactgtctctaaggagagggaaacaatgttatgattattaaaaaataaagaaattgagccaggcctacctggctgttgccaagtaact

SEQ ID NO: 44709 - DNA, 363 bp, Mus musculus
  source 1..363: mol_type = other DNA
agaaaatatgaagtgtattcaatttctcttcaacattgtaggcaacaaagagtcaaaagtatcaacctttcgtagcttcttagtcaagtggattataaaatctgttcaaaaagaacaataaattagtttttgtaacactgcacttggataaatcagatctgggactggcgcaagtgaaagtcctgaggaaagcacagacgcgcatgccgctggcctgggtcacaccggtactaaggccctgcggatgcatggaatcctgtagtacactagaggcgctcgcctcagcagctggcttccctgcgctggccccgcccctggagccagggaaggaggaagagctggtccccagatccccggtgacgc

SEQ ID NO: 44710 - DNA, 347 bp, Mus musculus
  source 1..347: mol_type = other DNA
accagggtcaattattccccacggatatattttggtcacatcattttctacataggatttctttttggtagaaggaaacaaatcaaagataagttttgaaggtgattgctgttcttttccacaggaatgtaaagttcttaagacatcacctcagaaatgcagttatggcagactgtctgctgagaaggttgcagttggcgcccgcgcagtggctgcctgcgcccaggtacaaggcggcttgatcagcgggctctgacccgcctcgtaatcggatacttttcttaggcggggccgcccaaaccgtgcgcgggttagggtctgcaaggttggcctgcgaacgcccttcc

SEQ ID NO: 44711 - DNA, 357 bp, Mus musculus
  source 1..357: mol_type = other DNA
ccaatgaatgcttggctcagcaaacatgcatgccattccacactcaagtatgtaggtaatttacaaaatgactttggcttcctatacagaaaaacggaggtagtggaaactggaaaatggagtaaaaatttccaggctcaaggtgctagatgatcgtccaggtcttttccctggagcttgggcttttggaaaagtgcagcggctgggagtctgcctaaacaagcttcagattctgtcaaaaagtgatagtaaacaggtttccacgggcagcgggggagacctggaagccttccttgctcactcctcaaacccaacagggctggctccccactaggttttgggactgcgcttgcgcac

SEQ ID NO: 44712 - DNA, 368 bp, Mus musculus
  source 1..368: mol_type = other DNA
aacaaatcaaagataagttttgaaggtgattgctgttcttttccacaggaatgtaaagttcttaagacatcacctcagaaatgcagttatggcagactgtctgctgagaaggttgcagttggcgcccgcgcagtggctgcctgcgcccaggtacaaggcggcttgatcagcgggctctgacccgcctcgtaatcggatacttttcttaggcggggccgcccaaaccgtgcgcgggttagggtctgcaaggttggcctgcgaacgcccttccgagctggagcacaggccatatttaaaatattttccaatagggattagatgccggggtggtaatacccgaccggaatgcgactggcttgaggtccagc

SEQ ID NO: 44713 - DNA, 515 bp, Mus musculus
  source 1..515: mol_type = other DNA
ctgacaagatagccagtgggctaattaacataaattcaagaaaatgtccattgtcagaaaatggaggttctcaaggatccaataaccgggagtccagggcaactggcctctggttaagtctaggctgttcccagctaccctcgaggggaaaggtaaaatagcagaggtctttttcaatggcgataatcgaattagcctcaaattaaacgagtaattggtccttactggatgcaaggataaaagcccccattttgctctcgcagcagcggttccagcggtacccaccccgcccaggccagaccctggcgcagggtgcgtggcccggggcttaggaagcgccagagctccggagagcgtgcacgcgctcgctgttccccgccgcaggtgggcggctgccgggctgtagggctgcgcgcaggacggagggcgcgcgagtgctgcgggaggcgtgtgcgcgctcccgcgaccgagcctccccgcgcccgcgccccccggaatctgtgcagctgtcgccg

SEQ ID NO: 44714 - DNA, 552 bp, Mus musculus
  source 1..552: mol_type = other DNA
ttatagaacccaggatccctggactagggatgcactaattaagaaaatgccttatggctagatcgtgccaagactactaagctaagcaggtccttcatttcaaatgtccacctcaggatgttggaaatggggatacattttcttcatatgaaattatcatatatttgcacaatggtgagtatagttaagaatgatatatatttaaaatcgttgaaatcttaaatgaaatcagagatgaaagttaattagcttgaattaatctccttacagtgtacccatgggtatactatgtattctttacagtgtacctatataaaatcacctaaaacttaaaaattctttgacattttatccttgcatataatgattattttcatccttatagaaaaaacaaaacaaaaccttttttgtgtcaaataaacgtcacctccgttttctttagagaaccgggtcctggggaaccagagagggagcaccctgctagggagcccgagcgccgggtgtcccgtcgccctctgtcttggcttctgggcgtcggtcccagagcccata

SEQ ID NO: 44715 - DNA, 509 bp, Mus musculus
  source 1..509: mol_type = other DNA
agtctcttagaaatttcttgttatttttaagatcaatctcaattaccagcctgaatcttgagttatcagaaagcaagcttgcagcctcagtcttataacattgccatcaaccttacagattaatttaaaaataacttctatgaaggtgatatgccttcatttagaattcccaggtatctcggtacttatccagtatttaccaatgcattatcttgtaatttattagtttgttgccaggaaaggcctctacgtccttaagggcagaatagggaagatgacacacaaagtatatttgttgagtaactttattgtgtatacagattcttccatacacgtttttttaaagatagtgtctcctgattccgggatcctgctgggcagcctcgcgtggcaaccccagtcgctgacaccaaactcggctgactgcaagaaagcagccaggttacctcctccccgcctccgtggccccgccccggaagtgacttgaggccggtccggaacctcccggc

SEQ ID NO: 44716 - DNA, 580 bp, Mus musculus
  source 1..580: mol_type = other DNA
atagttcgtcccttcaacatgtttcttagtaaaaaatgggaaaattaatagaattgtattagtattattatattttatacttaattacattaagtataaaggaaacttaacagacacgaaatatttcacctggatggaatcaaagtctttgatttctaaccaaaaaaaaaaatagcattctctatttcttaagtattggatgagattagaaaagtagaagattaaccaggttaaaatcctgaaggagttaacataacaacatacttaggaatgtttcttatataagctaaagtgggttttaaacaggactagctgaattacactattgcttctcaagatttttacccaacacggtatttgacctaagacacatatgtgtgttgaaattggttcgattcaatttgtcataatgactttaattattaaactggaactgacagaaggagatcagcttgaaggctctccgcaggcactctcagccaattcaggcagccctggcatatcggagcgcactcccacgccgagcaggcggggcggccacggtcagagggaggggccgcgccccgggttcggtgactgc

SEQ ID NO: 44717 - DNA, 503 bp, Mus musculus
  source 1..503: mol_type = other DNA
aaaaaaaatgtggacattattttcttttttcaagaaggggacaaaaaccaaaactttctgtctatattcagtctgctgtaacttgattctttctggacttaagtaaaataacaacagtccaacacttgagtcaaggagggaaacttctcctaggtgtcactgggggtgtccccaaacacacagtcggaactgtaagttctacctttctgagagcgggccgccgcccactcacccccaaatcccgagagtccctagcggctggactgagcgcgcgggccaggactcacctggccgggccgcttcgtccaagcgccgttttgagtccaaccgctaggatgctacagcagcaacgcaatgcaacgcaagcgcgggcttccgtaggccaccgactcaacaaccccggatgttgagtgctgcctgccccaagcggtggccccaagcccttgtaaggcggaggcggctttgcccagccgtctgcaaggagacgtggcggcggcggtccc

SEQ ID NO: 44718 - DNA, 350 bp, Mus musculus
  source 1..350: mol_type = other DNA
agggaaaagattctcagaagctgtatacgtccctctcctagttagtatggagggcatatccacttagtgcttcgtgggcactgaccagagagaactcggtaccaggccagtgtcgtcgctgagctggggcagcgctcggccgccgccggacgcctccaggagaccgtgccctccggggaccaggctccacaacctcctctaccagaggagaacaggaggagggaccgccgccgccacgtctccttgcagacggctgggcaaagccgcctccgccttacaagggcttggggccaccgcttggggcaggcagcactcaacatccggggttgttgagtcggtggcctacggaa

SEQ ID NO: 44719 - DNA, 322 bp, Mus musculus
  source 1..322: mol_type = other DNA
ggaggtagcctatggctaatatacatttatttatttattatatttattttttattagatattttccttatatacatttcaaatgctattccctgtactggggcatgctagaaatatgagctctaggggtactggttagttcatatttaatatccatttatgagtgagttattcaagatgatctttcctagttcaatccatttgcctgaaaaattcatgattaatagttgtatagtattctattgtgtaaacttcttatttaatttatgatttgaatttatgtttgaacttttatagaaaaaaaaaggatacttgaatgattc

SEQ ID NO: 44720 - DNA, 311 bp, Mus musculus
  source 1..311: mol_type = other DNA
tttcttattagtctctgagcctccgagattaagactgaacaaactgttctttgaagtttaaataagtggtaggcaggctgggctctcagtttggtcctgcccactgtgaactgttagaatccagttgctttttcacacacataaaactactgttttgcttctatttaaaagcaaaggacactagcctttcaaagcacaacaaaatgactacgtgctaattgtggtgccctataagacaggagtcctgccttttctcctctttcaattctcactagaaaaaaaggtggcaaaactaagaatttgtgctttgc

SEQ ID NO: 44721 - DNA, 332 bp, Mus musculus
  source 1..332: mol_type = other DNA
ggccgcctgacccaaggctgcctgggcctccaggccaccagccaggaatgatgcaaatgaattttcacctggtgaaatgaattgtcacttggatccctgaagcccagacaggaatccgtcttcaaaagaggaaactttcccagctggatatgaaccctggggaacgcgtgccattgccccggagcacacgcgcacgccgcaaacgcgtggccgccgccaggtctgcaactttgtggggcgatcgcggaggcgctccgcttcctcccgtagaagttggcgcaggccccgcctcccgctgtgttgcgggccggggccagggatatttgaggcac

SEQ ID NO: 44722 - DNA, 420 bp, Mus musculus
  source 1..420: mol_type = other DNA
aaaacagctaaggtatatatatgaccacggtaattatttctgttcttctatttctgcatctgcacaaagaaatatagttgtgaacgtatttaaagagtgcagcactattacatctaattcattctacttactggatctactattagtaatgctgacaatatttaatgacacatgcaaaaaagacttaacagcagtttttattttcttcttgttattttacgagttcgtaaaatgaatctgcattgctattaatccagaagggtacaaacttttgaacaggtgttcgatcccaccacttacatcacaggagagaccagaaaaagtaaaaattaattttgtcaaaacaataagattaacccattgttaaccaaatctcccagatcacattatttaagcctgcggggagttagtttctaacgg

SEQ ID NO: 44723 - DNA, 343 bp, Mus musculus
  source 1..343: mol_type = other DNA
agaattggggttttaagcagaaaaatattatttacttgttaagcagattaagacagagaataacaggtatgtctctattactccatggggaccgaagccccactcaacaactggaatttggcctcttacaaaaccccagcttcaggagaacaggttgggccaaagtgtgtcaaggtggcctgtgtttgctcagcagatgccaagtttcaaatctgggtggctccacagctgtgttggatggcaggatgccatggtaaccaccgcaaactgagcaaaatgtgaaaattgtgactctgccctcgggagatcaggggtggaacacccaggcacatgtcccagggca

SEQ ID NO: 44724 - DNA, 433 bp, Mus musculus
  source 1..433: mol_type = other DNA
ggcggctctcctgtagagtaactacggtagccccccggcggaggcagaaaccgcaggaccttccaggtcgcccccttgctccccgcgggccgcttccaacccctttcatctttcctttagtcaaggctgatttcctctttggcaaccagaaataacctaatataatctatctatatataaatatataatatataatgttcttaaattattcctgatttttttaaccaagctgccaagaaagaccatatgtgattgttaaattttatatatatatatttttactccgcacaatgcttattcttctatatccatagatgcttgagaagctgtgtttttgtcattcatgaacattttcctttggaaaaagaaagcgcctattttactaaccaaagacttgattttaaataagcccaattggattcatatcaatatt

SEQ ID NO: 44725 - DNA, 358 bp, Mus musculus
  source 1..358: mol_type = other DNA
acaggacaatacggagtttggtctatttttaaaaaggtatgagtttttagctcagccaccctccgcagagcctctccttccatccctcgggggcggagctcgggccagagcacgtgatgcccggggcacccaccacccccaacactttagctcagtgtttcagtgttctctacggacttcctaagaagcctgctttgggaacataaatcgcaaaggaatctttgcccataaggcggtgcaccgcttgcactgggtgcgcagacccgaggccgacgccggccccgctgggcgaggcgcaggcggaagaggcggctctgagatgaccagagaccttcctgtgctaggcgtggcctccgca

SEQ ID NO: 44726 - DNA, 283 bp, Mus musculus
  source 1..283: mol_type = other DNA
gccagcctgtgagaactgtctcaaaataaataaataaataaataaataaataaataaataaataaataaataaataaataaaaattgcctcaaagttttattgaaagggttaaaacattttgcaagaaagtcttacaaggtggaagacaggagataaaaatgttttaattccttgtcctaaacacacatttttatagtatttgatagaaaagaaccatatttgattttcttacattcagtgaagttggggcctctaggtcagtcccgtcctcgcctcacacag

SEQ ID NO: 44727 - DNA, 341 bp, Mus musculus
  source 1..341: mol_type = other DNA
aataatgttaatcatttataatttttaagatcaccagaagacttagatgtatacatatatatgagagcatcagatcccattacagatggttgtgagccaccatgtgatgtgaggagtcagtgctcttaaccactggccttgagctcacagagatctgcctgcccctgccttctgagtgctggaaggtgtgcaccatcatgatgcagcactcagtgactgccagtgctttcgtctcagagggaaaaccctaggctaggtcctccagtggcattgcccgggagggcgtggcaatgctcagtgtcacagagtgagagtcagcctgctgagagactcatctctct

SEQ ID NO: 44728 - DNA, 388 bp, Mus musculus
  source 1..388: mol_type = other DNA
ataagaacagttgttacagggactggatggcaaggctgcccttgacagctctatagccctggctgttctggaactcactctggccaggctggcctcgaactcagagatccgcctgcctctgtgcaccatcatgcccggcttccaccttactttaaagtggaccttttaggcaattttttggaatggagcccatggcataatctcaaggcacgcgagtggcaacggcaggccccaggcagcaggaggcgcccgcctcccagcgtcaccttgttgggtgatgccgtgcacgaagcaacgctggccttccttgacaatagctcgtagctcccgcgccgctcggtctgcacgctcccagcctcccgaagactcgctcattggctactgaagc

SEQ ID NO: 44729 - DNA, 476 bp, Mus musculus
  source 1..476: mol_type = other DNA
tattttttaactcagtcagtactgcagctgttgatgaacagtgatttagccacagctgggagaagtcactggcagtgggctcaatgagcatctctcacaagcagggagtggctgaaaatgtgtcagacccacccagccagtttggtccggctgacactgcggccttttccagttctgtgaccttagacaggtcaagtctatgcactgtctgcagtttatgcaggtgtctttgttagaaaccacagtttacaaaagagcaggaaatggaaagtaactaccagtttactttctcttctagctttagcaagaggggagcccttctcctaacaaaaaacaaagtgcctgctttttcagtttccaactcaagaattgcattttacattattgtaaaaaaaattataagccacattactgtttttggaataaccaaaattaggcgcgagctggcgagcaggctggcagctgccagatcttct

SEQ ID NO: 44730 - DNA, 380 bp, Mus musculus
  source 1..380: mol_type = other DNA
ggcaccagatgcccggttcctgtggccggttccctggcccagtttgggcgtccagaccctgccaagaatgctgtcagccttcagcctcagccgagagcaaaagaagcacttcctgtccagtacccttgtactgagtgtgcacacttataaatgtgtgcgcacgtgtctgtgtaaacacctcaaaggggcgttccccttcctctcttcccaagcacaggctggcgagcccgactcccagctacaggtgtctctgcgggacccctggcagagcacagccggaggtcttcccggaggaggcgcccggggctggcagcgggcggcgcgcattcctcagccctgagtcaggcggccgcccctctgccgggcccgcccccggcgcg

SEQ ID NO: 44731 - DNA, 229 bp, Mus musculus
  source 1..229: mol_type = other DNA
tcagttaaggactgagcatatagcagtgacaagcatatggcctctggctctgtctagtcctagatgccagggtctcagaaatcaaacagctctgacaagctatgtgggggaagggagcagcttaccctatcccagagatgccaggaactgttatcccacctatcatctgtgatgatccagggtagggtggtcttgatggcaatcgggccattgggacctgcgcagcgcc

SEQ ID NO: 44732 - DNA, 380 bp, Mus musculus
  source 1..380: mol_type = other DNA
gtcactattaattacatagaaaattatactgtgaataggcaaccactggggtcccaaggctctggtccctatgcactcccgctggttccgtgggaaggtcccacgacccatcccaggcacctgtgagttaaagtcattcacactggcaaatattcaaatggtaccttctcattgagttctctttgtaaagtttgaaaacatgattgttatgtgatgagcaggctagtacaatcctttaaagtttatacgctctggttaaatcaagtgtatgatgcagccaaggcgtcgcgccggcgcagtcgcctgtccgggcatgcgcgggggctgtggagcgccgctcggcgaagtctcgcgagagtgagcgccgaggccgaggtgcc

SEQ ID NO: 44733 - DNA, 398 bp, Mus musculus
  source 1..398: mol_type = other DNA
tggtttggcaattctttataagattaaatatacaccttgcatatttagatacagatgtatcaactgacacagatatagagaaatagaattgtaagctcacacagaggtctctctgtgaatgtgaaaggtaaaatatggtatgattccagttacacacatttttgaaaaggtggtggagctacatagatctatatatgtgtcagtcatgttaagataaaaactaagagaactgtgcatttcattgtatatttccctcagtgctaagtgagaggaattactgcttccttggagggaacagtcactgacattagatttgtgatagaatgtcctctaaggccaacacccctcctaaggccatgggcagtgggcaagagcgatagcacttgcccttacagtcc

SEQ ID NO: 44734 - DNA, 320 bp, Mus musculus
  source 1..320: mol_type = other DNA
agtacactgtagcagtttagcactgctggcctggagttccatatgtaggccaggatagtcctcagattgaaaggggtgtttaatgtagatttaaatctctttcatttgagagcagttagtgctcttacctttaaatgcagatttaactatgttgatatttacactcagtccttttcaataatgaataagaaaggaaaaccactaaaatccattgtaatcgatagtacatattatatgccaatgtgcatgcagtaaacactttaaaatgtatcctggaacgatgcagcgccccctggcggcctctttctttgagctcagcc

SEQ ID NO: 44735 - DNA, 186 bp, Mus musculus
  source 1..186: mol_type = other DNA
ggcgagctgctcctgcagttccctggacccagaaagatgagaagagagtgtctctattctgaccaaggtaggaggatactaacttcttcccaaacgattccctgcacccgggccaagttttactgggtagagctccaagggcgtgtccaccctgcctggaggacacgcccttggagggcatataag

SEQ ID NO: 44736 - DNA, 317 bp, Mus musculus
  source 1..317: mol_type = other DNA
agcactgctggcctggagttccatatgtaggccaggatggtccttgtcacaagacccagattaaaagggatttttaatgtagatttaaatttccttcattgagcagttagtactctccatcccctttaaatgtagatttaactatgatatttaacacactcagtccttttcaataatgaataagaaaggaaaatccatatggacactaaaatccattgtaatcgatagtacatattagatgccaatgtgcatgtagtaaacacttttcctggaacgatgcagcgccccctggcggcttgagctcagccagggggcag

SEQ ID NO: 44737 - DNA, 444 bp, Mus musculus
  source 1..444: mol_type = other DNA
gcaaggactctcccttaagaaattcctcgactgtgtgtgtccatccatccatccatccatccatccattcattagttactgagcgcccagccaatgctagatgtggagccacttgtagctttgcgtggggcaaccatgggttggacccacctgccagggcacagggccaggtgtggactcagtcccccacggggtcaggggcttgctacctacgcagccctgtgcagggctgcccccccagcccccgcccccagccctgggggcaagcgatcggatttatagcgactggcaccaccgagggggatgggcaacctccctgagcccttaagagtcgccaggcccgggcgcggggggcggagcgcgccgtcccgccgggcgcggggacaaaggcccgcgggcggacgtggccgggccgggccgggagggccctttagcggtggcggc

SEQ ID NO: 44738 - DNA, 511 bp, Mus musculus
  source 1..511: mol_type = other DNA
gagactctaggcccgagtgtgagacactcttgttcaggatgggagggtctccagcatagattctgcagctgcccagcccatcccagagatgactccgcttttatctctaatggggctttttaattcgcaaaataactagaaagttttacttaataaggaatatatctaaaggtcctaaagggactctctctgctttctgcggggctcagaggcagcacgagacctgcggggcgaggggtgcgggcatctcgcgcgggaagctggcgaaccaagccgaaccccggaggtttggggttccgggaggcgcagcgggcccaggggccggccacccggcggactacagtctccagagtgccccgcggcgcgggcggagccgcgagctcccgcagccaattgaggggtctcggggcgccgcgagccggcggggacaggcgcgcgcgcgggtgccgggcgtcctgcaggcgggtctaggagggggcggggcggggcgggcgggccgcggttcctgcag

SEQ ID NO: 44739 - DNA, 507 bp, Mus musculus
  source 1..507: mol_type = other DNA
atgttgggtggtcaatgtaccaaattctagtttataaaatgcagagtattaatattaatacttcactttgttctaaagacgacttaagatgtcctgtgggaacgatacacacactgacggggctgcggacctggggtaagggaaacccagactcggtggccagctcgctgctttccacaaattcagggcagggttgcggtaagtaaggacgagctggccacttccccctcggtgcatgcagccaatcagagcgcggccccgcccctcgaggccgttccagcgggccggccgagtgcaagccgagcccggctgagggtggcgccgcgggcgggggcgatggggcctggcagccgggtggcggcggcgaggggcgagcgggcgctgcggcccgcccgggatgggccaagcccggcctggcggggccgagcgggagccgaggaaggcacgcgggccgggcctgcgggccaggcggccggggggctagcggcgagagagcggcgcctggcc

SEQ ID NO: 44740 - DNA, 400 bp, Mus musculus
  source 1..400: mol_type = other DNA
gcagggactgttctgaaccggtcactgttgacctgagtgactttgcctctggacaggcgttaagagcactgaatgttcttcagagcactgactgctcttaccacatggtagttcataaccatctgtaatgggatcccatgccctcttctggtgtgtctgaagacagctgcagtgtgctcatataaatacaataaataaaatcttttaaaaataacattccttcagcccagcctggtctacatagtgagttccaggtgggccaggatattgattgtgggacaatatctttctctccatatacatatataatcaaatgtagggaatgaacattctgctatatatatggatattatataattttaacatttatataacatgcatttccaagctgctgtggcac

SEQ ID NO: 44741 - DNA, 294 bp, Mus musculus
  source 1..294: mol_type = other DNA
cgaggcctcactgagccccagagtatgccgccagatgttggaggctctcaacttcctgcacggcaagaggatcttatgacccttgagggtgcagctgaaggtgcatctggaagtgagcgtggggtcctcacacacacggggccagcaccctgtggaatacacaacggccatggtgccagagcctggtccaagcttctagtttaacagactccagtagaagagcctcgtaccaaaactgatttcttttttaagacttatttatttatttattagatataagtatactgtaacatc

SEQ ID NO: 44742 - DNA, 312 bp, Mus musculus
  source 1..312: mol_type = other DNA
gtatgttcatttctacttcagctaggaaaaaacccaccttgttcaactctgctgtcttcccactagaattaagctgaataagaacagaggtctctccggtcattcccagtcgaggacagcctggtcttttccaggacagccaggtatacagagaaaccctgtaaaaaaaaagtgtcttcaaaatgtatagcttctttctgggacggcagcgctgcagcctagacgactagtgggcaccgcagacacccactgcgcatgtgcggagatcgctcgctcgcactgcaaagatctacgggctgccaggctcgcgcg

SEQ ID NO: 44743 - DNA, 450 bp, Mus musculus
  source 1..450: mol_type = other DNA
ctgctgtcttcccactagaattaagctgaataagaacagaggtctctccggtcattcccagtcgaggacagcctggtcttttccaggacagccaggtatacagagaaaccctgtaaaaaaaaagtgtcttcaaaatgtatagcttctttctgggacggcagcgctgcagcctagacgactagtgggcaccgcagacacccactgcgcatgtgcggagatcgctcgctcgcactgcaaagatctacgggctgccaggctcgcgcgcgaggatttctgggacaagtagtcgcggcgctcgcgaggccctatcgcgagcaagccctagactcacagccctgcgctcccctaggtgctctctccggtggcagaagccggcagattggaccaagcggcttcttgctcccacaaagctgcgcgagccgccgcggctgccgggacgtcctgcgtcgg

SEQ ID NO: 44744 - DNA, 259 bp, Mus musculus
  source 1..259: mol_type = other DNA
aatgcaacaatctagatataatttagagtcctctcgaaattgtgtgatatcagcagttatcaaacttacagatggcctcagtgtttgaaattaaacacaaatgtagacacacatgtgcaagtaccaataaaactggtagattaatcttttttctaattaaagattcacattatagtaataacttgcaaatatatctaaaaagagaaaaattcctaactgaaaatgtagtcattctgagagactgtgacatcagaactca

SEQ ID NO: 44745 - DNA, 643 bp, Mus musculus
  source 1..643: mol_type = other DNA
ttcagttgagtcaccccaccgggcgggggatgtgagtcaggtcgtgggttctgccatgctgaacaggaggcagcggaaggccgcggcaggcaggcgagcaggcagggccggctttgatgtgggcgcggcgcacccagccgcgctgagcgcccgtccggccgcgccccgaggggggagcccccgggccccgcatcctcattgtgccggcgcgggcccggacccgcccctggccccccgccccctcgccgccctcgcgtagaaaacgccccggccgccgccagcggtgggaggcggcgatgcgcacggcgcgcccagacggagcggccgtgacgcgttcgcactgcagatgcgcgccccagcctcggagcgctgaccccggccccgctagcctcgcgtcccggttgcggcgcctctgccgcagcacccgccgtgcatgctgcccctggactgaacccgcagcccgcgtctcgcgaacgtccagacggccctcccgtccgcccgcgcaccggccgggctcctcccgcaccgcgttcgccccacagcccccgcgccggctcggagggcgcagcgctccggaggagccgcgcggggcgctgatgccgcagggcgcgccgcggagcgccccggagcagcagagtctgca

SEQ ID NO: 44746 - DNA, 306 bp, Mus musculus
  source 1..306: mol_type = other DNA
atattgacagatatctccgaatttaggatttacgtctctggagtctacaaacattggtaaggctcatgaatttctaaaaaagcgataggccttcatttggaatgatgaagacggcctgcgtcaaatgttttcgttttgaaaagcctagatccagccggagaaaagagacgctctgtggttccctggctgcagccgccatctttcagggtgggctgcgcacgctctcggccctgggcccgcgagcacgagcggaggcgtggcccgccagcaggactagcgcagatctcgcgagatctcctgcgacca

SEQ ID NO: 44747 - DNA, 495 bp, Mus musculus
  source 1..495: mol_type = other DNA
gactgaactgcagccggtaggagctcgctgctcaaatttccaaaggaaatttctccaaggtccccagcacctcggagggacctcgggtccctagtccaaccgggcccgtacgcgtgggcacctgctagtcaccgctcagtcctcctggctgggaccaggaagcatctccaaagtgcccgcgacgcctcgttggaagcccgggcgaggacaaattctccccacgcgggtcggtgtcctaggtggcgtggagaacgctccggtgctccccttgttccacgggtggacagcctccgaaggagggcgaacggcccgatagggcggcaaaaggccatttccccagcagcgcctacgggcgggtgcggcggcgggaaacggccgagcccggagcggggtgcggttcgggcgctaatatccgccgcccattatcctgacctattgttcgtttgttaaaatgatgtcaccactatttccatgaattaggcctttattgaaagc

SEQ ID NO: 44748 - DNA, 123 bp, Mus musculus
  source 1..123: mol_type = other DNA
gatgagaacagtgatgcagaagtgtaacatggtgtttcactgaagcaagagaaatcaggattgtgccattgaattctggcttgaacgtttccacctgcattttggagattctagtactaatgg

SEQ ID NO: 44749 - DNA, 379 bp, Mus musculus
  source 1..379: mol_type = other DNA
tttcaaattaacaaaagctgagagaatttgttaatatacctaagttgtaagaaacatttcaggaaaatttccccttaaatacataatatatcacctattcccatgaaataatttggtgtaaaatataagttcatgtgaaagtttttataattttaatgccaatgtcagcttaacttactcaaaaagttaaacagaacatctgtgtcagagttctgtcaggaatcaatatggcttgtggtagacttaaggtttactgctaaagcagttggatttccacaagctggagctgagggtgctctccactgctgagcagccagtctccaaaactaagtgggcacggttgggcggaggagcccgaaggacacgccccctcctcccc

SEQ ID NO: 44750 - DNA, 361 bp, Mus musculus
  source 1..361: mol_type = other DNA
ccctccccgcaagcacagaaatgtttgggggtggggggctggggtctagagccagaagcatctaagtaacactgggcagggtctgcacaggagcttggcccagggtggccttgacattgccaagaaggaagaaggtgcctctaggaaggaatttgtttgagacttaaaggatattctctatagcattttctgtgtctttgcaactggaaaatctgaatagtctctagtaacacatattattagacggctctcagaaacaaattaagttgttttgtggatgcaactcttaagacatcttggatcacacaagtctttctaagggaggagctggaggaggccccacccacctatacctggttca

SEQ ID NO: 44751 - DNA, 259 bp, Mus musculus
  source 1..259: mol_type = other DNA
ccagccctaaggagcaccattggggggtgctccctcttctctgtgagcatataggcggtgaaaaggaccaggagccaggcagggctgggtcccctcctttcccttctggatatttgctgaacgtgtttgccttaagcaacaaccctttccatcataatcaagccacagaaaccgagccgctctggtcctctccatcgtggccagaatgagaacaatgcctgggcagggctgacgtgcaaatcggtcgtccgacctgggt

SEQ ID NO: 44752 - DNA, 454 bp, Mus musculus
  source 1..454: mol_type = other DNA
tgctttctaaattcaagagttaccccctgggttcctaactcaagtacggtgtctgatttgcaggacacacacacacacacacagagagagagagagagaggggacccctagaaatgagctctggtcctaggggattctaggtggggcagactttactccacaccagaaagaatgattttctctaaagtcatctctctctctctctctcacacacacacacacacaccagccaggtgcctgctgtctgcccagaaggacatccccggtgtcccagacagcagggccaggtccccaccccgcccctctgcggtccccaggcggcctccgccggttctgagccccgctctactccgcaccagtccctggcgctcggccccctgagatccagcccgagcgcggggcggagcggccgggtggcagcaggggcgggcgggcggagcgcagctcccgcacc

SEQ ID NO: 44753 - DNA, 313 bp, Mus musculus
  source 1..313: mol_type = other DNA
gagtgcaaaagcattctgcctatgaagcagagtcagtctgtgggaggtccccagcatggcactgtccctggacctggcgctggccggaagcagctgtgggacccaccgctaccataacttaacaatccagaataaagttaagttttcaaaatgctattaattatgacttgttcctattcctggtctctgccagcctgaaagacagaaacatttttgtactgtttcccaggagactctgggaaatgcaggggcagagtccccaacagcagctgaggggctcagacttgaccatgtttgggcatggaggcccagg

SEQ ID NO: 44754 - DNA, 475 bp, Mus musculus
  source 1..475: mol_type = other DNA
cctggctaacctgcgtttgcaggttggtcacactcactgccaatggttgtatcagtctgtgagaatgagactggacatctccaggcattatatatactctttgcctaggcatatggtagaatcaaaagcaaatgccatatagaaggtgtgccatcaatagcaacaattctttaaactttttatctttacatttgcctagcaaatgcattaaagttttatgttgcagatatggaaactgtctgcctagactgtcatttcatgctacattcctatcagaaatggagctgttcggctgctaaggagccaggcttcagaaaacattgagagactatcttccttctcccacagttcactagtggatgaaattatagataattttaaggaactgtctttgagtgtctgtagaaaaaaaatacttgaactgacactggagtttaagcctccttgtttacttatttagaagtcagcagaggaa

SEQ ID NO: 44755 - DNA, 409 bp, Mus musculus
  source 1..409: mol_type = other DNA
ttaatattcaggatcttagaggttatgcaaagcgtgtctctctccttaatgtctggagaaaaaaagaaacccagcttttacctggcaggaacagtctaggctacttttcaagtcattttgaggagtttgactaaaaagctagttaacatctagtcagccttaatcctttctcgacaatgaattataaacacgacataacattttagtttttagtgtgtgcttaaagacacaattgataactgtaaggcaccctcaccctaagaattccacttgcaatggttctcatctggaaaaccaaaacaggttgatgctttaagaaaagacaatgactttagttctgagataacacttttttttcttttgtaaactacctaaattttaattttttaaaaaaatatacatgtgtgtg

SEQ ID NO: 44756 - DNA, 207 bp, Mus musculus
  source 1..207: mol_type = other DNA
agctatcatcaggactgatgctcagttaactcaacattgttaaactggagcttggaatcaagcacagatggcttgaatcccagcttcttcacttggcaagactcatctgtatcctattcagctgaaaaatttgtttagccctcaaaatattattccaagatatttttatagcttaagagtttttagtgtaggcttcaaaccaaaagt

SEQ ID NO: 44757 - DNA, 166 bp, Mus musculus
  source 1..166: mol_type = other DNA
gccacatgtgtcctctccagaggccaaactgctctctgactctacaggagctgtagagtgtcctggcaactctagaaaatgcatccaaagaaacatgacctggtcgggagctgctggcaggtggccgcccctgggtggggccacccagccaagccctgggggtcag

SEQ ID NO: 44758 - DNA, 320 bp, Mus musculus
  source 1..320: mol_type = other DNA
agctggcctttgatggccacacactgcccctccttcaaacaccatggacatatccatttctttgaatgttctctgggaaagatatgtcatctggagagaaagccttacccaaggccatcgcgatactctgaacctggggtgtggccatggcccaactgcatcttcagaaaagaagctggctagcagtggcatccaacttgcagggtggctgaatgtctgtgacagtgttcccaggaaggtgcctggcacgggtctcagcccaggtgtcaacaaggctttttactcttgtgtaactgtattttaccagaaggaaagaaaac

SEQ ID NO: 44759 - DNA, 310 bp, Mus musculus
  source 1..310: mol_type = other DNA
ggcctttgtttaaaaaagtctcctgttgttaaaaatattgaatatgcatgcatgtaacctgtatatcagccagcactcatttgccaaagtagctccttttaaaataagcaggtcacctgcacagaagctggtgaccttgggctctagccactttgagtgtaggaatccaaagccttggggatcccacctgcttgttagtttgtgaaattactcaactctttcaaaccaggctgaagcagctgcatcctggctaacttaagatttcatacctctgggtagcctaaatgtaggatcctgtggccactagagg

SEQ ID NO: 44760 - DNA, 471 bp, Mus musculus
  source 1..471: mol_type = other DNA
aagtatgtccatcttttgctttgaaggaacccaatcttagatttagaacagtaaatatagaactcatttgcattttctttacaaagtagtgtttaagcatatggtttcacactgaaaatagagatgacaattggtaattgtcttagtcagggtattcctgcacaaacaccaggaggaaaatacttccatacactggcttgcctcccctggctcagcctgtgtgagagctcacagaggcatttccttctgtgataacttcagctgtgtcaagttgacacaaaactagccagtacagtaatatttatgaaattctacaaaggcatcttgaatatgctgaacattaaatgacttactgtatgcccagtttggttgttactaaaaagcaagccacattttgaggttacctaatcagctcaatatgatacgaccagacactgttctaaacactttaaatgtatgaagtagtttgga

SEQ ID NO: 44761 - DNA, 164 bp, Mus musculus
  source 1..164: mol_type = other DNA
agttgtgttcctagaagcaaattcaacgaactctttgatgaaagaaaattggtattttgtgaatattttcctcttcaattgaatctattccaagagggcaatcttaccccatcttcctgatgagggaaactctaccctcgcggtggtctccaaattttgaaggc

SEQ ID NO: 44762 - DNA, 404 bp, Mus musculus
  source 1..404: mol_type = other DNA
tgtcaagagacaatttactgtacaatatatggaggatctaactaaccttctcagacgttttgttatataaagaaaaacaaaacgggaatgttaactggagtttccgattcacttttgatgtgtcacttcggcaccttcatctacagatcccattgcttaaaagtgtaaagaataagcaagtttacaaggaatttctatttagatggtctcaatagcagtcctattctttggaggagactttaatttcctctgcgcaaagtgagcccagaggtggcactgtgccctaaaggcgactgcaggcgggccagcgagggggagcatgcacatgcgcagtctctgcaaggcgcccggcgcggattggacaagacatctcgtgagaaacgtgagttctcgcgggaaccgta

SEQ ID NO: 44763 - DNA, 602 bp, Mus musculus
  source 1..602: mol_type = other DNA
gacagagagatagacagacagactgactgactgactgactgactgactgtgactgtgtgtctgtgtctaagtccgtattctgtatccagctcggtgactgaattaaaaaaaaaaaatgaagccacgaggtttatcagttcttggctcccaagaataaatgaatttcaatgtttctttcctggcggcccgggctgggaggggggcgggaggggccgggccccgcgtctccggtgtctaccctgctcagtgaatggagaaagcgagcgccggctagctctccggaccactccgtgccccagccgcctctgtgctccgcagcccagccctgagccggacttcccggggcacggtgctccctggcgctcagtccaggacccagacagagccctcacctctaccggcgacccagagggacccgagggcgctcggtacctgggcaccgtgagtgatgcgcagcggggcagcgccagccccacggatggagctgctgccgccgccgcccggcgcgccccgctccgcccgcaccccgtgcgcctgagcgccgcgcccgcccctcctccgcgcccgcccgccccccaggccgcccgcgcgcctcctcgggc

SEQ ID NO: 44764 - DNA, 261 bp, Mus musculus
  source 1..261: mol_type = other DNA
aagtggaggagaggccatgtccttgataccatctcttccttttccgatggatgatctcaaattcactttcctctttataatgaggagctagactagcccaggctggcctcgcacagactacattacattaaataataattatgtagcaaatgttaccatagcccgggcctcttccccgctgggaccactctgaggcgtgccgcaggagagtggcctcactctacaactcctagcagccccgcggagagcgaggcgaggagg

SEQ ID NO: 44765 - DNA, 391 bp, Mus musculus
  source 1..391: mol_type = other DNA
ccaggctggcctcgcacagactacattacattaaataataattatgtagcaaatgttaccatagcccgggcctcttccccgctgggaccactctgaggcgtgccgcaggagagtggcctcactctacaactcctagcagccccgcggagagcgaggcgaggaggctcagtgcggcggcggcggcggcggcggctcgggggaccggggccggagcggctgcggggggccacggagcggcgaggcccgcggccttccccggctcgctcggtcccggccgccccttgcggggttgctgggccgccccgtgggccgcctgtggcctcaggcgccgccgccccgccctaggcccgccccacccggcctgaggggaggaaccggccgggcctcgccg

SEQ ID NO: 44766 - DNA, 458 bp, Mus musculus
  source 1..458: mol_type = other DNA
atatttatttaatatgtagcattggattcatagatattattgtttaggatgaagataagtaaattttaacgtgaactaaatccatcttggtggtaaaaccacgttaccacgacccgcctgagagatgctccaagaggctgcctggctcaaaaacattgtttgcctgacacatgcacatgtgcgcgtgcacgcgcgcactacaatgaaaaggaaagccattgttttctctttccccacatcttcacatcctggagagagtatctatgcctgtttaacagagggatgagttgcaggcagtggtggcgcctttaatcaggtcaagttccaggacagccagggctagaaacgcccgcgccatgtgtctcctggatcccgttagggggcagcagagggcgcgccctgaaaaaccaaagtgacttacccgggtaggaatttccgtttccggcccaaactagaca

SEQ ID NO: 44767 - DNA, 547 bp, Mus musculus
  source 1..547: mol_type = other DNA
ggaagcagatccatagcattcctaattttagggaccctaaggaaagcagggtgtgtcaattggggccacagagcccggacactcgggactgtcccacgagggggcgcgtctcgggctctaggacccgccctcgccgcgctgggcgcggggaggagacccgggaaccctggagcccggcgctccgcctcccgtttccggggcagcgcagttacctgcaccgccggagccacacctggcggaggcagaagtctcggggcgcgcggcggggctccggcagaggctgcgggcggcggcggcggcggcggcggcgtggagcgcagcgcgcagcggcaggggcaggcaggcggcggctcgggccgctctcctggctggctggccgcggactcgggccggctgggcgccgcggcgggcgcacatggcagcgtgagaggcgggcggcgtggggctggggccgcagggccgcatggacagaggcgccaccccggccggcccccgttagggcccccgatccgtgggcgccactccccgatcatgctgcctcggcggc

SEQ ID NO: 44768 - DNA, 351 bp, Mus musculus
  source 1..351: mol_type = other DNA
attgtgcctttctttctaaaaaactaagggagaaaaatcaccttttaaacttgagccaagaaacactatttttgcaagtgctaacttttttttttttttttttaagacaattatcaagacgaagcatttgtttcttcttttggtaagtagacttccatctgccagtaaaactacattgcaaattgccgtagaaattagcagctttcatttttgcctacataaataaatatgcgaaataaattgcacaccagagacacactgcgattatctcagttttcaaacctggaagatacacggatgtgtttctaaatgagagaggccgcggaactgtggggcggtgcttgcaagcag

SEQ ID NO: 44769 - DNA, 462 bp, Mus musculus
  source 1..462: mol_type = other DNA
tttcttcgaacattcaaattactgacctacagttctttaaatattctgagtatgttctgtatatgtattcaaattattttatagccctggctgtcctggaactcactttgtagaccaggctaggctggcctccaacccagaagttaaaatatgtactagccctggctgtcctggactcactttgtagaccaggctggcctcgaactcagaaatctgcctgcctcagtttttaaattggcatttggaatcattaagttaaaaaaaaactcaagtttccgttaccgtaatgtgtgaaacgtgtggaatatttcacaacaggaatcaattgcttgtacttcccaaccgttggctcattcttgtctttctacaagagacaaagtcaacacttgcagttaagcatgaaacttctcattgggtagtttcaaaactagcaggaggaatcagctgctagcttactgcact

SEQ ID NO: 44770 - DNA, 457 bp, Mus musculus
  source 1..457: mol_type = other DNA
gagctgttgtttctgattaacttttgaacaaccacacagggctggaaggagcgcctggcattccgcccttccttgacgcctgttaaatctacttaaaagttgactgggcttgttagcacaacctgccttttagaaagtaacattctctcccacacctttttatttttaattagctaaaaataaacagttttcaaacttcacagcattttttttttagcattccagaaaaacatagctttcagggatgttaatgactctgagcacagtggacgggtctttctctgagcccaaggccagcctgaggttcggactgcctaactcagtctttagtctattttctataatacatgcttggttgactcctaggcatttcctccttaagcctgcatccatcgcttggctccgcccctttttgaacgcgtggcgagaggcggccaatcaacaggcgcggccaggg

SEQ ID NO: 44771 - DNA, 414 bp, Mus musculus
  source 1..414: mol_type = other DNA
gaggccagcctggtgacagccaggtgagccacagtaacacagtcactgttttgttgcttcatttcttgaaggtaggagagcatttcttcgaacattcaaattactgacctacagttctttaaatattctgagtatgttctgtatatgtattcaaattattttatagccctggctgtcctggaactcactttgtagaccaggctaggctggcctccaacccagaagttaaaatatgtactagccctggctgtcctggactcactttgtagaccaggctggcctcgaactcagaaatctgcctgcctcagtttttaaattggcatttggaatcattaagttaaaaaaaaactcaagtttccgttaccgtaatgtgtgaaacgtgtggaatatttcacaacaggaatcaattgcttg

SEQ ID NO: 44772 - DNA, 282 bp, Mus musculus
  source 1..282: mol_type = other DNA
gcttttatatctgaatgcaatgtcaatgcagaaaattctaaagagagtaacttctttttaaaaagaaaagtagcgccgctttcgaatgactgggaaacgagggcacatacgtacccgaagggtcattgaatctcttcaggggcgccttaggcgtcagctctgatcctgcatggtccaaagagcatgcagccaataagaggctttactgggtagcccattttgcacactcggacacgccagtttggactcttgcgcatgtccaaggcgccgagggcaagccca

SEQ ID NO: 44773 - DNA, 274 bp, Mus musculus
  source 1..274: mol_type = other DNA
tctacacaccgtgaggacaagccctggcttgctacccggccagagccacgtgccgactctgcaggccgcactggatgtcctgcgcgcgagtgccggggggcacctggacttcaatgaacagcgctcctggagactacaccggcgggactaggctctgggcttgccctcggcgccttggacatgcgcaagagtccaaactggcgtgtccgagtgtgcaaaatgggctacccagtaaagcctcttattggctgcatgctctttggaccatgcagga

SEQ ID NO: 44774 - DNA, 353 bp, Mus musculus
  source 1..353: mol_type = other DNA
aaaatgctgaacattacttaagaattgtttcatgagatgctcagtgggtaagagcactgactgctctttcaaagtggtggctcacaacactcatgttaataaatcaaccttaaaaaaataaaatattaaaaaagaaactgtttcgcttttatatctgaatgcaatgtcaatgcagaaaattctaaagagagtaacttctttttaaaaagaaaagtagcgccgctttcgaatgactgggaaacgagggcacatacgtacccgaagggtcattgaatctcttcaggggcgccttaggcgtcagctctgatcctgcatggtccaaagagcatgcagccaataagaggctttactgg

SEQ ID NO: 44775 - DNA, 369 bp, Mus musculus
  source 1..369: mol_type = other DNA
gagtgtgcattgctcctgaaggataattatttttccgttaacctggcttatagagattaattttgtaagaataatgttccttcacaccctattctgatgccagacatatggcattttaagtcactgatgatagtatgagggctctgacatcattgtaacatctgagaagtgaacactctagagaagcctatagagaacactatagagaagcctaccatctcattatctgtaaagagaacgaaagcattttttttttttaacttgcccccagaccaatctggctaatagaggccagacctgcccgggcaagccttggcactgaacactcagttccgacgtagatgcgtcccagctagagagccaggtctc

SEQ ID NO: 44776 - DNA, 244 bp, Mus musculus
  source 1..244: mol_type = other DNA
ctacaggaagtggaaagtgctttgccatctcctgccccgctttacccactggtacacacagcaaaccagggccctatttggtgatcttggttaatctccatggagagatggtttgcaaaaatgatttaagttaataacattgttctaagagtgctggcaagaattcacgcatgtgttaattcctttgacctcacagttaatctgtgagagttaatcaggcaaaacctctactgagtgatttttt

SEQ ID NO: 44777 - DNA, 344 bp, Mus musculus
  source 1..344: mol_type = other DNA
gatattcaaatgccattcgtatagcatgatctttttttcaagcttttataaaaatgttgagacaattacctcccctgtgtcttttaatgaacatattgcatatgaaatgctgattctacaggaagtggaaagtgctttgccatctcctgccccgctttacccactggtacacacagcaaaccagggccctatttggtgatcttggttaatctccatggagagatggtttgcaaaaatgatttaagttaataacattgttctaagagtgctggcaagaattcacgcatgtgttaattcctttgacctcacagttaatctgtgagagttaatcaggcaaaacctct

SEQ ID NO: 44778 - DNA, 268 bp, Mus musculus
  source 1..268: mol_type = other DNA
cagaaatgatttatgcgaagttaaatattccgtgttcgaaaaccttgcaaaattcagagttaagggagtctgtgcttttgacaacgcacgcaaaggttaaaaacccctgcaacaagcagggacagagcgctctccacacgttcattcatatgaatgcagtggttaaatatttatgagcacaccttagaagagtatgctcataagcaaatttgggtatgaaatctcgcctcagaccgtgtgagtgagcgcggcgcgaggacgccctccg

SEQ ID NO: 44779 - DNA, 441 bp, Mus musculus
  source 1..441: mol_type = other DNA
gagtgtttggtgctggctaattaattttaaatttctcctcggccagaagtccactagaagaaacttcatctaccagaaatatgaatggcataaggatgcctcatatttttctccccatgtggttttaaagtgctgaaaagcagctcttggaggtgctggccattgtctactagcacccgtcattgctcagtccctcaaacacacacacacatcctgcatgtatagttatctgtgggtgcatttttctgaaccgaaaacgatggagttcaaggcaaaggcatgtttccggaaatggagatgtgcctctcaaaccagaaatgatttatgcgaagttaaatattccgtgttcgaaaaccttgcaaaattcagagttaagggagtctgtgcttttgacaacgcacgcaaaggttaaaaacccctgcaacaagcagggacagagcg

SEQ ID NO: 44780 - DNA, 542 bp, Mus musculus
  source 1..542: mol_type = other DNA
atacattttatatacacaaagctaaaatactatatggaaatggaacatactttttctcattttctcttgaaaatttcagtgcatcgatatcagtattgttaagaatcctaagagactagatttcttactaacatatagaaatattttatggtccaaaagaaggaaattgtctcaaatgctaaataaatgttccaacatctcctgaagctgtcatggatccacagaaaatatgatttaagatcttttcactttatgtaaaatatgtaaccatctgaatgtgtatatttgacccttacctcaggtagacattcacatatattgtcttctgaatgtatgaagggtggctttcacaacatgtagacacacacacatgtatcataattttgcagatgttatatatattgtttttgtttcttactattgaaaatagtttaaaaaatccttttcctattaatcagccataaggactatttttcattacaaggatgcctatcagtatttgactttatgtaggattccttctgtgaaccatagaaataata

SEQ ID NO: 44781 - DNA, 339 bp, Mus musculus
  source 1..339: mol_type = other DNA
tgctataaatagctggactagggcaggggattgctattcttaaggaaataaagttcaactccttgcccctttcaactgagaccgggaggagaagggtttcaggaaccaatcttcctccctattaaggggacacacacacacactctctctctctctctcgtgagccagacgctctggttgcttttgtcttaaagaaagaaagaaaaaaaaccaacgaagattttactctggatgcttttggtagtagtttaatattattcaaacatgtacatattacacatatatatgcttcttttcttaatttttttaaacaaggaaatccccggcagccgccgctgc

SEQ ID NO: 44782 - DNA, 288 bp, Mus musculus
  source 1..288: mol_type = other DNA
ctcttcttcctattctgatggataggaagcaaaaagaatactgtcacagtgcaaaccggagccatcggtgcccaggcatccctcagaacttctgaatgctgcatttatttaatacaactcctatattatggagcacaaattgtttgtttcattgctactttatagctataaccttgcttctgttataaatcataatgttaatatttttggaatcagaggtaatatcttcttggtcattgacctactaggctgccattcaaattgttgtatagtgggcttaaaaacccc

SEQ ID NO: 44783 - DNA, 234 bp, Mus musculus
  source 1..234: mol_type = other DNA
atttatcaacaatgacatcaaaggctctatcaattagtttataactgaggctattacactcaatgattctaacagaaaggtcctgctcttgctgccctgccctatcatgggtggtgcatggcccacattgcatggtgtgggtgcagctgtactgtgcgctctgtctccatgtagctgtgctgcaggctcatgaatgttgagattattccatgggttatatcaatgtcagacctg

SEQ ID NO: 44784 - DNA, 592 bp, Mus musculus
  source 1..592: mol_type = other DNA
ctacgtctgataccaggactatcgagtagactgttctctaatgttgtaaaaacctctgtatctacaatagagaaatagttaccatcttatatctattgaaatgtggtctatttaattcaagattatcttataagccagagctcagcaagctaaactctaaaggatcagataaatattttaggctttgtaagctataaagcaaagtgaaataattgttgctgaaagactagtagtattaaattttatgtttaaaaatacaaaaccattataagcttccgtataaaaatatacagtatagagacggtgtttactatagtctccttcggaacccactggttagtagcttctcatatataagctgtaattaagtttagattgtttatgatagagagagaataattcctccacaattatttggcaacaagtatatggagctttaaaatgttatcactaatattgcactccataaatttatatgatttatgtgccaattaaaaatctcaaaggcagaataaagctaagctttaacttctgttggcacaccaggagaagcagaggtgtggagagtgaagccaatctctaacctcagaga

SEQ ID NO: 44785 - DNA, 273 bp, Mus musculus
  source 1..273: mol_type = other DNA
agcagtggcacagccactaatctagtgagttaaaagtgattgtcattcaccatccattgcacagttcaaggacaaaaaaagcccttcaaatttaaagggacaagacgtttctgtaggccccacctcctctcggagggtcgggacgtgtgcttcactcggccccgcgtcccgaggcgcagcagccctggctggtctggaggccaaatttgagcatcctcttggcttctaggctggagactgtgccaacataaactgatttgctacttataaatt

SEQ ID NO: 44786 - DNA, 379 bp, Mus musculus
  source 1..379: mol_type = other DNA
aacctgccaaatttccacaagttctaaaaataagcagagattaactactacttaggccatcctggtctacatagtgattcccaggacagccagggtcttcttcaagatcgtcttggataggttttggtgggggccgatccaagacccaaaccatcttgaagatttaaggtattacactctggctactctgatctgagctctgaggcaggagaatctttagtaagagactttttcaatggagcagtggcacagccactaatctagtcctgagttaaaagtgattgtcattcaccatccattgcacagttcaaggacaaaaaaagcccttcaaatttaaagggacaagacgtttctgtaggccccacctcctctcggaggg

SEQ ID NO: 44787 - DNA, 332 bp, Mus musculus
  source 1..332: mol_type = other DNA
aactcacacacaaaaaacataaggctttttttttttttttcctgagacagggtttctctgtgtagccctggctgtcctggaactcactctgtagaccaggctggcctcgaactcagaaataaggctttttttttttttttttttaagaaaaataaattcaccaaagtcgcctattttccaggactcaaagatatgcctatctctgctaggattaaaggtataatcatttttgctaagattcttcatctgtacagctatagattatccatatacataaataaatctttaaaaaaaagcgcttgcaaatgcgcatgtgccgatctcccggagtt

SEQ ID NO: 44788 - DNA, 503 bp, Mus musculus
  source 1..503: mol_type = other DNA
agaaaactaggcagaaactaaagtctttttcgtgtaattatttatagctctaagtggttaagacacgaacaaaaacacccaggtacagcaggatgttatgccattatactgcacagaaaatgcctttctgaaaacaagtaaattaaaagggctttgcaatgctcagcatggatgcacgcttaagagtacccctctttataaagaggaactcgtgcgtgaaaatctacctccccatcgcagcatgcggaagtcagaacttgcgtcctggccgctggatccacgcgcggcacacgcaggtggcgccgcgtcccccgcgctccaggatcaagggggcagggtcactggggatcgcccccagagtcccagggaaggtgaagcctagctttctgcccgggcgaggcgccggggaaagaaagactgccattcccagccccccgccccgcggggcgcggggtgctggcggcgcatgcgcgaggcccggcccccaattccccgagcgaggg

SEQ ID NO: 44789 - DNA, 409 bp, Mus musculus
  source 1..409: mol_type = other DNA
taactgagatctctctgatgtcttggatgctgagatcacccagggtgccataacttgaggtagacggcagggacatatatgttcccatctgtgtggacattgacatccgaaaatcctcacgtgtgtacgtgtgtacgtgtgtgtgtgtgtgtgtgtgtgtatacagaaaagaagccactgaagtcttcaccatgaatctgcacatgcatactggggtacactactactactactactactactactactactactactactactactactactactactacaaaacatgtatgtataatcactgtccagtgcacgaacattcagtgaacaaggaatcaccacgtgtacacacagatggctctgcagctgctagccagcgcacgtgaccgggaaggaaggcactcccgcc

SEQ ID NO: 44790 - DNA, 201 bp, Mus musculus
  source 1..201: mol_type = other DNA
caattctgctttgaatagaaatgatgaaactttgtcattaacagtagtaatggtgaagatgaaagtggcacataagacatctagctggcctgggggctccctgggaacatatacagttcagtgcacagagctagagaggtgaatgaccacactctgtggccgttaaggtgaataacctccctgctagggcaggactaagct

SEQ ID NO: 44791 - DNA, 306 bp, Mus musculus
  source 1..306: mol_type = other DNA
tttctttctttctttctgcacacggcaaggaagagggtaaggaaagaaacaatagtgaactctttccgtggatctaaggactacagtcaatcctagagtttagtcctttatattttaaagagtgaaaaccaaaaattattttcggaactttagtttcccaacagaagcctgttgtgcccactccaagcctagaaataacatttattctaaggatctctgcgcaaagattcttgggaagggagtctttgaaagaacccactcacctgaccaatgggaagttggagggcgctccttctgacggaggga

SEQ ID NO: 44792 - DNA, 415 bp, Mus musculus
  source 1..415: mol_type = other DNA
taaatcaaaggaacagtatttctgtctatgaaattttgtataactctatggaatttttttaactttactaatccatgaagttcagaagaggatcttaaatgccctggaactggagttaaataggagagacttaaccagtcttgatgaaaggctactttccagaatggcattgtttcaattttttgcaaatctctgattaacagctagaataattccttctgttgcatacaagtggaaaaagtgtgtaatatttactgttttgaaaactgttactctcctaacagagctcttgaaaggcactttgaaagacgtttttaaagccacaagtagtcgcgtttgaaaaattactttgtgctacatagtactgagccgtacagtgacgccagcaatggcgccattggccagcgcggccgtg

SEQ ID NO: 44793 - DNA, 359 bp, Mus musculus
  source 1..359: mol_type = other DNA
gttcagccttgcctagaatgcatgcttgtaattcaaaaaaaaaatccaattcatattctggaatctgggtacccttctaactgttggagaacagtgccttctcagatgtgactcaagtctctgtcacctgcctaacgggtagaagtcccaccctaccttttaactgaagcgtaatcccagcgggccccctggggtgtatgaaccgggatgcccacacccggatccgctctgctccccgccccatccccgcagagggagcggtgccgggcgcggcaggtctccaagccgactaggctggcgctggcgtcggggctgcgctccttggctgccgcacagagtcagggcgcccgggcttcccc

SEQ ID NO: 44794 - DNA, 345 bp, Mus musculus
  source 1..345: mol_type = other DNA
atgaaaaaatatttcctacaatgcaggtccatgttttgccacaccactgggatgtggccgaagcaggggttcccaagctcccaggcatcccttcactgctgaaaagctgcacagaggagtaggaccaatacataaattttcttttaagacagtctcaggaccctcctgtctgagcctcttgagtccagagaagtggcgttttttaaaccccggtattgtaaatggttctgaagagcttattattgcaactggatcttagaatacactaagagaagcattttcctttagcagtaaactatgaggattaagaactgtccgaatcccttatgtttctcagattcagac

SEQ ID NO: 44795 - DNA, 235 bp, Mus musculus
  source 1..235: mol_type = other DNA
cacaacctggctttgctggtattttttctcacctatagcctgggctattagacaacagtttaatacggtgcattgtattgtagtgatccccaaccattaaattattttcattgctacttcataactgtaatcctgctactattatgaatcatagtgtttatcttcccgtcgattcttttgtccaatcattaaccaggagaatgtttctgcaacctaacagcaaagttcacttaga

SEQ ID NO: 44796 - DNA, 311 bp, Mus musculus
  source 1..311: mol_type = other DNA
cccttgcgtcccaaccgcgaggatgtcctcgcttcgcgccctctatcggcggctctgagagtggctggattgcacacctctttgcaattttaaactcctcaagaagagaaactacaaagggtaataccttctgaatttatggcccagatacactaggccctcttatttgattgtggcatgaaccatgtggaatcgggcctctattcaccttaggcatgatgtaaacagaaattagtatctctgccgacgtctatattccctctgtaacttcttaaaattcccccagcaattgagactagtcagtttctact

SEQ ID NO: 44797 - DNA, 308 bp, Mus musculus
  source 1..308: mol_type = other DNA
atggagactgctttgatagctaagaaaaacccactgaattggaaaactgctgtaactgcccttaaaagcccctttcctgtttaatttaaacggagtctccggtctctccgagtgacttcatttctatgaaagcatggcattcttctgtaaagagaactagctttccttgcatttaaggaggcaaagcagacacacagatctggaacaccgttgtcacacggatatttgtgggccggagcatgcgcagaacagccggcggcggctcggccggcctgggctccgcaggcgggaggagaaaccagcggcgc

SEQ ID NO: 44798 - DNA, 448 bp, Mus musculus
  source 1..448: mol_type = other DNA
cctaggcactgcctaatgaaaggccacactagtttctagtggcaacttagatccctgcaaagatcagcttaagcaagcttatatactatatagacacagatcctgctctaaaagcttctacatttataatacggcaagaatgtgccatagtattatgtgtgcacactaatgtggtttgaaccttgaaccaaaagaaatggcaaacctatttacaccttttattttctgatgccttagagacgagtcttagtctagtcacattgtcccacgtggtcccagcaggtgagtgagtgagcgcgaacaggtgtcgcctcacccttcggcgtttcgggcccactcaacggaggcggtgcgggaagatcccgccgtgcgtgagcgtgggcgcacgggggccgggcgatggcgagctcgcgcgcaggcgcagagcgcgcgagccggcggtcgccgc

SEQ ID NO: 44799 - DNA, 590 bp, Mus musculus
  source 1..590: mol_type = other DNA
tgatgccttagagacgagtcttagtctagtcacattgtcccacgtggtcccagcaggtgagtgagtgagcgcgaacaggtgtcgcctcacccttcggcgtttcgggcccactcaacggaggcggtgcgggaagatcccgccgtgcgtgagcgtgggcgcacgggggccgggcgatggcgagctcgcgcgcaggcgcagagcgcgcgagccggcggtcgccgcagagcgcggggggcggagccggagcgcggggaccaggccatggcggccgccgggcgctggtgccggcgctcggcccgggagcgcctttgtcgccgcggaggatggtgacctcacggttcgggccgcttccgctgcctccgcctcccgagacgccgcagccgaggccggacgcgggagagccgccgctgtgagccgcgcaaaccgggccccccgccgtcggaaccgaagatctcaccggaggggcgggaatcggagccgggcagcagcggacaccgccatccccagtgccgccccgcaggcagggaggctgcggctccaggtgactgcggtcagccgggagcatcccgcaggcctgctgcccactgcgc

SEQ ID NO: 44800 - DNA, 270 bp, Mus musculus
  source 1..270: mol_type = other DNA
cttctttcctcccgcgcctggagagggagagaaccccgtctctctggcagaggtgtccagtccggtgcaggcggtgcaggttggggtttcagggggacccctggcttagtgtgcagtgcgcctctcttcagtcacgagcagctcatcatataagcgcgccttatgaggcgcggcacccttggcgaggcagggagcacccgggcttctcttcctgcgctgcctgcttgcggcgagctggcatcaaagattaatggattgtattttataaaa

SEQ ID NO: 44801 - DNA, 265 bp, Mus musculus
  source 1..265: mol_type = other DNA
gcgagggccccgctggggagagtcaaactggattcttctattttagcaaggagaaaaaatgacacttcaagtagccaagccggcttcgagattcttcaagtgaaggtaccgctacaaaaggatgagcgaaggtttacatttttaaaaattttgcttttctcaaaaaaaaaaaaaaaaatctgtggttggcgtttttttttttttttcctttttttttttttcaaatattttcaaaggggaggagatttttccacaagaaaaggtt

SEQ ID NO: 44802 - DNA, 283 bp, Mus musculus
  source 1..283: mol_type = other DNA
gtccggttcgtcagccgctcttgagctcctgatgggtcatggaaagggggatgcgggacacagtctggcttagccatctaactcgctcactttgagaagtggccctctacgacagacagggccagcccgtcccaggcgccttggaagccgcctcccgtgtgggcaaaggtttgctcacactcctgtgagaatccaggctcctgggagtctagccttgggagcctgcagagtgcttgctctgaactatcagggaagagtctcagaaatagtttgccacagcccc

SEQ ID NO: 44803 - DNA, 624 bp, Mus musculus
  source 1..624: mol_type = other DNA
tcatctataaagctgatggtttaattcaaaaaaacaaaaacaaagacttttaaaatactttgtgcacaaatatcaaattaggacacctttgaattttagagagcatttgttgctcttgtagaagaacaggttcagtttctacccattcctagccttggggtggtacacatatgaatatacaaatgtagcactcatatgtatataaaataaaaggaataaatctaaaagaaaatttaaaattgctctttgagtaccagacttaagtttcatcacaaattgtttaatgcattttggcttgcaatcaggactaaattcccaacaatttctttatgcaaggggtattcttaacattgatgagtatataatcaaaacattgaccaatctaaaaaatggtgaagatattctatatcctgtagtattaaatattcagtaaagtttaattttatgtaaaaatgcatcagcatatccatctcaatagtatgaatatttgcttttgtctttaacaatgataaaaattacatatatatatatatatatatatatatatatatatatatgcttcctaagttgtattttcaaataaattttctgggcacaggcagctgccctaagcagtctgcaatc

SEQ ID NO: 44804 - DNA, 356 bp, Mus musculus
  source 1..356: mol_type = other DNA
caccacaaaccacctagctgattggtgtaggtcagagacttgaagcccctagtagagctgtgtaattgagtatatatatatatatatatatatatatatacatatatatatatatatgtatatgtatatatatatatttctgaattaaaataaatataaaattaggtccagaggtatagctcagttgataaaagactgcttattttacctgggatatatgatatcctatgttagcatgtacaaacatgcatacataactacacacatatatttaaaaatttaaaagcccttgtaaatgtctagtgactgaggtggacaagcagataatttccttgaaaaatatttttgctgttctg

SEQ ID NO: 44805 - DNA, 529 bp, Mus musculus
  source 1..529: mol_type = other DNA
gcataactgtatatgtacgtctatttatatatgcatatatctataatatatacatttatacatatatttatacatatatttatacatatatacacatataatacatatgtgtacatgtacatatataaatgcatatatgtataaatatatatgtatatataatatacatatacatttaatcatatatatatatatatcatatatatatatatatatatcaatagttaaagaaaaagactagtgtaattatattagaatctcaaaagataaaataaataaataacaaatttaattcacatctgttccggatgacattaggacaatcatctcataagatgactctggggttcacagggtttaagtatctgaaccaagtcacatagcaaatgtcagagttggaatcaaactaatttcaagaactgcgggaagaattctgccgtagcacacagtctggttctctcagagaaaccataaatttttattttaaagctgtgacacacacgagacagtttgtagaaactaatagact

SEQ ID NO: 44806 - DNA, 350 bp, Mus musculus
  source 1..350: mol_type = other DNA
ctggtgcatgcaaatttttatctagaactgaatttatacttataaaaattgtttgctgtttccttagttaaattctattttaactagacagtctctattttaggacatgtgacaatatctgggcagatatttcactattgaaaatactaactggtatctagtaaataagtcctgggttctaacctcagcagtgcaataccccaattagatcataaaataaactcattatattgaaggtgggtgtggtggtaacacatgcctgtactctcaacacttgtgtggcaagatgttcagagtgaaggaagtctttccccaccctggggaacctggacttcttcccatgaagaaag

SEQ ID NO: 44807 - DNA, 518 bp, Mus musculus
  source 1..518: mol_type = other DNA
aggggatccagcattctctggcctctgtgtgtatgtctgattgctcatagtgcacaggcatacatgccgacaagcatacacatgaaatatatcttaaagagtttttgctgaactagagctaaaaaatagtgttgattctttggattttgagaacatcacttttctaaatcctgtcatatttcagacgacaataagaactcaaaagaggctcagtaatttgagcttagacaggctagcctgatccaatgaaaagatatgtcttgtcttcctgtccttcccatatcagtgagttttactaaataaatggttaattgttacttagatctcaaattcagaagagatagttaatatctatcttctttagtaacaaaacagcctcaacctgtctgtgaggcggagcgaggcctgagcaggtcacgcctctcagcacgcccctctgccccctggtggccgcggctgcgcagtgcgtccccttgagccgcggctgcggctgcgcagtgccgccctctggcggctcg

SEQ ID NO: 44808 - DNA, 622 bp, Mus musculus
  source 1..622: mol_type = other DNA
agaattattttttaattaaaaaaatgtatatgtataaatacatatatatttacatatataactttattttaacatttaagtaatttttattttatttctttacaaataaataacatttaattaaaggttttaattataacttaaaaattaaggtcttattgtgtaacccttaaggaattgcctaaaacaaaatgtagtattacttcaagttttatcacaagttttgactgacatattaagtgaaaaacctgatcagtggaaattactttagcagatctcaaaaattatgtatgcttttagaaaccaaagccacagagttcttgggtatatcacataaaacacatataggtatgctgtgtatgagaactaagtttctgaggcttgttacaaactatcttaacgagggtactaggtagctgtctacagataaaatcattgtatcataagagtggggaaggatttagaataaaattctacactggtcagggtcgtgcttagcccaaaccgcagcgatctcagccctctcacgctccgggggcgcagggcgcggactacaattcccggcgtgcggcgcgcggcgcgggcggaaagccggccacttccgccccacgcagcgccggtg

SEQ ID NO: 44809 - DNA, 502 bp, Mus musculus
  source 1..502: mol_type = other DNA
attattatgtttgccaggcaagcgtagaaatccaaagtcaaattctcaacattcagatataaagtgggatgtggaagagataggcagagagaggaggctccctcaaacttgctggccatctagtgactttgatgtcttcctcatacaaaatcttttaatagtgatgagtacaaattttaaattcacctaatgacatgcttccgatcgaaaatacaaaattgtacagatgatcaatttctattttatgttccttgtttaaacttacctagaagaatctagaaataaagtgataatttagtgtatttcatcttagcaaggaatttagaaatgctacttagaaatgctttataaatgctatttagaagtacaagacaaaaaggtcacaactatacttttaaacttggtcacaaaacaacatctgatagcttgcgatttgctgcctacggggtaacagacaggcaccggcagccatggctagagcggctctgacagcgacaggaac

SEQ ID NO: 44810 - DNA, 553 bp, Mus musculus
  source 1..553: mol_type = other DNA
acaaaatcttttaatagtgatgagtacaaattttaaattcacctaatgacatgcttccgatcgaaaatacaaaattgtacagatgatcaatttctattttatgttccttgtttaaacttacctagaagaatctagaaataaagtgataatttagtgtatttcatcttagcaaggaatttagaaatgctacttagaaatgctttataaatgctatttagaagtacaagacaaaaaggtcacaactatacttttaaacttggtcacaaaacaacatctgatagcttgcgatttgctgcctacggggtaacagacaggcaccggcagccatggctagagcggctctgacagcgacaggaacttccggggtggggcccgtcgctttccgcacagggtggccatggccaagagcaagttcaggacacatgcctgccgcactgctgggtggtggtgcggctggacggccggaatttccaccggtgagctggaggggcgggagaccgcgtggtgcgcccacacttccgggaagtgcgcctctcgtagttaccggggtaac

SEQ ID NO: 44811 - DNA, 264 bp, Mus musculus
  source 1..264: mol_type = other DNA
ggtatagcctaagctactaatcaggtttattttcgaacttttatcacagtttgacttgtatttttagaacaactgaaattcaactagtaaaatagttatacctagtcaaaaaaaggcccacgccttcatccctggagggcgtggaacagaagggtttcctgggcaacgccattgtcgcgctccaggagtggcgggagacaccgggccgctcctgattgggcgaggcgagcccgccaaggcctcccggccgcggcccgcccgccc

SEQ ID NO: 44812 - DNA, 406 bp, Mus musculus
  source 1..406: mol_type = other DNA
ttacgaggtcctggggatggaacccagggcttcatgagtgcatgacaagcattaataaaagctaagtttctggagtacagaagccctgtcctctgggatgctggatctgcaaggcctggactaaaggcgtcccgataggaaaacaagttcttttagcactcatttagtcccttggaattaactctttcacagcctgactccaagagtagtcaatcctggaaggtagagtacaaagagttgtcttggtcacccaaagtactgtgtgtgtgtgtttaacactttcaaccccagtcctgacccaggcctcaagaatggttgaagcgatgctcccgggggcctcctcccattccaggcagagccctgaggggctaggggcggagaggccggcgtttgcttgaaaacctcc

SEQ ID NO: 44813 - DNA, 180 bp, Mus musculus
  source 1..180: mol_type = other DNA
cttctagaacatcttttctgaaaatcttgatgatgcacaaaacatattgagaaacctgtgtgtttctcttgataagagtccactctgctaaatggtgacagcagtaacacttgccattatcacagtcactgtatgagagaaatattatgttttcaagttcacctttgagtccaaagtcca

SEQ ID NO: 44814 - DNA, 214 bp, Mus musculus
  source 1..214: mol_type = other DNA
atgcaggcccacggaagggtaggataaacaagcatcatcaaacaagtttggagccttctgtatcctcatctttttttaaaacagatttatttatttgttttatgtatatgagtttaaagatttattttattattatatctaagtacactctgttgctgtcttcagacacaccagaagagggtgtgtcaagccaccaagaagccaatggcaggga

SEQ ID NO: 44815 - DNA, 281 bp, Mus musculus
  source 1..281: mol_type = other DNA
tcttagaaagactccatagaagtgatcaagggtgattactggtcagccttccgggggtgtgcctttgtacctcagagcttgcaaagctcactggccagctggccttagcctgctgggtgcaaattccaggcatgagagactttgtctcaaacagattctgatctctacataggtatgacatgaacatgtaacctgcaaaatttttcaactcgtttcttgctgaaggaaccaaagctcctttcactggcaaaagcctagactggtccctgaaagcattgtgc

SEQ ID NO: 44816 - DNA, 585 bp, Mus musculus
  source 1..585: mol_type = other DNA
acactcacacgcatatgcacacacaaatatgtgtaagaaagctgcgtgtatttaaggtatacaatgtgatgactttatatgtatatatatattatgaaatgagtaccataaagaacacacacatacacacacacacacatatatatgtgtgtgtgtgtgtatgccatcacttttgcacataaacattcaatcacaactcttattatataaacaggtatgcttatataattttattatatatgtataaaatttatgaacggtgattttggaaaatatctgcttcttctcccagaactatgtaagaacagaattcatttaaggggaggaactaagttctcagacctttctttgatgtgctggcatcccggaaaggcgggcccggggaacccgccccctctctcttgcccctggcacgggcggatgactcggtggctggcacccagctgcggtcgcaccccagaagggcatgagcccctgccccagaggattccccatcgcccggtgttgcccaaggcacagggtgactcctccccgaggaccctccccttcggggcgcgcgtcactctccccacccctgggttcgga

SEQ ID NO: 44817 - DNA, 325 bp, Mus musculus
  source 1..325: mol_type = other DNA
aacggtgtccaaaggggcccctgcagtgccttgttgcttcctttcatagatgaaggaactgctgtgcagatctaatttacattccaaatggaaccactgtgagaagggcccagtgtggttctcaggatagggctcgacctgcaggtcaccatgactgtcttcagacttctaaactagagaattgtaaggcgctttgagccttgtggctctatggcgctttgagccactaagcccatgacttaactgttgtcaaggaagaattataagtgaactcctcttataattctaggtttctaggcaagttgcctttgaacgactctctaaa

SEQ ID NO: 44818 - DNA, 507 bp, Mus musculus
  source 1..507: mol_type = other DNA
ggatcgacatgggcacgcgcgcgcgcacacacacacttttacactaagaaatggaaaggaagtagatgtttctctttgtttttaaattattacatttaacaatatacagaagctgtctgctgagcctgtgccctctgagcccgtgccctctgagcccgtgccctctggtcttgggaaagcagctgtcatctccaagcgagcaggggctctactgcacactagtgcgtgcctggctcttggcaagatgcttggaacaaaacaggactatatgaaaatatccttccttggcaggtgtcgctggtgatgcaggcggcagcaggaaagtcgtccctcctccacctccagagtccggaggctggatactccaggtcaggggtgcgcagggagcccctcgccgcagccatttacagcagccgcggcgaaggggctgggcaccgcggccaggggaggagccgcggcaggcggagaggcggggccgcgggcggggcgcggcggtccgccggcgca

SEQ ID NO: 44819 - DNA, 335 bp, Mus musculus
  source 1..335: mol_type = other DNA
agtttcatcaccttctgccaagtaaagaaagatatatttgctacaatttctctgaaaagctattccaagacgtgtgaagagctggagttggacagtccacagcccaagactggcttagaacccagtgttaaactctgaccccaagcaagaatctgcagccttggtttcctgctgtaacttatggctttgaaaaaattagctttctccaaatcaacagtattgatactttaacagccatggaaagcctgccctgactgcgctgttactgtcctcaggaaaaagcgaaatggcttataacttaggcattccaacagtctgatttttaaactgctcag

SEQ ID NO: 44820 - DNA, 458 bp, Mus musculus
  source 1..458: mol_type = other DNA
tgctccacatatttaaaggaagaaactgagacattcttgtttgtgaagcagagctgtttatcttacatggtacctctggctttccagaggctgggaagagacatctgaagccccattttaaaaaattatattaagtttttttcacttgtcaatttgattgttatagacatctttgaattcctaaatgaaaatatttaggatgttattcttaatcatgttcacaaatatctccatatatatgaatatatcatagagtacaatcttgcttttaaaaaacatttttgatgattacattagtataatttttaaatatattgcttatctgtattttctgacttttacataaggcaagtatttaattttaaaagtctcgtataaggaattactagagagtactttcttctactaacaaaaagtacgaagaagtataaagtgcgcatgtgcttctcttgtgcttc

SEQ ID NO: 44821 - DNA, 460 bp, Mus musculus
  source 1..460: mol_type = other DNA
gacacaacttcttcagtattgttaacagtgtagctcaggctggcctcatagtcagtgaccctgcattgtgtaatggtgttttgataatctccttacttcataataccactataaacaaacagtatcctgatagattacattctaaagtgtattagaccagggatgacagctgagctctcaagttgtccatagattaaggctataacaattatcactttatgtatttactcagctacctagttaattagttaattttttttccagacgcctgcctcagagtcagagatctgcctgcctctgcctccccaggtgctctgtacatggaccatctcgggataagggtgtatctagtgtgtcattacacagaactggaacattgatgtgactagattaacagtactaacgtggtaatcactggaggtcagacatcctggggagcagattctggggactcaggagt

SEQ ID NO: 44822 - DNA, 314 bp, Mus musculus
  source 1..314: mol_type = other DNA
ttacctgaaacaggtttatgacattgtcctgtcaaatttcacaactgttctggaaatgctttcttgaacaacattttaccctctagttgaaagatgggaaagtagtcatatccagtttcctatttgaagccaagcagctttggccagcctagaactctctgcatagccatgccgctaaaggagtccctaaactttggaaacagagtctatgagctagggctcctagtaaacattggttagaacgatgttagtagagacagatgtcccttctgcccttattccaggaagagacttgtcttcatccataaatagct

SEQ ID NO: 44823 - DNA, 296 bp, Mus musculus
  source 1..296: mol_type = other DNA
aggccagcctggtctagccaagaaaacaagaacatactctaatgcccgcctttggttttcaagaaagggttgttttgaaggacagctttccctgcaaatggcaaacggcgctctaccagtgggacattctggttttcttggcccagtggaacaatggtgttatatactattacatattacctacagatgcagtaggtaattacctccgaagcagactacaggagagcccaagtaattgggtccatcaccaagccatgtgaaaatcctcacttgaggtgtgactctaggcctgggga

SEQ ID NO: 44824 - DNA, 522 bp, Mus musculus
  source 1..522: mol_type = other DNA
acaaagcactccaggaataggagagcttgcttgttttcttaagggggaaatagtttcccccaggtgagcggttcctcagggctgagccccaaaggaaggaggaatttccattcctttttctttcacaatgtatgtatttgtttcaaagaatgatctgtgaaacctaccattctcgtcacaacacccctgcacccctgggctgggtggggagtgaggtgtgtggatccctgccagatagtacaacctggacagaacagatttttcccttctgtccaacatttgctaaggggggaagaggggaccctttgttgagtcctttttaaaggattaaagacagctactaacaattacccagctagctccagatatatatatatatatatataaaagttaaaagaaatttaaagaaataagcaaaaaacagaaagccactgtctccttctctgaggatgagatgcagttaacaggtactcagccaaattttgatgtcttaccctctgtcagatctcagtgagtaaagac

SEQ ID NO: 44825 - DNA, 336 bp, Mus musculus
  source 1..336: mol_type = other DNA
cccttgatcactaattgagaaaatgccttacatctcatggaggcatttcctcaaagacttgtaagaacttttacttaattatttattgcattttgctttgaacaatgtagcattttctagatgccagaacagaaaatggtcttatccaatttcctgtcttatttaactgcctaactctggaagcttccacaggtgatcctcttcgaaacctctccctacatttctgcaagcagagactaatgtcagacaagtgtatataattacctttctacacagaagagccacctgcctctgtgttataagttgaacagatactatcttctgggacagattatc

SEQ ID NO: 44826 - DNA, 314 bp, Mus musculus
  source 1..314: mol_type = other DNA
ttgtctcctttttttatgataggaaagagaaaatgtagactttaacagagttgtcacagcatgtaaaacgttacagccagtaccatgttaccttgtctgaggaaaataattgcattatttttagttgctgcagagatagatgaactgaaattttaaggcttaccccaggcagtgggggaattccacaatccacgtggaagtttgtgtacagaatgtctgggaaatccagtttctagaagcagccttctttctgtgtgtgtttgacacacgtgtggcagctcctgagcgcaggcagggcctgctcacgggggcgg

SEQ ID NO: 44827 - DNA, 283 bp, Mus musculus
  source 1..283: mol_type = other DNA
tattaatatttaaaaattttttattttatgtgtatgaatgtttacttgcatatatatgcatgcatgcatgtttggtacccaaagaagccaaagagtgttgttggttgtcattatattacagactttcaaagaactagagaataatcctgttcaggcctggtttttatagtaagtaacagccagtttaacagggtgtctgttcatgtgtactcatgtatatacagatgctcaggcacactcaggatgacagacatatttgatcacacatcccagatgggtcata

SEQ ID NO: 44828 - DNA, 309 bp, Mus musculus
  source 1..309: mol_type = other DNA
gctgtcttcaaacagcaggcaggactgcccaaattcattcttaaatctgagttcaactttttaggaaagaagaatctttgtaggaagtcaggataaatttaatctttacaccctcctggcagatgaaagaacatattttactccatctttctaggctttccaggaaaaacaaagtgctaagcctccaggctggctgagtagagctcagtaatgatcaggatcaagaccagccctctcttgaatgtgaatttctagaattcatggaaaaccaagcatgctcgtgtccctcctttttggcatctctaagag

SEQ ID NO: 44829 - DNA, 455 bp, Mus musculus
  source 1..455: mol_type = other DNA
aagatgagatggtctctaaaaaaaagcacatgcaaattgccttctaatttttaaatctactcttatgaggaaagattgcaagccaactcccttctgtttggaaggaggtgcccctcaagctgtccctggggaaccccattctctttcagagagacaggaaggggttccaagggacttgaatacggccccttcagctgctccggagccgatcctccggaacggggcgcccctcctgcaaagggaggggacagccagggagccctgtgcatcacccgctgcagacgaggagccccgcgccctcgggaacctcagcagcttgccctcggctgcgcgggggtgagggttgtccccgccgcccccacccgaggctccctctctctagccccgccagccggagcgcgcacaccggggctcccgcacgtgggcgcgcgggaggcggcggccgctgctgcccg

SEQ ID NO: 44830 - DNA, 337 bp, Mus musculus
  source 1..337: mol_type = other DNA
aattcctgacttcagccagtatactttaaaacatacagttaaaactttttaaggccagatctgtgacatttggaaacactacaaaatttgaacacgtgttgaggtcatcgggttgccatgcttccccgtccgggaacaccttttctcgccgggcggcggctgtcaaagaagggcggagccgcgtctctgccacgtaagggcggagaggccactgtagtttgcttgtgtgccctgcgcatctggcttcagaatgcatttgtacagcgctgccaaactaggttgcgtggcagaagatacttgagcccacttctcagtgcagcagcagtgaagggaaccc

SEQ ID NO: 44831 - DNA, 311 bp, Mus musculus
  source 1..311: mol_type = other DNA
gtctcgggcccggacgatgactaaggttagggttagttaccctgcatggtagcttgcagtcatctgaaactagttccaggagaccagacacaggtagcacacatatgtatgtagggagccactttaaataaaatacattttgaatgtggaacttaaggctgagatctacagctcttgatattgtagagtagtaagcctcttttatttataacttgaagttgtcccgtttactggccccagtgactttaagactgtaaatggtgcacatgatggcataccacagcgtgctctgagaggtcactccgggtaaa

SEQ ID NO: 44832 - DNA, 429 bp, Mus musculus
  source 1..429: mol_type = other DNA
tcacaggtagctgtcacttttgagtcatttgtcttttaaatgacaataccatataacctttctttttttttttttaatgaaaataagctttattacatcaagtaataaatacaaagatgcaactgtaacctgtgcattttaaagattgactctccatgaagcagggtctacactgtacacaggcgggccagctactgagcaaaggcgcgtggtttgcactcaactcctcggaggcaggtgagcacaaacaatagcttgctgtgaagtggcttcacaaacatctttcaaatgtttggaaagaaaaaaagagctgggtcattcctaactactttggtagaaaaatgactgccattttgcacaaagcctctcatctccacggggtagtgagatgggccccgaaccaggctccgggcatgaatgatgcctcgt

SEQ ID NO: 44833 - DNA, 381 bp, Mus musculus
  source 1..381: mol_type = other DNA
ttaaacttaattcattccaaagattctctgtcatatagttgaacactgttgcatttaatatggatgtggatattaataatatgcaggagcgccccagtccagcgggagggcggagcctttcgctccagtcccagccggtcgtcaggctccgcccagaatcccgctcggagggacccccggagccggaaatatgaggacgctgagcgggcccgcccctcagcttccggcacaatcgtccgtgcctgacggagaacagggcgctgctcaacgtcctcgccaccctccgctgtccgttcccgctggcagggcatgggggcgccttccgctccgtacgcgttcttcgcggggtcgctctgcagcctggggcggggcgtgggacac

SEQ ID NO: 44834 - DNA, 316 bp, Mus musculus
  source 1..316: mol_type = other DNA
aagggttctctaaagttaaaaaaattttttaaaaatggaagcgatgcaactctggaacccagctgtataccagctggccaaattccagaccctaagtttagctcagcgcagtgccaggatgagtcggtatgcggggaaccagacaccttgtcccgggagccaggcctttgcccctgtggagtggagcccagctggccttgcgcgctcacctgtccccgacagttccactgctgactgggccatactgggcggcctagcagagaaagggcagcacctgcctccctcagctgggtgcgcggcgcccagtgggtactcg

SEQ ID NO: 44835 - DNA, 511 bp, Mus musculus
  source 1..511: mol_type = other DNA
attctctcataaacaatttccatttcggatgaaatttgagtaaacccatagcacttgaaaaatatgtttatttaatgagaacacacagacttgtctcaaaacccaaaggactatgttttcggaaaagtgtctttactggccggccagccttcctagagaaattctgttttcttctatagacgagaatatggtagagtagctgttttacatgacgacatcctcacaaaatcctgtgaggcaatgatttgttttatatgatttacgttatattactatatactttatatagccattcagagtaccttaaacttaattcattccaaagattctctgtcatatagttgaacactgttgcatttaatatggatgtggatattaataatatgcaggagcgccccagtccagcgggagggcggagcctttcgctccagtcccagccggtcgtcaggctccgcccagaatcccgctcggagggacccccggagccggaaatatgaggacgctgagcggg

SEQ ID NO: 44836 - DNA, 467 bp, Mus musculus
  source 1..467: mol_type = other DNA
cttgtgaccagaggatcacattgcccaaacctctgggcaatactggtgaggagccgcctcattcctcctggcccaatctcgcagtgactatggaacaggctcagctcctctttgctgtgcagtactcaccggtaggtagtcactgtgaccgtggccggttgctttaaaaaaaaaaaattctgtttttcttcatgaaaacgttacctcctagatctgaggaaaatgaagacaagaacccgattctcgctcctttatatagagaggtgtgattaagcctccaagctcggggtggcctgaggttgctgggtctggaggttagcattgcccagggccagcatcttcagacactggaaggtctgacgcgggggctgcggtgagtcagcacagcagggttctgctcctctttgaagactacttcctgaaaacagcctgtttcaagaaatagaaaccgaaactgattctcaatt

SEQ ID NO: 44837 - DNA, 467 bp, Mus musculus
  source 1..467: mol_type = other DNA
aaaactttttgaacaattagcaattttttaagggtccatctggccagttgtgggagcaacttcctcatagcttatacaagataaaaatgattttgtttttaatgaaatgcagcacagtgaagttaacacattaatcatagtgatcaccatcttcgtggaaatcacgtggtatgtaactgtctttcaaagagaaagacatctctttgatgccatctctttcatgacatctctttgtgccatcttgaacttggagaaatgaagcttgcttgtcagccacccttccctagatatctgagagatgtcactgataaaagtcagtactactcagtaatagatgacatagacaggactaggctaccaaatagagctctcaggaagccctggagttgtccacttcagcagagctccacctcccgaaggatgtgaaaccttttcagctgactgtgtaaataagacacagaggtctg

SEQ ID NO: 44838 - DNA, 123 bp, Mus musculus
  source 1..123: mol_type = other DNA
acctggtaatagccatgcgcctgcgaatgcttgcgcacgcgcccttcctggttgtttctttttataaaacacaatatagttgatatttgattcctataaactagccatttccaggaatagaaa

SEQ ID NO: 44839 - DNA, 429 bp, Mus musculus
  source 1..429: mol_type = other DNA
aaagtaccattatggccatcttgtgatgctgggacagaccccagtttctggctccagacatctggacaccttccctgccagaggagaggtgaccatctggaagggctctgactgccagagcctctgagaccagtctgcccaggtcagctcacagactgcagagggtgggacagaccccagtttcaggctccaacatctgggcaccttccctgccagaggagaagtgaccacctgggagggctctgactgccagagcaggtgagggaaccatcttgtgtcctgggtccctcagagaacagtctgccaggttccctgcaagaggagagcttgcctgcagagagtactctgaccactgagccaggacttctgacagtcaaaatcatatctcatgatgctggtagaggaccttaagaagggcattaataactc

SEQ ID NO: 44840 - DNA, 609 bp, Mus musculus
  source 1..609: mol_type = other DNA
aaactgttgaaatatattgaatatatttcctgtgtaaagacttactactggcaaagtcatactgtggcaagtgatgccaagtctctccttaataaggaagagtttttgtcagagaatcatgcctctctgacctccctgaatactgggaaacaggaataggtactaaccttagggctggcttcaggcacgaacttaaatcctacttttaagcagcaaacattttctgggagaggattcatttctttcaaagacagaatatcactgaaagtaccattatggccatcttgtgatgctgggacagaccccagtttctggctccagacatctggacaccttccctgccagaggagaggtgaccatctggaagggctctgactgccagagcctctgagaccagtctgcccaggtcagctcacagactgcagagggtgggacagaccccagtttcaggctccaacatctgggcaccttccctgccagaggagaagtgaccacctgggagggctctgactgccagagcaggtgagggaaccatcttgtgtcctgggtccctcagagaacagtctgccaggttccctgcaagaggagagcttgcctgcagagagtact

SEQ ID NO: 44841 - DNA, 336 bp, Mus musculus
  source 1..336: mol_type = other DNA
attatttggggatcaaattaactctaatcctaggcaagctttgattctgtaacagacctcgaggcagttagcttgcctcatcttgtgactcactggccagctgacaaagtagacatagcttatacaggtgaaaaataattttagtttttacaaaatcatgcacttaacacattaatcacagtgatcaccatcctcacctgtcagccacccttgcctaatcggtgaagtgagtcacactgaaccatgggctcactgggtctgaaagtcagtactgactcagtaatagatgacatcattaattaagtagagctccacctccctctctggaaggatgtg

SEQ ID NO: 44842 - DNA, 336 bp, Mus musculus; identical to SEQ ID NO: 44841
  source 1..336: mol_type = other DNA

SEQ ID NO: 44843 - DNA, 189 bp, Mus musculus
  source 1..189: mol_type = other DNA
tacctgctggagatctggtacagaatcaagatgagttaatttacccaaaatatgaactttgtgggacaatagctggggccttagctagaaaatgctctggatttgtctaagccaatctctttttaataaaaaaggctctaatttacttaaagcaaaacttaagtcgtgcttccaacaactaccatttcc

SEQ ID NO: 44844 - DNA, 308 bp, Mus musculus
  source 1..308: mol_type = other DNA
ctttgattctgtaacagacctcgaggcagttagcttgcctcatcttgtgactcactggccagctgacaaagtagacatagcttatacaggtgaaaaataattttagtttttacaaaatcatgcacttaacacattaatcacagtgatcaccatcctcacctgtcagccacccttgcctaatcggtgaagtgagtcacactgaaccatgggctcactgggtctgaaagtcagtactgactcagtaatagatgacatcattaattaagtagagctccacctccctctctggaaggatgtgaaaccttttc

SEQ ID NO: 44845 - DNA, 216 bp, Mus musculus
  source 1..216: mol_type = other DNA
taggaatttcataaattcattctttttaatggctgagtagtactccattgtgtaaatgtaattataaacaaggctgatcttctggatatatgcccatccagagtggatgtacaagcctgcaatcccagagaaaatgcctcaccaggggccctggttgtttctttttataaaacacaatatagttgacatttctacaagctagccatttccaggaat

SEQ ID NO: 44846 - DNA, 408 bp, Mus musculus
  source 1..408: mol_type = other DNA
agacccaggatgtgtgcagaagacagagaagagcctccctggtaccaggaggcctccttttcaaatgatgtcatctactgctgagcagtactgcctttcagatccagtaagccaatgattgcagacagagaaatcaccaattaggcaagggtgtctgacaagggagcttcagggatccacctccctctaactttctctttgaaagacagttactttagattatctccctagccactcatagaaaaatccatggaaatggtgaacattgtgattaatgtgttaagtgtgctacattttgtaaaaagaaactcatttttatcttgcataagccatgaggaagtttgggctatttttaaaaatttgataattgctcaaaaatgtttcacggatgttaggcattataaactg

SEQ ID NO: 44847 - DNA, 555 bp, Mus musculus
  source 1..555: mol_type = other DNA
atctgttcttcatatctgattacatgtgttaaaatccgggcgtggtggtacatgcctttaatcccagcactcgggaagcagaggcaggaagatttctgagttcgaggccagcctggtctacaaagtaagttccaggacagccagggctatacagcttcttttcccaacatggcagcaaatgtctttcctccatggtgataaacgttaaaaccaacaaaacctgtgagggattatctcattgcatcaaatgatgtttttggaaaacgctctcatgagggaatccttgagaaaggaaactaggaagactccattactctctttcctgtggctctggatcctgtgagaccccaggttcatgggtgccttggggccagccacagtgttcctcccgatgggcagtgggaatcctttggcttcagagaactcattccctgatgtcttggccgagtgacccttcacaggccaagtgccaagttaaagtccttttctttttcctggaaatgtttatgctgcaggggaaacaaagaaagagctttagtttcacttttgtttcct

SEQ ID NO: 44848 - DNA, 321 bp, Mus musculus
  source 1..321: mol_type = other DNA
tgccatgcgcatgggcgcgtgtgacacgagattaggaggatctccacatggagaagggtagattcgccacctctagcagagtgcagcttcactgcaggcttgccaggagtccgccgttccctgcatcagagctgggcacaagcacttcccaacttctaatggagactgcagtctgtctcagaggggctggccttggaccaccatccagcctccctggatatccagcttgatctatccagaaatcctggatggccagcttgggcaagcacctttttgttctatctatcttggtttttataacaaagggcagaaccaatatgc

SEQ ID NO: 44849 - DNA, 299 bp, Mus musculus
  source 1..299: mol_type = other DNA
tgcagattacagtttctcgctgctcgggcgagttcactagctccggcagctcagcccctgggctgggggacagatgctgttcccaacatggagcgggagagagacagttacttttcttctgcagtctccgaatagcaggcttcctggaaattgaaataaggggtatgggacccccatattccgcagcttcacaagcaggaagtgaagtattcctctccgggcagaccagccgggattaggaggccagcagagcacccagcgggtccttcccagagcggcctcggaagtgcccctgcggc

SEQ ID NO: 44850 - DNA, 412 bp, Mus musculus
  source 1..412: mol_type = other DNA
caagtattcttagctgcggatcagtcttaagattagggaccatgtgaccaagtgttacagatctgataatcatatactagttattaagagctcatagtgatgaatgaaataaaactttttccggcactgccgtgaccctagaagctacttccaccaggcagttgctaggcgacctcctggcatcaggacagaggcagggcagccacgcaggtgttcctgccacctctggcagccagagcgtcaacgcgagcgaccggctggaggaccggcggcgcaagcgcgctgcttctcgcgccgcactgagtgacgcacgctcccgcggccacacacctcccgcgttgatgatggagggggggggggaaagtggggagccagcggttgcccaggacctacttccggaggacaggcgggg

SEQ ID NO: 44851 - DNA, 337 bp, Mus musculus
  source 1..337: mol_type = other DNA
tatataaaggtggacagttttaggaaaacttaaattgaggccatctgttctcaggtgacaactgcctcctgcttttcttagtgatgatgtcaacagcaaaaagcatgctggccagggctagcgagactcattgagcctcgcagtcactgaagacaacgactgttcttcttgtcataggagtccctgtctggcctgaagcctgagaagctcctgaagagactccagccactcaataaatgcatggttcctatagggcatgatatgttctagaagacttcctagtcctacggaggagtccctcccgtgagtacctaaagcacccagagtactgagtgca

SEQ ID NO: 44852 - DNA, 245 bp, Mus musculus
  source 1..245: mol_type = other DNA
gctgcttgaggaccaagtactccatgtttcttttgctttaaaaaaataccaaggaatacatttttagggttactccaaaacgctcttcttgctgaggaaacgctagattgacactcttgggaaaagtctttgttagatcttgacctgggccagcgcggactcgcccgtggcagggcggggaccaacagaggggcctaggggctggggagcgccgccccgccctcccggggaaggaccacattgcc

SEQ ID NO: 44853 - DNA, 454 bp, Mus musculus
  source 1..454: mol_type = other DNA
gtgaattaaagataaatataaataaatagataaataaataagtaaataaatattcttagcctcagtggcagttagggaaaagccaattaacaccataatgtgatttcagtacaagctaaaatgaaaaactagttagttggcgactatttaaaaggtcatcatcaacaacagtctggccttgacttttggcaaggatgtttgggatatattttgaaatatgtctttcacacggaaatgcagaaaacgatactatgcggttttgttcatcgcacgggggacagtgcagtcacctgcactcctcgcccacccgcagttaacgtacgcaaagtgggcgctctccctacccaggctggagaggggcgggctgaggctacggtgaccctcctcccccggagctccgccccgggccgcctcggctccgcccccgggccgctgaccggtccgcgccccgccg

SEQ ID NO: 44854 - DNA, 657 bp, Mus musculus
  source 1..657: mol_type = other DNA
ttattgataaagcttctacattttttggatcctgatgtcctttcagatgatgaaggatcatatccagagaatatgaggtcacaccactgtcaacttagttgcctccgactagatagatagatacatagatagatagatagatagatagatagatagatagatagatagatagataaatagatagataaaaaccataggtaggtaggtaggtaggtaggtagtagtaggtggatggatggatggatggatggatacatacatacatacatacatacatacatacataacattggtaaatatggtagataaatagtaggtagatacatagaagtataggtatgtaggtaggtaggtagatagatagatagatagatagatagatagatagattagatagagagatagatagatagatagatagatagatagatacatagatacatagatacatagatagatacatagatagatacatagatagatagagaaatataattttttggtgcatttaaaaaataattacaagtacaataataaaagaatgcatactatatgatactattgactttaaactttgtgaataaaataaagcattttttggtggtttgatgctgagaggagcctgacataaaaaaaataataataataataattaca

SEQ ID NO: 44855 - DNA, 315 bp, Mus musculus
  source 1..315: mol_type = other DNA
caggtgggatctgcagtcttcacagcagcccaggggccgcgggaacttctgagacggagccattctaaaatgctggaagtcacagcttcccactaatgagccatctgctgcctttgagagtgatttaaaagaccagccaggctattaggcattcctttcagggaccaatagctcattgagagatctagagtccctggccgtggggagcctgttcccaccgagccatgggcccctgacctgtaccgtgacaaggttgaggcggacctcagagcctcccagggtccactgaccaagaggaagttggctgttagctaa

SEQ ID NO: 44856 - DNA, 482 bp, Mus musculus
  source 1..482: mol_type = other DNA
atgcattgggaactatgatgttcctctcagaagtgaagaatattattgacagactctggtgagaaaagtaatattttctatggaatggctactttttgatttacagattttttttttataaagaacctatgtgcatatctgtgcacaagtgcatgtgtgtgtccttatgcgggctctgaaggtagaactcgggtgatcaggcttttgggagttttttgataattcagaatttagtctaaaggaaaattcattttgtagtacaggttttacaattttttttctataagatggtttttaaactcaagaaatcaacatgttttgttttaatttcccggagacatttataatccagactctttagaagctgtaaagataacttctttctggtggtaaactatgaccacagttatatttgattaacttacagaatcccaaattttgtttcttctgatgacttgtataaaaagtacatcttagaaatt

SEQ ID NO: 44857 - DNA, 312 bp, Mus musculus
  source 1..312: mol_type = other DNA
gaacgaaagatgggcttccttgagaggcatttctgggctgatctgccacggctgactcgacaaggtggtagttcgttacttaaattaggaccccataatttaaaaaacaaacaaaccctgcctattaattatttttttcctgcatagttagggcaggaacaattagttgacgaagagtgtaagttttctttctcggaagatcaattaaacgtctgagaatttaatctgggagggcgggcaggagcgcgccgggccggctcactgctccgagaccggggggatccacccccgcacgacgcgggatatgggagg

SEQ ID NO: 44858 - DNA, 437 bp, Mus musculus
  source 1..437: mol_type = other DNA
cggtggagcccctggcttggatgcaggctcacggcttgccagacgggtctgcggccacctgggggatgcctaccccctgcacctctcaggtccggggtcaatatcttatatcttaataaggcccagtttgctcctggcaggcttggaagaagttcacaagcctagtgtgtgtgtgtgtgtgtgtgtgtgagagagagagagagagagagagagagacagattggttgtactctgtgtctacacagtctgtctgtacattttattattatcacattttacaaatgaagaaactgaggcacggagcgatctgtcccccttgctaagagggttgggagccgcccctcaccccttaccctgagtcttgggggccccccgctgttgtcagcggcaggaggctccgccccagccccacccctctcggagggctactggctggc

SEQ ID NO: 44859 - DNA, 376 bp, Mus musculus
  source 1..376: mol_type = other DNA
acagagtagtcagaatcccaaattctgagttttccaaacatctgattcacctcagaccttctggaacctacttgagagccagaggtctgcagaacttgtctcttataagaggcctctttaggctaagggtcagtgtggcatctgccttagtgaaaaacaaaccccaaggccccgcggcttgtcctggttcttcctccaggcttcaagccacactgtagccaccctctccggcgcatgcgggtctcctggccctggagggcgggctcaggagacggtcctagcttgacctggatcctggcggacgctcttccagcaagcagacggtcagacggcgagccgcctagggggcgccactctgcactagggcatccggcgc

SEQ ID NO: 44860 - DNA, 606 bp, Mus musculus
  source 1..606: mol_type = other DNA
cttttggcaggcacctccggggtctcatcctgagaataggtactggggtccatttcacccagtgaaatgccgtggtactatgccattttacaaaaaaagttaacatttgggtccaagtctactgggcccccatttaatttaaaaccttaatctctataggttcttggaaagcttcacagtcactgaaccagcacaggtgactggaccgcccctggccctcgtgcgggagggcgggagcaggcagcgcctattgcgcacgcgcagcggacgggtttgcgcatcgggcttgcgcgttgatggggcggcggcgggcacgcgcctgaggcggcgttgctgaccctccccgagcagtggggaccactccttcccaccactccgagtcctctcaggggccctgtccgcaggcctagtccctgggcattccaggtgccctgacagcacacggcctgacgcgccgtccttcccctgagagatccacgggcgcgcactcgcgcgcgggccgcggacgtgagggcggcgaacggcggagccgcggcgccgaggagggccgtgctcgtgcccggctcgtttcgaggcgcgcgcgcgctcccgccgcagcccgggccg

SEQ ID NO: 44861 - DNA, 269 bp, Mus musculus
  source 1..269: mol_type = other DNA
agaactggggctaatttgtccctagggcgagagtcaaagttgagtgaattgagttgggagcagaagacagatgtcctgacctctgcagtgagagccagggcagcatcgcagtgcctccagagccatgaaacgcaatagggaggagtcttgatcccgggaggagggcagcgggcagcgttgcgttgcgctgcgcggactcgggcggctccacccgcgcttccctgtgcggccgcgagggggctccgcgctgctcaggccgggccaggcgc

SEQ ID NO: 44862 - DNA, 539 bp, Mus musculus
  source 1..539: mol_type = other DNA
agcagacggtcagacggcgagccgcctagggggcgccactctgcactagggcatccggcgcccgtcagactgagcgccgcggcggcggcggcggcggtggcagcagcggagcaggaccggaagggtcgcagcgccccgcgcccctcacacccactgcgacggcgacggggcggagcagagcggggcggggcgaccgggtccaggtcgtggagctgggtgccgccagaacgcatcgccgccagcgtgccctccctctgcctccggcgcggcggcgcggagccgaggtgagccgggcgggcggctaggcctggcggggctgctcgggccacgcagggcctggggtgcggggctcaggggccgcctggtgtgtgcagccccagggctgcaggccggctgtctggccgggccccagcagacctgcccgcagggatctgtgggcgcctttcctccagctgtgaggcacgtcgctgcaccccgctgcatgccctggagcctgagctctggtccccgcgaccttggcggtgactgcgaccctcact

SEQ ID NO: 44863 - DNA, 225 bp, Mus musculus
  source 1..225: mol_type = other DNA
catgtcttggtgtatgtgcaccatgtgtacggagaaagaaacttttttcctaggagtaagagatcctaatatcagttcactcttgtaacagtgaatattgacaagtgttgaactaattaaatttttctttttccagcttgagtcttcaagagggagcctcagaactgatttctaaaaccaattgtacttggtgtgattataaagcaatgagactgattgtcatat

SEQ ID NO: 44864 - DNA, 353 bp, Mus musculus
  source 1..353: mol_type = other DNA
cagccagactgactggttgctgtgtactctgtcaggataaccgacttcaaagttgtaatgatcacctgccatgtccaggtgacatggggacagctcataccagaaaatctctgtcagagactgccgccttcaggccaagagtaagagcagggcactgcgcccctccatctgtcagatggggtgagcgcagcgctgggcagagggcgatcccctccaaactggacagcggcagcagggctggaggggactgcgacgctgtgagccagcgcggccgctagggggagccaaccttcgggccgacgtctcgaccccgccccagcctctcggctcctctcggctcggctcgggcgcgg

SEQ ID NO: 44865 - DNA, 390 bp, Mus musculus
  source 1..390: mol_type = other DNA
ataagtatgaatgtttgccggcatgtatgtatatttaccatgttcatgcctagcacccacagagttacagatactcgtgagctgccatgtaggatatataaaaaataaaaaatataaaaagtataaaaaatatactttccaggttatcccaaactagcctcagactctggagggaaagagagccctggctgtcctggaactcactttgtagaccaggctggtctcaccgcccggcgataaaggacctttaagttttaattcaaaaccaagatagtttataatgtcagccatgcaaacctcacgtaggaacaccagctcgggttgtgttgttgtgggctagagcggctcaagagctctcaggggcgggggccggaaccagcgcaggttggg

SEQ ID NO: 44866 - DNA, 376 bp, Mus musculus
  source 1..376: mol_type = other DNA
tttgaaacagtttcaccaagttgctcaagcagaatatcttgaacttggtcttttcccaacctgtggcacaggactggctatagcgctttgaagccactaaggcctgagatacaatcctgtgagacagcctgtttggctaaaagaatggctacctgacagtagacatctgtgtccatcccccctggcttggggacgacactgctgagtcataggcaggcccaagcctgggaggtacctaggctcgatactctcgaccccgtacctttcaagggtcccatcaagggggctccagcggccgccccagcctaggggaggggcggggctcatagaggctccgcccccacgaggcggggctcccccgttttctataaaagct

SEQ ID NO: 44867 - DNA, 396 bp, Mus musculus
  source 1..396: mol_type = other DNA
cacctgaggctcagcttgagaggtctgcctgcctatgctggcctatccaagcctcccaaagcctggctgcatctgtctggggtttgggctccgggggcgggcacccagttctgctgattcggagggccttcgcctcaggccatcggcaggagctggacagcagccagagtgcgcgcgcgctcgcgtataggggagtcagcctgcgggtggcgctcagcgggagcggagccaagccccccccgcctccccccaggcctaggccctccccctccagactaggcctgccccgcaggctcaagcccctcccactccgggctacaccggctcgctagggctagggccgatcgccgcctcccaccctttgagcggcgttggggagcgaccctcccctgcagt

SEQ ID NO: 44868 - DNA, 524 bp, Mus musculus
  source 1..524: mol_type = other DNA
tttcactccttccaccctgtggattctgagggatggaacccattttacaaagtagcttctggttccattttgaatggtgacttccaaaatgcatgccccgaggctgccttggctcagtgacagttcctggttccgcagaaccagaggcgccccgccccccccggtcacccgcccacagcatgcctggcaccgggaagctagtcggctacaacggctctgttgagagcggaggagcgcctcccccggtccgcagcacactctccgaggcacatcagagaatgccctgagagagagcagctggcactttctggctagcctgctagctagagataacctcgggcccctcccatgccagatcctctctgtcgggaggggaacaggcatctccgccgtctgtggggcgccattccacgcgcgtgccaccttcccaaggcgggcccgccgggatcccgggagctggcctcctaccccgccccctcgcggtgctcccagcggcggcgagtgatgcggcccctttaaatccc

SEQ ID NO: 44869 - DNA, 273 bp, Mus musculus
  source 1..273: mol_type = other DNA
tggatactgctaatggaagtttccagaactgggtctcttctgtcaacatcggcacacatgactacaccacaagtgtggcagtggtggggcataaccaaggataaaaaatatcattcatgagcctttggggctagccctggatgggaatacagacccagtcatcactggccagagcctaggaaggaagtggtcaagctgtccacagcactggtttctaccttcccagcctggccaggctccctgcacccctccccgcctctactgcaaaggggt

SEQ ID NO: 44870 - DNA, 280 bp, Mus musculus
  source 1..280: mol_type = other DNA
cttggcactgggaagaagcagtgctcacttatcttttcttattttaactccatgtgtataaaaacacttggctgttagctttttttctttgtgattttaaaaataaaactttaatgaactctagctcactggaacccagtgctttggattgggagtgactcaattttatatatcagtcggtttttctgtagatctaaataagctattgctcacagtaccagtcagtgataactatctctacagtcactctcccgcactgagccctcgccggcccaggccc

SEQ ID NO: 44871 - DNA, 426 bp, Mus musculus
  source 1..426: mol_type = other DNA
gacgccctatcttagctggccagaagtcgagtggtacccaactcccaccttgttcacagagtgcatctctgggagctctctctccaggttcagtgagactctgactcaaaaggcagagcaagtggatctctgtgagtctgaggccagcctggtctaagataccctgcctttatgtttataataagtaaacaaacaagtaaggtgaaaggttagcttttggccagaggtcatgcctgaaccaggctggcccacctgctgccactgactggctcaggaggattcttactagcctgggctacagggtaacctgggggggtgcgattttatgattgaaaacagtgcctggagcacagtcaatgctccggaaaaccctaggaggcctggcagggaggcattgtgagtcacagctggcagacaggtgggtgc

SEQ ID NO: 44872 - DNA, 432 bp, Mus musculus
  source 1..432: mol_type = other DNA
ataaggaaagcaatttctcttctttaaaattagggagagagaattggcgcaggaacaaagctcgtttcacatgtagaaaaacctgctgtttctttctcaaggatctagccaaatcctatattgaaaaacgagtgggttatgaaaaggctattttaaatctgcacatgggctcctgagctcaggactccgcaggcggtgtctgctcaccattgtgatgaaggccataggtcccaggcggggttgggacagagttcctaactcaatgggtcggaaagccgtagaacgcgtgccagatccgtccgccctccgcggcgcgcgcccgcccgtttggtgacggcccgcgagcgatgctaccaataaattcttagatcttgcgcaaggatctgacgttcgttttagccactttcgtgcggtggggctcgctcgcgcggc

SEQ ID NO: 44873 - DNA, 358 bp, Mus musculus
  source 1..358: mol_type = other DNA
cgggatgacccgggcgtgtctccaccttgggagaggcccgttggtcggtcgggcgcagcgctctggggctgcgtccttcgcgcccctggcagtctcagccttccctcgcgaggcgccgcacaccgagcgcctctcgtgcaagggcgaggggttcgttggcagcccatgtgggtcgggactgaccccctaaagcgggcaggtaaggggactggtcccaggcgccccacggagaggaggtttggcacaacccggccctccagctcctacgcgttctgaggagaaagggcatgccctgcggggagctgattagcgccattcccctcccccactccggcgggtaggtctagagaacggagcc

SEQ ID NO: 44874 - DNA, 285 bp, Mus musculus
  source 1..285: mol_type = other DNA
ttttacagcctgttctgaagaaagctgccgaaaaatatgaagtcgaaaatattagacatgagttagtgctctattacctacagactgaaattctgactgggaacatagctctgctattcaacggtcctggaactgccatgccgcgcgcgcgcgcacgcgcgcgcgcacacacacacacacacgccaagtggcctactgacagggtttctctgtgtaactgggattaaatgtgagattttgattctacggttaggaatcgtacttgcggcttaaggtcgtcggtcc

SEQ ID NO: 44875 - DNA, 413 bp, Mus musculus
  source 1..413: mol_type = other DNA
atcctgtgcaaactggcagggacgtttgcctctgcccttgcatgttcacctggaaacggggaagagtgcagctgaggtcagcaactggagcctccatctggacatagaaacaggctcaagtctcatccagctacaaggcacagagagtcccaaggcagcagagtgcgactcgcactacatagggctctccgggtggggtgccactccttcgaggtgacttgggacccgcggtgggctacccctggccggcttccagcgcttctcctcggggtgtctctgcctagctgcgagtcgggggagcgggcggcggccgcgccaagaagcgccgggtcaccgcaggctgaggcgcccgccgtccccgccctcccccagctacgcctcctccgccccgcgccctgcggtgctgcagctgc

SEQ ID NO: 44876 - DNA, 582 bp, Mus musculus
  source 1..582: mol_type = other DNA
tgtgcgccgcgcccggggccaagttggccaacttcggggccggggcggtcgcgcagggggcgcaccccgatgccttggaacgcaaggagcctttgcctctctcgagatgcagagtgtggcgctggagggccgcgcgcagaaccagcaccagcgggtccgggggagccagggcaaggcggcgcccggggacgctcgggaggagccggtgcggagcgcgccgcctgcgggccctgagcaggttccccggagattagtgggaccctgctccacctctcccgggcttaagtgggggggcttgggctgcccgagctgggaggacaggccgcctatttgctccggaggccaacgaggaacctcaattgggaatccagccttcctggagactgaggcaagggctgggggcgccgggctccgccgacaggctcagagtctccgaggtctccttttgcaggcgggcccccggggcaaggagccgagcgcatcctggcggtgccggtgcgcactgacgcccagggccgcttggtgtcccacgtggtacggccggggcgggggtacgagcccgcagagctgccctggaccaga

SEQ ID NO: 44877 - DNA, 315 bp, Mus musculus
  source 1..315: mol_type = other DNA
tctgtttgatggtagtcacacaaaaactgcagtgcaggagtcagccactgacattgtagtcaatctcaaatcatatttttttaattgaatttgtttcaccaacagaggctgtagcatttttgagagcttggtactgactgtctttcaaggatcctagagtctagtaaccttgataacagcatcctggaagactagaccacttgtctgcccagcgataggctagtgcaccgcgtgactaggcgcaggcgcgctttttgctcctggtctccctctgagaaaaggagtccaaaaatctgcttcctggacaaacgcgca

SEQ ID NO: 44878 - DNA, 504 bp, Mus musculus
  source 1..504: mol_type = other DNA
actatagtccttaaactaaagtggtatccttctggtatattttgacaggaatagaagcaggatagaatcttacagagttcggtgactttcagacacataatttgtatcttgttgagaccgaataatcattcttcagaacttttacagtggacaaagacaggaaaaaatttttgtaaaaaacagacatttccaacttaagtaatgaataaattatttctacctaaatctgagttgtccatgacagtaatgactaatatggcagttttttgcttaatacaaagtatgagccagcaatgaaaaattgtgtatgttatgtatcttttgtagcctagaaaaagcataattttctattaaaaaatgaaagaggacagtcctttcgcctttagtagtattaccattgtaattatgaatgctgaaaagttgtcccactctgcaccatacagggtgggttgtagtccacagtggaaaccaggtggctcgcgcgcacgcgcagttgagcctagt

SEQ ID NO: 44879 - DNA, 184 bp, Mus musculus
  source 1..184: mol_type = other DNA
agttggggcgtggacactatgcccccccttagaattgcctagttggccatcactaaatgtaaatgagctaaatacctaataactgtccacatgtagtcagtcaggctggcctggtacttgcagtgcaacacgcgcctggccccggtgccttctgggaggtgtagtcagaaaagacctcaggcat

SEQ ID NO: 44880 - DNA, 318 bp, Mus musculus
  source 1..318: mol_type = other DNA
ctgctgaggaggcttccccacctcagagctgtgtcttctttggttcggaacatagtctttgttgcatggaataatgtgatcacagtgcactgtattcaagtatcatgatgtcagattttaaagaaagtttgtaacctatctttctatcctaagataggatggaaattatcctaagatattctcacccagccaggttctcttaatttaggaaaggaaaaggttctagaaccagtttctttaagaaaataagcttaagggagcaatcgctggcccgcagccctgcggttgcgcctgcgcaactggaagccctgtcgaggg

SEQ ID NO: 44881 - DNA, 358 bp, Mus musculus
  source 1..358: mol_type = other DNA
ggggcagccattgagctcatcaactcagctgccacccaggcccagatccagggctctggttgtccagagatcttgaaccagatcaatgacttgtgtgtcacactggcatactatggcttccacaatcatattttctatgcattcattcattcattcattcatgtattcatttattcattcatttttatttttctaaatcaatatataattattttctttgatttatttcaaaaggcttacaacatgatgttaaactgccagtctgtttctggccgctgtgggctggctggggagggggggctctccaccgcagctgcgcaccaaagcggtcccgaggtaaactacatttcccagaggc

SEQ ID NO: 44882 - DNA, 300 bp, Mus musculus
  source 1..300: mol_type = other DNA
aggccagcctggtctacaaagtgagttccaggacagccagggcaaagtttagtgtacaaatctttgctcaagatttaaaaatggtttagacactttaagactttatttttatctagaatacgatttttaaaggttttctacaactgtccaatgttggcaaaaatcctgctaaggtggaaggttcgtgtaagacaccctgaattaaaagctattgcacatgctggaccagcaaatagcgctcttagagactctgccctacccagaaaaaattgtccggggagtccgttaacggctaccagg

SEQ ID NO: 44883 - DNA, 268 bp, Mus musculus
  source 1..268: mol_type = other DNA
agagtctgacctgaggtctcactggaggatcaaggtcaccttgccatgtcatggtaccctcagggttctgcagagtgtactcgggtcactcgccctccctacagtggggttcagaggaggggtgtctgttcccccccccccgtcccctgcctgctcccagaagggggggacaaaagaatctggtcccctgggaatatgagctcttggcctcccgagccagggggctctggtgaccactcatggggccaggaggaggtctcttctccaa

SEQ ID NO: 44884 - DNA, 280 bp, Mus musculus
  source 1..280: mol_type = other DNA
aaataaagtacttcaggataatgacatttgttttattcagtttttctgtacagcgtactctgaaaagtcagaccacacactcctgtagtctctccctctttggactgagatgtgacattgacaaggctcacagagctaagttatctctagttgggccatgtgtcaacacccccaaacttgtaagaatacagaattcctgtccttgggagctgaaggatatttgataagcttttgcatccgctgccccgaggaacttcaaatcccatccctgtgtctcgaa

SEQ ID NO: 44885 - DNA, 252 bp, Mus musculus
  source 1..252: mol_type = other DNA
atatatgcagaggaccggatacagatttctgtaggccggagctcctctctaatcacagtaaaatatcattaggaatcattttttaaaaaaagactagtcgtgtttggttctactctacttccaagaagtgtcaggcaagggcgagatatgggatgagacagggtctcaagatctcgctatgtagaccaagttggcgggcaactcacagagattcacctacctctgtcacaggagtgcgcctatggcctatag

SEQ ID NO: 44886 - DNA, 520 bp, Mus musculus
  source 1..520: mol_type = other DNA
tcacaatgtaaatgcagaggcaggagaatctgggcgacccagatcctggcatgaaggacgaaccttccttcccaagtgtgatcctcgaagctggaggtgaactccagccgctgcctggctcgccgcagcgcctgccctacctcttccgggcagctggccagggcccttagagctgaatggacggcactagtaccggggatgcgtcccgccaagggtctccccgctggttcccggccgaggccttgggcccaagctgccggaccgcaccgtcgggcgaacccggggcctgcgggccttgactcgagcggcgaaaccgcggcagctcgggtgttgtcgccgccggccgagaggcaccccgccagccccgcggacgcatccgcaagcggccttttggccgagaaatgtcgccaaaccctcctcaggtggctccagcgccacctacgccgagccagcgcgcatgcgtcacgaagcctcgtgcccgcccacagatcgtgcaaggggacgaggggtctgtgacgtc

SEQ ID NO: 44887 - DNA, 410 bp, Mus musculus
  source 1..410: mol_type = other DNA
ttaaaaaaggatatatattaagaatttgttatcccagcacatgcccgtttgttgatgtaaccggaagaatactgtcagaagtcttaggacggtaagcacctgctacgcttgtttttatcctggtcactgagctgccttcccactttaagctgatgggagtcagaggttggccctacccagcgtggccacgcccagcaaaactcttcgagagcccgacgcgcgccgcagacttaaggcgggcttcctacccgcgcctccagcgctgcgcagccgcagtgtggctgatcaagccccgccgtccctgacgtcacagacccctcgtccccttgcacgatctgtgggcgggcacgaggcttcgtgacgcatgcgcgctggctcggcgtaggtggcgctggagccacctgaggagg

SEQ ID NO: 44888 - DNA, 249 bp, Mus musculus
  source 1..249: mol_type = other DNA
agctaaaacctggattccaaataaccaagcgaagttttgcttttacaagcttggggaacactcccaaggctcgaacagtgagtgcctcaacctcaggcggcctgcgacagagccgagcccggccgcatagggtgcctcgggtggcaccggcggggtacagaggctcgcgctccgggacccgctaggcgagggcccggactgcgaggagctgatgagcgccaggcccccaccagtcctcccctgggtggg

SEQ ID NO: 44889 - DNA, 103 bp, Mus musculus
  source 1..103: mol_type = other DNA
tgtatagccctggctgtcctggaaggctgctgggaactcgatctgtagaacaggctagccttgaattggtagttcggcctccctgggattcccgcggtgaaaa

SEQ ID NO: 44890 - DNA, 476 bp, Mus musculus
  source 1..476: mol_type = other DNA
attgcttgtttttttatgtatattttaccacaataaaaacaaacaaaaaccctgttctttaataagtgctgtaagcattttgcagttttctatggcatgtgaacaagactgccccagtctgctgaggggccttctcaggaccacagaggtctcttgtcactcagtgctgggcctgtttcctgcacagtacataaggtaggactcagaagctcttcctgtagcgacatgtcaagtttatcctgtctaatcctagcaagaatttctagagatctccgtggtctgccccagcagtggcaccgaactctacagcgccatgccaggaaggcctttgtctcacagggtgtacttatcagccctgctcgggcgtgccccgccgcagtttagagtcccgccgtgacaagctatctcgcttgcaagttagggagctcctgggggcgggaccagcactgaagccccacccagagctgacgtcgcgg

SEQ ID NO: 44891 - DNA, 401 bp, Mus musculus
  source 1..401: mol_type = other DNA
cccaggcctttaaagttttatggtcaatgcttaaaagttaacagggctatttttccaaaagcaagttgtcagactaggcagggtgacacatgtctgtaatcatatcctggggctacatgaaaagactcttaatttttccatttaggatcatctaaaaatcagtgaaattgtgcagcacataattccagatattaagtatctatgggtgttggatggagggcaggagccctggcatctcaggatgccgaggtgctgaaggcctccgatgaccgcagcactccgtagattagagcacttgccgtgtaccccgggcagctggggacattggacgtgctcgcccggtgaccggaaccgtagacagttctccgactcgcgcgcgttctaaaatgaggagcgcgcgc

SEQ ID NO: 44892 - DNA, 394 bp, Mus musculus
  source 1..394: mol_type = other DNA
caacccctatttcattttgcccctaaagaggggctatttacagagagcagctccgaactcttaaaaattgtgtgtgaaggatttggggagtctcgctccaacactctcgctttttagctacattagctggcaggcaaacaattacaggcccgcgccagtaggtgcgagccagctacatgtaatggtctcttaaaatgttcattttctgatcttcttataattataagattataggcgggtacccgctttgtagtctagactggcctggaactcccggtgcgccagctctcgtgacaacccgtcggtggttctgacgcgcggaaacccaggtttgctccggatcgcagaggccaggcgtcccggcactgcgcaggcgctaactgttgcctggctc

SEQ ID NO: 44893 - DNA, 592 bp, Mus musculus
  source 1..592: mol_type = other DNA
agaagccctgcttgtgagagcctgggaggaggctcatctctaggtccaggagggcctcccgcacaaccattcccaatctgtatctttgggttgggtatgtcttacttttgtcaaaggctaaagtcaggactggaacagagtcccagaccttgggacgtcccctgttcgcaggtccccaggtgaggaccagacaagggatcccagaactaccggaggccctcctagctacccagggggcggggtggggtgcacgtctcccgcccgccgtctgtggggcctgcttagagctggtgcagggggcggaggccgaggtcagactcctgcgccaagggcgcctgcccctcctagctgcggcgtggggatcggggcgatgccgggagcagaggacaccggggcgcgcacagcatcctgccaacccccgccgggtgtccgaggggcgcgctgcagccttcgggaacgcgcgggagccggatcggcgggcaaaggacgcactgggcgacactcgtccgctggccccagagacggaggcccggcctgactcacccgcgcggcgcgagccccagcgcccagcccggcccccggatgtgggggg

SEQ ID NO: 44894 - DNA, 256 bp, Mus musculus
  source 1..256: mol_type = other DNA
gtaatattccactgtatacacaggattgctatgatcatctgagtgcaagcaactggtttggttttttttttttatcttaaaaacaacaacaacaaaattactgcccccaggggccgggccctacgtggttgctgggaaccaaaaccgggttgcactttttaaggaagaaaaggtgttccaacttcttactcttaactactgtagacgcctactacacctcttcggctcttagcagtgcggcgcgcgctctagagcc

SEQ ID NO: 44895 - DNA, 365 bp, Mus musculus
  source 1..365: mol_type = other DNA
ctctaagcttattctttcagaactagcttacaaatagacttcgctttgtttatgtttctagcaaacacaaaacgaaaacagaaatgccaaactttatctttagtcactctgtggccccagagagaagtcaatgatttttctaagagccagaggaggcccgcggggaccccgacgtcccatgaggcctagccttgctcagagacgcatgtgcgcatgcccggtcgactgagctgccctgatccaagatggcggccggaccggggctggggacgggcttagcgcgttactgagcatgctcagtcttccgtcactgcgtcaggtcggcagccggcgcaggccgctcagtccttcccggagaggcgggc

SEQ ID NO: 44896 - DNA, 557 bp, Mus musculus
  source 1..557: mol_type = other DNA
tgtggaccaggctggccttaaaggcgtgcgccaccacgcccggcttggagcctcagtattaactaaatacttgttattatagaagttgcactcagtgtaaactaagggcttccctaggacattggactccattgtcaacactgggataggagagggatggattcccgatccatctaacgtcaaaattaatcttaatcctctgactaggccaattttcatagcatcggctgggccaccagcggtagccgaggacatcggtcgtctcaggtaatcctcagagaatcccggaagaggagccgggtgtcagcaaggtgacgttctccacgccgggtgacacaggctacttccggcgggcggcgggagtccgtgacgtggcaggcgagtccgtgcacggtcctccgggcccggacacgggactgtcaggtgccctcggggcagctccccggggacagagagcacggccgcagcctccagccggaaccggaagtgccacgtgtccccactgtgcctgcgcggccggcggctccgcccagggcctccctcctctccgggttcgg

SEQ ID NO: 44897 - DNA, 392 bp, Mus musculus
  source 1..392: mol_type = other DNA
atcacactgatatcactaagtgtctgtttacatttgaattattcgacttaatgtaaactctcataatgtaaactgcctttaattctttctttatgagtcctggtaaattgcccaggctggtcttgaattcaagacgataccattacaattaccattttaaatgttatttagtccggtgtggaccaggctggccttaaaggcgtgcgccaccacgcccggcttggagcctcagtattaactaaatacttgttattatagaagttgcactcagtgtaaactaagggcttccctaggacattggactccattgtcaacactgggataggagagggatggattcccgatccatctaacgtcaaaattaatcttaatcctctgactaggccaatttt

SEQ ID NO: 44898 - DNA, 367 bp, Mus musculus
  source 1..367: mol_type = other DNA
gatgacactcatcattggcatattggtcacctgtaaaataattgacatgtaactactctgaccaatatttaaacagaatgttcaaatacgtgacagtaagttcaatttacttcatcctacacttgaacctttcaaaataaattttatcttatcgtaaaatcttgagtgaccgccacacttactgggcaaccactcccctagagccactagagctcggtgttgtccctcaccctgcgtgaaatggccttccgaagggccacagctgtcgcccgctctcttgccctgccacgctccaagccggctgtgcaaagcgctatggctgccagggccccagcggcgggtgcctcgctagtgacagtccgcaggt

SEQ ID NO: 44899 - DNA, 306 bp, Mus musculus
  source 1..306: mol_type = other DNA
cagatgtagagtggctatgtagagagaccctttctcaaacaagacaaacaggacccacttttgtgtgtgtgttagagtattttataatctaaggcagctccctataaaaggtgtatttaggtggaaattaagaaagacattttaccaagttggacctggtgctacaaggttgcaatcccaattcacgacttgcctgcctgtttcaacattaaaataactaaacaaccccctatgacccatacctttaagaggcaggtgatctcttaagcggggcctgggacctgcggactgtcactagcgaggcac

SEQ ID NO: 44900 - DNA, 475 bp, Mus musculus
  source 1..475: mol_type = other DNA
ccagcaccagagtccctgggggtggggcgggcgccaagctgttatttgcaaagaaacgtctttttgacgcatggcaaattttaagtacgtcattaatatggcgccaaaagatttttttaagtataagacttgcacgggctcagccggcgctcgggcccggccctggggacagggcgggttgggggcgccccggagtccacgaggagtccgggcccgcgtgcaggcgggcgggtgaccgtgtagggcacccccccgggggggccgcaacgctacctgggactgtcgcctgccgaccgcggccatcgtccatggagttactttgcgcccactcctagtggcaccagctctgagctggagggctgaccatcttcccagcaggggtgcggggcttggggggcgccgcggcccggtcgcctccctcgccacgaccccggatggatgcgcgccccccgccctcccgcgccggccccaggag

SEQ ID NO: 44901 - DNA, 399 bp, Mus musculus
  source 1..399: mol_type = other DNA
ggtgagagcacccagcttggtgctggtgcctgctgggatcctaacagtaaacagtatataatgaacttccttgaagcccactcttaagaccttcactagatctggaggtcctgagttctaggaatcaaagtaccacaacttgcatgtagaagtctgagggtccctcacaaagtcctttagagtggggcatcctaacttagggcaaacctcaggtgtggccactgcagagtcccaatgggcacctagctgccagctctatgctggcgggcctcaagctccccagcagttgcgttgcactagagccccgcgagggcgctccagataagtcctccagagcactcgccctcagccgtggtcgctctagccgtgcggcggcggcgcggggcgtgtcgggaaagc

SEQ ID NO: 44902 - DNA, 310 bp, Mus musculus
  source 1..310: mol_type = other DNA
ttttccaccacgtaggtccaagaaattgaactacttttgctattacagttaaatcaagatctgtaaaaatggagcccttttaaaagctctgcgggctatttaaaagtacatccttgtacttactcagcctgtggcagagttcctaaaaagttttgcgtttcacacgtcatgagaaaactttaaaagtactgaggccagcctggaagtatacagtcccagtatgtggcttactaccgagctaagccctctatacgattatgtcgactttgaggctctcttgccgggcgaaagccaagcacgcgggcctgcg

SEQ ID NO: 44903 - DNA, 552 bp, Mus musculus
  source 1..552: mol_type = other DNA
tccatagatggagtctttaaggtttataaattctaagtatggaaattccattagcaggaacaggctattgatgcaaatgcccttaatccccaccgacctagcattcaaagccgttcattacaaggctttacctgtcccacgtaccagagttcacttgaaacacagaattaagtccagattttttttttgttgttccgttttaaaagactcagaatgcaagcggctccttccacaatgtctttttgcaaagccccagtactttgggaccaaaagaatcagagccaggctaggccatcacgtgacctgctctgatggcgtcacaggccccctcaggggtgggcggcgctggcggtcacgtgacttgacgtcacccccctccccgtccggccgaacttgaaactagcgcagcgtgagcacggagcggatcctccgtagttgcccgcaagcaacaagcccggaaggccgccttctgcccctccggtgcggcgcgcgcgcccgctcgccccgccccctctcccccctcccgcggtggtactggcggagggcggaggg

SEQ ID NO: 44904 - DNA, 451 bp, Mus musculus
  source 1..451: mol_type = other DNA
tctggtcaacagttgatgctctgtaggacagtgcaatgtgaacacgtttcacaagcctcagaattctaccagtaccagaacacagccctggcttgttcggatcgaaggcccacttcggccccgccttcgtgtgtaaggtgcgcgggcgacacatcccaggcaacctgccagtccccaaaggtgtgtgactcccttgtggttccgccttagggacatctgagaggtatcaccactgctcatgcgccgagaccgcgcaggcgccctgcggagcctgggacgccaggattaaccagcgccgccctcccagcgggaggaccacgccccaagagcgaagccaccttcggcagccaactccgctgcgcttgcgccccggctccacggtgcgcagctctgggtcccggccccactccgtcgccctccccgcggctccctgacgctggcgtgacgtcac

SEQ ID NO: 44905 - DNA, 453 bp, Mus musculus
  source 1..453: mol_type = other DNA
caacagggtggtcctagcctcgaatctccaagctggctattgggaggcagacagatctgagtttaaatagcaagtatatatgtggtgaatcagaaacacctttgtctcaacatggcatacatgtatatatatatatatatttaattcagtatcagtagagaagatttccttaaaggaaaacacacacccacaaccggttttgcggtttgttgtttgtctttcaagccgtttaagacagcccatgcctgaaagacccttcgggtcgagatggtttcccagccggtgccggagtccggcggagtaaggaggacgtccctgctcagcacctctccaggagacctctgcggcgctcagggtgactgccgtcaggcgatctcaacggccagcccggccggctgtgtgacgtcacgggctcggggtcctcggcgcctgcgtcccgctgctataaaaggc

SEQ ID NO: 44906 - DNA, 500 bp, Mus musculus
  source 1..500: mol_type = other DNA
gaatcagaaacacctttgtctcaacatggcatacatgtatatatatatatatatttaattcagtatcagtagagaagatttccttaaaggaaaacacacacccacaaccggttttgcggtttgttgtttgtctttcaagccgtttaagacagcccatgcctgaaagacccttcgggtcgagatggtttcccagccggtgccggagtccggcggagtaaggaggacgtccctgctcagcacctctccaggagacctctgcggcgctcagggtgactgccgtcaggcgatctcaacggccagcccggccggctgtgtgacgtcacgggctcggggtcctcggcgcctgcgtcccgctgctataaaaggcgacgccgcgcggcgccgctcgagtggccttccggcagcctcgggcctgcggtcttgagacggagcaccggcgagccggacacgttcctcgagggaggtgcacgaggcggcgaggcgacctggcctcgtatcct

SEQ ID NO: 44907 - DNA, 659 bp, Mus musculus
  source 1..659: mol_type = other DNA
ccagtgggcctgtcccggtctctccagggaggggagggcggggcctgggacgttagcccctcccaccgcggccccgccccggcgcccgccccgcccccggctcgctgcccgcggtgccccggctgtgccccgcgccctcgccccgcgcccactggccgctcaggcggagtcagcgtgcgctccgcccgccgcgctccgggctcggagccccgcaccctgggctcgccgccttcccggccggctccgcgccccgcacccggcgccccggcgggcgcagcgcaccatgccgcagctggactcgggcgggggcggcgcgggcgcaggcgacgacctcggcgcgcccgacgagctgctggccttccaagatgtgggcccggagcgggacctggcagagcgagtccgaaggcgcggccgcaggcgccggggtcccgggtcccggcgtccgagtacatggagaagccgagggagcgcccgaggtgagcccggcccgctcctccccggaggacctcgtcccgagttggtagcgtgcggacccgcccccccgcgccacggtcctcgtggcgctctgcaggccctgggacgggagcacacttcgcagagacttttcccggacaaacttccagagtccctagaggacggtgagttttgcgccgctgagc

SEQ ID NO: 44908 - DNA, 404 bp, Mus musculus
  source 1..404: mol_type = other DNA
tgcggatgcccagctgtcttgttcagctacagcaggttgtgagcaaccacctggcgtctgagtagaaggcaaagggtgtgaagtcttcactcacatgtgatttcacaaactctccaaacctgatttggttagtcttggtgccacgtgtgacctcacgtagcgagactccgcacacgcaactttacagtgcggagccggctctcgggagagtttaatttgcaactgactcgctgacgcacgcgggcgtgtcgcaggctcgcagaggggacagtagccgctctgaccttccccactgggcctccgagtgacttgcagcctcggcgactccggcgacactatccgctgaggtccaatgcttccagcagcctggaggctgcaacagtgacccgcgtgtccccgcgcac

SEQ ID NO: 44909 - DNA, 442 bp, Mus musculus
  source 1..442: mol_type = other DNA
tggttcccaggagccacatggggtggctcataatcacaccagctccaggggagtagacgccctcttctggcactggaatcgctttgtagaccaggctggactcgaattcacttagtgcactatcacacctggctagttttaattcagaaatgattgcttgcatatatgttgtggagatcaaaagaggtcttatagtcagatcccctgggttctctccagctccatatatatatatataatctttcttaagtgtattaaacttgtgtgtagtttgaggattcctcacatacaggggtgcttggaatcgaacccaggagctctgggggttaagcgatgacccctgaaaaaataaatccgtcccattcgccttttttttgatgcaacgtcatcacgccgggacgtagctgcttcgggagtgcgcttcggacgcgtatctgacgtc

SEQ ID NO: 44910 - DNA, 544 bp, Mus musculus
  source 1..544: mol_type = other DNA
tcagctacagcaggttgtgagcaaccacctggcgtctgagtagaaggcaaagggtgtgaagtcttcactcacatgtgatttcacaaactctccaaacctgatttggttagtcttggtgccacgtgtgacctcacgtagcgagactccgcacacgcaactttacagtgcggagccggctctcgggagagtttaatttgcaactgactcgctgacgcacgcgggcgtgtcgcaggctcgcagaggggacagtagccgctctgaccttccccactgggcctccgagtgacttgcagcctcggcgactccggcgacactatccgctgaggtccaatgcttccagcagcctggaggctgcaacagtgacccgcgtgtccccgcgcacgcacacacctcgtgccagagtgcacgcaggcctttacgcgcggccccgagactggtctgggcgctgtccggggtggagccgagggcggagcttcggggtccggcgcgcagagctggggcgtgtccgcgccgccgcgatctgcgccgctccgccctcggcccg

SEQ ID NO: 44911 - DNA, 316 bp, Mus musculus
  source 1..316: mol_type = other DNA
tctgcagggaagccccgttgagccctcctgcaaatcagccagtgtcttgttttaggaacaagacacgttcccggctcagcctggtcaggcttggcaaatgtcacctgggaaaagaaaactttgggaggagtgttccctgaatattgcttcagggacatctctcttggtgcaatgtaccgactgagcaaagcacaaagagagctgtctggcccaggtcgcagggaatcctcgcgctctgcttgcgcgccgggctgctctacacctgccgcggggtctgacccgcaagcaggcgggcggggcccggagggtgacgtca

SEQ ID NO: 44912 - DNA, 330 bp, Mus musculus
  source 1..330: mol_type = other DNA
gtagaattcagagatctgcatgcctgtgtctcctgagaactaaacagccatgttgctggattaaaattcctctacacagccgggcaggccagcctgggaatgatccagtcatcatgacgacacctgtaacccatcaagtgttggaattaaagatgtgggccattacttcaaaatcctggattacaggattttttttttttaggattttttgaatactacaaaattccactgcatagtggccaccattagcctcttctgaattgagcccgtctggccccgcccaggaccgcagaggtttctaaggacccgcccaccggtgctagtttccca

SEQ ID NO: 44913 - DNA, 354 bp, Mus musculus
  source 1..354: mol_type = other DNA
gtccaaggccctgagcctgagtcactatagtttctcaaggtcatccttgaggactgtcctgcaggacattctgtgttagcagagcatgtgatttggacccttgtggttttaatactgagttttacgtagagccgagtgcagagagcctgcaaagtcactgccggaagtccctccgcggtgacgagcacggcggaagtgggttcaatatctggatgggaggcgccctgcagctcgggcttctccgcgcaggctcagtggcccactgtgccaggacgtgacgccagacttcgtcagacgggggggtctcgcgagaacgtttcgtttcagcgcagttctcgcgctgcaaccttgctc

SEQ ID NO: 44914 - DNA, 598 bp, Mus musculus
  source 1..598: mol_type = other DNA
tacctcggttttgagacatggcttagattgagtggatttccaaactgtgaaattacaaactacaaatggaagaggacacttttcttgcgctactattactggattctaggaaaccttaaaactttgtctaatttccaattaataggctgatatttatttatttacttatttatttatttatttatttatttttttaagacggtggacgacgtcgctgcggacctccacgtctactcctgcggtgcgctgcgggacacgggcggcagggcctgggccttcacctgcaccccaaaaccggtcggccgggctgcgccccgccccgcggcgcctccctagcgggctgcgcaggagggcgtgtgccccgggccgggttctgtccccgggtctgacgctggtgcggccccgcggaacctgctgcgacccgcgcttcgcatccccgctccccagccccgggcccaggcgcccccgcacgtcagcccgcgcgtcagccccgccgacgccgcctccagagcagcagcagggccgcagcccccgcgctgcctgcgggaggggcgcggcctggtcacgtgacgctcgcagcagcccggccctggtcaca

SEQ ID NO: 44915 - DNA, 397 bp, Mus musculus
  source 1..397: mol_type = other DNA
ctcagtttaccacctgctgccctgaggacatgattcatttggtgttgtcagtacctaagctgtaatgacaagccaggagaccagcctggtctacagagtgagttccaggacagccagggctacacagagaaaccctctttaaaaacgaagacctaagggctccttatagccaggtctctactaagatggcagtgtagaccatagacagtctgtaaagctcagaggtcaacattactcctgaagactttattagaatccgattttgattataaccatctcactgagctattttaagaatcatggattcacatggctttcagaggcaaggtaggacaagcacagtgtgcctggagtgtagtccttgagtacattctctgggtacacattaactgattac

SEQ ID NO: 44916 - DNA, 645 bp, Mus musculus
  source 1..645: mol_type = other DNA
ggaagaggacacttttcttgcgctactattactggattctaggaaaccttaaaactttgtctaatttccaattaataggctgatatttatttatttacttatttatttatttatttatttatttttttaagacggtggacgacgtcgctgcggacctccacgtctactcctgcggtgcgctgcgggacacgggcggcagggcctgggccttcacctgcaccccaaaaccggtcggccgggctgcgccccgccccgcggcgcctccctagcgggctgcgcaggagggcgtgtgccccgggccgggttctgtccccgggtctgacgctggtgcggccccgcggaacctgctgcgacccgcgcttcgcatccccgctccccagccccgggcccaggcgcccccgcacgtcagcccgcgcgtcagccccgccgacgccgcctccagagcagcagcagggccgcagcccccgcgctgcctgcgggaggggcgcggcctggtcacgtgacgctcgcagcagcccggccctggtcacatgggccgcggccactgcgtcagtcccagtcccggctgcgggagtcgagtcgtcgccgccgccgccgccaccgccgcccccagcggacggggcggggatcttggtgccagggccc

SEQ ID NO: 44917 - DNA, 319 bp, Mus musculus
  source 1..319: mol_type = other DNA
taacgagtggggtctgggtttgatgacacactcagcccaaacccacgtctgacaactgccacactcgttcgtggctgaactgggagaaacgtttatgtcgcctgccagtggcttgctaggcagtgtgcaggaccacacagaagaacgaggagaacaagtctttttgttttttcttttagctgccggctgttatgcaaagggaccgcctcttggaacacccaggtgctcctgacgggggaccagggtggctaataaggtgtcgctagaagcgcctttttgagtctcccccttgagatcgaaagaaaatggtagcttccgc

SEQ ID NO: 44918 - DNA, 297 bp, Mus musculus
  source 1..297: mol_type = other DNA
cggcaagttgctatcttgccattccatgttctaagaagagcaaccaatctttctggccccaagacattgtatgtttttcaaagttaaagtcctctttttattttgagatggggtctctcaaaagaactctctatatagaccaggctggcttgaatccacagagacctttttcaaagcacattggaatttcagaattcaccctaagaggataaatctgtatctaatgagaacaaattggataaaaccgtgttgtcagctgactgctgttgtctgattacagaagtgaagtcagtcttc

SEQ ID NO: 44919 - DNA, 295 bp, Mus musculus
  source 1..295: mol_type = other DNA
ttgaggccagcctggtctacaaagtaagttccaggatagccagggctatacagagaaactttacagacccccagtagcagattccagtggataaatgttcatgtcaccaaaccagatctgtggaagaattacttacttcccaaattattaagtaaataaataaatgtaatttttttaaaggttaaaagaaccgcactgaggagcctgctggtccataagtcttgcctgcggatccggcagccggctcgagtctctgcggtggttagaggtccagggccggggactagggccacgt

SEQ ID NO: 44920 - DNA, 368 bp, Mus musculus
  source 1..368: mol_type = other DNA
ttcagacccaagatgaacattttgaatgttaacacagaacacacttataattacttgcaacttaaactctcctataacttagtcaaaagatctctgtgagctcaaggtttagacggagcttctcctttgagttaggtctcaaactcccaacaaatgagggttggctggcatagtccaccccgtgaaccgtaaaataaggagtcatcagaatggacactgccagcgccggaagctcctggcagtctgagcgggatggcagcaccccgcattgccccagtctagcgtccatggagatggacgcggaaaggccttgcgcatgcgtacttcaagagcccagagattgggcggggcgagctcagagtgcgcct

SEQ ID NO: 44921 - DNA, 332 bp, Mus musculus
  source 1..332: mol_type = other DNA
aagccctgggttccatatttctattttgctttttttttttaatttttaaagtataaaagacacatgaattcatagtagaagaaagtatgtcaaaatgttaatggtcatttctatcctatatgaaatggagttccagaccaacttgaacttcatatagcaagttatcttatgtagatcaagctccacatttcaaaaagtattatctatcatgagaaaaggaactcccctatataaaaagcatcagacattaggtattgatgcaatatatgcagtgcaaggacatatatatgtaaaatattgcttttattttgcaacgctgcgcctttgcagtg

SEQ ID NO: 44922 - DNA, 557 bp, Mus musculus
  source 1..557: mol_type = other DNA
ttaacatatatacggctagtgcgcaatctttgttgaatattcattattcaataaagcaataaatataaacaaacactgagcattttgtgctaaatgtcatacattctgcaccataagctaaggtgcccgctcggaatgacagctagcgtagactctggggttccgagcatccgcaagaccatggtggccacgcgcagccaccaagcctccactgtccgcgcggtgcttttctgtctggcagagcaggcctggcgagatgcaacgcgttccggggcaactgggcgggtcccgagcggcccccgatgcgtccggaccccagccccgccgggcctcccggcctggccaccctgccccgcccgccgcgcgcttctatggcaacggccgcgcccccgagcagggccgaccggcatggtggccgcgtccggtgctccgccaacgtccccactccggatgcagcccaacaacaccgggtttgggggcgaggctggccacacacagctacagagggcagtgcgcaggcgcactctgagctcgccccgcccaatctctgggctctt

SEQ ID NO: 44923 - DNA, 443 bp, Mus musculus
  source 1..443: mol_type = other DNA
acggggtgtgccaagtccagatgtggtctccagatacctaaagtttgccttactatcagggagaccttaggtagtcactgaaaaagtttacggagcctcttgtgcgcatggcaaggagccaaaggctgcctggcaggatgcaccggtccagcccagggctcccgccctagctccagcttagagcatcaggtgggacctatgaaccatccgatagggacactcagcaggcctcggagaggcccgggtcccccagacgtggcagtccgggccccccacctcccgcagctagtacctcctgccaagccgcggagacccccgtcggtcccagccgcggggagtgcgctgtgctggggccgagccgggtagggaggccggtcccgcgggcgggggcggggccggctccgcggcttctcccgccgccgccgccgccaaggggagtttcc

SEQ ID NO: 44924 - DNA, 525 bp, Mus musculus
  source 1..525: mol_type = other DNA
ttaatagatataatcagtggctttgactgtgatgaaaccacgcattttaaatgttctggatatttaatgagttaagctgctctctgggctgaggatagctcaggaaacaaacaaagtgacataagggcattgcgttaacattgtttctttttacaattactatagaatgcacgtcaggatgggcaagctccaccttgtggatctggctgtaagtaccagatgctacttaagctgttaataaaaattaactcagaggttacatgtatagttacatgaaatttcaaagtgcttattattatgggatatctaaaagtatcattatgtcacacacattttgaagtgaatttcagatgtcatatgagatattttaaattacttaaaaaaaaacaaggtggatttctgagttccaggccagcctggccttcaaagtgagttccaggacagccagggctgagataattttaaaaaattagccccccgcctttttttttaatctgtttattgttaggggtcagaaagacaagc

SEQ ID NO: 44925 - DNA, 292 bp, Mus musculus
  source 1..292: mol_type = other DNA
ttttaagttcattgaaaaggctcacatgaagtaatttaaaaaaatttttttttaaatcagccatttctcaggcttctgtctaaggtaggaaaaatcttcaacctataagatcagctggtctaggatgcgagaaggtctgcctatcatccttctgactccttctctgcaggaggagagctttgtttgctgatttcacaggaaaatttaccactgacaatctggtgtaataaaattttccaatgtaaactcattttcccttggtttcagcaactttaactctatatatagagag

SEQ ID NO: 44926 - DNA, 279 bp, Mus musculus
  source 1..279: mol_type = other DNA
tctggttttgggtccacaaacttttggtcttaaaaaaactttaaaaaaagcctacacacacatatatactttgtgtattgcctgcatgtattacagcatgtttacagcttagtagaaatgaaaactgatttattctaaaggaaaaatatatacaagagtgcagtctattgtaaaacgctgttaaacagtactgtccgtacagcaagttcgagcctacgcagctgcccactcccacttcccggcatgccccgggcgtgcgagaggcgtggacaagtacgc

SEQ ID NO: 44927 - DNA, 278 bp, Mus musculus
  source 1..278: mol_type = other DNA
tccctgcagcagagatgctgcagctccaatcattttcaacattctgggaatcagcgcagcttctgcggagacggctggagtttgggcagcctgctgctggcccaacccagatatagtgtcccaacagaagggtcactggtgggccgggtgttcaagctgcccactggcaattttgtatccaaaccatgcattgctttggtgatttatcagatacgtttgttgaaattaagaagagctttgctgatgcccaccttcctttagcggcccatcactggttt

SEQ ID NO: 44928 - DNA, 377 bp, Mus musculus
  source 1..377: mol_type = other DNA
tttagtaacagacaggatgctgatcaaaaacctacatcatgcactctgtcagaccagctgctttaataaatgtctttcccagagagtttttttttaagcacagaattgaacctttgcttgctggtgtgtaccaccacacctatttgaatacattttttctcactttatcaggaattgagtttaacaccatgggcgtctctagagagatccgccaatgtaagttgtagaaacattcttttatgttatagaaaatgctttttaagagcaaaaaaaaaaaaatgcattttgtttgaagacccagggcactggaaaccctgagtttcaggactctctatctgattgttagcaattattcatttcctcagagagagaataaa

SEQ ID NO: 44929 - DNA, 339 bp, Mus musculus
  source 1..339: mol_type = other DNA
ccctgctacttccaccttggaggcagagggagtctcccgggtcctcacagctggaggtgggagaggaaggtctcacacacaccaaaggaggtgcttttatctcctcagtttcggatttcactagactcagaataactcagataagagtacagatatctagagtccatacggtatctagatctaaatttgtgctgttgagtgagaaaattctctctctctctctcttcaaatacagatatgaaattagagggtcacctaacagtcatctgatggtggcccactgcaggatcccctagctgggagcccccccgcccctccatttgtagtgggaggggacag

SEQ ID NO: 44930 - DNA, 514 bp, Mus musculus
  source 1..514: mol_type = other DNA
tagagggcatgcctggcgtgcatgaaatcctagccacttgtaattcagggtcaccctgggctacctagaccctattcaataaatgggaattgaacttctgctcagttagtatgacacagcagaataaactttgtaccgttatttttatttatgtatttattttaaatccaaaacgagtctgccctgggacccaacaggctgagtcacacaggacgcccggtggtggtgtcagagccgctccggaactcatcgcccctcccccgcccgcgggagtgtgcgtgtgaccgtgtggtgccactggggcccgctgggaggaaagaggcctcagttcccatccgccctgtggggcctggagagggccgtgacccagggcagggctggatgagagcagctccacttcactgtggctgatcctgcggggtagtggagacaccacccccaccctacgggtgggcccccctcttctccacgtgatgcactcgggtgccgggtgtgcggagagtgggcaaccagg

SEQ ID NO: 44931 - DNA, 278 bp, Mus musculus
  source 1..278: mol_type = other DNA
aactctctccctagggcttttggtgttaggtagtcccaaggaaccttcaacggctggccctgcagagtccaggctgggataaggcggtacagggacataatctctcccttcttgaccagactgataggggcgggcccgcggtagccccggggcggtggcgcgggcccgagggggtggggagcacagctgccttgtacttccccggccaatgggcgcgcaggagcggcgcggcgggggcgtggccgagtccgggccggggaatcccgcttagatttctt

SEQ ID NO: 44932 - DNA, 408 bp, Mus musculus
  source 1..408: mol_type = other DNA
ggctggccagtacaccccagagactctcgtctccatgcttgcaaagcactgtgcagccctggctgtcctgtagaccaggctggccttactacatacctagtcttacatagagagtctagttactagccattatttatagcaacaagaaaccttaaaacacttaacaattgttacacagtaattcactagggccacccaaatatttacattatggtttataacagaagcaaaattagttatgtggtcccgctgccactggtcaagtccatggtcagccgggtgactgcgtgggccagtgttcccggggcttcgcagcagcaccgccagccctgctctgtgaacgcgggctcgtgcgtgtgcactgccccgccagcccacagcgcccgcccgtgggctgtgttcgctcat

SEQ ID NO: 44933 - DNA, 564 bp, Mus musculus
  source 1..564: mol_type = other DNA
taaggcggtacagggacataatctctcccttcttgaccagactgataggggcgggcccgcggtagccccggggcggtggcgcgggcccgagggggtggggagcacagctgccttgtacttccccggccaatgggcgcgcaggagcggcgcggcgggggcgtggccgagtccgggccggggaatcccgcttagatttcttcgcggcgccgcggactcgccagtgcgcaccactccttcgtcgaggtaggacgtgctttcccgaaccgaaccgaaccgaaccgggccgagttgcgccgaggtcagccgaggtggccagagggaccccagcatctcgggcttcgcgtgcgcgcatcgctcctgcagcaaaggtgagctcgccggagctgcgcgggcaccgacgggtgccgtggaacaaaaacgggacaccaggaagtgggggccagagacaccctgggtcgcggtggcgcgctggctcgggagggcgctgcaagcgggcgggaggcgggccgcggcgtgcaccgccctctggccgcgctcggcggtctgcgtgcgcggagccgctgc

SEQ ID NO: 44934 - DNA, 300 bp, Mus musculus
  source 1..300: mol_type = other DNA
cattctagaaactgatacaaaagaaccaaattctggtcacagatagctaagattctcatacaagtcttcccaaacatgtctgactgactgctatgaatctgggacaaatggggcatttcatgctgcctgacttgggtcagtaggcaccccaacggagtgttttgtttttttaattttcctttaaaaacaaacaaacaaacaaaaaaaactgtaataataattttttaaaaaataagcaagactcttcccggccttagaaagccctggggctggacccatcagttgatagaagtgaatttc

SEQ ID NO: 44935 - DNA, 506 bp, Mus musculus
  source 1..506: mol_type = other DNA
aggctaggggagcccagctctagcttgggctagcttgtacactagaatgggcctttctgcaaatagcctttcagtccaagctccgggcctctggtgtctctataaaggccacagggaatctttcgaaaggacactagagactcaggggcctcgcctctttgcaaggtgaggatcctgcttttccaaggacgcttctcgggccgccgccgtcccgtgatggactacggtgtgtgtgaagaggtggcgctcctgtcccccacacaggccggtccgccataatccaggctggagcaacgaacccgggctaggcctggctctgtcgctctccctcccacgtggggccgagaaagccggagctcctagctgcacgcgcgttgtccggccgattccgggcgggaggcctgcgtggaaggccgcaggaacggagcaggaggctgagccggcccgagagctccgcccagatcggtggagtgcaggggtgtggtccagaggactcggcttcccgg

SEQ ID NO: 44936 - DNA, 657 bp, Mus musculus
  source 1..657: mol_type = other DNA
aataatttaagaacataatagtctgggaattaaaattcattgccatccacccctttttaatatatgtatatattatatgtaaatatatataactattattttattttatgtgtatgaatgcctactgggcctgtgagcactcttaagagagtcctagctgagctaagatggcagtctttccaggaaaaactgcaacaaaggctgtcgttgtcaatgagactctccgaggttcatgagaaggtgggctgtttactgcttaaattctaagcctctttccattgaatcccaggatggccttttttcaaagtcaccctttccctcaagagaagggcaccctgggaacctttccgccccctagagcggacctgttaggggcgtggctcacagacgccccgcctcagtcttccagtctgggcggaattcacccaacccgggccccgtagagactggaggcgtgaagcccggttcagccccggagtcctagctcggctccgcctcaggcgcacgcgcggccgatggccggcgcccactgtgcgtcactcaggcccctgccccgcccccgccgtgccgcgccgcgccgcgcctcagagccgggacggcggggcgggccttgcggcccaggcccatgcccagagcccgccccgccctcaggcccta

SEQ ID NO: 44937 - DNA, 350 bp, Mus musculus
  source 1..350: mol_type = other DNA
gactgaggtacccagagagtagtctggccaaaccattgtacctccaaaacatgcgccttgcttctagatgccagaaaaaggtcaactcctctaggagatcaaatagatccatggcctgctgctgtcttgggtctgtgccctagtccagggctgtggtttgggaacaaggcacggccccatccccctccccgggctagagcaccggcccgtaaaagcggggtcctcggagcccccaaagtgggagggtcgggagtccgcgggaccaatcggtgtgcgcgcggggcgcgggcacgaacggaggggggatcgggggcgggcagcccgggggcggggcgcggcggccaggcggc

SEQ ID NO: 44938 - DNA, 394 bp, Mus musculus
  source 1..394: mol_type = other DNA
gcagcctgagaacagtttgcctgggggtgcccagttctctggaccaacagggctttcaaacccatctcccctgccaggacagggctttgaaggcacttggtaagttgcttcctaaagcccatgtgaggacagctggcattcgtggaaacctggttctgactaggtagagttgtaacggagctccatgcagccccagatctggtctggaatcacccctactctgaggggcagttggctggccctccacatcagagagcgtaaatattccgatctgaaggccccactgtggacttaggctggctgccagtgaagagcacctagcttgctgcctggaatctctgggtctcagtacagagagagccgtgtctgctcagaattgccactcggaggcagg

SEQ ID NO: 44939 - DNA, 220 bp, Mus musculus
  source 1..220: mol_type = other DNA
atcccataatggtacagatagcagtaatgtagaccattatagaattgtctggaccttatttaattagataatgaggtggacttgtgagaaggccagaggctgggtcagactgcccaggcagggtgggcctttaaagcagcccgcaggtgggctgccagttcttggaagggcttattaatgaaaaccccccaagcctgacaacctgggggaaggctcactg

SEQ ID NO: 44940 - DNA, 243 bp, Mus musculus
  source 1..243: mol_type = other DNA
ctgcaggcctgatctgcaggcaggctcccatcaggttatcagaaggataccctgatgtgggccttcatgcattgccttactgcactcagactaggagatacacttagctctggcttctggtgactacctctatcagtgtacagtcaccacataggctgtacagtcagggtggaagaagatggcctttgaataagcagtctttcttcccatcttgagtactagaaagtgatgaatataaggtga

SEQ ID NO: 44941 - DNA, 429 bp, Mus musculus
  source 1..429: mol_type = other DNA
tttctgtggcatagcagatgcagaaaggtttggggctcttggctggtagctgccacagacacggacaagtggccgggcatctccgttctgggctctgctccctgatgagatgcaagcttgggcaggcgtgggaacctgctcagctgcactgtgtgtgtctcagacagagctggttgaggtgtccaatctcattggcctgtgtagagccgaagcctggctagcctgagcccctcagagaagcagttaggctttggacagcctcctgcaatttgccggggagcaggctgggatgggggcgccgcccctggtgccggtcccacgcggcgcaaggaggtgtgcatcgcatacgtgcagcgcgtggcggctcgggccttcccgaaggctccagtggctcggagccaggcccgggcgggcccggggggcgggagg

SEQ ID NO: 44942 - DNA, 117 bp, Mus musculus
  source 1..117: mol_type = other DNA
ccagaagcagttcctgattccacagaatcccataatggtacagatagcagtaatgtagaccattatagaattgtctggaccttatttaattagataatgaggtggacttgtgagaag

SEQ ID NO: 44943 - DNA, 351 bp, Mus musculus
  source 1..351: mol_type = other DNA
ggaagagactggcttcaagcaagagcagccctcccaagacccggttcctgtaatgggaaaggtagagactcactgtagatgtttctgcagactgtacatctctaaggttcacagagaatatgagttcaagtgcacagagaatgagtcctgaaattattttagaaaatcacagagccaggcttcctccttttgttgctaagaggaacttgagctcttatgtaccacacatatttgggagacacctgtgattccatgtggctgcctgtgtcttcatgagacatgcctggggacatggcagctggtgagtgtgggtatgtggctcccagcaactacaaggtcctagggggcgtc

SEQ ID NO: 44944 - DNA, 410 bp, Mus musculus
  source 1..410: mol_type = other DNA
atgagtcctgaaattattttagaaaatcacagagccaggcttcctccttttgttgctaagaggaacttgagctcttatgtaccacacatatttgggagacacctgtgattccatgtggctgcctgtgtcttcatgagacatgcctggggacatggcagctggtgagtgtgggtatgtggctcccagcaactacaaggtcctagggggcgtctgactcagccaggaaccggcacttctttctgagccccttcctccagcccgtttcccccagaacgttgcggggcgggcggcccagcccctcccccagtcgggctcggcagcccaggagtcccggcgcgctgcggggctgggagtcgggttccgtgaggagcgcgcgctgcgccctccccctcccgccgggtctccgcagc

SEQ ID NO: 44945 - DNA, 261 bp, Mus musculus
  source 1..261: mol_type = other DNA
acagaagttctgtcctaccaagttggcatgctgatcttctcagaaggcaaggattctgacagcccacaggtgttatctgtcaactttcgaattaaaccctttaaaggctagaccagcaggctactctgaactatagctctagtcgccccccgacgatttccgcggggccataagagccccgtccggaacacgtcacggccaggcgggcgttagtgtgcgcgtcgtgcgcatgcgcatgcgttctcggccagtctcgccccc

SEQ ID NO: 44946 - DNA, 234 bp, Mus musculus
  source 1..234: mol_type = other DNA
agtgtgcatctgtagcaccttgctggggaggcagagagtttggagtatgccagccgggtagtctaatcgtttgctaacagacccacacacatgtgtactgcacatcacatgcgcagtgttgtcaaatgctattttatttttttagaataaaaaggaggttgccacgtgctcaatatactatggagatggagccaccttcgagtgaggctaagccaacctaaactctatggctag

SEQ ID NO: 44947 - DNA, 290 bp, Mus musculus
  source 1..290: mol_type = other DNA
cctgaattaaaaatgggcagatgagaccactgctaggcttagcggagtctgccgcaggtcacacttcctgggacagaagcatcacaggagggaagaagggaattgattctcgttctctgagcatgtataccgtggtactcttgtatactgagcaaatataatttttttaaaaaggtggggggtggctttgttctctaaaaagccatggccaactcccccccttggctttgagctggcctgagccagtaccgccccatgtgcagatgaagggggggccagtgggggccttg

SEQ ID NO: 44948 - DNA, 455 bp, Mus musculus
  source 1..455: mol_type = other DNA
gtaaataagggtttcaactgcagatcagctgacaacttcttaaagtttgtctacccttgcaatggtaaacggatgacagatattaaagatatacagctttgtttcatggaataaccgcagtctttcaaattctaaatacttagcataaagggttagatatttttagatagatgtcttttggttaccaaggagatcgagcctgagcccccagtcgctagatcttcctagacctaggtctcctcctagagccctagcagtttgggagggtcagaggcgggcctgggtcccagaggctttctcttgccacccagccgcgcgcgccctcgcacgccccgccccgtgagaggccgcgtgacggacccgtgagccagccaatggcaggcggccccgcctggctcgtcgccagccaatcgccgcgacctcaatctcgcgctccgccccgcgcgccgtggccg

SEQ ID NO: 44949 - DNA, 396 bp, Mus musculus
  source 1..396: mol_type = other DNA
gaaacaatgtagatgaacagtctgattttctttttgagaaatttcctatagtgatggtcatgccactagtaatcccagcgcttgggagacttcttgactctccaatgagtcagtgattctgattccttgaaagtggtgctggccagctctgcctagcagcgccttgctcgcccgggcacgtctacggctggatccggacaggaaggtgctgtggcgcgaggcagcggcatccatctttgcgcgcctagcatcctaggtcccctcactgggcggggcctcacagctaccagcccgcctactggggggggacagggcgtgtccttgtagtgggggcgtagccgcgcagccgcacacaccgcttgtggctccgcctctgcgcgccagagcctaggcggg

SEQ ID NO: 44950 - DNA, 411 bp, Mus musculus
  source 1..411: mol_type = other DNA
gatgactcttgaaagctacatccttggagtttgcttccaaactagcaggcagctggacaagttgtgtagagtctccttagttagcagtccttattgcttatataacctaaggaagctagtttcagggacttcctgagaaaaccaggctggccttccttgagtgctgggattaaaggctcttaagagccacctgttagaaccgtggttcctcgtggtgtggtgacccccacccccaaactgcaagcttgctactgttaggatgtgcagtatatctgacatgtgaccctgtgaaaggggtcgcaccccacaggttgagtccaggatgcagtgtttcattcagttcagcaggaattactactcagcagtccctggacagagacatgtgcaagtcaaggacaagaaactcccttt

SEQ ID NO: 44951 - DNA, 470 bp, Mus musculus
  source 1..470: mol_type = other DNA
cttaaggaacatatttaactggaattggcttgcagtttcagagttccattatcatcatcatgaaaagcaaggcttgagcttttgagacctcaaatatggacctgtgggggccatttaaactaccacaggagtgttagtattttattagtccattaattgtcatacattatacataaaataattccacattacatctgtcagaactttgtctgaccttacaaattaaattcataatacgaagtcttatgtattagacttctaaaaataaatacaagtaatgtgtgtttaaacacaagacacttacgtaactttcagagtctattctatgaaacaaacacttataaggaggatcaggcttcagggtcattctcacaggagttcctggaccatgtgagactgtctcagcaccagttttgaattaatatattcaagaagctggggccacagctgctgctggtgacagtggcttc

SEQ ID NO: 44952 - DNA, 526 bp, Mus musculus
  source 1..526: mol_type = other DNA
aaattttttctctttaaagttttaaagaaaaatatgacggcttccttttagtccctgcagtgaagtactatgttgtatagattattcttccttagaggaattagtatacattgtacctacatggatttttttttctcaaaaggattgtttttatttaaatctgtttacataaaaatcttggttttgtttaaaaaatatatataaatcttaccacctgttttaatttttaatactaactcaatgtgggcttgaagatttaaccttcagaacattcaataaatagcaagttgtatgtagaaacccataaatttatggtattaacattcctttgatgtgttagaattcaatagtatcttactacagcaaattattttcccctgagagaaaattctgtgttaaatttaaataatattagaaaagagacttttcaaatacaactgaatattaatgtacagaattgtaaaaactataaaatagatgggtacatctgcagatacagtagccaattgatctaatgcagtttgtg

SEQ ID NO: 44953 - DNA, 295 bp, Mus musculus
  source 1..295: mol_type = other DNA
acagggttactgtgacaccctgtctcaaaagcagaatttttatagtctagaccagggaatactgggttttcaagtacagcttaatcaaagattaagaatctttgattcttaataaacagtcagttttacctaaaagtagcctaaaatgttacaggtgttaatttttatccatgcctgcaagtactaagttaaaatgtatataaatgttttatggttattactatgaagcttctaataaattatttcctagcggcacgcgtgaagtctgccctgcggggaaccggccctgattggt

SEQ ID NO: 44954 - DNA, 460 bp, Mus musculus
  source 1..460: mol_type = other DNA
ctctgcagtcttggacttaattgtagttatgactgagaattgctgccacacacagcaagacttcacctggctcttagctaaggcctcaaacagctgagggtttaaatcaagagcacttgttcctcttgcagaaaggaccaggcctgtaactccagttccaggggatccaaagattagatgtgattcactctttgcaaaatactcatctacatataaaataaaaatcttttttaaaaaattaaaaaaggggtgatcagaacaactcagactgttctggagcagggtctcgggtagcccaggctggccgaaggatgaactaaactcttccatcctcccgtgcagcaggtgcagaggcaaagaaagggcgtttcctccgcccatttcgttccctcgctcgccgcacgccggcgccagtgcgcacgcgcaggcccaccgggcgcgagccggcagtctccgcgcg

SEQ ID NO: 44955 - DNA, 403 bp, Mus musculus
  source 1..403: mol_type = other DNA
aaggcaggatgcaccaaacctctattgcagaccggattaagcctggaagctctcaatctagagatgcctggcctgtatgaaagcacaaacaaatctgatgatttaatgattgattcaacaaatatttaaacacctgttgtgtacaccacagagatagacacataatttttatgtgctaatttaaaaaaaagcgagaaggctgaatttaaaatcacgttgtaccactaagctacggggccctaggttttcagagcttggggaaaaaagctgtgtcctgggtgttgtctagaaccttggccgcgcccttgtgtcaccgtcgccccggtctggggagaggaggaaaaagggggtatgtcttgccctttatggctaggaagcccccgcctggctgcggattggccac

SEQ ID NO: 44956 - DNA, 466 bp, Mus musculus
  source 1..466: mol_type = other DNA
cagctcctttgaggtaactgggacacaggtgcatatacttacatatgtccctgatagtctcgctatataaaatgagagcatgtataagatggaagacctgtcagcgttttcaacaatttcactgaaaggaaaagtttcaatcttccgtttaaagagctggcctttattccaaggtcaaggctttccaactttcaaaatcatgtatgtcctgtagaccaggctggcctcgaacaaaggcgtgcacaccacgccgggcgtgtaagccagggtcagtctctctcatacacacgcacatgcacaacgtgcatgtgtgcaagacatgtgtgtctgaagtactgggacagcaggtcctgcagccgctgggaggtcctcaccttgcccggaggacccctcagaggagccaccccggcgcccagcgcgcaacgccatgaccgtacatcggtctccggggactttcccaggggcg

SEQ ID NO: 44957 - DNA, 352 bp, Mus musculus
  source 1..352: mol_type = other DNA
actctacagggtgggtcttttggaaaacctctctggaaaaggccttacaggcacaccccaggtgtatctcctcgggcatgctcagactgcagctggcaggttcagaacgactcactcagcatctggggaagaatgagaaacttttcctcctctggagaggatgcttgggatgcctggagatttccccaaggcggccatcccagcagggcagcccaggtggcctgtggcccagctcaggagccagcaggctcaggcctggcaaagggccctctgctctgccagaggcgggatggggcctcagctcggccttggctggcttctccatcatgggggaattcccctcctgcctcag

SEQ ID NO: 44958 - DNA, 300 bp, Mus musculus
  source 1..300: mol_type = other DNA
atcttgagattctggagataatattttttaaacttttaacttttaaaaattacattttctttattgaagtgcaaaaaatatgtggcaccttggccttctgaggcagctagttggctcctgaggatgtctgctgtccgctgtggccaccaggcagtggcagaggtttggcaagcttcaaatttctcaacaaagcttttgacgtagaggtggcaggtttcccccgagggcgccctcccccagcgggcagcgagcgaatccgattggcccctgcgcgccacctccaccgtgcgcccagcctgc

SEQ ID NO: 44959 - DNA, 367 bp, Mus musculus
  source 1..367: mol_type = other DNA
gtgcacacatgtgtgcacatggcctacatatggagatcagaggacaaatttcaggagttaattactcactgagataattttaattcatttttctgtagcctagactgaccttcctggaactgcaaattgattggccttttcagctcaggaaatgtacatcacaggcaactgcctttcccactgagcaagggcactcaccctcagtgccccctggaagggcagaaaaatactcttaactgcctttctcatcagagggtcctgagaaccatctgtggctcctggggatctcggcctcaggtacttctggcgtggagcgccgctggcacctgccctggcccggccccggctcggccggggccccgcgcag

SEQ ID NO: 44960 - DNA, 315 bp, Mus musculus
  source 1..315: mol_type = other DNA
aactctaggacctagagcttaagtctcatgtcttaagcctatattttaaataaaatcactaactgtgcttcacaaagcccagtttggccttggtgaaggtctcgaactcctcctctactttggaaagtaaactttggtgttaggcgcaggcgctttcccaggtctaaaagcctcaggacctggcagcgctttagatgctgttaaatgcctggcagggagctttctctctgtgtagagctctgcccctgcagtaggccgggcgtggccggagaagtcccgcctagggcctgcaatctcagccccgcggggcggagc

SEQ ID NO: 44961 - DNA, 270 bp, Mus musculus
  source 1..270: mol_type = other DNA
ggctccagaggacaaaatcagtaatgttcctcagatgtggccctagagggtctctcattaggggcttatgtatgagagtacactgtacttcagataaatagttgtgaactaccatatagttggtggaaagaaacattgagcatcctgaagcccaaaggcacaaggctctttctgtctgctagacaatctcttcttccctgtgaagtggtggttaaaggagtttctgttacattagcagggctgagcattgagcatcctctgctcaaacag

SEQ ID NO: 44962 - DNA, 437 bp, Mus musculus
  source 1..437: mol_type = other DNA
gacttaacaatctgagtttgaactgtggggtccacatgctgaaggaagagaactgactctcacaagttgtcctctgtcttttaacaaacagaaaaaaataattgaatttaaaaaaaaaagttaccttttccttgtctaaacaaaaagcaactgacagtagtctatggtaaaaccatgtctactatgtggacctggctagcctggacctcacagtgtagactagactggtctcaaactcacagagatctgcctgtctctgccccaactttttctgaagcttcccatgcagaccgggctggcaagtgagccccttccctagccctgggatatggctttttaaaggtatatttccactcccttcataactaagtggtggtccacacagtcttcctgcgcagagccagctagagatgctggtgtggcttgttccttgccag

SEQ ID NO: 44963 - DNA, 352 bp, Mus musculus
  source 1..352: mol_type = other DNA
ctgcatatcagatatttacgtgccaattcataactggcaacagtttaaatgaaactgttgtttgaggaagacacgcatgcggtgccagctgcccctcccatcttcttagagctgactgcaggctggtaggatttttttcagagacagaaatgggtacccccttagcggagtgtgtaataagttcggctctcgtcattaaaattatcaggatactgcccccagttctgtataaaaacagatgcggtggtggacacatctgtaattcaaaagttctggatgatccttagctatctaatttgattgggtaatatcaataaagcttatgggcgtggtctcattccagccaggccag

SEQ ID NO: 44964 - DNA, 330 bp, Mus musculus
  source 1..330: mol_type = other DNA
aacatatgtgcatgtacgtatgtgtgtggtgtacgaaatatatgtgtgtacatggagtatatgttgaacctgagcccactgttttggctagatcagttagtctgctgaagagaccaagggatcctttaaatttttttgaagcaagatttattttttaaaaggtgcaaacttgtgattataaaccagtaaatgcacgttaatatatgctgaacaaataaattttagcaaggctaaaaattacggatattttgcgactgcctcaaatgaagcagcggctgacggccgccaggtggcgctgacgtgacctgggctagggagccagcatcacgt

SEQ ID NO: 44965 - DNA, 407 bp, Mus musculus
  source 1..407: mol_type = other DNA
attttccagcagtcagactggtgcagaaggtgagctttcctgatcactctgtcctgttgtgatgaactttagctcagctaacaattttaggtgacagttaatcgtatccacagagcagaaagaaatgaatatgaacatgctcatttgattgtttgtgagggaatggtgttgcccatagtgggcagtgtaagacaattctctaggccctctgctgaaggtagaggataaaaatagacacttcaagaatcatctgggttcatgtctcctgataatagctcactgataggtgatttaactactagggaaggcttcctggaagtgtacacttgcactaccctacgtgcaggtgccctggaatgaatttagggaggcagagggtgagcaggcccagcctgcccgtggacttc

SEQ ID NO: 44966 - DNA, 321 bp, Mus musculus
  source 1..321: mol_type = other DNA
tattgatttaaaatactacacaaacatatatatcatattatttttaaataatatgtgtatgtattatccctatgttatggaataaaggtaacctggtgccagatctgggatcctgattgtctgtatagtctctgtgtgaacagatacagttcaggctaagaggtggaacaattttaccttctgtctgtgttcagacgcgcggcataagtcagacggagcctctgcctgcagcaacagaagatcatcacatacattatattcatgtgtgaaaaatgtattaaaccagtcattaagtacagttaatatatgctttcaaaaaag

SEQ ID NO: 44967 - DNA, 344 bp, Mus musculus
  source 1..344: mol_type = other DNA
gcatgcttaatagaagtaggaaatagttcaatcagtattattgctctgagtttgtcaggtactgacagcgcaaccactagacctagaggggacttcgcctcgttatcaaggatgatgccaccagtatcaccagtggcagcttgttttgttggcactgagaaaagctaagcccaagagagtgctcaggcaagttcactcgctagcagcctcggctctgaacaaggcctggcctgttctaggtgattccagcagctgttccagccctgaccctcatgtctgtttaggcaggagccccagaacagattgtctgggaccctgcccagagctccaagaggcttcctgct

SEQ ID NO: 44968 - DNA, 238 bp, Mus musculus
  source 1..238: mol_type = other DNA
ccaggcgggcggaggaaggcatgaccaccacctggcccagctctgcctcaaacagtttcaagaagcgggtcaacaggcctggcgccctaggtcggcctttctccttcctcaaagggccgggccttgacgaagctagccccggaagaggcggggcataagtggagcccagccctagggcggggcctggccgaaggatgggttggcctgagggcggggctttcaggagcgctctccggaa

SEQ ID NO: 44969 - DNA, 338 bp, Mus musculus
  source 1..338: mol_type = other DNA
tataactttcgccagccagagggtgatcaaagctctgcaatcacaagagccaaacgccagggaggctgcctcgcggtatgctctggggtgccgaccaggtcagcagctcctgctcttccgaaatgcatgcaaaaaagcccgggaaactgttacttagatcccgggtaccagagtcgcctgggaaggcgggagaccggtcctcgctccagagggcacggcggccctggggctgcctttggagaggaggctcatagccaaggggcgcggtggcgaggcggccattggtccctgcatgcgaccgggagcagcaggttcggctgagcgcggctatatagcgg

SEQ ID NO: 44970 - DNA, 447 bp, Mus musculus
  source 1..447: mol_type = other DNA
gtaactactggctgttagctagaaatactcactattctctacttagctagaaatatttactattctctactttttttattttttatttatttttatttttttaaaatgtgcaaaatacttgcattacttgcattacttgcattactgcattactgagtgggaagaaagctgcagcccaggaaggctttgcaatgctgttcttgcacaagcaccccaggtacttctggtcaggccagcctggatttggaattcttactcagaattgatttgtggtgcttggaatcaaaccagacccagaaccaggaccctgtgcatgctgggctagagcacaggcacctgggctcctttcctggaaaagttagtatctgatatagttctagatttttaaaagaatcgtaattatgcagtcaatgtgtacttataacaaattggtaaactctgttgaca

SEQ ID NO: 44971 - DNA, 374 bp, Mus musculus
  source 1..374: mol_type = other DNA
agtttttcatgttttatttgtatttgtaaaaaaaagaaaaagaaaaaaaaagaaaaaaccaagcaaaactgtgccttctatttatcttttttaaagaaaagtaataaagattctagatttgttttcagatatcctaaaatcacgccccagactgggatgcaggccggtgacctcagtggctctgtgcgctagccatatggtaaattagtgggtgtttcttggaaaaaggccaatttttattaaaatatttctggaagaaaacttcatctggcaatgtagactgctaaaactcacttcgcctctgtggacaagtccctattagtctgtagacaaccagagagtgtgcaagcatgcttgtgatttagggcccatga

SEQ ID NO: 44972 - DNA, 284 bp, Mus musculus
  source 1..284: mol_type = other DNA
gtctgcctgagcacatcttttacttacatacagctattttttaaaaaatcatggtaaggattttgaaagacttaaaagattgcatgaggctggtctctggagggtttgaagcttcctgggaagccatggaccccagcagcccctgaagggctcgctggccccaagcaatgggggaacgagattccgggactcggtcgcgatgcgccagcctggcacactctaagggtctgaggccagggctctgatcccctttcatggagctggccatctcgacaggcagcgcc

SEQ ID NO: 44973 - DNA, 237 bp, Mus musculus
  source 1..237: mol_type = other DNA
tcagggccatgagtctgcctgagcacatctggactgtttacttacatacagctattttttaaaaaatcatggtaaggattttgaaagacttaaaagattgcatgaggctggtctctggagggtttgaagcttcctgggaagccatggaccccagcagcccctgaagggctcgctggccccaagcaatgggggaacgagattccgggactcggtcgcgatgcgccagcctggcacact

SEQ ID NO: 44974 - DNA, 296 bp, Mus musculus
  source 1..296: mol_type = other DNA
tgcttccattgtgtgttctttatgtttcctgtaaaacataaactatgttatgtttaacatatgttacactaaagcatatctagtagaatgtatatgctgatcaaaagggaactctgagagttgaatttcctttatttctaacctggttctgaaaccgacttgctttctgagattttcagcgagactgccttagcagtcaggctgccccacaactctgaggctggccaggctgggaatgctcactcctcaggtggtgcaggcagctcactcagtgtgagctgatgttcacagggagg

SEQ ID NO: 44975 - DNA, 189 bp, Mus musculus
  source 1..189: mol_type = other DNA
cagtatctccgagccagctgcagtccagcagggtccacagaggcccgcagcctgcctgcaccctgcaatggaaggggctgctagcatcttctggagagggatttggacagtgggttgccccctttggagaaagcaccctccacccctccatcctctgcacccacagggggaaaagtgaggtaactccga

SEQ ID NO: 44976 - DNA, 179 bp, Mus musculus
  source 1..179: mol_type = other DNA
cctgcaccctgcaatggaaggggctgctagcatcttctggagagggatttggacagtgggttgccccctttggagaaagcaccctccacccctccatcctctgcacccacagggggaaaagtgaggtaactccgagctggctcctgggtatcagcatagctggcagcgagctagcgctc

SEQ ID NO: 44977 - DNA, 241 bp, Mus musculus
  source 1..241: mol_type = other DNA
aattactattgaaagtcgattgaacagaggaggggaatctgttccttttcaaagacactcgaaagcaagtctttagggtttcaggtgccccccccaccccatattttaacagcgatgcactgcacatctaaaattacaaatcaaaagcatatccttcctcaccacctttgcagtgagctgagagcagggcccgccctgaatcgacggagggcggacatcctggcaactcctcgacggcgac

SEQ ID NO: 44978 - DNA, 453 bp, Mus musculus
  source 1..453: mol_type = other DNA
cgagttacaacatataatatatagtctctcgatttgctctatgtaagcaaatagaacgcacatattgcatacgttcatttaaattttatgaaactagaacattccgattcttgcacaatagagattttgtcaggagacaagattcgtgatacggaattgtactatttaatatggtttttcctgattggaggagaacaatcacacgcgtgaccatcgactagctggaagccgagcctggggtcagcgctgccgccggtccgtgcgacagggagccccagctgcaggctgcggcgactccccagctaacgtggcgggtctctcgtctccgcacgtccgcaccatggctggaagcgttgcagcccctcggccaccgccgctcgctcgccgatccgacccgaccgtcgcggaagtactcctgacctcagcgcggaggcggggtcgccgtcgaggagt

SEQ ID NO: 44979 - DNA, 335 bp, Mus musculus
  source 1..335: mol_type = other DNA
acaatctgaagttttaagcttatctcctaaatagtgagaagtctcctaatagattttgtttttctttgaaagacagtatttggatatatctgtaataatgacaatagcatgtatttgtaatgtacctacatccatgcatgcttgattgtcgttactaaccgggccagaacaaggaccaggtaaattatataatcctataattttggcgttacaaaactggaaggcttcaacttccttaatttcagactaaaattcttaggagtttatttaaattcagtccattatggcgggaagcgtggcagcatacaggcagacatggtggggcttgagcatag

SEQ ID NO: 44980 - DNA, 411 bp, Mus musculus
  source 1..411: mol_type = other DNA
tctgctatgcacagccgagctttcagtccagtatcggacccactgtgggcgctcgctggtaacgtgctctggggcactgtgtccagaagctccacaggttggagagggggatggaaacccagccgcccactgagcgatgcgcaaggtgccctctgcatacaggtttggggacccggggctctcgctggctgagaacttgcagagagccacgcgaattccccggggtgttcccgatcgcgtgctccgcggcccctgcgagcgcccaactccctaactccgggactttggcaaagctgcagcgcaccattggagcccacggggagccggggccctcttgcatcctggaggacggggttggagcgcacccccacggcggtgacacggtggaggcgcccggctcccccgccggcg

SEQ ID NO: 44981 - DNA, 207 bp, Mus musculus
  source 1..207: mol_type = other DNA
cggacctctgctcaggatcccgcgctgggattgggaacctgctcaacatcccatcccggaatggagtgaggtggaggctggcccggaccaggaccagcagagtccagcctggcaccggagaccggcagcgatggcgcccaatgggaactgccagcggcgacgtgggccccgcagcgcacagaggcgggacttccgctgtgccgcggc

SEQ ID NO: 44982 - DNA, 804 bp, Mus musculus
  source 1..804: mol_type = other DNA
cagactgcgcggcgaggcccaccgcgcggagcgtccccggggtcccttcccgcggccctgcgctatgccccgagactcacaaggaggcgttgcccgcgggccggacgcagcgctcgccgtccgcgatgaggcagcagctctggccgtagcccggggcggcggcgggggcggcagggggcccttcgcggctgtcctccatctccccgccccggcccggcccctccgggggaggacccctgtaggccactccgcggctgctagccccgcggggcagctcttcgccagccccgcgcccgggtcccacggtgcgccctgggtcaggcgcgctccgagctccgcgaggcccggctgctctgtgctcctgcagcccgggccccggcggggatgcacacgccgaggctccggccggggctcacgaggcttcccccgggatccgggcccggccgccctggggctcccgaggcccccgccggctcccgcctgctccgcgccgcgcggcaaagtctccaccccgtggctccccgcgcgggggcccggcctcgaacctgccgtgtccgggccccgcggtgtgctcgggccgccccagcgcctggccgctcggcggcgccccgagtccccgcggcagcccctgggccgccccggccgccgcccgcccgacgcgccgcaccacaacagtgcgctcccccgcccgccgcggcacagcggaagtcccgcctctgtgcgctgcggggcccacgtcgccgctggcagttcccattgggcgccatcgctgccggtctccggtgccaggctggactctgctgg

SEQ ID NO: 44983 - DNA, 417 bp, Mus musculus
  source 1..417: mol_type = other DNA
gatggagtgagcagcccagcagtcgccggctccttagccctccgaagacaccggggagtcctgccacagagatgccttggggccaaggcgccgccaggctgcctcgccaccagctcagcctgccggcgccgaaccaggcgcctgagaggctagaggagcagagtctcaggagaccaccttgttgggcagcagctccaggtcctgcctgaagcaggggaccctgctgggcccaatggccttcaggctggttcaggaatgctgcatatcctattctgaatttcaggcctaaaaacaacaatttgttctggataattctagaatcctttccttggatccatgaagaggcctgtagcccccgcccttccaggaggggaactgggagaggggctccggctagaggttgacatcaaagccgag

SEQ ID NO: 44984 - DNA, 660 bp, Mus musculus
  source 1..660: mol_type = other DNA
tggttccttcattttacaatagagaaaacccctaactaactgcaatggggtcaggaaaatctcagagctttctgtgcctataaaacactgggtttcgagggctcgctgcccctgtggggaaagaactcccttccattaccagtgctctggccaggctgcagctgggccaaggtcatcggagtgggcagaagccacgcacagtagccaagtctgggctgaagcgttagcaggccgggccggccgcgtggccaggtcccatgtgctccacctgcgaccgttctggggcgctggccctttaaggctcctccctgctgcccccgtccacttgccgcgccacaggaatggtctccagggggcggggccggggcgggaccttccgccctgcgcgcgcgcgcccgtcgccgcgccgtccccgcccctcgcgcgccgcgtcgcgaggcgcgcgcccgcccgccgcccgccgcggatcgcgtggtctggctcggctctccgcgccgctccccccctggccgtccgcaccactgcagccccccgagccgccccgggccgggggcggggggacgcaggcggcggaccgaggtccgccaggccggctaggcgcgccggagccttctgcccggcgcgccactcagcgtcagcccgtccgcgccgctccgcgtc

SEQ ID NO: 44985 - DNA, 392 bp, Mus musculus
  source 1..392: mol_type = other DNA
gtaagtcattttgatttcttctggaataaaagttttgctgtatgcttacctacggcccctctctctgcactgacccacagtgataccagggacacagcggacagcacaggccccggagcagcgctgcttaggccgtccaggttctgggaggcagtgctcagctgacctcattcatgactcggtttggtggcgctctcccacccctacctaatcgtaatatgctctgatgttaggaagtggggccagttctagatccctcgtttcccaactttctcgctctgcgcctgcgcagggaggcggggcgtaggtgcgcacggggggacggagccgagaccggcgggaccgcgcacgcctggagtggctctgggcgccaggagggaggagagctcggg

SEQ ID NO: 44986 - DNA, 353 bp, Mus musculus
  source 1..353: mol_type = other DNA
ctcatactatagcccaggctgcctagcctggagcacatggcgcctgagtgctgagccagagctcagaatacactcttgcatctgtctttaaaacacaaggcaggcggatttctgagttcgaggccagcctggtctacagagtgagttccaggatagccagggctatacagagaaaccctgtctcaaataaggagctttagttaaatacaggtatatatggcggaaccttgaaattaaggaaatgtaacctcaggacctggaatttagttccaggcggcgcacgggagcgagaggcgcgggttgggcctcaacgcgctccgtagcgcccgcctccaggggcggggtttaaatcg

SEQ ID NO: 44987 - DNA, 439 bp, Mus musculus
  source 1..439: mol_type = other DNA
ctgtgtctcctgaactctgaggaatcacgagtgagaagagctacaaggagcagccttgtgaagggtctgctgctcttgagagcctgggaaagaaacatttcagttccccggggaagcacactgggatcctcagaggaagccactgaagcctagatcagtgccgaccctgactcagtctggagctgagttagatagataccaagaccagagctgagctcctgtctgaacttctaaaattgtactaatgtcactaaatttccaatgatctgaagatgagcgtctcccagggttaggtgctatcatctgaggtccaggcagctctgaccgaagtctgaatggcaggcttcacgggcagacttctgacctaactagccatttccaggaactgaaactgacgggcaccaggccccgccccttggggaggaggcaggcagggctc

SEQ ID NO: 44988 - DNA, 376 bp, Mus musculus
  source 1..376: mol_type = other DNA
caaactagattcattcctgtttatgatttgtttcaaaaccatcttgttaatcctacctttgtttcaaaaggttcaaggctagcctggtctaacagccagggctatacagagaaaaaaaaaaaaaaaaaaaaggtttttatgactaccttcttaggaccaccttgtgatcataactttctttcaggaggtggttataacttatttttagggggaagcagttcctgtatgcaaataaaaaaagcttgctttaattaattgcttgctttaattaacttccttaaatatttaggattaaaatttatgaggtcattcactccaaagaaagactgctctgactccggtcccggaagccggcctcggactgcgcatgcgtata

SEQ ID NO: 44989 - DNA, 270 bp, Mus musculus
  source 1..270: mol_type = other DNA
ttgctacagaaaacagtcagtagtgcaagtgactctcccttgtgccaggcacttgtaaattctttataaacatgaagtatattaagatcaatgggtgatctaaattccatcttttggtaacagaagggctaaactcttctccattctggggcagagaggcaacagaattgcgagtgatgccttgtttcaatgtagacgatcagagtctgtacaaagtgtcttcagctggcggatgctgcagctcggcaggctttgcacggggctcccggg

SEQ ID NO: 44990 - DNA, 393 bp, Mus musculus
  source 1..393: mol_type = other DNA
tccattactatagaggagtctcagcagcagtaaagagctaatgggtgcttgaatcatgaaaatgttaaccatgggtcaactcaacccatataattctcgttgagactgtattctcaggtgttttgatatcctttcaaatagacatgctggctgaattcgctggttagacgctctgtggtcagcaggactaccgccgtccctggcaatgctggacaggctcagctcaaggtggcactgggctcacagccctttgctctcaaggttagctaaacctgccctgtgacactgtgggcactgccagggcaggtcaatagtgcgcttgcgcgggctagatgccccagtaaccctgcggacagagtgggccaatcagcgtgctgtctcctggccccgccc

SEQ ID NO: 44991 - DNA, 504 bp, Mus musculus
  source 1..504: mol_type = other DNA
tgaatttgaagtgaacatactaaattccagggttagtgagaccctctccagaactgaacatctggaagctgaacctatgtgtatatacaaatatatttgtgtgacatttcagtctgttgtcatctaaaaagtaaacaactgtgaagttgttacaaaatatgtaaatttttaaaaggtaacttgaagatactatcagttcccagtatgtattataaagtcaaatgattaaatatatttatatatcttacaaaattaagtcatacacaaacttttttttaatgttactcttttatttcaataatggtcttgacaggtagtttcatgtctgttgctttagtaaaacaccctgacagagcaactaaatgaagcaatccattactatagaggagtctcagcagcagtaaagagctaatgggtgcttgaatcatgaaaatgttaaccatgggtcaactcaacccatataattctcgttgagactgtattctcaggtgttttgatatcctt

SEQ ID NO: 44992 - DNA, 192 bp, Mus musculus
  source 1..192: mol_type = other DNA
gaacctcggcctcaaggactttaggtccgacagccctgggggccatctgagcctccaggctccaagcgcatactcttccgcggacccagcgtctgagtcccatacgccatcgcgtaaaaacgctatttttttttgttggtccctcccaattcgagaaatgctagcaatagggactgtcactgcctggcgcga

SEQ ID NO: 44993 - DNA, 416 bp, Mus musculus
  source 1..416: mol_type = other DNA
tcttgactaaacagactctttaccgatttactaaacacgggctatgttcaacagaacccaatgtttcatctccagaaaaaaagcctggggccccgaggccgtcagccatggcttcggtccgtcttgcaagccacacatagggagctcactgggctaagttcgacggtagccggcgtcccgtgaggccggctacttagcgggagagatggcgcccgctgcaggtgtcgggagaggttcacccacctgtctcgacctagagtccgccggattcaaaaaaaaaaatcacttttgaaaaacgacttcgtttttgttagcaatcctccggtcgcgccaggcagtgacagtccctattgctagcatttctcgaattgggagggaccaacaaaaaaaaatagcgtttttacgcgatggcgtat

SEQ ID NO: 44994 - DNA, 376 bp, Mus musculus
  source 1..376: mol_type = other DNA
ctctcattatgtagccttgactggcccagagcttgctatgtagaccaggctggccttgaactaatagagatatttatttttaagagtaaagaacttctgaaggaagctaccctggctgttagagaaggcagtttcctgctggacccggggagcagctgcacagtgcgctggctggaaaaattctgaaactgagtccagttaagtcatttgccaaaaagacttgagactctgccatgggaaagctggattcctcatctataaaggaacacactgtgttctcttgtacttccaattcctgcaagtctcagcagccctaagctggggcttaggcccctccccagaaggcagctgggcttttagagcaacagccacctac

SEQ ID NO: 44995 - DNA, 189 bp, Mus musculus
  source 1..189: mol_type = other DNA
acggacactttgccagtgtctggacatggtggacaacaatcttgaccatcaaggacgaagctcaactttcttcttccatttccgtttctctcttcattaccgggagtcacgagggtcctgctatagctcaatggaggtcctggaccatcataacctctgtgtagtgcacttttggctttatgccaataa

SEQ ID NO: 44996 - DNA, 252 bp, Mus musculus
  source 1..252: mol_type = other DNA
gtttagagaactctctctacaggtggaggaggctgctttccccacgattgatcaacccttgggtttcctaaagtttctgatagttttgctaatcatccgttgatggttgcttcaagaaactacatggggtttctgcagcacagggctagggtctggcagcttctcagggtcttccagaaagccacaagactcaattctcaaggcctatgcagaaatcaagatatttctagtcacttgggacacacgcatgcg

SEQ ID NO: 44997 - DNA, 247 bp, Mus musculus
  source 1..247: mol_type = other DNA
tgtctcatcatcttgagcaatgatggaagttccagatgagtattttgaaagaatgtgtttaaaatagcttagcctttctctccactgtaaataagaaggctgctaagagcctaaaaataaatagacgggctgtgtgtgtggtcccttctaagcagagaagttaatagattcctatactttttaactttcaagtactctaaactgtagtgcagtgcacttgacgtcatgccaagatactatttacagt

SEQ ID NO: 44998 - DNA, 286 bp, Mus musculus
  source 1..286: mol_type = other DNA
gtgccccacatttaaccctaagtctgcatgcttcaggaaattccgggaactttttgctgccactccaacatgtctggtctttgccatcttatgggcaataaataaataaataaataaataaataaataaataaataaatattactgtatcaaaagacagcctggactacaggtgaattcaaggccagcctaggcttgtgtgaagcgctgggttccacccatactcacaagcttcatgagttagtttggctgctggatccgggccagcccaggcgataaaaccctca

SEQ ID NO: 44999 - DNA, 359 bp, Mus musculus
  source 1..359: mol_type = other DNA
aagtctgggcatggtggtgcacgcctttaaccccagcactcgggagacagaggcaggctgatttctgagttcaaggccagcctggtctacaaagtgagttccaggacagccagggctagacagagaaaccctagaattctccctcaccccgaatgaatttatttatttatctatctatctatctatctatctatctatctatctatctatttatttatttatttatttatttatttatattcagggtctctgcctggaactcagagatccgttcacctcagtactggaaaactttttttttcttttggcataaagcagttgtttctggggttctgaactccggacggctcccgcgaact

SEQ ID NO: 45000 - DNA, 236 bp, Mus musculus
  source 1..236: mol_type = other DNA
tatttaaaaataaatcatgttatagaatgcagctggatcttagaagatattttaccacaaccaatcattgattatcccagcaactcagcaggcggaggcaggaggattgcaagtccaatgcctgtgaagcagcttcgcagcagcgctgttgtaaaaataatgaaataaatcattaagatgtcaaattacttaaaggcagctctttcgactctagatccagaggctgaatctgggtc

SEQ ID NO: 45001 - DNA, 366 bp, Mus musculus
  source 1..366: mol_type = other DNA
tcaggggcagggcctggccactattaatacagtcagattaatttttcaatgtgaattccaggaaaatttaaatgacaatgtgtgtcacattttatttgtacttgacattctcgttaacagatagtttctatttgaaagaaaacgttatttgaaatttaaaaataattgtcatcgttttctttacatttgtgaataatatattcctatgtacagttcataattcacatgacataattcacataatgaactaaactgtttgtcttgaaaaacaaagctatctgtggccaatcaaggcacgatgatggggcggggactgaggggcggtccaatcaggagcgcagcccgggcacaggggcgggccttggc

SEQ ID NO: 45002 - DNA, 354 bp, Mus musculus
  source 1..354: mol_type = other DNA
ggcactgcgcgccccctggtgtttgtttaccagaaggtgcaccccaagcaagcagaaaagaccttgggcctggactttcttattactgcctgtcctacaccaccgggtgtgatggctcacactctgaggtcgaggccagcctggtctacaaagtgagctccaggacagccaggaagtgagcactccgccctgcacagagccgagtctggcccagtgcctcactcaactgacaggtgtggatttctggacaggagtctccacagccaaagccaaaactgtcactttcgataccatgtcacaatgttcccaaaccagcacgaataatagatgtcctcttctttgggctcaaactgc

SEQ ID NO: 45003 - DNA, 355 bp, Mus musculus
  source 1..355: mol_type = other DNA
gggtttcattactgtgaagagacaccatgaccagtgtaactcttataaagaacatttaactggcaggaggaactgagagttctacatatccgcaatctcagtctgaagagtcacacattgcagatagctgactacagctgtattaacacaatattctttagagtgctttcctgcaaacacagactacacaggcatctgcctacctagcctgacagacacctcccaaattatctgtggcgggcagtaccctgcaggatgaagctcagctgctcaatcatgggcagcaaggacctggagcgcagctgccaggacctggacgtcagagcgcacggcagccaggaccccgccccgcgcg

SEQ ID NO: 45004 - DNA, 446 bp, Mus musculus
  source 1..446: mol_type = other DNA
ttacttacatgctcacagtatctaaaaggcattacatcatcacatgaagaaatggagatgcaaagagttgcctatggatttgtcaatcagtaatattcagatcctcactcagcgtatattaaggtaggacattaacagtttgcttttataaagccagctctccaagagaatgtgagccatgagaatatatagcattttttattttctctcagtaccggatggtgtgcgtgagcgcgcgcgcgcgagaaatagagcgctcctgtaattatggtacagtaaaacaacagttttggtcatgaagtcagaagctgtcatttcctcctctacaagcttctccctcattagctgaggggatttactgtctaacctagttacaacattttatatttgtccaatcagataagagtactttggagccttcatttaaatataaagatgacaaataa

SEQ ID NO: 45005 - DNA, 369 bp, Mus musculus
  source 1..369: mol_type = other DNA
ctgcaaccttgtgtctgacacccgcaggccacccgcagatgaagccgttggtctcccttgagctccccaagcgccgcacagggccagtgtagggcctggatgttgggcaggacgccgccctgcgcgatggtcacgcggcccagcagcttgttgagctcctcgtcgttgcggatggccaactgcaggaggcattcgtaagcgccagcaagctcttatatatgatcaggagggaggctatgcaccttcctattggatgccaacaagaaccaatcagaaaagaacgcggagccttcctaatttgcatattgtaatgtaaaattgtattcaatcaaagggagtgatgcctgatccttcatttgaatgcaaggc

SEQ ID NO: 45006 - DNA, 496 bp, Mus musculus
  source 1..496: mol_type = other DNA
acctcgcccaccgaaacttcaggcttggggagaggactcacgccccttgcctgctccaacgcctcgggcgcgtggcaatcgtcagtggcccgcactgtgagacccttttaacgacttggctctgaaaagagcctttggacacagcatgcttggccagctccccgggcagcagcaggcgcacggctgtctgcacctcgcgggacgtgcgccaggcgggaggcctcgctggcgatgcgctcgaagatgtcattgacgaacgagttcatgatgcccatggccttagacgaatgtccggatgcacctgcttcagcaccttgtacacgtagatggagtaggccttgcattcaaatgaaggatcaggcatcactccctttgattgaatacaattttacattacaatatgcaaattaggaaggctccgcgttcttttctgattggttcttgttggcatccaataggaaggtgcatagcctccctcctgatcatatataagagc

SEQ ID NO: 45007 - DNA, 313 bp, Mus musculus
  source 1..313: mol_type = other DNA
tcaaaattattatccttctgattcagattaacgtacgttaactgtgcttataatgggtttcattttgataacttcaagagaaagcaaacgacacaattccctatttttaaaaaatagtgttaatactatgtttaagcttagctgagcttttttagtattccagaactcaggaaaactatgcctcgttgttatataaaggaagcatgcagaaaggttctagaaggtagattgttttgtttttttatttaacaacaacaataaaagctccaagaatcagagtgcagcatcccataatgccacctggtgggcgcag

SEQ ID NO: 45008 - DNA, 258 bp, Mus musculus
  source 1..258: mol_type = other DNA
ctgtccagtactgtatgacttctgagccatgtcagaaatcctgtgaggttaacacatgtagtggaatcactcattaatgccaatgttaaatacataaattactcctagggtgtgcatataatataagtatgcaacttccaagccttaaaggcagggatcaccacctcccaactttgagttgctaatttctagatctatttattggtcccacaaatatggtgcccccgcggcatctctgccaagcaacctgcctgcgtg

SEQ ID NO: 45009 - DNA, 517 bp, Mus musculus
  source 1..517: mol_type = other DNA
ctttttaagtttataagtttataagttcacctttgtgctaaagtccaaagtaaaggagatttattctggtcacacactggcagagtatcaactctgacacaggccaaactgttcagggcagggcagtaacgggacatcccttcgcaccgggcactggccggctgcacccaatggatgaggtcgtccgccgcctcctgcagcggtctcacccggtgagtccagtgctccgaacgctcgcagatggggcacagcaggaaggtggtcagcggctcgcggtgcgccgcacagacgccctgcgggaccggagaagttcctctgcgccgacagctcgcgacactcggggcacgcgtatgggccctcgggctggccccagcaacgtcggatgcactcgcggcagaagttgtggccgcagtcggtcatcaccgggtcggtgaaaatccaggcagatggcgcaggtggcctcctcctggaggttcagccatggtgctggcgtctgcgccgcacgacttccgccgga

SEQ ID NO: 45010 - DNA, 419 bp, Mus musculus
  source 1..419: mol_type = other DNA
caggcccttccgacctgctgctcgagaatggctttaggtctttacctgcagccaccggctgaaagccaggcctatgtgccccagctctggatcgcaaacgctctgagaagctgctcgcctgcgggccacgccagaggctcgtggccggccgctgcctgactcagcagccgcgggagtgctagacccgggccgctgcagacgcaggctggagtgcgttccggctcgctgctagttgctggccccagcaacggcggcagaagttgtggccgcagacggtcaccaccataagctttgactgtggtgtcgatcccggcatccaactggccattgtattgaccggagaaaggtttacacagtgcacaccggatcttggggtgcggggacaccacctgcggagacttgtcaccgcaagagaggtc

SEQ ID NO: 45011 - DNA, 304 bp, Mus musculus
  source 1..304: mol_type = other DNA
cagaaagccaactgtgggcaccagcggctggatatctgggaagatcaatgactgatgtgagagggcccagctcactgtggacaggccggtaagagccctcttccagggttttggtcatgtttagtatagcaataacaaagtaacagtggtgaagataatacattttatactgttcgtatttaaccgtgaacaaggaaatgcctaacttttttcctccgacaggatattcattgtccccccgagaggctggctggggtaagatggcagatttcatgtttacttatttaccgggtggctctgcgca

SEQ ID NO: 45012 - DNA, 459 bp, Mus musculus
  source 1..459: mol_type = other DNA
aggctgctaagggggctgcccttgcccccgcatccagggtccactagtcatcagaatgctggctgcaggggaagagctaaggtcataatgctggcccttaggcagccaacccaaaagatcgcaaattttgagctctagaggagggaccctcccctctgggctcccagcccaggctgctggctccgcccaagagagcaatcccagcagggagggcagtggttgttgccagctacccccacccggtggtcagccacagctctgccttgtgcatctccaggtgaggctgctcctggggcagatgggaagtcctgggcccagaactgcctggacttcaagtggaggctggggagaccagcaggcctgtctagatccctgctgctccacccccagggacaaccctagggggaacaatggagcccttgagggcccctcctccatcccccattgtgcttggtggcg

SEQ ID NO: 45013 - DNA, 332 bp, Mus musculus
  source 1..332: mol_type = other DNA
gcctgaaggcctgcttcattccactttagacttccacttttgtctgaccacaaggtggctctgcaccgtgggctgactcacttccaaagagtttaataaagtaattactgaatggtcagcccagatgaaggctgctaagggggctgcccttgcccccgcatccagggtccactagtcatcagaatgctggctgcaggggaagagctaaggtcataatgctggcccttaggcagccaacccaaaagatcgcaaattttgagctctagaggagggaccctcccctctgggctcccagcccaggctgctggctccgcccaagagagcaatcccag

SEQ ID NO: 45014 - DNA, 415 bp, Mus musculus
  source 1..415: mol_type = other DNA
acccatattggcagctgcaggtcacaacctgtgccctcacagggcatctgaggctgtgcagcaccttggggcactctctgcctgagtgcctgatacagacagagggtgggctgtgtggtttgcagcgcacaccctaaggccagcactggtgatccttggtaaatttccctactcagggacaagtgcatgtgcgcatgtgtgcatcttcattgtacgtgtgtggcatgcatgtgcatgcacgtgtaccctacatacagtacttgtgtttctgtgggatagaatctgatagaataccagcaacactgcttttgtaagattactttaagtcaaaggtgctcagaagagagcagcagctcaggtctctcagtactcagtggccccatccttcctgcagagtgggaggacagggctgatg

SEQ ID NO: 45015 - DNA, 338 bp, Mus musculus
  source 1..338: mol_type = other DNA
gccaccatgaccttcggaagagcagtccgcagtttcttgaagtaacttatttaaaaaatactttggggagccacaaggaacttgcactgtagacaaggctggccttgaactctaaaaaactaaaagacttaaaattaggtgtatgtgtctaatgatttaacagttaaccggctaacccgaaaatgtaactaaacggattcgaagctgacttctgggggagaaccgcgcagtgcgcctgtgcatcatcgcggccccccccccccccgttgggctgaggtgtggctgtcagccatgccgccctccggtgtgttccggtgggccggcgcgccgctgtgacg

SEQ ID NO: 45016 - DNA, 291 bp, Mus musculus
  source 1..291: mol_type = other DNA
gaaagtccttttggaggctttttacagcagctaccagggttctatccttaaaagactgaggcagttttcaatgggacagagccaattccagaagtttatggaaccacaactagcaatactgtgagaagactattataaactccgcttacaaactactttcaatgcgtcgactagacccggggtcgtctgtggttggggccggttgctgccggcacccaagaaacgccaacctgcagaaggcgcccgcggcgcgcggtgatgacgccacggagcgcagggcggccgtcccca

SEQ ID NO: 45017 - DNA, 203 bp, Mus musculus
  source 1..203: mol_type = other DNA
gctggctgccaatgtcgccagcggtcatcctgagaaactttgtggagagtcctgcagcttgcacacactagtgggggttctgaagagccgactgttctcttggcacgcccagcggtgcatagcaatgctgtctggcttccgtccaggcactgcacagcgttgtgctgtggggacggccgccctgcgctccgtggcgtcatcac

SEQ ID NO: 45018 - DNA, 300 bp, Mus musculus
  source 1..300: mol_type = other DNA
ctaggccaagataagattgtattggatacgtttcaggccatgacctcagggctctcaacgtgttcaggatgaagaccaagtgatctgtcattaagatgtagctcagtttctgttcattttgaggcgctcacccagagcatggaagagtgaatcccattatttaacttagtttcaacagttttccagaaagcaaggggccggcccctcctggtggcgcaggcgcacctttagaaagaggatcagtgcgcaggcgcacgggcacgttagcgagagcgcaggcgcgcgcgggggcgcgagagt

SEQ ID NO: 45019 - DNA, 403 bp, Mus musculus
  source 1..403: mol_type = other DNA
ccggggggagaaagctctggaggtgacacaacagtggctgaagcaggccctggtaacagaactgtctcctgggacttctgcatcgctcaggcagtgctatgcccatgcaggtgtctggtcctctcagtcagctctgagcgtgcacacaggtccaagaccagtgtggagacatggtgcttgtccccgcatccgcggaatgggctggaattccgcaggaaggcgcgcgtgcgcacgcgccggcggacacggactcgttctagtgccgggagccagagtgctagcccgggacccgatccggaaggctccccccgtagacgcgcaagcgccatccgtgtgggggcggggccctctgcgtgcccgccctcttcccccggcgtgccccgcggcaggcgctgacgtggct

SEQ ID NO: 45020 - DNA, 447 bp, Mus musculus
  source 1..447: mol_type = other DNA
gggaggtttgacttatagacaatccgaagatgagtcacagctctgggctttcacacagaccacagtgatatctgcagctagtagtccagaagtccctgaggaccatattgtccgctctgcagaaagcaacattggcccgcgagtggattcgcgtccccccacgcgtcagtcaggagacaccccggagctcgcacttgtgtcctggctgcagacacctagccccggggtctaacccccgcgccacgtgcccagccctccccacagcgcgccccaggcccgccccgcgagccgagcagctcggcggccgcggcggcggcggcgggcgcgcagctcggatttcggcccgcccccggcgccggcgtgacccctcctccggggcgcgggcgggccgagcccagctggccggcgccccgccccgcggccgcggctgcggacgctataagaggg

SEQ ID NO: 45021 - DNA, 441 bp, Mus musculus
  source 1..441: mol_type = other DNA
gaatcaatgtggaaatttcactttgccttcccaatcagcaaaataatgtttgccaaaatcgttagattaagtaggctactgccgacttgaaagcagtggttccagaacccgagcccaggggctgccacttgcgcgatctcatggtgcttggagcttgagatccagggcctggtcctgtgacccccatacgctgcgcatcccaacgcgctcaccccgcgcacccacggccgcgggaggggccagcgccgcgaggctccaaacccccagggccccgcccgcccctgcccgccccgccccggccccagccccggcgggcgccccccgcggcgctgccccgcccccgccgccccgcgccgcccagggcctcggcccgccgcccggccgccggcccacctggcgcagcgccgccctcggagcccgtgtaccggtgcacacccggga

SEQ ID NO: 45022 - DNA, 363 bp, Mus musculus
  source 1..363: mol_type = other DNA
tacacagctgtagaggcccctctgagtgcagtgggcgtgctccacctggagcccaatggaagaggagtaactcccttggatgtagtccttccagtaactgatatagtcgcggaaggacatgtggccgaatagtctgtccggccccggccgcccgaggtcacccagcgccgcctgctgccccagccctcggtgaaggcgccgctgggtgtggggccgccaccgccgctagggactgggtctcgaggtcccggtagtaccgtgcgtgtctcccgatccatcccagtccggcttctcacattccagcaggaacgcgggccttggggctcccagggtgtgcgcgtgcgcgcctacgcggccccgccc

SEQ ID NO: 45023 - DNA, 219 bp, Mus musculus
  source 1..219: mol_type = other DNA
atactgggaacgagttctatttctaaggaaacatcacaatcctttaaaaggttccagcatcctctcagtgtcggtggcgggctccggtactggctagctgcgcggtagcagctcacctgagcgctccactggaccacgccagcagctggggagcaggtcagccactcggcgagcgcttgtacgcctgcgcgagagggcggggccgcgtaggcgcgcacg

SEQ ID NO: 45024 - DNA, 421 bp, Mus musculus
  source 1..421: mol_type = other DNA
atgtctctgttggtcctcagtagacactggataatagcagcaaaggcatgctttggtcaggtaaggagcaggagcttccttcttccacattgaggtcctctaacctcagaagattatgacatctaaatttttaaaaatgagggctcagagtccttgtttagaaaatctggcctgattcacaataaaaatttcaaataattgtcatgttaggaatttccagttgtatgtgtatgtatatgtgtatatctatctatctatctatctatctatctatctatctatctatctatctctatcttatctatatgttattgttccatggatactgtcctggcagggcatcactcaaggattgggggcgtgtccaaacccttcgtctatcagagtggaattgtccaatcaggccgcagctcgagcggag

SEQ ID NO: 45025 - DNA, 345 bp, Mus musculus
  source 1..345: mol_type = other DNA
acaggtatacatgttattaaaaatttaaatctcaaaaaaaatttttaagttcttgttatatagttaaagttatgtaattatattttagtacctaaaaatgtggctaaaaaaaaaaatgacattgtggcccttcctgggcagtcaccaccgagttgggctctcgggattccggaaaagcccaggcagggccgctcactgcctggccagcgggggtgtgtccagggtcccaccctcagcacccggttctgctgggggactgctctcaaagagccctaggccagattgtcactctggcacctggcgcgcaggagcctcgggagcggaagcaggggagggctcccgcag

SEQ ID NO: 45026 - DNA, 162 bp, Mus musculus
  source 1..162: mol_type = other DNA
ctagtctatcaaaccaccttctttaagggtgaataggttccaatgccctagttcttggtgtttatgcattaagaggactatcctggtgctcagagggacccagagtgctaccatgccacgaagccgcgggccgctgcttcggcgagcaccgtggatcgctgg

SEQ ID NO: 45027 - DNA, 317 bp, Mus musculus
  source 1..317: mol_type = other DNA
catgtaactatccagattcccagtcgttgggcatacccagggtcttgggcacgctcagtaaggcagggggctcctgctgaatcagcagagtctctgctgcctcattcaggacactgagagagtacctcttgctcagctctgccatggtcagacaaaagccaagcactttggctttttcgtaagacttatgcttttaaaaagaatctagggtttcaaagcctgattctgatcctaggcctcactgagctgctcgctgcctggctccgggaattctggtctgcagcttaggcttagtccatgtctttgacagtgatgca

SEQ ID NO: 45028 - DNA, 367 bp, Mus musculus
  source 1..367: mol_type = other DNA
aataggttccaatgccctagttcttggtgtttatgcattaagaggactatcctggtgctcagagggacccagagtgctaccatgccacgaagccgcgggccgctgcttcggcgagcaccgtggatcgctggcaagccggcctccctggctggtggccgcgcgaactggcccccagcgcccgggtcccgccggggcgcgcgcgcgcatcccgagcccgctaggaaggccagctaaagcccgggccccgggcccaggccgggagagcacggagcggggcggggcggggcggtccaggcgggccgggggtgtcggatgtcacccccccgcgtacacctcggccaggaggcggggacctcctcccagggga

SEQ ID NO: 45029 - DNA, 306 bp, Mus musculus
  source 1..306: mol_type = other DNA
tgtgtgtgcgcgtgagcgctcacagaagaagcaacagcagagggctgagcaccttcaatgtcatcttgctgtcacatgaatatcagtgtcctaggcccagagttctgactaaatgtgaatcacgatgctcgggttctgtctgtcagagggttagctgtcagcccgtctgggctgttggcttcctccttcctttgaaaataaaagcaagaaaccagggctttccattaaaagaaatcgggaagcaatctcttctgctttctcagtgtctgaaggaggaagctgaggtctgtgcccaggtcctagcct

SEQ ID NO: 45030 - DNA, 304 bp, Mus musculus
  source 1..304: mol_type = other DNA
aaggagcaggggttgtccgggagtctggacaagagtggcctgtagtatatagttcaggcccttcttgctattacttaactgctccgcgccacgggaagcacttgaaacaatttctagtctttatggtggcatctgggtcggcccgcagggagaccgcggagatctccggcgtccttccgggagcagcccagcccaacgccgcagctgtcaggccgcgggcggcggcgccagtccaccctggacaaggccattggctcgcggggctgccggttgcggtgccccgccccaccccgcccctccccga

SEQ ID NO: 45031 - DNA, 321 bp, Mus musculus
  source 1..321: mol_type = other DNA
tagcagtcactgggacttatgcccaatgagcccaggagtggaggcctcttcccctgtcatgcctggagtcagagttaagttttgaaatcaaaatgagggtgtctcctgctcaagcatagtgtagggttgcttcataaccaacctcaccaagggtctgggataggaaaagtccatttgtcatccatgataggactgccatgacattccctgcatacagtgttactccatttttaaggatgaaaactgaagtctcatctccaagggaggaccaagtacatgtggagcactctcactcagaaggcactttggtgtggtgacctt

SEQ ID NO: 45032 - DNA, 494 bp, Mus musculus
  source 1..494: mol_type = other DNA
gggagtctggacaagagtggcctgtagtatatagttcaggcccttcttgctattacttaactgctccgcgccacgggaagcacttgaaacaatttctagtctttatggtggcatctgggtcggcccgcagggagaccgcggagatctccggcgtccttccgggagcagcccagcccaacgccgcagctgtcaggccgcgggcggcggcgccagtccaccctggacaaggccattggctcgcggggctgccggttgcggtgccccgccccaccccgcccctccccgagtgcgcgcggcgcccagctcggttcgttcgcggtggcggcgggcgccgggtgagcgcgacggctggacttgccggccggcgccttgggggcggccgcggtggagccagcggccggaggccgcgtccgtccatgggcccacagcggccgggcggcggggcggggcgcgaggcggcgcgcgcgctctgaggccgcggcgagcaggcgggg

SEQ ID NO: 45033 - DNA, 290 bp, Mus musculus
  source 1..290: mol_type = other DNA
agtccagtaggggttctgttaaacaagtgaggcactgcgcaccccacagtagggtgttcaataaaataaaacaaagcagttgatttcatgtgaaaggccagcggccttgtcaggcgaaaaagactgcttttaaaattcaaatcatgataaatcaaagttatctaagattttagcctaaggagtccccttgagggattaggcagaagattgggctgcctacctgggctctgagagctgatttcaacctgctgggaggatggtctgcctactccctcacaatgagcgtgggc

SEQ ID NO: 45034 - DNA, 337 bp, Mus musculus
  source 1..337: mol_type = other DNA
gctgtggaccactgtggacctaagttcatgagtcccctgtctagggcacactatctaacactggaaagtacctgctgccaaacctcgggaatctatccccacagttgcgaattctcagcattctgatcagttgtcatctgttgaaaagacttatctgtggatataagtttttagaaaacagaaatgatgaaatgcagaagcaggcagatctctgagttcaaggccagcctggtccacgcgcgcttccccaagggctctttgctagcttgggaaagctgctcctggctgggggcgggccccgcaagggggcgtggcacacccggagttgggggcgggc

SEQ ID NO: 45035 - DNA, 366 bp, Mus musculus
  source 1..366: mol_type = other DNA
gagcagttaatgctcttaaccgctgaaccatcagccctggtttagaccaggctggcctggaaggcttaaaattaatttttaagtagctaaataatattcactgttttgaaagctagtttgcaaagatagggccggctcagggcaagactgagccgtgcacatgcgtggtccgaggaaattttccgcaaatctttcctctcggcggccggacttttccgcggggcgacttgccgcgccgaggggcgcgcgtggccgaggggctaggctccgcacatcctagtcgcctgcgggggacgcaacgctgctcgctccggctagtcactggcgttgcctgccctctgccggcctgcggaggctcagtgcaag

SEQ ID NO: 45036 - DNA, 375 bp, Mus musculus
  source 1..375: mol_type = other DNA
tgtacacagcggaggctggcagcgctggccgctgtgtacagctggcagcgttagttacaggctcaagcccagagctcttaatagctttaaaattcatttaaaaaaagatgtatttttttttattatttttaaaatgtgagtacactgtcactctcttcatgcacaccagaagagaggagcagttaatgctcttaaccgctgaaccatcagccctggtttagaccaggctggcctggaaggcttaaaattaatttttaagtagctaaataatattcactgttttgaaagctagtttgcaaagatagggccggctcagggcaagactgagccgtgcacatgcgtggtccgaggaaattttccgcaaatctttcctct

SEQ ID NO: 45037 - DNA, 390 bp, Mus musculus
  source 1..390: mol_type = other DNA
aatacactagctggcagtaggtcctcctggccccctactgttatgggcactggctaatcccagggctaaagtggagaaacggaggttgactggcagggaacggggggtggaacctgccacctccctctcggggcttgccgccgtctcccggatgctgggccggaacccgctcgcaactgtgctgtcgcccctcggcaagtgctagcccgttccgcaggcccttgcactgagcctccgcaggccggcagagggcaggcaacgccagtgactagccggagcgagcagcgttgcgtcccccgcaggcgactaggatgtgcggagcctagcccctcggccacgcgcgcccctcggcgcggcaagtcgccccgcggaaaagtccggccgccgaga

SEQ ID NO: 45038 - DNA, 451 bp, Mus musculus
  source 1..451: mol_type = other DNA
acacttgtattagggaaaacttgccccttagatgaggccttttcatcttatgaagtgatacaaagtaacctttttctcatctttgccactagaaatcctaggaaagaaattagttccgagccaaggaaagtttaacctgagtttaactgttacagatagactggaaatccgaggaattgcttggtgtttaattttcagctttagaattcaaaaccttcctaatgttacactttgacttgggaaactttgtgtatgttcagaaatgagcacaacctcagatacagaagggtttctggtcgttaggctctctagtgacatgttccggaagtggtttaaaataatgttcagtcattctaagcaaaactgggcccagaaattttgtgcttagcggaactgtttccatggagaccagccaggtaagatctcgcggcgcttggccggcggaagtgac

SEQ ID NO: 45039 - DNA, 410 bp, Mus musculus
  source 1..410: mol_type = other DNA
gtagtacatgagagctgttctccagctccacttaattaacttatttagagacaaggtactcaagagatccacctaactcagcctccagagttaggggactaaaggagtgcacgcactccttacttaactgtatcgtatggatgaatgacttatttaaagaaaaaaaaaaatcactcctgacaaggaaaacgagaattaccatttattttgcatggtgtcatcatttaaaccttacaagagttctacagatgaagaaaatgtcaaaagcatttttaactctattaaagagaggtccgagcgtgcgccgctggccaggcctagaaaagactcccctccagccgctagaagggcctggtgggggcgggggggcagaccggcaggacccaatgggtgctccggaatgcccctaa

SEQ ID NO: 45040 - DNA, 454 bp, Mus musculus
  source 1..454: mol_type = other DNA
ttaggacagagtctttttaaaaaatctttacaaacatccgtgcaccacatgtgcccatggaggccagtgatccttaacatacagagacctttctttaccaaaaataccttcatgtttaaaatatttcctttttttttaataacatgaagcacagtaacaaatttacagacatatttggagattcactatatctgttttttttagaacctttatagatttgaaggttacacctctgatagctttaaattttataaggttatggttgcaaacattcagcatctatgaacaaagaggatcacacacagcaggtgtatctgcctttacaagctgtttaaaaaccctcagagctcaacgaagtaagcgctcaataaatacctaaggatttgttcctccggcctgtaacctgggactggatgtcccagggcgatccctttaagggcggcggggctgcgcg

SEQ ID NO: 45041 - DNA, 607 bp, Mus musculus
  source 1..607: mol_type = other DNA
catcccatggcagtgatccttaacatacagagacctttctttaccaaaaataccttcatgtttaaaatatttcctttttttttaataacatgaagcacagtaacaaatttacagacatatttggagattcactatatctgttttttttagaacctttatagatttgaaggttacacctctgatagctttaaattttataaggttatggttgcaaacattcagcatctatgaacaaagaggatcacacacagcaggtgtatctgcctttacaagctgtttaaaaaccctcagagctcaacgaagtaagcgctcaataaatacctaaggatttgttcctccggcctgtaacctgggactggatgtcccagggcgatccctttaagggcggcggggctgcgcgccggcctcgctctgggccggagcctgcgcgtccgtgtccgcggtggaggctgcgtctgccgcgggccccgggcgaggagcggggcgatgcataggctgcgcggctgctgtgcgcgtccccgcggtgccccgctacgggccgagcggagccgggcgagcagccgcgccctgcgggtgctggtggacatggagggcggcttcctccgga

SEQ ID NO: 45042 - DNA, 380 bp, Mus musculus
  source 1..380: mol_type = other DNA
tgtgttaattactgtttaattcactatggcaaaaaattgagccaataatgaaacatatatgtgtgtgtgtgtgttgtgtgtgtatatacatatgtaatggaatataatatatcatgtattatatataatggattattgctcagctctaaagaaaagtgaaataaaaatttatgtataaagagagagaatataaatctgtttttctagttctaactccgtcataagatttattcttttggttttggtagtggataaacaaacacctaaagtatatttgatagtgaaagataaagttggtttgtctggcttacacatcccatggagaggtgctgctcactggctttcccccctgacggggtggccccacccacaacgggctg

SEQ ID NO: 45043 - DNA, 479 bp, Mus musculus
  source 1..479: mol_type = other DNA
accgttaagccctgtaagggtaaatggctctgaggtccaccaaaattcgaacacttttcggggctcatataaaattaaaacaactgtataaaattgcgggctatgtgtaaggacttaagacccatccccaagtcactgcaggatctgggatgggacactgcaaagtgtaactcttaagggcgtggtccagagcccacgggctttgtgatgacattgtgaaccaacggcaaaaaggagtaattctcctccttcgcgccagcgggggactgaggccgcggagccgccggcggcgggagcgcagcgaccggcagaggctgaggcggtggtggcggcttggactccggcagcagctcgggcggtggctgtaggcaccaggagtccagcagctgccgaggggcgctgggtgcttgcgtcacaactgcgcgcccggggaggccgggcgggaaaaaactctgagtctgcgccctgggcgtattgag

SEQ ID NO: 45044 - DNA, 373 bp, Mus musculus
  source 1..373: mol_type = other DNA
tacttaatctttacaatcaaacagtgaaggttggtggaattggccataggaggctgtaggtaccccatcgatcagattctctctaagcgctccccgtcagggtcccccatcccagcgggtccgtggggctccctgcttccctctggtggctgaagcgcagtccggggacctaaggggttggccctggggcaaatgtccagcaaatctgttgctatcatcagataatattttttggggaaactaaggcccaagaaaagccggatcctgaagaggagcctcaggctccaaggcggaggtcgctgcgtctaggaggagctgggcgcgtccgggggcgggacgtgacgcaccttagctgggaggtgcctggccgggc

SEQ ID NO: 45045 - DNA, 436 bp, Mus musculus
  source 1..436: mol_type = other DNA
tgagttctggtgcactcattttcaagaaataaataaatcaccttgtttcactttgtttctgttctgtttagagaactatctgcagctctgaagaaaacaattctacatggttcctgtcatcaaagacagatgtcctctatttttgttagtcagaatcagaattactgctacccttgtccagaaaatttttaatggagcccatttgcttgaaatgaataaatatatacgtatgtagtctggcacctgctagatgcataccaaatgcttgaagaacgattagttttccgtctggggccctcctggaggctagcatgcagagcctcagtgaactagaaagatgactggagtagattccctaatcctgactactcaatacgcccagggcgcagactcagagttttttcccgcccggcctccccgggcgcgcagttgtgac

SEQ ID NO: 45046 - DNA, 254 bp, Mus musculus
  source 1..254: mol_type = other DNA
gtgaatggtcagttccacgctctatcactgagccatggctgacacatctgttgttaacccacttcggttaaggaacctgacctcagatcagttagagctctgtccttcactgggtccttccttagatccagggagggcacagtacctaggtagagaggttccagtacccagcgaatgttcctggatctgctggtaattcctggagtctgagacagtgtatggtacatgtcacagagactggctggcttgcaccc

SEQ ID NO: 45047 - DNA, 493 bp, Mus musculus
  source 1..493: mol_type = other DNA
tagtataaaaagtgcaggtgtgggcttctcagaggagagccacacttctgttctaacaatagtcatatatgtcactctgattccatgtgtagaccagcctggccctgaactcagagatctgcctgcctctgcttcctgagtgagtaccttttactgtaagtgaaattcgaaaggccatattctcttaggctttaaaggtcgttgcattgctattttaacattcttatttgaaaataatccatataagaagaacacttaaggcaaatttcacattgtttcacagtaagaaatccttgattctcagttggcaaaagtgttacaaccagattctgaagtgagagactacactggtcccaaagtagcagggtaggagcctcgttctaagggactatgccctagtccgagacttggaagtgcgccccacgaggcagtgtccggaaactacatttcccagacggccaggagaccttaggtgcatcagataagcctcccg

SEQ ID NO: 45048 - DNA, 277 bp, Mus musculus
  source 1..277: mol_type = other DNA
gggtttctcagtgtagccctggctgtcctggaactcactctgtagaccaggctggcctggaactcagacaggtattgccacatgtgccgtgactacattttttacatctaacttgaggaaatagaggcctggcccaagtcgccaagcccctgcccccagacagacatggggcgtgcagtggggcgcgcgggcgccagggggcgctgtcggggcgcgaacggcccacctggcacccgaggccacgagcgagagctgcctggccgcccgggaacttttt

SEQ ID NO: 45049 - DNA, 300 bp, Mus musculus
  source 1..300: mol_type = other DNA
cctcaaaaccctgagcccctgggtctgtggggtccctgcctgccaggttgcagaccctccgctatcacagacagtctcagatccctgtgtgtggccagtgtacgcacaggcgcaggcagctaagggctcacccgtgggctcctttggcacgcgcgcgcgcacgcacagcttaggcgcctaggaacctcgcagcagtgacctggccacagcggtgagagccgcgagagcgtctccttggcgccccctcccctcctccgcgtctggggcgcgggctgcgcgcagccaagcccccttgtcgcg

SEQ ID NO: 45050 - DNA, 306 bp, Mus musculus
  source 1..306: mol_type = other DNA
cgccggagccgggcaagagggctccctgaatcccggcctgccaccgcgctctgacctgccgcgaagcagggctgctgacgggggtcgccgggggcccccccctcccatcgcaccgcgagagaaggaatttcttccacaatgccttggtgagcggtcacggcgaccgccggcctttcccgagagtgccgtctcccgggggacagttccctggcgcctcagggcaagctgagtgggggcaggggtcatgactcagcctctcctgtgactgctgaccctgagccctaggcaggggaagagactccctct

SEQ ID NO: 45051 - DNA, 365 bp, Mus musculus
  source 1..365: mol_type = other DNA
cctcgggggagcctccttgtagggtgaggtggcaccagcgtcaggcagaggcctcgtgacaaggatcccgcacgtgaggtgatttcagtgccgggaggaggcccgcggatctcaccagcccggtcagccgctgtggctcactcgacgcctgccccacgcggcaggaactccatcggcgggcctcgttccagcccggactcctgtgtgccacgggtctccgctgcccgcgccgcgttctccggaacgctgagcgcccggcctgacagcgtctaaccagccacttccgattggacgacactccacctaagtcactagggtctccgtcagcctcttgattcatctagagaatctttacgtagtggcgg

SEQ ID NO: 45052 - DNA, 395 bp, Mus musculus
  source 1..395: mol_type = other DNA
gcacctggcctggccccaggtcacatatgacccagtagctgggctcaggtcctcaggacctctgttacagattcacagagtgtgccaccatgcctggctcacagaatgcccactggcccttcaggtcctctctgctccaatggtagggttctgcctgaaacctctcagctggctcatggaggggccccactgcaggcctgtatccgtattttggacccaggactgtctggttctaaacagcaagtggcctgatacagaagaagccaaggcccagtgcctgtgcacccgcaggagattgctagaaaccaggctcgggcaggcagcccgctaggcgagctgggctggtgggcggggcttgatgggaaaccccgcccctccgctcaggtggctccgcc

SEQ ID NO: 45053 - DNA, 275 bp, Mus musculus
  source 1..275: mol_type = other DNA
aaatgaaatacccaaactctagaatgagttatgtatcgggtacctccaggccaggaaactggctgatggacccttttcctacacaagtgtaaaaatgacatgtgtgctcattttacagatgagattggttgctggggaaccaaacaccgccactacgtaaagattctctagatgaatcaagaggctgacggagaccctagtgacttaggtggagtgtcgtccaatcggaagtggctggttagacgctgtcaggccgggcgctcagcgttccggag

SEQ ID NO: 45054 - DNA, 529 bp, Mus musculus
  source 1..529: mol_type = other DNA
gtcccggtgggaggcgccgggtgcaggaggccccggcagtgagagggcctggtccgcggctgagggctcgaggagcccagggcaggcccggcccgtgagcgccgcgaggaggccctcgggcccggccttgccgcctggcgctaggcacccgccggcgggggacactcggtgcggaccggcatcgcggggtcccccggagccagggctgggggagggggaaggaaccgccgccgccgcgcgggagccgaagctgcggggagggcggacccgggcgcgcacgcgcgggggaggggccggggaaccacccgcccgctgaggccagaccaagcgctcgtgttgccacctggacccggagacctgcaagcagggcctcccagacctggcttccaattggcgcgggcgcgctggagaggcgggagcaagctcacgcggcgcttccgcccattggcggacagagaaagcacgtggcgcagagcgcgaacggccctctgggagggcgggagtggcgcgcagcggggcgcacggctgc

SEQ ID NO: 45055 - DNA, 315 bp, Mus musculus
  source 1..315: mol_type = other DNA
tttctttctgtacgaggccagcctggtctatagtttggatgtcatttttcaaattgaaacagaactctgttgcacattatgtccgggcctcacctgttggcgggacataggcccgggccggaggctgcggagctggccccggccatacggtggggtcactgagacgccggtccaagagaccgcgccaccggtccctcagccgggggtcccatcctgcccaaggacctggacccctcgctggttctggccgtcttcctcatgacacctacggcgcgccgtcgcagccgtgcgccccgctgcgcgccactcccgccc

SEQ ID NO: 45056 - DNA, 177 bp, Mus musculus
  source 1..177: mol_type = other DNA
tgccttctctgagtgaggaacttcctgtctgaagaccccgagctgctgtccttccacaaggggagaagggcttccctggtacgcgctgatgcaagctccgataccccaaacttggactgccagataggggtacctccgcctgcacatgtggctgagaaaggacccgtccacgggcgc

SEQ ID NO: 45057 - DNA, 462 bp, Mus musculus
  source 1..462: mol_type = other DNA
cctgaggacttgggcctgggcttctcagggggtgtgtagacttggagttcacagccaatcttggcactgtcatttaacagctgtaatttgcaatacctattaacaacatgttcgattcccagacccacgtggttcatgcacatggtgtacatacatatatgcaagcaaaacacataaaatgaatacatctaatttaaaaattaaaaaaagctggcattaagtgctcttaacggctgagcccagtatactagctgtgcaacccagctgacttcaaattcgcagcaatcctccctgagtactgggattaaaggttactccagcagccttttctgtcactatcaaagagaaaagagattccccctctgctttgcaaactcaaagcagtttggggtctggtcctaatggtgtgcccggactccgaatctcgtagcaccgggagctcgggaggactccattcttggt

SEQ ID NO: 45058 - DNA, 242 bp, Mus musculus
  source 1..242: mol_type = other DNA
acgagagtgctgaggaatatttccaatttggacaacgtgacgtgcccgtgcgcgtgcccgcggctgcgcgacccgtgggcagtcccgggacgtgacttgtggaacgtccgcttcgggaagcgatggcggcgggaatggggtgtgggtgcccggaccgcgcgcctccctgagggcttttcgtcgccgattgattgacaagcatgatttaccaaccgactctggaaactccagtccgtgtttgc

SEQ ID NO: 45059 - DNA, 453 bp, Mus musculus
  source 1..453: mol_type = other DNA
agagtgctgaggaatatttccaatttggacaacgtgacgtgcccgtgcgcgtgcccgcggctgcgcgacccgtgggcagtcccgggacgtgacttgtggaacgtccgcttcgggaagcgatggcggcgggaatggggtgtgggtgcccggaccgcgcgcctccctgagggcttttcgtcgccgattgattgacaagcatgatttaccaaccgactctggaaactccagtccgtgtttgcctgaggcgtctgcgggcatccgcacgatgccgtgacgcggcagcgctgtccagtggacaccgcgagcacactccggcgggtggagtccctcggccccggaggggggggaggggcggcggccgacgagcgggcctcgtctgcgcatgcgccggcctctccgccgactgggcggcacgcacgcgcatgctcaaagtacgtggagtctcgtggccgc

SEQ ID NO: 45060 - DNA, 242 bp, Mus musculus
  source 1..242: mol_type = other DNA
gagtcctgagccccaactcccagggcgggttgagcaacgctaggtccctgttgctgcagtgcagctgcctcctctcttgacaaagatgggaggacagggttgttctcgcgaagttctttgtgttgggtcatgaataataactctcaaggaattgagattttcttttttttttcacggttgggacccaccttcggactacagcatgcgtgactgccccccccccccggcgagcccggcgagcc

SEQ ID NO: 45061 - DNA, 466 bp, Mus musculus
  source 1..466: mol_type = other DNA
tttcttgagaaagggcctcacactaaagccagaattctcagcagtcgtacttagtctcacatctggcctctgagctcatggtcccttggtgggccaggcagacaaaacctgacacataatgggcctgaaacccgggatgccagaccctggacttccatagaacagctgtgtctgtttatgggaaacctacatgctggccagggcaatctaagctgccacatgtgacctgaagctgaaggattaggcctgggtcacggccagccccagaggctacagcagcccaagcgacgacaggagactggaagtgttgatcatctccagcgggacccctacaggcctccccagaactctggtcccagggaggcctcgcagctctgggagtcgcctagcagcacttcccgcagaggccgcggccgggaggcggcgcgcgcgggttaaaggggcggggccggcgctgacccagccc

SEQ ID NO: 45062 - DNA, 341 bp, Mus musculus
  source 1..341: mol_type = other DNA
cctaatccttcagcttcaggtcacatgtggcagcttagattgccctggccagcatgtaggtttcccataaacagacacagctgttctatggaagtccagggtctggcatcccgggtttcaggcccattatgtgtcaggttttgtctgcctggcccaccaagggaccatgagctcagaggccagatgtgagactaagtacgactgctgagaattctggctttagtgtgaggccctttctcaagaaagccccagacggtcccggggcgtgcctggcgatcacgctccgttttgagcacgtgtgcgcaggagttgtgcgctcggattggacctcggcgttcggt

SEQ ID NO: 45063 - DNA, 231 bp, Mus musculus
  source 1..231: mol_type = other DNA
tttgccctgccaccacatcaggggcgctgatcatatttcctgaaatatggcaagcatttgggtccagatgacggaggctggccattctccagcgtttgcccgggccggcgcaaggttcctgagctaggtcaccagcactccccggaacctaccggcgacacgccgctcctaggaccgtactgtcccagggaagctaccgcggcactcgcgtagtggcgccttttaagaggc

SEQ ID NO: 45064 - DNA, 290 bp, Mus musculus
  source 1..290: mol_type = other DNA
gagtcttccacaaagttcaacttggggtaggaaagtgccaaaaactttggtgtcattgggtttgccctgccaccacatcaggggcgctgatcatatttcctgaaatatggcaagcatttgggtccagatgacggaggctggccattctccagcgtttgcccgggccggcgcaaggttcctgagctaggtcaccagcactccccggaacctaccggcgacacgccgctcctaggaccgtactgtcccagggaagctaccgcggcactcgcgtagtggcgccttttaagagg

SEQ ID NO: 45065 - DNA, 353 bp, Mus musculus
  source 1..353: mol_type = other DNA
tgaccaaggaagagttttaaaatacacgtgttctcgtgaaaaggttttacatttacaaaagaggggcctctcgcaaaataggcggagtcgctttcgcccgggctcccggtacccaagaagagaacccaagtgcttcttaccggcgatccccttggcagcgtcgtttttctccgccgaaggccacttccatggcagcgcgggacagggcacggcctccaggccgtcggtgccactagggtgaccgggaagatcattccctaggtcctgctccagcagcaactccacgggtgcccgtgcatgctggagataaatgcagtttttccaggcaagcctcttaaaaggcgccactacgc

SEQ ID NO: 45066 - DNA, 308 bp, Mus musculus
  source 1..308: mol_type = other DNA
attcgtttttactagcgtgtgtaacacaaacaacgcaaccagcctcattttaatatttgagacagccagctagcctgaatcttggtatttaggggctgacaccaggacccgcggtggtggcgcacaggccagcctggtctacagagcgagttccaggacagccagggctagaaaaaaaagatctatttatgtcattagttactggaaactgaacccgaaccaggctcgatgccctgctctgagcgcgggcgaatcgcgcgtgggcagctgggggcgggctctacctggatgctcccaccgccaccccg

SEQ ID NO: 45067 - DNA, 353 bp, Mus musculus
  source 1..353: mol_type = other DNA
gagctctacatctgcagggggcttggaatgggctttttgcaacctcaaagtcctttcaaataggagtcatgaccagtttcattcaaactgccgcagatccactgcaagttggcctgtagtggtccactgtaaacccattccttccttaagcattgaatgctttggagcgtaaagggacacaagcagtactgtgtgtactggtgtactagttatcatcacagggagatccgtgatcaagccttttggctggagactggagggtaggcagccaggactctaggcggggctgtgctggttggctacacggacctggccgttgggtgtgaggccacacactgctgactctctgacgt

SEQ ID NO: 45068 - DNA, 397 bp, Mus musculus
  source 1..397: mol_type = other DNA
tgagacaagaaactcgcgatgtagaccaggctagtcttgaactcacagcgctggcagatctctgtgaaagaaagttcctagacttagcactattaatagtattaatattacatgtaatagtgacatatatgtatgtatatatatgtatatatgtacacatatgtatttatgtatatatgtatgtatgtatataatgtatgtatgtaatatatatatatacatatatatatatatatatatatatatatatatatatatataatagtaatactagaatagtacgttcctagttatgtgtaggtctgtttctaacctccttaaaaaacaaaaacaaataatctctcagctttgcagagcaagttcagttttttctgaaaacctccggaagatttacggt

SEQ ID NO: 45069 - DNA, 602 bp, Mus musculus
  source 1..602: mol_type = other DNA
gccaggctcaggctcttggaggcgcgcccggcacgctgccgctctcgccacaccgggcgcccaggccgagcgggccacgtgcgcgagccagcggcccggagcccacaggacgctcggtaggacagcgtggcggccctcgcagctactcaccctggctcaccgcccacccggctgcgggtcgccgcccctccgagtcgcgctcccctcgcctggccgtcgcgccgccacctaagcccccgcggactgggccccgcgcgtggcgggcacacgatccggagtcgcgcgtggcacagaggcttcgccggctctgcggtcgaccttcgcccgcggtcgcgagcccagcttacctctctcgggagccgccgccgcccggacccagacgcctccttccccacgcggccatctggagactctcggttcgtcgggggctggagccgacgcggctcagggcgcgcgggagccgaagggaaacgtgtcccgtgagccgcgcctcacgccggaagcctgctgtaagctgccgcgcgcagtgcgagtcgctgcgcccaccgcctggacgtccttgggctcccagaacgagtggactcccagagcgcttcgcgcga

SEQ ID NO: 45070 - DNA, 421 bp, Mus musculus
  source 1..421: mol_type = other DNA
ctatcaactggcattgatttacacgtgtgctgtggtcgtaaggccagtcagaccaatagctgactgttgttagctaccacgtgctcttaagtactgaacacttgcatgtgttacgagtttggcaaagttgcatattcaatttgtctacagaccttcaaaatctctggatttgtcaccgggactcaggcccccagcggccgaagccaccagggccgaggccaagggttgggcctctcaggctggcgggatcgtcgcgcgaagcgctctgggagtccactcgttctgggagcccaaggacgtccaggcggtgggcgcagcgactcgcactgcgcgcggcagcttacagcaggcttccggcgtgaggcgcggctcacgggacacgtttcccttcggctcccgcgcgccctgagccgcgtcggct

SEQ ID NO: 45071 - DNA, 305 bp, Mus musculus
  source 1..305: mol_type = other DNA
taaatactgtgtagttcttaagaaataggatgttcttaggaaaagctgtttaggagatctccagccttcaagcattccactgaggtactcaaactttaatgtctgtgtggtggtctcatagatgtggacatcaaatttgttaacagaatatgattctgtgaacatctttcctaatactgtacttctagagaaacactggctcctgggtagctagctccctagggacctcggtgggctgcatagctccagcccgcacgtgcctcaggcttgctaactttgcgcgcagcgccccgcccccttctccg

SEQ ID NO: 45072 - DNA, 447 bp, Mus musculus
  source 1..447: mol_type = other DNA
ctggggcccagagttccagcctggtctagcagggatcactgaaatccctgagtccaggacgtgaggtcccgggcttgggctggacccagtcctgggttggagtgcagacgtctgtgcccagcccggaagggagcccaggatcacgggcggactcaaattgaatgtggcacgggccgcgcctacctttggtctgaggcaagctggccggcgggctcgcggcgggcgactccatgctgcggaccgtcgcggcggagagcagacagcagactacaccggggccgggcgcgctcatggctgctggtggctggcagcggcggcaggcgatgggcgacaggcgacacagacgcgacggttccaagcgtccgaggcgggcggcgccaaagccacactgggcagcgccggacgcctgccgacggcgccacgcaggccccgcccatcgtaggcccg

SEQ ID NO: 45073 - DNA, 273 bp, Mus musculus
  source 1..273: mol_type = other DNA
agccaggcattcggggcctgagtgttggccagaacagttactttgtcactaggcaaactaggtgctggcgtgccaggtgtgctcgttcaggtgaacactcacctggcacgcgcccgccgtgggactgccctaggaggcaagccggtggtcgccgctctcttcagaggagtctactgacccgcacacgctgtgccataggggggcacaggctggggcacccaggaccacgccagcgggcctacgatgggcggggcctgcgtggcgccgtcggca

SEQ ID NO: 45074 - DNA, 257 bp, Mus musculus
  source 1..257: mol_type = other DNA
agctcgggccaggcaggacctggtacaagcgagaacaccatggaagttgatgttgttttcatctaggctctccagaacacaagtgactcaatagtttcctccctggaaaagggggttaaccgtcatggtcattccttcagcatcttgctgacatttagaaatatgggcccaagccttacctgaggtgcccagagtcttggagaatgtcctgctccatccggaggtacctcccagtgactcccaggctccaccctagg

SEQ ID NO: 45075 - DNA, 454 bp, Mus musculus
  source 1..454: mol_type = other DNA
ggcaggatttccttctcttttgagaatgaagagaatcccattgtccacacacatcaaagacatgcagattgcctctgtatctgggctactgtgaacagtactacagtgaacttgggagcagttagactttcttatccctgcaggattctgaagacgttgatgctgtagcattgattcttcatgtcatatagagttctcagtcactgtcacctgaaatcccagccctctggagtctgagacaggaggctcttgagacaggtgaactcatgtcattctcacaatgactcaagggcccacttttcaaatgagggcatgactgcacgtaacacctaacgtcctgggagcaatcacacttcgtgggagaggtgacatctcaactgatcggcagtggacagcccaaagccctgtcattttaagccaaaagcgacaggtcgcttacctgtcctccctggac

SEQ ID NO: 45076 - DNA, 391 bp, Mus musculus
  source 1..391: mol_type = other DNA
acatgcatctcgtgcaggtgtcgcatgcacgtgccacgcgcgtgcgcgcgtatgtgttcgcgcgcgcgcgctccagtgcgcaagtggctggtgcgtgtggggggcagctggggccaagaggggccaccgggccaggccagggcggtggtgggcgggatcagcggcgccgcggcgcagggcgggcgtgctagcggggcgcggagctgggtgcgcgcagagcttctgcctcccgccgccggccacgccgcgactgcgctgccaccgcctccctgagaacggtcgccgggggagggtgccctggcccgttgggaggtgcaggacacccacacccggctcaggggagcgcgcccggccctgcccgggatcagataactgcggcgggggatgtcgc

SEQ ID NO: 45077 - DNA, 609 bp, Mus musculus
  source 1..609: mol_type = other DNA
ataaatatacagggcagaagatcaatattttctcttccatctgtgtaaccctcagataggagagctaaatgcatcatagctctatactgttcctacttaataatagagtgtaatgtggctagtacaaattgaattgctataccaaacctgtataacacgatatttcaaagccaatgtaaaaatttgacttgatattctgtctttatgttaaaattaattttatctttcttggtgcaaaatattgtacaaaatgtagccactaaaaaaattcgtataccagttggcattctagttcaataggatattcttgccacgcccaatctccagctgtggcattgcggtcgccccgcctctttgcggcagagctcaggccggtgcaaaccggttcagtggcctgactgacactcagtttaggagagactcgtcgctggcgtctcctataataggcgcagaccgtgtcttagaccggcaaaccaccaatggtgtgacgcttgacccaacccgaggccttcggcttttctctggagccagcgggcgagaagagcagcggagcctgcgcactaaggccgccggcctgggtgacgttatcctttcccgcggacagccctc

SEQ ID NO: 45078 - DNA, 363 bp, Mus musculus
  source 1..363: mol_type = other DNA
caagcagcctattagagtgctattgctatatatagtagatatgtagtatggtttgaaccactcattattgggctcaacatatattttgaagattgctgaagaataataaaaagttctaatgaaattaactataagaagtccattataagtgtaaatagagattagcatttaaatgtgtccttgcaactctaccggcccgccccacccaggccccctacccaggcccagcgactttgcctctgaatctgaggcactttccggccgggtgagcaccctcgggcctcagttcctcctcctagaggacggcgcccggggacgctcagccaatgagtgcgcactttgtcgtgctggggtttggcccac

SEQ ID NO: 45079 - DNA, 388 bp, Mus musculus
  source 1..388: mol_type = other DNA
ttgcatcaatgttaaagttgagccagtgaatcactgtttaagaattcaactgtgcccatgggaattatgaactgagaattcaaaaattttgtttctctaataaataaggtaaacaccatatagattcatctgccctacaaaactatatctgaactgcttctatatctattaaatacattttatgaaaagcgatgaagacccagagtgacaatccccctggtggtggccattggacaaagcttgaacaaagtcgaagcccaattcttccagccactcctcttgagcagcacccaggccgaggcttgtgccgcgcgctgcgctcggcgacggttggatttggacgcggcgcccggggcggggtggcgcgtggggcggttcccgcccggct

SEQ ID NO: 45080 - DNA, 232 bp, Mus musculus
  source 1..232: mol_type = other DNA
tcctttccgaggtggtgactcatgtcaccctatacaccacagtgtggcacaggacttccaggttctgtcctccctgggtgatacagagaggaaattcctggcagttccttagacatctccaaccagtaggttgtgcctcagtgggacccttgtgcaggcttacacgctgatgccaggctgttgagggctggctaagagccccgtgtgaagcagaggtctggattatgctgca

SEQ ID NO: 45081 - DNA, 273 bp, Mus musculus
  source 1..273: mol_type = other DNA
gacatggatggagacctcgaaaccttttgtcacagcagtgtgaaactaacagtgaggaacctttgactaagcctgcatttttccaggctgcaggtgtcgcgaacgtgttgagctgaccacaagctgcaatccaatatttgctggccacagcaaccacgatcggaccttggctgaccgtagtgggatcatgttcaggacacagcgacagcgactggaaggtccttgcctcagcgcgcccttgggttgcaagggctcttccaggcctgtgggtcc

SEQ ID NO: 45082 - DNA, 297 bp, Mus musculus
  source 1..297: mol_type = other DNA
ctctggctcagccgggcgggcgggcggcgccctggctccagtcgaggcagacagagctgctggccgcctgtatctttctgctcatggctcagaaatgtcccaagcttgccaggagacttcgggcccctgctggccctgtctcctcccaggccaggcagctccctcatagggagctttgggaccgtctcccctagccttcccattgccaactctgacaggcctaatgagacccaggtcctctggcccctgacgggcggagctgggtctgtgggctcagacccaacacataactgtggg

SEQ ID NO: 45083 - DNA, 422 bp, Mus musculus
  source 1..422: mol_type = other DNA
acaagtatccaattgtctagatttttatcaagatacattgtatacaagtatccaattgtcaagatatatatatatgtgtgtgtgtgtatagtagattttatcaagatacattgtatacaagcatgtgtgtgtgtgtgtgtgtgtgtatatatatatatatatatatatatatatatatatatatgtgtgtgtgtgtgtgtgtgggaaataaataaataaataaataaatagttctccaccatcagggtgtttgcagagccccatatgatgcacaccaaattccagtgacattccctgggagagggtcacagagaacactgtgtcatgggctccgaagacccccaactgctcccgtaggggtggtgctcttcgcaccaagagcctcgccaggtgcatccacgtgcccggccccagggaatctg

SEQ ID NO: 45084 - DNA, 543 bp, Mus musculus
  source 1..543: mol_type = other DNA
agtgaagtctgattctgcagctaaattcctgtaacgaatatggctaaattaccttccaggtctggatttcagtcacgcccttgtgttcaattttatttattaaagaagtagttcccaaatattttgcactggccggcacattcaatgcccctagagtcgagctggggatctaaaggcaagaagctcgcatggatgctggtggcttgggaccaagctctgacatccctgagcttccagcttctcatgcaggacgcgggacttggacaaatggagtctccgggtttcgagcgcattcttcacctgtgctgggtgatgcccgctggaccactcccgcgcaccaagccttccaacgatggcgtctttgccgtcgctgtgtgtggcaacagcgacaccacctggagagaggtaactctagcacgtgactttccgccagctttgcagcctgcgagcttcaagcatgcagtgcgggtccgtggacccgcccctgggggttaggttccgcgcgaagactactgcgcctgcgcactagagcctcctggcaac

SEQ ID NO: 45085 - DNA, 216 bp, Mus musculus
  source 1..216: mol_type = other DNA
aggggaaagagggaaaggactctccttacctctgcaggcttgcagttgatcatgggagactcgagcggccgagggttcaaccacttgggctgccaaagttgtatacaaatctgaaatatgcataagtgaatcttcatgaagtttttcacgtgcaagagtgggaggagcctccgcgctcggagggcggggctcgcgcgcgcgcgctcgctgccggcg

SEQ ID NO: 45086 - DNA, 467 bp, Mus musculus
  source 1..467: mol_type = other DNA
atatgatatctaagactttggcttttgattgagaactcagtaataaatgtcaaggggacactcagactttagggaatcccgaatctctttggagattggagaacttttctagctctcgagttaacaatgctcacttttgcctcaaccggacgtccagagcgcatgcgcatccccgccaggtcctcactggctgggggtgggggtgctactccggggtaaggcgtccagaacttccggcgccgaaagagtggggggtgcggagcttgttgcctaggtaacacccctcctcccctcgcttcccccccaccacccaagctccggaggctgctagtacgcatgcgtgagagcatggtgcggggctgcgcgcgcacccctgaggagcacgcatcaccccttgggcggctcccgcccggagtgggacagctgggcgcgcgcgcgcgcgcgcgtgattgacaagggcgcgcccg

SEQ ID NO: 45087 - DNA, 194 bp, Mus musculus
  source 1..194: mol_type = other DNA
gtggtgtgcccaccacaatggctctccagcctgttttcaacttgacacaagccagaggcagcttgagttgagaactgatagactataatctaagccaaatcacttttggttttggtgtttttcacagcaatagaaactccatttaaagcccacagccaaagtgggtttatgagcacaccctctctgagctatga

SEQ ID NO: 45088 - DNA, 428 bp, Mus musculus
  source 1..428: mol_type = other DNA
cctggtgtcctgaaacaagaagcttcaggaaggagccctttgccaaacttgccctcagataaggacctaatggtctccatagctgcgtttgggggatcccagcaacagttgggcttggagctggagctgggcctcggcccacgacccaacccgccgtctgaggagatgaatcagcttccggctccgcccccggggccgcacgtgaccccaggtgagggtggcagggtgggcgggaccgcccttagtcaccggcggtccagcccggtgccaccaccaacgcctgtggttcctcgggtcgtccgggcacgctggcgtcccggctcttactccggactggggcgagggtccccgtcagccccagctcccaggcgaggcagaggacaaccgcggccctggacggctctggctactgaccccgaccgcggtct

SEQ ID NO: 45089 - DNA, 414 bp, Mus musculus
  source 1..414: mol_type = other DNA
ccctctctgctccttgggaatgggaggtaaggagcccgaggtgttcacccagtgtaaggcctgaactccaaggatgctaactaggctttgaagctttgaaagcagtgaatgcagggcagtctgagggtacaatgttgccattagcttgtcctcattaggttaaggccagggtccactgggactcaaaccagcctggtgtcctgaaacaagaagcttcaggaaggagccctttgccaaacttgccctcagataaggacctaatggtctccatagctgcgtttgggggatcccagcaacagttgggcttggagctggagctgggcctcggcccacgacccaacccgccgtctgaggagatgaatcagcttccggctccgcccccggggccgcacgtgaccccaggtgagggtggca

SEQ ID NO: 45090 - DNA, 356 bp, Mus musculus
  source 1..356: mol_type = other DNA
ctgctcggaagggtttcgtgtaaagttaaactccaaacactccagtggcaggccttggtggaatttcagtgaaaccagagccaccatacagaggacttagctctacccttgaatgggtggggacagacaacttagccttcagcctctgttcacaggtactgacccctggcatagggactctcctggcattgccaggagccaatcttgagagatcagcctgctgactccagaagcaagcctgtccctcgagtaagaaggttcccagagtacccgagtccctgccctctgggattcacctaccctagagcaaaaggagacctattggtttaatgatcaattaattccgttcagaaagc

SEQ ID NO: 45091 - DNA, 443 bp, Mus musculus
  source 1..443: mol_type = other DNA
ttgaaagctggttactaacctgtatgatggtttttcatcatttagcaaacaggcttggaaacaaaactagcaaacttattaacctgctctaataatatggttaagactccttagtacaccgaataatcaggcaagtgctgatccaaatgaaaatgagcttccttcctgaggtcactttgagggagggagcttcgggagctacataagagcagctcctcgtcctgcaggctcgcctgcatcccccggggacctggcagggtaaagctgccaagcagcctgcggcatttagcaagattccgcgaaaaggctgcgcagcagtgctcctgaagggctcgcggactcgaggacgccaggtcacgtgggctgagcgggcgcgcgccccggccccgcgggaggaggtgcgcaggaggaggcggggccggggcctcccgtgaagccccgcg

SEQ ID NO: 45092 - DNA, 269 bp, Mus musculus
  source 1..269: mol_type = other DNA
tctagctacagtgtatttactgtataataaataaataaatatttaaaaaaaaaagaaaccatatttcaggcagagacagatggatctctgtgagttccaggtcacccagagctacaattttttaaaaaactaacttttagaatgtttaattatttgtatatgtttatgttggttctgggaaccaaactcagcttctctggaaaagcagcaaccccaggagatgggggtactgctgtcatctctttttcagaagaactcaggtcaaagag

SEQ ID NO: 45093 - DNA, 298 bp, Mus musculus
  source 1..298: mol_type = other DNA
tggggctctggttttcatccccagcaccacaaaccaaaacctaatattctctgtagggtgtagatttttaagcacccgtacaatgttgagggcattggtctgaaatcacatagtttgtacacctgacacttgcttttaatcccagcacttggtgcagagtccaggacagccagggctacactgagaaaccctgtatccctggtcgagggggcatcaacgactacccatcaatggaggttgaagccccgcactggcgcgcgggcgccccctggacgtggccatcgggaaggcgccagcg

SEQ ID NO: 45094 - DNA, 535 bp, Mus musculus
  source 1..535: mol_type = other DNA
agagcactggctagtcttccagaggactcaggtttgatctcatagctatctgtaattgcagcaggcactaggtgcactcgtggtgcacatatatgcaggcaggcgatgaaattgacagcaacatccccaaacctgaacacacacttaggtatggggagtttaccatggctttgtaatgctttcttgagcaaaagttgactatcatttttcacctaaacaatccgagagcgcctccttagaaaggaggttctgagcctccctcagaagtctagagacccccagaaggcgcagctccccaccgcctcagcgactcccggggccggagttcaagatccgcctcttagaggtggtcagggcgtggcgggctctagctagccgcgggcgccgagccgagcggagccgagcccgccgcccgttcctaagcagccgcggcctctgcagactcgccccggtgcctggcgccgcgtcccggggtgcgcactccttttctcggcggagggagcaggactggggcgcatcgtcctacaagacgcgc

SEQ ID NO: 45095 - DNA, 301 bp, Mus musculus
  source 1..301: mol_type = other DNA
actgaggcgatttgcatgcaatttcctgcacatttgctccaaagtattgctgcccaaaggggcagcagttgtgaattaaaaattaagtatggacctatttacttaggattaaaaaagaaattacaataaattcctgaacttcaggtcgagggccccaaagctcgaagctcttggtctttacatttttaattttggagaagtctaaattaaatacttggcacccagtgagagagaaatttgattttgcaccatgtgaggcagagcccgcctgcttcctgagcaggccttgcccaagcgctgg

SEQ ID NO: 45096 - DNA, 309 bp, Mus musculus
  source 1..309: mol_type = other DNA
aacagtgtttagtgaggcatacatgattttattattcctaagtattgtcattgttagatttagttattccataaaaccatttctgacaacaacagtttctgctctgattgttgtgcacagtattcttattcattcatttgcaccgtttaaaagtatttattaaatgtctgatttctcatgtgcaagacttcggcatctgacaaagggcctggagaggctcgcccgagcctggtctgacagggcggggctcgcctgcgggcgcgaggagcggctctctagccgccgggaactggaaagcgctcggctcca

SEQ ID NO: 45097 - DNA, 463 bp, Mus musculus
  source 1..463: mol_type = other DNA
agcaggcagatttctgagttcgaggccagcctggtctacaaagtgagttccaggacagccaaggcaacccgttattcttcaaagaagctgtttagtcctggctggtgactacaggtagcagcttccgcggggcagaaaggacagatcacccacaggtgtgggcgctcagcacccttcttggaggcggcgccgcaagcgcagggctgagccggcgagcaccctggcggggcagcggagaccacgggatcgggaggaagcccgggcccggacctggggtgcagctccggtgctgggcttcgcgctcgggcgctcccgcccgagggaaattcgggaacccatccttccccgagctcaggagcagctggagcaaggaccctaggcagggggcggggccaagaccggctcctggcagccggccaatgggcgccgcccccgtaaggccacgcccccgcccccgtccgga

SEQ ID NO: 45098 - DNA, 415 bp, Mus musculus
  source 1..415: mol_type = other DNA
tcccaagtgcggagactgtgcggtggtggggaatccacggcagctcttaagcaaagaaatccctgaatgttttttagtaaaatctatttactaaacaaagtagtaaacaagggtattatttttaaactttgataaagattctgagtaactcgaaatggataagtaccggggttcccgcacaccggctcgcactcagggatctgacgtctagtcactcaaatccctctatttagttaagcgatttaatagaataaaagcccgcaggccgtacttctcgcgctgtaggagtccgggagcgcgaccgccctcccgggcgctgcgaacttcacgcgccctgcaggccgggggcggggcggggcgggacgagacggcgtgacgtcagcatgcgtcatcgcgcatgcggactggcggggcg

SEQ ID NO: 45099 - DNA, 504 bp, Mus musculus
  source 1..504: mol_type = other DNA
gcagctcacatgtctgtaattccaggtccaggagatacacagagaaaccctaacaaaaaatagtattgtgaacctgtctactttgtgattcaagttgtagtagattactcctggtacttaaaattgctgtaataagtacatttttatgtattatctcactaaactaaaatataagaaagagattctagttgttactattttatgacatagtgctgtgggtagcagaactagtggttcttgttccaaggcttttacaggcccctcttataagctagtaacaagtagtagttttaagtgaattctctgtaattcatgtaattcagtgtaaatatcttagaaataattataaaagacatgctatgatgtatgacattgtcattaagttgcagatttttttacctgttaaagtctatatctccttaaaattttagtttgaatattatcccaactaaactgcatttattttttgcagaataatgagaagcaaatgcgtcagctttctgt

SEQ ID NO: 45100 - DNA, 564 bp, Mus musculus
  source 1..564: mol_type = other DNA
agcatgtcaatgacacactgcaaattgcagtctatgaacaaaatgtcattaatcaatacgtttggacaaaataactgcagcgattctgctgcaggattcgctctggaccagtctggatggatcccaaccttccaccggagcagagagcgcgcgcgcccggtcgagcccctcacctgacgcgtcctctcccggctgctcggccgtcgccgcgggtcgcgagaaccaggcgagagctgcgagaagcggctcagaggtcaccgggaccggcccgtgcccgcgtccccgcccccgccgggccggccccgcccggagcgcaccgctcaccagcggcagcaccccgtgcccccgcgccggcgcgcctcgggtccgcagccgctccgcgcccgtccccgcgtcgcccgtccgctccggcagcaggcgcgccgtacaacccccacaccgccggcccgcggcccgcagcagggttcgacccagacgccaggctggcccgggacgccccgccagtccgcatgcgcgatgacgcatgctgacgtcacgccgtctcgtcccgccccgccccgcccc

SEQ ID NO: 45101 - DNA, 553 bp, Mus musculus
  source 1..553: mol_type = other DNA
tctgaagcacctcatagtccatgactgaacaaaactgagtttttaaagaaacaaaaattttcactacaatttttattacacctgaaaagattactttagttcttgagtgaaagacatgatttgttgttaaatgcaaaaggggaactgtgctctttcagactcaggctagtgaagaggctttaggctgggcactcgagtttattttctgcttactgtgttgtgtgtacacatgtgtgtacaaataataataaaaagtttaattctaaaaaatacccaaattaattagtgagcagtattatcatacttggtaatagaaatgactttcctttatgtattgtttcaatctcaaaaaaagaatacttggtgctcttgtagaggatctaggtatagtttctatggtggcacatacttacattcaggttaaataaatcaaagaaataagtaaatgaaataaaattaataaaatggtcatagagcagtataaccaatagttgtctatatattgttgtttaagaaaactttacttgctttggctttaaaaccttttttaaac

SEQ ID NO: 45102 - DNA, 504 bp, Mus musculus
  source 1..504: mol_type = other DNA
cttaccgttcagtgtgcttaaaaggaaggaagcggatttcaggcgtgtcagcacgccttttatgacttcaaactttgtataaaacagcccgttatccggaataaaagtttttccgattgttctttctcagatggcggctttgcaagaggaaaacccttaccacgccgtggaggaggcctcgcccgccatgccgaggtggcggcgcgcaggggtcgcaaggctaacctcgcgccgggctcccggtcctttcccacgcctgaggggaaggccccgggcgcgcgggagtggcaggctcgcggggacgctccaggccgaggacgcgatggctgccacggcggcggcgggtcgggccggaggcagcgctgccggggcgggcacggcgtccgcgaccccgaggccgaggtagagccgcactccgttctcccggggagggagtcgtctccccaaccctccggaaggaggaggagcccaagtctgagccgcctcagcgcggccgcccggcct

SEQ ID NO: 45103 - DNA, 425 bp, Mus musculus
  source 1..425: mol_type = other DNA
tgcccgccccggcagcgctgcctccggcccgacccgccgccgccgtggcagccatcgcgtcctcggcctggagcgtccccgcgagcctgccactcccgcgcgcccggggccttcccctcaggcgtgggaaaggaccgggagcccggcgcgaggttagccttgcgacccctgcgcgccgccacctcggcatggcgggcgaggcctcctccacggcgtggtaagggttttcctcttgcaaagccgccatctgagaaagaacaatcggaaaaacttttattccggataacgggctgttttatacaaagtttgaagtcataaaaggcgtgctgacacgcctgaaatccgcttccttccttttaagcacactgaacggtaagtttcagccggttccgttttcccgcagggaacccgagtccacccgcagc

SEQ ID NO: 45104 - DNA, 406 bp, Mus musculus
  source 1..406: mol_type = other DNA
gaaaacctttccggaagaagttaactaagatcggttagttccctaacccagcgacccctgaggagaagcagagcagggacacctgctgctccaggcgtgccaagcctagcatggtacaagggcccggcttccggctcccggcaggcccgcctgctccggagaccgtgccgggtaagtggcactgcgcctgcgcaggaaggcaggctgcgggtggactcgggttccctgcgggaaaacggaaccggctgaaacttaccgttcagtgtgcttaaaaggaaggaagcggatttcaggcgtgtcagcacgccttttatgacttcaaactttgtataaaacagcccgttatccggaataaaagtttttccgattgttctttctcagatggcggctttgcaagaggaaaacc

SEQ ID NO: 45105 - DNA, 565 bp, Mus musculus
  source 1..565: mol_type = other DNA
ggatatgccacatctgaattggtgcatgcaaatctgtacaattatgcatctaggaagtttcaattattgagaactttgtgttaaaacttaatgaggatttatgaattaatcaagctgtatttgggaaaacccatattttcatcattaaagataataaatggactctatattgtaataaaatcaaagaaaacgtttctttaaaagtcaatacgttcaaaagcttatgaatggaatgtaatcctggatccatttacttaaaattgaagcagatatccgacaatttacatactacgttagctcacattaggtacatgatggcctctgccaagttggtagtgttaccaccttggaaaccacgaagtcacctgaatttatgaactgaggcctgacccaggtccccagttagaaatgatcaaacgggcaccgctacctgcaagcgcaggtgcaggcgcggtctcgaccctcagcgctcggccggccccacggccagggtccctagctcgcgtgttccggagcgccgcgcaccacccccggggccttcaggttgtcggaggcggggacgcgc

SEQ ID NO: 45106 - DNA, 231 bp, Mus musculus
  source 1..231: mol_type = other DNA
gccagggggagcagggtgaggtcgcaattcaccctgtggcgtagggaactcgggacgcggggttccggacgggcgagcgcccgcacatgcgcactcggttacttagaccaatcagcgctggcgccgcttctgaagaatccagacgctgcataaatagcggctcgcgcggccactgatgacgtgacgcggcaacgggcctttggtcgcgtgcgcggagcgggggcggccctg

SEQ ID NO: 45107 - DNA, 253 bp, Mus musculus
  source 1..253: mol_type = other DNA
aaaacctcagaacctagtcctgaggttgaggttgctctgggctgggtctctggctaaatcctcagcttccagccccacatctgggcccgtgggcgccagggggagcagggtgaggtcgcaattcaccctgtggcgtagggaactcgggacgcggggttccggacgggcgagcgcccgcacatgcgcactcggttacttagaccaatcagcgctggcgccgcttctgaagaatccagacgctgcataaatagcg

SEQ ID NO: 45108 - DNA, 331 bp, Mus musculus
  source 1..331: mol_type = other DNA
cctggtccaggacatccagggcttgaaaaaaaaaaagatttaaaaaattctatttccaagggaacattggacttgcaaactttatatgccccataataaaaaaaattctatttcccaggcttcacctcactcaggaggaagtaactgcttaaaaaaaacagagtttgttaaaggaaattttaagcatagatttaaacatttatgaagttgattgcttaaatgcatatatgctgcaaggagtcacctctagtgctggcattactctgcacttgcagtcctaagcaccagcctctgccaggggcaaggcaggtgtcttggcctggcatgccca

SEQ ID NO: 45109 - DNA, 191 bp, Mus musculus
  source 1..191: mol_type = other DNA
ctagcatcatctgaaagattgccatactggacggtacaggtctggaggacattaattaattaatttttgttatttagtttttcatatgccactaagtctaccattaaagctaaacgctggcccctggtttatatttttagcaagctggtccttgttctccctggcagtgccggggctgactcgggggatcc

SEQ ID NO: 45110 - DNA, 477 bp, Mus musculus
  source 1..477: mol_type = other DNA
acaagaaccctactctagtcttcactgacctcatagctgaagatgaccttgaacttctgattctgacccagagcttgggagtttgtcacaatgtccagtttatgaggtatggagctcagaacttcatgttgtctctccagtcagaagtggtcttcgatgagggccgtctgcatagggccttgagttagcgtagatgagccaggctctcccgcttttttttttttttttttaaatttaaaatagagacaggggctaatcgattacgattacaggcctgcactgtcaggtctgactacacattgcgcttaacccaacacgcaggcgcgctggagctcgcgcgctcttcgctacccatcccccggggcgggggagggggaggcctgggtcgcgaggcgggccgctggaagttcccgtgagcctttgccgccctcacctccctggggtgaggagtggtctattcctagcccttaagaggag

SEQ ID NO: 45111 - DNA, 191 bp, Mus musculus
  source 1..191: mol_type = other DNA
gacattaattaattaatttttgttatttagtttttcatatgccactaagtctaccattaaagctaaacgctggcccctggtttatatttttagcaagctggtccttgttctccctggcagtgccggggctgactcgggggatcccaggggcttctctggatcagcccagtggccagtcactggtccttgac

SEQ ID NO: 45112 - DNA, 477 bp, Mus musculus
  source 1..477: mol_type = other DNA
aaatttaaaataatcgattacgattacaggcctgcactgtcaggtctgactacacattgcgcttaacccaacacgcaggcgcgctggagctcgcgcgctcttcgctacccatcccccggggcgggggagggggaggcctgggtcgcgaggcgggccgctggaagttcccgtgagcctttgccgccctcacctccctggggtgaggagtggtctattcctagcccttaagaggagggcgctcacgacggtctggagcgatgctgagcccgggcccagcctctcagctccgccttgtgcgctgcacagatctaggggcatcgcggggcgccgcgcgtgggcgacaactgacgacatccctagttagctgactgcagtcgtttaaagacgggacgttgacaacgtggccagggactccccatgtgggcacatacataaatttaagacgtgtctccatttagtggctggaactactagttg

SEQ ID NO: 45113 - DNA, 320 bp, Mus musculus
  source 1..320: mol_type = other DNA
aagcccacaccggtggctggggttccaacagctgtggcctcccatgaggtaagctttcagtattcagatgcaccagaagagggcatcagatctcccggaccttccgaagagcagtcggtgctctagagccacaattataagaacttagaccttctagttaactgggtcttaaaattttcacaattgaacccagttgggctggtttggctagttgtaaatgtattttagtaatttgaaaaatacttctcttgagaagattcaggccagtgttatatataacgcaggactgcagatctgtgctggcagcagctgactatctg

SEQ ID NO: 45114 - DNA, 449 bp, Mus musculus
  source 1..449: mol_type = other DNA
tcttcgatgagggccgtctgcatagggccttgagttagcgtagatgagccaggctctcccgcttttttttttttttttttaaatttaaaatagagacaggggctaatcgattacgattacaggcctgcactgtcaggtctgactacacattgcgcttaacccaacacgcaggcgcgctggagctcgcgcgctcttcgctacccatcccccggggcgggggagggggaggcctgggtcgcgaggcgggccgctggaagttcccgtgagcctttgccgccctcacctccctggggtgaggagtggtctattcctagcccttaagaggagggcgctcacgacggtctggagcgatgctgagcccgggcccagcctctcagctccgccttgtgcgctgcacagatctaggggcatcgcggggcgccgcgcgtgggcgacaactgacgacatcc

SEQ ID NO: 45115 - DNA, 390 bp, Mus musculus
  source 1..390: mol_type = other DNA
gccttttaaaaataaacatttgtttataaaccagattgccactgtaatctgggcagtctcagctgtttgcacagctggacttggctgcagtgccatgcaaagacgcgaccacagaaaggaacacccagttttccctctttgctgggtctttttgaaaaccctatatagatatgctcctagagtcttagagtaggtgcctgtgcctaaattgtaagtgggcccaataaagaacttctggtccagatgcactggtctaggaggacagctgaatcgagcccctcaaactgttagtactctgatctcatcctagtgagagttgggtagggctggccagaccatctcctgatcagagggaccctgacctgtcttggctgtccagaaaggactcac

SEQ ID NO: 45116 - DNA, 489 bp, Mus musculus
  source 1..489: mol_type = other DNA
gggcataccttatccaagcaccatgggttcccagggggttggtgacttaaaggtctcctcaactagagtatccagatctgtgtccgtttccaggcccggagaagaggcttgctcagtgggcattgagccaggcctcctcggacaatctgagatactgattctctgcagagcccactcttgagaatctagactctgcggcgaacaggggccccaagaggcgcagcacagtgtccggcagggggcgctgcaccagggacaaagcagggcgggggcgccgggcacccctagcccagagccgcgcggcgggaaggagcgggcgccgagacacgcggcggcgcgggggcggggcggccggcggggcggggcggggccgacgggctggcggcgagcgccgggacgggctggcggcgagcgccgggagagcgcgccggggcagagggaggagcgaggggagtgcgggccgcagccgcccccgcccccgccccgcgc

SEQ ID NO: 45117 - DNA, 696 bp, Mus musculus
  source 1..696: mol_type = other DNA
tctggcccagaccacatcaactatccctggggacttgtggaggagaggagcagggacaatggtccaacaggtcccctccccgcgaaacggggaccctgggcggtgcctcccggcgctctcctgtcacccccctcgtaggggcggggcgctccgggagccgccgcgccccccatgccccctccccgcgctcacctggcgcaggtgctgcagcagcgtccccgcctcctcccgccggccctggcgcaccatccgcagcagctcctggaccatgccgacgcgccggtgataggggggtagcccactgcccgcgcgccccgccttgtccccggcgcgcagcagcagcgacgcccagaagtcgggtcgttcgcggcgggggccgggcgccgcgccggggctggctctctccgccaggctgcccttggtctgccgagtgcccatgccgccgcccgcctggggctgcgcgcgccgggctaaggccgcgtcccccgccggcttcgcgcctccccggccgcaactttgggggaactgttgcgcgcgggaggcgcgggcgcggggcgggggcgggggcggctgcggcccgcactcccctcgctcctccctctgccccggcgcgctctcccggcgctcgccgccagcccgtcccggcgctcgccgccagcccgtcggccccgccccgccccgccggccgccccgccc

SEQ ID NO: 45118 - DNA, 323 bp, Mus musculus
  source 1..323: mol_type = other DNA
cagctgtacagatctgaactctttctcccaatggatctaatgagtctggagtctggttggcaaaagtgactttaaagtaggtttaacttaaccacagcaaatgaactttttttttccttgcaaagaacttactgcgattgcaaaatagaatcctgctctaaaactacagctttcatatagtttgaagtcaaaggatggttttagggaaggccaaaccatggctaaaagccatgtgcagagagagagagactttgtctcccacgtcccaacacctttttctctcgcgagagggagagatcccgctgtgccgctgagccactcgt

SEQ ID NO: 45119 - DNA, 244 bp, Mus musculus
  source 1..244: mol_type = other DNA
tttgtatgaatcataagcactccccatgctagccttgaatggttgtgtagactaggctggcctcagtttgtttgtttgttttgtgaacataagcagggaaagaaattacctaaattcaagaaggactttttaaaatgagtattatgatgtccaagagacagagaatttgtctgttaaagagcactgtggctgatgccaggccctttaaagttcccaggtccagggcctggggctcgggatggga

SEQ ID NO: 45120 - DNA, 817 bp, Mus musculus
  source 1..817: mol_type = other DNA
catcaactatccctggggacttgtggaggagaggagcagggacaatggtccaacaggtcccctccccgcgaaacggggaccctgggcggtgcctcccggcgctctcctgtcacccccctcgtaggggcggggcgctccgggagccgccgcgccccccatgccccctccccgcgctcacctggcgcaggtgctgcagcagcgtccccgcctcctcccgccggccctggcgcaccatccgcagcagctcctggaccatgccgacgcgccggtgataggggggtagcccactgcccgcgcgccccgccttgtccccggcgcgcagcagcagcgacgcccagaagtcgggtcgttcgcggcgggggccgggcgccgcgccggggctggctctctccgccaggctgcccttggtctgccgagtgcccatgccgccgcccgcctggggctgcgcgcgccgggctaaggccgcgtcccccgccggcttcgcgcctccccggccgcaactttgggggaactgttgcgcgcgggaggcgcgggcgcggggcgggggcgggggcggctgcggcccgcactcccctcgctcctccctctgccccggcgcgctctcccggcgctcgccgccagcccgtcccggcgctcgccgccagcccgtcggccccgccccgccccgccggccgccccgcccccgcgccgccgcgtgtctcggcgcccgctccttcccgccgcgcggctctgggctaggggtgcccggcgcccccgccctgctttgtccctggtgcagcgccccctgccggacactgtgctgcgcctcttggggccc

SEQ ID NO: 45121 - DNA, 303 bp, Mus musculus
  source 1..303: mol_type = other DNA
gtggaaggccagggccctgtccactgggtggcttctcacatggccacctgcagccatgcaatggtgcttatcaccccagcactggggcaagagtctagaatattaaaagcagataaagctagattgactatgtctgtctgtctgtctcttacattttggacccctttaaaacacgtggtctccggaagagcctatgccaagtggcaaggcagttctgagccttgtcactgtggctggctactagccaatctggaggagcctcgtcctgtctgagtaactgagcttcctcgggagggacagctg

SEQ ID NO: 45122 - DNA, 463 bp, Mus musculus
  source 1..463: mol_type = other DNA
tggtgtttagcacaacaatagaaacaggagctaagacagttattgctgaattttttcttacttagccttatttattaaaggaatacacatggtgacagtgacaacagagagacagtgtgtagtgagggcttacactgccctaatgtgtgcacagtgtctcagttcccacccataaactgtgggcagctgggctggggcccagactcagaagccataccctgggtaggcagctgactgtgtctacacaacaagtgggtagccctgaataattaaataatttacattattgttaagcacctaagctgtatttatgaatatttaaaagtccttaataacagcaactgaaagatgctaacattttttttaaatgtgttatgttttacatttggttaaaagaatagctgctatagaaataagatgaccagctcttccagaatatacagcaactgtctctactttctaa

SEQ ID NO: 45123 - DNA, 338 bp, Mus musculus
  source 1..338: mol_type = other DNA
aaaccccgggttctgtgaagatatcattacagttgcaaagatggctttaaactctctgaatttgaaaccaaaaaaaaaaaaaaaaaaaatctctgaattttaggtctaggcattcatgccatcaaaatttgtcttgtccttcccactttacagccgaggaaggatgtacacagaggcgcgatactggcctctcttcttgtctttctcaattttctttaacatttaaatcgcttaagaaagactatactaaaatacaatacatttacgggcgtccctgctggtggtaatgactcacagtttgtacttctttggtagcaaaaaacattttccattcataa

SEQ ID NO: 45124 - DNA, 236 bp, Mus musculus
  source 1..236: mol_type = other DNA
ccaggtacttgctttgacgtgctcagaagggataaaagcagagctctccagtctgtcttgaagataaaattctttgttgaactcctggactcacttgtcttcagaactggtcaggtctggttcagattcttcattctctgagtctgaacaccccgaatgtcatttatgcagagtgcctggtcttggactctctgtctaggtccagggaaacctgacaactgctgatgtcacaatgc

SEQ ID NO: 45125 - DNA, 308 bp, Mus musculus
  source 1..308: mol_type = other DNA
aggattccaggaaatcgcttcaagtaaacctcttccgttagatgagcatctctctgttagccctggctgtcctggtacactctgtagaccaggctggcctcagaacccttttctgcagagggcctcaccaaggtcactacacatgttttcatggactcttgctaattgggcacatagcaaaaggaacctgactcgttggaatgctgtacagtgattccttgcactgtgtaacactgtatgtatataccaattgcagatagctaactaagaatgggacactgtctctttaaatagtagaggctgagaac

SEQ ID NO: 45126 - DNA, 355 bp, Mus musculus
  source 1..355: mol_type = other DNA
catggccaggactccagccaaggctgggagccaggccagcttgcctcaggcaaacttcgcctggagaatctggttttgccaagcttaggaggagccggatcggtcccagcctaatgtacggtgttttaaagaagttaagaccccagcgcaggtcaggtgcgccaagacctgaggtcctggctgctagtaatgggcacagttcacttcagtgttcccgagaacccagcactgcgcacttgggtccagctttaagtaaaagtcgaggtctgtctggcagtcggcgccccgcccgcccgcctgccccctctcctcagggaggcccgccctcccgcgggcgtagttcccgttaaagggg

SEQ ID NO: 45127 - DNA, 291 bp, Mus musculus
  source 1..291: mol_type = other DNA
tttccaactctcaggccccaagaggtaacatatcatgttggcagcagtacccagtcatgcatccagactaagcatgggaccgtcaggtggcttgagacaagcattctgtgctctcttaacagttaccagtgtgaattgttagggctggctaaggagtattaaatgtggctaggccaatgactgccccaaccccctcacctggtaaaagaaattttattaggtcttgggtgtcgacagaaatattatttgtgtttactgaaaactttccagtgcctcctggcacggttacta

SEQ ID NO: 45128 - DNA, 319 bp, Mus musculus
  source 1..319: mol_type = other DNA
gatgccggcttaattgtttgttcaagagaaagaagttagaacatctatcatgtgactttaagtttcaactagtgtctttaaactaaactgtccctcctaaatcagggtctgttggaggcccttccctgagccccgattatgaaactgggtttgcgggtggggctgtcacataggcaactatagccaagactggcctcagaagcgagtgtaaaagcgcgcgagcgccactcaaccgggtgggacctcttgctgctcgcgcctcctggtaggtagcgcagcccgtcactcggaaggccgggaccgcccactccaccgtgct

SEQ ID NO: 45129 - DNA, 599 bp, Mus musculus
  source 1..599: mol_type = other DNA
agaatacttgtcaaaactaatttagaagtctcggatagggcccctggcgcatctattccaagtgcggcgggctcagcctagctctccttggggccgtccagggggtgcctgtggagctggcggggctgaaggctcttcaccccccggggcgcagggaaggcgcggaaccctgcgcgcgggaagctccggagccgggcaatcctccagcccgcctgctctcccgctcccccagccgccagcatctaggccgagccgggggcggggcggctgctctccgcgcggggcgcgctggggtctgggaaaccagcctcgggtggcgggcgaccccaggcctctggctgtgagcctggcgccgcccgctgagcctccagtctcggggggaatccaccctgtgactgggtcagggacgtggcctcggtagcctcccaagtcccaagggccctgaaaggcgcccaggctgggcggaggcttgctgtggcctcggctcctccgcgcgcctcccggggtgatcgggacgtgcgcaccacttgttccaaaggcaaaagatgggcggggatagggatggcggcggccgccccctcccggccagctgggccccc

SEQ ID NO: 45130 - DNA, 383 bp, Mus musculus
  source 1..383: mol_type = other DNA
atcagagttccaggaacagtgggtctaattagtttgtactttgtaatatttcacttaacacagcatttcaaagtgctcgaaaaacagtggattgaacagttgttaacttttcagttattcaccttagtctaagattaatttagtgatgaactgtgatgggcctcagaaaagcctttctttagcctctcagtggcccctgatcagcacctgaggtgaaccaaactgcccttgtaagtcatgttttcaggggactgccgggccgggccggactccagagccctaacccgcgggctccgacgatctgtccctcccgggcagagagcaccatccgatctttataagctccgctagcctagctttcagagagcgctgggagccggaag

SEQ ID NO: 45131 - DNA, 315 bp, Mus musculus
  source 1..315: mol_type = other DNA
gtaacacatcacgcaaaactttatcaacaactggttatacggatttggaattgtacttattattttttaaatataatttctgactcttcatctttttaaataaatccaaaggagcctgccaagaactcttgggaatctgagaacccccaatccggcaaggggtggactggctgggcgttagactcaggcaatcatacaggcgctgtcaatctgacagcgcccgggagtgcgaggaaggggcgtctcctctgtcgtccgcgccctctccatgcaccctagagcggatccccgcgttggtctgtcccacgtgtggcg

SEQ ID NO: 45132 - DNA, 494 bp, Mus musculus
  source 1..494: mol_type = other DNA
aatgactgagcatcaccaatgcacataggcattgctctgggcatgcagactatctttactttcacaaagtgtttctcttactgggaggaacacactaaattgttgcacatctgtactgcaggtgtgaacaattacaccgtgtgttattcatgataaattaatatgatataagaaaagaaggataaagactcctattttagttagagtgcttcccaggagcttttcaagagtttgtgataaacacacatctgtcaaaagtccttctgcagttatcattatcatggtgattaaggtaacactttaagcccaggaaccgcggctcaggtccaaaagcttcaggtgaccctaaaggtcacctccctgccaagtgacaagccaagggcttccaaggttgcaggcggccggcaacacggtccataacgtactggtgcagcagtccccaggaccccaggacgcctctcacctcaccggctcctgggcgccccctctgagtg

SEQ ID NO: 45133 - DNA, 389 bp, Mus musculus
  source 1..389: mol_type = other DNA
ttggcttatgtaattaatatacacaatcaaaacaaaccaacttatcctaacatcggatttttttttttggggtgtcctaagtcgactttcgaggtcaagataagcactgttaaactatttccgtcttgaagtaaaacactacgaagtttacttagtcttttcatctacgccaaaacaaagaatatcatctgaaatgtgttcttatggtggatcaaattagccagatctatctcccatgagatagaacaatgcaaacttggaatactttgcttccgccaagtgacagtaaccggaaaccggtgaggggggcggggcctccggcgacgctctagctttcgtccgagctccaaggctcgcgggcagctagcgcggcggcgcgctgattggtc

SEQ ID NO: 45134 - DNA, 430 bp, Mus musculus
  source 1..430: mol_type = other DNA
tcctaaaattgctgattaaatatgtgagattctaatgggaagactcacatttgtttgatccaattctgacttgatatatataaagatgacaactaattgagatcacatgtgattttctttcttttatatttagacaacatgcaggagttaattttctcctaccgtgtaggtcaataggcttctttacccaaccagctggtaaatgccagtgggctgcccaggttactgattcaatcttatgtaaacttttggttacttagatgcatgctacgcctagttaaggtgactttatacaatttaacgaacacacttcatatgacttgagagaaaataggagtcagacgtttactctgttcaagcacgaaagtatttcctttactacaaggctaaagcctaaacggtccctacaaactttggacagaggcacggg

SEQ ID NO: 45135 - DNA, 207 bp, Mus musculus
  source 1..207: mol_type = other DNA
cttctgatgtgtttgaagacagctacagtgtactcacatacataaaattctttcactgcaacaggaaagcatggggcagggacccctccttagtggtagcttattcagaaatctgtccgggacctgcagaccatcttgctctagatacactagatgcagagcagagtctaagaggctttgcatatcttagcaagctctgtgcctctg

SEQ ID NO: 45136 - DNA, 367 bp, Mus musculus
  source 1..367: mol_type = other DNA
tgtatctgggagcgcatataaagttgcaaatttgtcttagaacacccaggcaccccagagacgcgcatcctcagcgcctctttgggtcccgctcagtccccagacacaaactttttgtgtcagccgctcagtagctgctccaggcatcggtctcctgaagcaccaccgttccagagccctgcagtaagctggggacaccagtcgccaggcgccacctgcacgccgggcgccgcctgcagccttcgggcatcctgcagagactcccgcctgggcaagcagccttggcgcactattctgcaaagagttaagagccggcttcctggggccgcgtctggtccccaggccccgctgatctcctgtcagtagt

SEQ ID NO: 45137 - DNA, 292 bp, Mus musculus
  source 1..292: mol_type = other DNA
gatactagaacagatacctaaatgcattctattaaatttcaatgtgtaaagagtgtcacaaacagctctagaactgggtcaggctgcttgtgatcagatgaaaaaaagttaaaacctatttaaaatgtggaaaaattgcttcccaatattttaacagatttcactgcagaggacttgaaagaccttgaggagcttatggttctgtcaacaaaatgtgattacttttggtactttaatccattagctgaaattttgtggtacagcaacaccactgctctgttcttgctgggcc

SEQ ID NO: 45138 - DNA, 526 bp, Mus musculus
  source 1..526: mol_type = other DNA
aataaaaaataaaaataaaaacgcaactatattatattgttttttttttcttttagtattttatttgatgtttttcatccttaaaaccatttttagagaagattctggaacccatccataaaccaggttcttcttctggaactaaaatataacttccttcaaagaaagccttgaaaaagagatgcgtttgaaggccatcacagcctctttcttcccacacagaataaattaacaaaatatttgggaacagagagctctgggttgagaccacagttattgtcatctcttctgcagtgatggatcagagactggacgtgacttctgagatctcgtagaactctacgtgttctctgagaggccctgatccaggacttcaggccctgccctcagtgctgggcgctgcagctcaacctgtattgcaggctgcgccgggggcgtgacggaggcgtgcccggggcgtggccaaggcggcgcacgccgcgccctcagcggagcgagaggccgagcttgctgcattgcagccgcc

SEQ ID NO: 45139 - DNA, 317 bp, Mus musculus
  source 1..317: mol_type = other DNA
tctctccctgaatttcagaaggaaatgtgtgtatagccagtcagattctcagaggctgaatgttgttcaactaaagcccaacacgctttacaggaaccttattagggtcccgaccgaggcgccaaggacttactttgaccatggtctagggggagggtactcatgactgaattctgtcaactgtgataagaggtgactgctgtggcccagcgcagggaacccggagctccctgctccctgcgaggggaggggtcaggccggtctcaggccccgccccgccccgcccctcgctccgccccggcgccgcgcgtcgccag

SEQ ID NO: 45140 - DNA, 300 bp, Mus musculus
  source 1..300: mol_type = other DNA
gtcatgtcctggctttaccactagggccaaagttttagagaagtgttaatacgttgaacgcatgtgccgtttcctagagagggccagcctctagaaggaaagctttcttcctttgggaaggtaatggcccagaggtgggacagattctaaacttctttgcaaaggtagatactatttaaagcagatcaggactcaggcctgacccaaagctggttcatattgtggcctggctttcaagactgtccccagctggcacccagcagatcaccaaccagggtcttggtttactggcagccctgc

SEQ ID NO: 45141 - DNA, 731 bp, Mus musculus
  source 1..731: mol_type = other DNA
caagtcagagtaggtttaaccctgccgctggccggctccagagggctcactctggccttgctccggggtgaagagtcccccaaccgggcgcccaggcgtggaaacgtgggcggcggcgagcggctggcctccctccccgccctccccgcgcggcgctcccgcgtgtgcggctgtgtgagtgcgcctctctcctatcgcacacgctccggcactagtgcaggcggttcccggctccgctcactcgctccggtcgctgcgctcccgcctagccgccgccgccgctgcagtcgcagcccggcatggtgagtgactgaggtgcagccgccgcgcaccccggctgcccgccggaccccagcctcagtcggcagcaccgtccccgggctcggcggcccggtggcttccccaggggttctccacgcgtcctcgggacgcactcctcgagggctgagcgctccttctccgcctgccccgtctcgtcccgcaggacctgcccggacgggaccacgccgccgctgccgccgcctccgggagccgcgcttcggggccggcctgagccgagtcgcgcggagccgccgctgccgcgggcgggggatggggctgcccgctaggcgcgcggagcccgcagggggagcgcggagccggcgcgcagcctgagagccccgcgcagcccgcgccccgccgctccgtgcgctcccgccgccgcccgcgcctcgatggcgccatctccccgc

SEQ ID NO: 45142 - DNA, 304 bp, Mus musculus
  source 1..304: mol_type = other DNA
ccctgggtcaattagaccattgtccagcacagctgcccttttgtactggagattattttttacaataatttattataaatgtctgaagaggacacgcatgcttatttaattgcaaatttaaatgaaacaattaaaaagtgtttgagttatcttgggaaaaaaattgtattgcattttaactttttaaattatatatttaggacagagtaagagacagacaaaagacaagcctgtgcctgtagtcttcagagcacgtctagtctaccagaccagcttgtgcctaccttattaacttagtggggcg

SEQ ID NO: 45143 - DNA, 317 bp, Mus musculus
  source 1..317: mol_type = other DNA
ttcatctttgcaagtcatgaaaatcaaaaggcttgagacggaagagcccatggctttgaacttttctcagaatagctgggagaaagacaaccaattagtctggccaccagaatcttaaataatactgccgaccactggcttcccccacgcccgggcagacgggctgattgtagcatacaaaaaagatgacctatccccgaggacagggctgctgaacctaggtcaggatcctgcagaaaaacttcattaatttttcacaagatttgtctaatagtagcgcaaagagttaacccattaggccacatcctggtgagctc

SEQ ID NO: 45144 - DNA, 148 bp, Mus musculus
  source 1..148: mol_type = other DNA
tattgatccagcatgctggggtcatcctgaaatcaggatggagaaaaacatcttgacgtttactaccacaaatcttacattgtggaattttctttaaaagcaatagccagcttggtctcttatagtgagttcccaccaagctagggct

SEQ ID NO: 45145 - DNA, 297 bp, Mus musculus
  source 1..297: mol_type = other DNA
gctcaggaagggcctcatctgaggcttcgtaagcatcatgataaaacacgtcacatgcaaacatgtgacatgctggagcctgtgagtcatgcctgggatctttggcccccacagaatgcaatgcaggcagctaatacaattagtttttaaagccctcaatttcccactgggaagagtgggcacacagccttgctgatcccagcaatgcccagtccaacgaacagtgatgtcatactttgggatcattcctgaaccgtgaaacagttaaaggaggacccacgtgtacttccttcttgt

SEQ ID NO: 45146 - DNA, 334 bp, Mus musculus
  source 1..334: mol_type = other DNA
ttccaagtcttccctttctaagaaatgcatagcaaatgaagatgggttagaaatataaatatgtataatacataaataaatatcttatatgactttaaaaagaagcacttaaatactaattccagcactatttagcctaaccagaacacgcgcgctagcgcgtcctttttcttgtttctctgtgtagccctggctgtcctggaactcactttgtagaccaggcctgccttaaaggcgtgcgccacgcccggcttcatttgcttttttaatgagagaaagaataagggaaaagggcggggagggaagaagggctcgcctcgcccttgtatccccg

SEQ ID NO: 45147 - DNA, 418 bp, Mus musculus
  source 1..418: mol_type = other DNA
ctagttaatttacaaactaattcatggcacgccaagcactgtataaaagtgggtgtggcaatgcacaccaatcttatgatcctgaaaactaacattgtgttatttctctgtactctttaaagtcgagttgtaaccgcgcggagttctgtcaaagttggaactatccatggccctttcacgccaggaagttcctgagattgcactcaccccaggcttcgggcggtgagacccggcttgaccgcccttgggctccggaccggcccccggcggtggcggcccagcgctgaaggctctgctccgcaggcaggagcacgcttcctccggtcatccctgagcccatggccgcgagggaacagacgccagagctggcgacactgcgacctcaccactgcggcgcgctcgagcttccgcttctgcc

SEQ ID NO: 45148 - DNA, 362 bp, Mus musculus
  source 1..362: mol_type = other DNA
gcatttaaaaaaaaaaaaagtgctttaattaaaggacggatgttgttatacacacagaggtggagatcatttgctcagcgcgtgcactgcaattcaacacagtttaaaatctgagacaggccttccttattagcaggcggcttgtattacagttagcaaaagttatgggatgacttctaatggggtccgagacctcgcagttccacccggccggtttttagaccgggcagtaggaagggatcccctagtcccttgcagctgggaggagcgaacccggctagaagacccagggcccagccgccgccaggcccaggccaggatgagcggcctccttcggcttccggcagaagcggaagctcgag

SEQ ID NO: 45149 - DNA, 340 bp, Mus musculus
  source 1..340: mol_type = other DNA
cccttaccagtgtatgggtaggctgtaagaggacaaatgtcaactgtaccttaattctcttgttaaggtttaattttccagtcctgatttagaaatgacccagcagctgtcactgtgaacatgttaagtaaataatactgcacaagttttacagaacaagttcaattctactttatcttcgatgagctttctaagcaaagatcccattgtgctattcccagctttctacagttggaaaaaatggttttatatatacttttcccttggcaacggcgaaaaattctctttccaaatatagaggaagaatgagcccagggggttagtggtggcctataaaagc

SEQ ID NO: 45150 - DNA, 246 bp, Mus musculus
  source 1..246: mol_type = other DNA
ctaaaatgcttttctgagttcgaggccagcctggtctacaaagtgagttccaggacagccggggcaacaaaaaagcataattacagatgatttattggtgaagacctttccttatcctgaggctaaactgagaagacagggaattacactgtcaatttagactgcatttataaagagagcaagactaaaggtcttaaaagtcttcagttaggcggacttggtgggtgccaccaaagccttcctgtg

SEQ ID NO: 45151 - DNA, 662 bp, Mus musculus
  source 1..662: mol_type = other DNA
tttttccctaacagtttaaaaaagatattattcagaagctcgagataattcagtgtttaatattttttcttaatatggtagatattatatttgctatattttattaacaaaagaaggggtggacatataaagagcgtcatttatgtagatagtcattttttttcatgatgtactatgatataaaaaacattgggaaaattttacaactagtaagtattcaactttttcccccttgcatacatgccagtgaggaaggaatgagaaacagcttggctaaagctgttgttaatttttttttaataaagccaggaaattctgggaatgttaaggaaacaaagagaagatctttctctctgcttcaattgttgaaggcatgcaacttaatttgtgaaaattaagccttgtaaaattaaaataagtgtattttatttatatagtttaataggagaaatattccgacggcagccaggtatcctgctggctggccaccgtcttcagatcatcttctcaaattatccataggagattttactcaataagaaaaatatttctaattatatccaaccattcttaatatgaatgagaattatgcagaattgccaagagggtttttgccagacaattccttttgacttaagaaagaagaggcagttagtaaaaga

SEQ ID NO: 45152 - DNA, 427 bp, Mus musculus
  source 1..427: mol_type = other DNA
tctagatacctacgttcacacatggcaatctgcatgttcaggtgttatttgtaagtgaaaatttaaatatataccagaaatcccattttaaaaaattttctcacatccattttcatagaggaaacaggttttcacaagcaacttgaaaacaaaagcagctgtctttcttcaaccagattttaaaattaagctttgaagcatccttcaaaggaagcaacagttgttgcagctacaatgagccttcacagagggcactcacggattccgtcacaactcaaattatttataggagattgattcatatacttaacccaatgtgagagggaatatttctaattatatccaaacatccttaatatgaggggaattaggcttggagaccttccttgccaaaaacacattttgccaaatatgttttaagaaagag

SEQ ID NO: 45153 - DNA, 390 bp, Mus musculus
  source 1..390: mol_type = other DNA
atttcctgtcatggcctttcaagggcaccgtggaggccctgtatctccttccgtgatgcagcagaaacactcatgggtatcacacagcagtctgttgcccctgcagtgcaccttcagactttagaagaatctatcaccagttctgtcactcggtgcttccagtcacagtgtcagatctaaagttcactccagactccgtaatgggctcgttcctgtggaaacagctttataggcacgaattctgtgatgaatgatacaacacccccctgtcaaattatttatagatgacaagaaatatttctaattatatccattcacagccacagtcagtgaatataaaatccgcagctaggacagctgaggtggctgctgtgtttgcagaacagcctc

SEQ ID NO: 45154 - DNA, 444 bp, Mus musculus
  source 1..444: mol_type = other DNA
tatagaaattatatctcaatgtaaataactttataaaggaagattttaactttaaaagcatagccataaaatattttctttaaaaaataaggatgttaattatactaatagcctgaatcagctacattaacattaaggcaggttgttaagacatgagtgtatataaagtatgaccccttttacatccctcagcatgctggcagagggctccaaggatgagccctggcgacggccgcatctgatcttcaaattgtaactcttaagaactgcattctcagagggcattgtcaaattatttataggagattggttcacatactctgaatgatatgaatacttctaattatatccgccaagtgttgagggagctgcagcatcagcacttctgttcctatataagcagggctgccccctgggggcaagcagcaagaacccagtggcctg

SEQ ID NO: 45155 - DNA, 500 bp, Mus musculus
  source 1..500: mol_type = other DNA
gccaataagatatatgtggctacagaattatacacggttgccaaagctcttaagttaaaaaaaatcataattcttacctaaaatgaataagttaggccatatagaaattatatctcaatgtaaataactttataaaggaagattttaactttaaaagcatagccataaaatattttctttaaaaaataaggatgttaattatactaatagcctgaatcagctacattaacattaaggcaggttgttaagacatgagtgtatataaagtatgaccccttttacatccctcagcatgctggcagagggctccaaggatgagccctggcgacggccgcatctgatcttcaaattgtaactcttaagaactgcattctcagagggcattgtcaaattatttataggagattggttcacatactctgaatgatatgaatacttctaattatatccgccaagtgttgagggagctgcagcatcagcacttctgttcctatataagc

SEQ ID NO: 45156 - DNA, 364 bp, Mus musculus
  source 1..364: mol_type = other DNA
caagacataagattatttaatagcagatacaaagtagttttatttggattttctcttcaaacctcagagcactgtcctctgtgtgagcatcacaatgccatatttagcatagtttgaaagagaatgctctcccagctgacctagcaggcaggtcaggtatctccttcctccctctgctcagtcaaagaggacagcttcccccaaagagatatagtgagttccaggctagtctggaccacatcaccctatcttgattgctcctttgttcttagggttccctggaacacgaggagagcaagagtccagctagataaaatctgagcagatggagattcagctgagccatgccaaccgccaggtggcg

SEQ ID NO: 45157 - DNA, 274 bp, Mus musculus
  source 1..274: mol_type = other DNA
tgcatgtgtgaacacagccatctgtgtgtcatggcatggatctgaatttaggttctcatgctagctcaacgtctttacttacagcctttggtgatagattgcagctggagccaggcccaagccagagccctgacttaggtttgggaagaagttggctgaaacttctcccagctctaaaatgcagtagacaaaggtgcccttgttcctaagccatgtgaaagaacagagatacatcccccagggtgctcagcgcactggccccggggcagctgct

SEQ ID NO: 45158 - DNA, 256 bp, Mus musculus
  source 1..256: mol_type = other DNA
aagaggagtgtgtcactgcggaaggcagggccaccatgggtagctagcattgtgtgggagtcctcccaggagaaagaatagcccagttagtctattcccaggctggccttgaactcatgactaagatatcccaggtgtgaccatcacacctgtcccagatgagactaatccatcaagcggcttccagccatgtcctggctacttctggatgttgccaatcacagcgctgggctcattagcagtcattgtcatggca

SEQ ID NO: 45159 - DNA, 298 bp, Mus musculus
  source 1..298: mol_type = other DNA
ttccacttggttcttcaatggaaagactggatagaagctagagatcatgagctttctttgagacccctagtgctaacaggaatagccctcagatgaagaaaatgtggttagtaagtagccatcactgtgttcagaacacagttgtttaaacgcaacggaggtgttgtctctgagacaggaaaactcatcttgttactatggcatagtagtaaccacggagctctgagatgcatgggggcccaaccatctgggcttgctgaggaagtcccaggcagctgggaaaaatctcccaagattt

SEQ ID NO: 45160 - DNA, 526 bp, Mus musculus
  source 1..526: mol_type = other DNA
gtgtgtatatgtgtatatgtatgaatatatgtgtatgtacatgtgtgtgcatgtgtctgtatgaatatgtgtttatatgtgcatatgtatgtgtatgtttctgtgtgtgcatgtatatgtgtgtacatctatgaataatgtgtgtatgtgtgtatatgtgcatatgtatgaatgtgtgtatatgtgtgtgtgtgggcatatatatgtatgtatgaatgtatgtatatatatatatatatatatatatatatatatatatatatatatatattgtgtgtctgtgtctgtgtgtgtgtgtgtgcacatgtgtgtgcacgtgtgttgttctggcagtggagataacagcacttccattctggcagacagtttggggttgtaggttaagtggtagggctgcctttagaccctaagctcccggctcttcgaggatgcttggtagggtccctccttgttcctttcttctcaacaagcacaggaaaggtaagtggcgtgcccctcctccctccaaggactgggcagacctggc

SEQ ID NO: 45161 - DNA, 392 bp, Mus musculus
  source 1..392: mol_type = other DNA
tgagctacaaactgatgagaaattcattttgcaagaccttgcctgattaattataaacctgacagttaaggcagccaggcagtgcaaatgtaacctattgtgttatttaaaaaaacaaaacaaaacacccagttcaggtcctggggtgaccggttgcaaaggaggtggcgccacctgaccgcatgcacctgagcctgggctccccacctgcacagctgccagcgcgcgcctctcgggacacctgggcacgaacaggggcagccagagccagggctttgcttcccgggagtgcattcccagctccagccgcgggggcgggagcccggcggcgggcgctgccctagggccggattcccgcgtggggcgtggcgtggcggccccgcccctggctc

SEQ ID NO: 45162 - DNA, 275 bp, Mus musculus
  source 1..275: mol_type = other DNA
atatataaataaatattgagttcctcatataattaaattatttaacatcttgaattatttaattacaaaagagagcaatctcagaataagaaaccagtggttctcaacctgtgggttgtaacccctctgggagacaaatgactctttattcataacaaaattaaagttatgaagtagcaatgaaaataatttaagaaccactgctctaaacagttctctttgtgcggacaatcccaggagttcctggcatcgactcccggcccatttaaaagtcc

SEQ ID NO: 45163 - DNA, 635 bp, Mus musculus
  source 1..635: mol_type = other DNA
tctctgccagtccctcggcaactcaccaggggtccggggccatggtgcagtctccgcccgcagctgggacacttcctgctcgagcagctgccgtgcggctcattccccgcagttcggagagtgcgcgacccgaaagtgacacccctaagggagggtgcaagaatctatttttgttaattcacatgaattgctggacgcaagaaaaatagttaaattgttgagcagaatcaaaacattttctctgtatttttcttcttaattcaaaacagcaagacaagctgggtgtgataactcaagcctggaattccagcacttggatgatacatacaggcaacatatgtaccatacatgcatgaatacatacatacatacatacatacataaaaatagttgcatactgtactaaaacgtttttagtgatttttttaaatttttcttttaaaaagaagtatcaatgccatgttttttatagcaacctattcatcaatttttaataatcatcacgaggggcttaattgtatagtttttaaaaagtcacagacctgtatggataaaatacatactaaggaagttcaactcaaacacagtgggctgggtttctgctcctgcatgaacctagcacgcatgcgtgcgcc

SEQ ID NO: 45164 - DNA, 587 bp, Mus musculus
  source 1..587: mol_type = other DNA
gcctgaagctccagttctgctacatccggcgcacgcatgcgtgctaggttcatgcaggagcagaaacccagcccactgtgtttgagttgaacttccttagtatgtattttatccatacaggtctgtgactttttaaaaactatacaattaagcccctcgtgatgattattaaaaattgatgaataggttgctataaaaaacatggcattgatacttctttttaaaagaaaaatttaaaaaaatcactaaaaacgttttagtacagtatgcaactatttttatgtatgtatgtatgtatgtatgtattcatgcatgtatggtacatatgttgcctgtatgtatcatccaagtgctggaattccaggcttgagttatcacacccagcttgtcttgctgttttgaattaagaagaaaaatacagagaaaatgttttgattctgctcaacaatttaactatttttcttgcgtccagcaattcatgtgaattaacaaaaatagattcttgcaccctcccttaggggtgtcactttcgggtcgcgcactctccgaactgcggggaatgagccgcacggcagctgctcgagcag

SEQ ID NO: 45165 - DNA, 381 bp, Mus musculus
  source 1..381: mol_type = other DNA
aataaatacactaatataacaggtggatctccaccagcctgggccaaacttgtctaagttggccagcggcagagctggctttggcatgcaagtgacgctagtttgggttctgactgaaaacagaaatgcagggccttgcctttagacagcaccatggtctgcagaccatgcagaggaaagaaggcagccttcagacaccttcctgcctctgcaggcagactatctagtccctctgcatgccgcttcctcaggataatgtgggacatgtgcacgtttcccagggcagcacggaagagcatcagcctcctgaaggcactcggcgcgctcctccctcagacagaaaggccagtgctacccaggcgcgcctgcgcacgcctctga

SEQ ID NO: 45166 - DNA, 260 bp, Mus musculus
  source 1..260: mol_type = other DNA
agcaaagaatagctcttccctcccagatgttctgtcccatactggaccagaacctgcatcctccaagactgcaggctagtgtcctttgcaatggagactagagtccctggtgcactagacactggctaacctggctgcccagatccaggacagccatctcccctttctggactggctggggccaggctcaaggctggggagggatgcttgcaccagcccccacctggctccctagggagggccactttatgtgggcacag

SEQ ID NO: 45167 - DNA, 207 bp, Mus musculus
  source 1..207: mol_type = other DNA
gagtcccatggcctcgatggtttttgtttgtctgtttagagacaggctagcaatatgcagccctggctggtctggatctggatatgtagacaaggctggccttgattctgcctccaaagcatctggatcaaaggcatggaccaccacacctggcagccgacaggctttgtcacagctagcccgacatcgccctcatgcccaccgtag

SEQ ID NO: 45168 - DNA, 288 bp, Mus musculus
  source 1..288: mol_type = other DNA
tcaggaaaagaaaaaccattgggtttttacaacaataacgttgaccttgtggtcggttctagatctactagtttctaggaagattcctgtagacggaatagaggaatcagggtgcttactcctcagcagtgcaggccttttaaggcgagaaggaagcagctcatcggagcttcctctttctagctgtgttactcagtactggtacacaagcgcaggctgctttgagtcctaaactcgcgagagagcccggctgggcggctagccctggtcatacccccccgcctcccc

SEQ ID NO: 45169 - DNA, 345 bp, Mus musculus
  source 1..345: mol_type = other DNA
tgggatacagctcagtgaccctaggtctgtcgagaaaaaaatctggagccatttctcatgacctggatgccactgaattcatgtgtggaaacctttacttggctaataaactatttcttttgacctctactgaggttcctctactgaggttcaaagccagaagaagcattctattgagtgtgtacattgtgtacatactaggattgaatatatatatatataaatgcctttctgcaatgtgcagatgtcaggcctgaggcagtccagtggcgtgcagcacagtcaacaggtgcgtgggctccgcccccgccgcgtctctctcttggggcggggccacttccggga

SEQ ID NO: 45170 - DNA, 535 bp, Mus musculus
  source 1..535: mol_type = other DNA
tattgtgggaatctccctagggatactgccaagtcagcttcaggggaccctgggagaactgaactggccccatctctgaagttcagtgcgtccgagcttcttggcctttagcctcgaatcaccacagcttccaggcctaaaagaaaattggcagtgacaactctgtgaggtttcccctagagccaacgcctctggggccgagtgcccataggggcaaggccctgagcgtagtgccaccggggccaccagtcttttggctgggaccgggagggagaaagccgttctcgcccccaccccacccccacagggtgcgcgccggccctgccccctctccggggtttcgcgggcggctgcttgccgacgttactggccggcgccccgcccggcggccccgcctccgcgctcccctccgccccccactcctagcgcgagtggtggcggcggcggcagcggcagcggcagcggcgggcggcggcagagccttcgggggcggtgtgcgccccgggcgggcagggcagcactcggaccgcggcgg

SEQ ID NO: 45171 - DNA, 395 bp, Mus musculus
  source 1..395: mol_type = other DNA
tagcctgcaagctctgtccttggctccagcccagcaatcctacctcagcccgctgggaggaagggcagggagctgttgtacacagctttaacctcaagtcaaataagtatttaaatatgcatgtaagagtattttatctgtacttaataaactccgtcttataataaagggagaccgggagtcagcttcacagatcggactcctctgtcaggctccctacccggtagagcaactggtatcagagttcctgaaaggtgccctcgggaacagagaggccacctcaattcctcacagcactcaggcagcagaggcaggcagatttctgagtccaaggccagcctggtctacagagtgatttccaggacagccaggattgtgggtgcctcagaaccagg

SEQ ID NO: 45172 - DNA, 269 bp, Mus musculus
  source 1..269: mol_type = other DNA
ttactaagttatccagccttggtcttcctcaagaagcacatttggaaaaacaggagcaggacggttcctggacaccaatctgtccctgagcaggcacgctgccatagcccctggggagatgcactggtgccgtgaacccctcttcagcaccacttctgatacagatgatgaacatgggccctgttaggctataaatttcaaaagaatgggggaggcaactctagctcagcctggagctaaacaagttaataatctgaatctctgcagct

SEQ ID NO: 45173 - DNA, 556 bp, Mus musculus
  source 1..556: mol_type = other DNA
ttttactttattatatttatacatgtataattaagagttgactagattctgcagacatttcattgtttctaaggcacttgaaccactggttctttagccctaggggctatgacttcctcttagatgagtgagtgaacaaatgaagtcgctctatctcagccctgcctaagaggcatccggccgccacagggttgcagcccggtcaggacagagctttagcgcccagcccgagaggctcccctcccccactgcaggtgagccgcaagcagcggctcccacccactgaagctccagggtgacgtcaggcctcaggaccgcgctccggccccgcccctgcaggcagctccgggagctggcgattcctcggcgaaagccggtcccgctgagggacccagtggctgcggcaagcctacgggccgcagaacgctcgagtgggttgcagcggcggcccgacgcaggagctggtgacttgtgctgcggtacacctgccccactgtccacggcgatctctgcctcgcgggggccgcacctcccggagtctctgacaggcgtgagt

SEQ ID NO: 45174 - DNA, 461 bp, Mus musculus
  source 1..461: mol_type = other DNA
tcctcttagatgagtgagtgaacaaatgaagtcgctctatctcagccctgcctaagaggcatccggccgccacagggttgcagcccggtcaggacagagctttagcgcccagcccgagaggctcccctcccccactgcaggtgagccgcaagcagcggctcccacccactgaagctccagggtgacgtcaggcctcaggaccgcgctccggccccgcccctgcaggcagctccgggagctggcgattcctcggcgaaagccggtcccgctgagggacccagtggctgcggcaagcctacgggccgcagaacgctcgagtgggttgcagcggcggcccgacgcaggagctggtgacttgtgctgcggtacacctgccccactgtccacggcgatctctgcctcgcgggggccgcacctcccggagtctctgacaggcgtgagtcgcgcaaaccgaccagtgg

SEQ ID NO: 45175 - DNA, 494 bp, Mus musculus
  source 1..494: mol_type = other DNA
agggtttctctgtatagccttggctgtcctgggactcactctgtagaccaggctggcctcgaactcagagaccagcctgcctcgctgctttatacagagctgggaatcaacccagggctttatgcatgctgagcgatatcattttaataatttctaaattttcaattgcacataaggatggcattccaacacatgtatacaatttttaatgattgtattagagtgactggaatatccataaattcagatatcgctgataaaacacataattgatagtgtcaatcacagtggtccaaatgtactttagatcaccaaaccaacacatgcatgtttatactggtagtggttggtctaagcccctctattgtggcttggggtgtcatagcccacttaggctctgtatagttttcccatgtttggatgggaccagagaagccttggccaaagggaccctgagttccagcagctgcccaacccctgggcagcaccagaga

SEQ ID NO: 45176 - DNA, 258 bp, Mus musculus
  source 1..258: mol_type = other DNA
tatgttacaatatagatctaatgattccagcttcaaatgttgttgatggttactgtgactttttaaaaaccctgctatgttgttttgtcttcaaacttcaaaaccaatcccaaactctcctgcgcagcacagctcgggggtccggggcggcgcctgcgcaggacgctgtcgcagatctcacgtcagcgcgcaaagcctaggtcggctccacgtgcacagaatggcctccgacacccagggagcccctgacgtgtcggg

SEQ ID NO: 45177 - DNA, 252 bp, Mus musculus
  source 1..252: mol_type = other DNA
ctaggcacctattagagacaagtatgtagaaatgacttcccagggaagcttcttgttttgtgttgttaacaacagataaggcattgttattttgttttcaggcaataactttaacgtgttaagtcagcactggtgttagctccaattcctttgagcactggccacagagcccagggccttacccagctgtgttgcgtagacataaaaacatcttgctcaactccagctgagtaacaaggctggcagggttgc

SEQ ID NO: 45178 - DNA, 360 bp, Mus musculus
  source 1..360: mol_type = other DNA
ccggctgtcctggaactcactctgtagaccaggctggcctcgaactcagatatccgcctgcctcgcagattaaaggcaggcgccaccaatgccggctaaattggatattttctttatttacatttcaaactggggcatggaacaccctcaggcccaagggccgcccccagtccccgggagctccgggggatctgtagtctacccagatgtgggggcggccggctggggctaattataagaactaactcctatcccagagccactcggcgccggtgaggtcccccaggtcctctcaccctccgagggatgacgtcaggacccctcgcagtcccctcgcgagatctcgcggcaacttacaga

SEQ ID NO: 45179 - DNA, 231 bp, Mus musculus
  source 1..231: mol_type = other DNA
ggcagaggcaagaggtcatccttgggtctcaaacctgagatatcaaagctgatgtgcgctcaggtcttctcagcatccctcacagcggccaggctgccacctaggaatagttatgtctatttgttggttattgttcaattcaaacatcctgaaatatatatatatatatatatatatacacacatatacatatacatatatatatagtgagtacggcatctgtggagctga

SEQ ID NO: 45180 - DNA, 271 bp, Mus musculus
  source 1..271: mol_type = other DNA
ttttggctttctgcaagaaggggtttaaaccatctttcaatacagctgtgggagcttcccagtgcaacacttggtctgacacaatggctgggtggggccaaggcactggcttcctctgcggagatggaaatctgggccttcagttcccgcctcagagacgcaaccatagaggtaatgaagatggtcatgccgttctgccagcccagcttgcccagggcccacgcagcagtacaggtgagggtgcatcggaaactagcctcctctggatgct

SEQ ID NO: 45181 - DNA, 427 bp, Mus musculus
  source 1..427: mol_type = other DNA
atctcatagttgactcaggtgagccctctttcataattattcatacgaatgaagcaaggacaagctgaggaggagatggaaatccttgtcttgacctgcccggcctcctctaggtcattgtgacgatcaagagcttaataagatcaaggttttgttttttttaggcctccctccctgggcgcccgcagctggccggggatgggtgctgtccagcaggtgtgtaccatcgccccggcgggcgggactgcagtttctggcatccgaacagcgctgggcgtgtctgcggtcaggcaaaccccaaacagtttccggcaccctcccaatgccaggcctgggagccggggcgaggagagttaggccgagggcccggccgatggcagcgcctcccattggctgctgagccggctcgcccccatgcggacccgag

SEQ ID NO: 45182 - DNA, 485 bp, Mus musculus
  source 1..485: mol_type = other DNA
tttaaaaggcagccaaagctacacaaagaattttctttcttttgtttgttttattagtctgagaatctcagactgttacattctattaaggtcaaagtaacagaagttctaaattaaatgaccttggaaaaccaatttatcttgcaaaaacagttttacacgttaactttttaaatgtaatttagtttcagtgatcaataaaataacattttctcaagtgatatttcaaatagatttatttattgttatatgtaagtacactgtagctgtcttcagacacaccagaagagggcatcagatctcattgcggatggttgtgagccaccatgtggttcagtgcatgtggaccagactagtctagaattcaaagatactcctgtctgctctggcctcccagtgctgggattacaggcttggacttctaaaagccaccgcggggagccttggcaccgcccacagccggcccgcgcgaatcgcttctccgg

SEQ ID NO: 45183 - DNA, 390 bp, Mus musculus
  source 1..390: mol_type = other DNA
acgagttcgaaaggcacgtgaccctaaatccatgagagcatgggtggcctcatggactccaggcatctagattcaccacactttgggaaaaacaatagtttaatctgtgctttggctcagggggagagagcttccccttgccctccctaggggaaaatcctcgggttaggtatcaaggcttgaggtctgaatcttaacctagacccacacctgggcctgttgtttccccaagtcccagcattagatcctggagttactccactggagtcaagtggtcccacaacaacaactgtccttaagggcggtctcaattggtctttccaaagagccgggcttcagagaccccaaggatagccccgcccccgaagcgcgggcgccgattggtcagcg

SEQ ID NO: 45184 - DNA, 528 bp, Mus musculus
  source 1..528: mol_type = other DNA
ttcaaggccagcctgggctgaattaaaggccaacttgggctggattccaaattcatgatttatacacccacagattcaactgttatctgtctgtctgtctgtctgtctgtctaacctacaatctagaagattgcatctgttacagaccctatgcaaatactgtgtcatatacaatattatgtctgtatatataatagacctaagcatctgcttgatgaaaaaagactgtattttcaaagatcatattaagggtagcatctaaattttcgtggaaaccagacaatttaaccagaaaggtcatattaatgtttactctatatattttatttatatataattattattttctttgtagaccaggctagtctcgaagtcacgaatccacgtgcctcggcctcccgagtgctggggttaaaggcgtgcccgcccaatttaaatatttaattttttataactagaaaaaggaaaagaagccttcgttctgtttcaatgactacatcacaaaaaacagtggcggctccgaaagcg

SEQ ID NO: 45185 - DNA, 355 bp, Mus musculus
  source 1..355: mol_type = other DNA
gccagggctaaaaaaaaaaaagaaaaagaaagaagatttatttattattgcttacatatatgcctgcagatagagataaccatatagatggttatcaaccaccatgtggttgctgggaattgaactatgttagagaagataaccctgaccatgggcccagtgctgtaccaaggtcagatggccagagaaaggctcatgggggaatctctctgtatcttttcttttttaaagatttatttattattatacataagtatactgtagctgtcttcatacgctccagaagagggtgtcagaagaacaatcggtgatttatgagtacactgtggctgtcttcagacacaccagcatgtgg

SEQ ID NO: 45186 - DNA, 383 bp, Mus musculus
  source 1..383: mol_type = other DNA
tatcttttaatttaaaaaaattataacctagaatataacctggagggactttggtactctcagatgcctggcatctgggagacatcaaatatttgttgaatagatgaaatccctctggtgtcttttggtccattgacatgggaaagaggttcttggtctgtaactggcctagggtcattcttcggcaaagttttgccaaccaggggctaggggacttagcctgaccctgggacaagctccgtcccctcgactcctagcgcccaaggcagtgagtgcgtaccgcgcctatagacgttggtagaggcactatcgcgagacttccgaaagcagcagcgtggcgcttgcggacgcagttaccatggcagccgggcggcgcccgagcg

SEQ ID NO: 45187 - DNA, 339 bp, Mus musculus
  source 1..339: mol_type = other DNA
tatggaatattttctcttgtgacaacaaacaaacacagtgagtcactctgggcgcttcaacgatcagtctgtcaatgtttcaaggatggaactgctcggcggtaattccggacgacaccaccggagcctaagctccgccccggtgggactccggcgctccggggctcgggtcttttaagacccgccccctcaactttccgaaggggcggggccccgcgcacagctgtcaccccggagctgccacccgcggaccattatcatccggctgccaatcggcgcgcctccgccaacgccccttaaaggcgccgccgctgaccggggagcccggcggacgactcg

SEQ ID NO: 45188 - DNA, 441 bp, Mus musculus
  source 1..441: mol_type = other DNA
actggtacattccctagcacccaatattttggaatgggggaccctaacccacccgtgtttgggttggaaggggctctaactcccccccctcccaaagtgatgaagcttcctcccactgctgcaagaaaaaggcagaggcttcagtttttgctcctcccaactgcggctaagcagaggatggataagatctctcaaatcttggattataattttattagagttttgtaataaaatttattttataacaagagcaaggcgtatactatttttcagaagaccattggatgggccaaaaataaaggcttttaaataactatctcacatagcgcttctaatttgcctttctccctttttgtgccgaatggagaataaaatacttcaaacgacttgcaaatagatattattcttgcgttgcaagaacttcctttaataggaaatgtc

SEQ ID NO: 45189 - DNA, 447 bp, Mus musculus
  source 1..447: mol_type = other DNA
aatatcctattgtgttatctagatcaagccatttgacaaatattgagtgtctccatacatgatatgcttagtgttgggattagtccacatgtaaagttgtgcctataaccaaagcccaggctctatgctagagtcaaatgaccccagacgggatccagcctgtggtatcaccagacagtctgggccctcctgccaagtagtacacctctctctctctctctctctgtgtgtgtgtgtgtgtgcagggtgatgggtgagattagtcctcacgattccccatagaccaggtgttgggaccaggtcgggctatatggcacagtgggttggcgagctggccccacagccagacccggcgacccccggccctgcagcgccccgcccccgcggtccgcttgcgacgtgtcgcctgccgcgccccgcccacgccgcagtacccggatgcgggtg

SEQ ID NO: 45190 - DNA, 271 bp, Mus musculus
  source 1..271: mol_type = other DNA
gtaggctccctaccgaaaggctgtctccaatcttgcgcaagcctgtattctaggcaccaagcttagaaacaggggaatactccccccgcagtcctacggtgctggaatgcagtgtagaggtttggtaacactttacagggtccctaagcttgggctccattattaggaagctgagaatgaagcagaattaaggcaagtttagtaactacctactaagtcttagtttttccttatgacatatgtgtaaagttcttagcacagcgcttggatc

SEQ ID NO: 45191 - DNA, 271 bp, Mus musculus
  source 1..271: mol_type = other DNA
tcatgaaccttggcttttgtattctaagcagcaggaaccccacttttggggcagccctaaatgtgggtggctgcatcctctgcagaggcagcactagtcaccaagtaggcttcctggagggcaccaggacaggtgtcttgttctggctgactgagcggtgtctgaggcccttcagcccagcaccagcacccaagtccacgtgcagggatgtgtgtgacacagccctgacctcagtggggggcggggcctgcggctcttcgggcagaaggcc

SEQ ID NO: 45192 - DNA, 422 bp, Mus musculus
  source 1..422: mol_type = other DNA
cctaaattctacctttatggagagtttaaataaggcttgcatttaattcttggaattacttctaggtttaatgtctccattacaataccaaggtgtcagagacctttcagactttagctcttttatcaatatacataatctaattccgacagattacgtaacctctcagccaagaaggggctggccagccagttcgtcattggcaatctaatgatatcttcagtgtagtgctcagatttttaagctttggggatcactagagacacaacggatctacgcctgcgtacaagtcgctcggcacgcctgcgcagactccgcccagcttctgggtaaacaagttgccgcgtgctctgagccctctcagcctatgaacgagttggggcgcccccgccctcacgtgttgtcatattgtccaatgggaa

SEQ ID NO: 45193 - DNA, 189 bp, Mus musculus
  source 1..189: mol_type = other DNA
ataccacttgaaaacatatatttagtattattcttgatatcttatttgaaatttcacatatgcactaaactctaatacatgcttagagcatttacagtcaggcaaagctagagtattgcctggacccgcactggcagcatctaatagtcctggccagtgaacatttaaaccctgtggacttcagtccac

SEQ ID NO: 45194 - DNA, 537 bp, Mus musculus
  source 1..537: mol_type = other DNA
acatatgtagaaaataattttttttttgagacatctaggtatacttggctgacttcgaactcagggaacaaaggctattacactctgctataaatattttttttacagttaaaattgcagcaattatatgtttgctgtctatcaacctatgaacaatagatggagtgacagtttataattgtgaaaaacttaacatctatgatgttcttcaaaatttccacggatgatttttaaaattaactctattatcttatttatctttgtctgtatgtacagacagtgcaccaccaggtgctttctctcagaagctagcactggatcctctacagatgattcttttctgagacggggtttctctgtgtagccctggctgtcctggaactcactctgtagaccaggctggcctcgaactcagtgattcttatctgattccctttttgaagagacagctgaaaaagataaacattttattttcatatgtaagtctgacgttgctctacagaggagctgtagagactctcatggagggattaaggg

SEQ ID NO: 45195 - DNA, 246 bp, Mus musculus
  source 1..246: mol_type = other DNA
aagattctcgatccagagctggctagctagcacatcagcttgtactcctggagggagattcgctgggaccctccgatcacaaaggtacagattgtggacagtcatctgcaagataaagagcctcgctcagtggctggtacccactgctctgaaagagggtgacaagctacttccggtttataaagcgccgatgccgcgcgcatgcgtgcccacgttcccgggcctctgaagcccagtgcgggaggc

SEQ ID NO: 45196 - DNA, 282 bp, Mus musculus
  source 1..282: mol_type = other DNA
ctgcctcagttctgaggtcctcaacaaatgagctttctggttagaggagtgtccactgactccagagaccatggagagggcaaacacattctttctcccaactcctgggaagacctgcatgcagggagacagaaccgctgcagttccttcctcctgcaaacgggttaaccatggcgcgcgcgcgcgccgcctggctggctccgctgagcaaaccgttggcagcctcccgcactgggcttcagaggcccgggaacgtgggcacgcatgcgcgcggcatcggcg

SEQ ID NO: 45197 - DNA, 202 bp, Mus musculus
  source 1..202: mol_type = other DNA
ttggctcagcctccaagtagctggaagttgccaggttctcctaagtagatactggctaacaaggaagcagcagctacaggctttaggctccaaaccctttgtactgcaggccctggcagggggccctggctcagcctagacagctcccacaccctgaaggctgcttcagcccgcagacgcctgctcacgggctactggcccg

SEQ ID NO: 45198 - DNA, 420 bp, Mus musculus
  source 1..420: mol_type = other DNA
tattctcgagattacaccatgtttgagattgaaaatgaaaagtgtctcacatcaggctcacacactgcccgctgggacaaactgtgcaaagtgagctcctgccagagctggctgaaacatgccttcaagtcataagaatgaagctcacaggagtctacgccagttttatccctgcttgactctgtgagaaacacagaataaactgaataaactttttgtcaccctcttgagtgtgagttcctgtggcccctcccagtgtgactcacacacttgatagatgtagtacacacatcctgtcttacccccgttcctaaaacgggatgggagcttctgcaggcggagcttatgcagatgagcagcgtgttctactcagaggcaggcggctccatgcagatgaaggggcgtggcgggcttgctgcc

SEQ ID NO: 45199 - DNA, 496 bp, Mus musculus
  source 1..496: mol_type = other DNA
atggctgggcacacagggccatatagacttgtgctagtgactgtgtgcaagaggagacctggacacctgcatcaggctgtgggtggagcgtgcccccctcttccctccggcactcgcgcctctgccgccccaacgcgtgcctcggaagggagcggcccatctgcgcgtgacgcctcgagggcggggcctcaaaggggacagaggcggcggcgcgggccccaggcccctgccctggcccaaggagggctcattcgttctgtatcctagccgcctagagatcgaagccctcgggccacggtgaccacgatgccttgatgagagtgccctctcttcccgagctctcggggcccgtgcgccccgccgcctgcctggcacggcgcgcgcccgctgcggccacacgctgtgcacagcttgcctgcgcgagctggcagcgcggggcgacggcagccgcacggccgcgcgcgtggtgcgcctgcgccgcgctgtcacgtgcccg

SEQ ID NO: 45200 - DNA, 214 bp, Mus musculus
  source 1..214: mol_type = other DNA
gaaggggagagtaacccagtctgtttctcttgcatacactcccccacgcttctctctgctagagaggacacactgggatcttagaatattctcaagagatcaaccaaatatcattttcctgctggaaatattgttttgctttttccaggagatcaagctatgttatcaccaccaagattttttggggtggactgctccacacctgccggtaagg

SEQ ID NO: 45201 - DNA, 466 bp, Mus musculus
  source 1..466: mol_type = other DNA
aaatgccttgcagtgaatttccgccgcattcctgcacaggaagcagccgactagtgtccttccatctggttgctgccgtgcacgcgtggccggcgagtcctcctgttccccatcagagtcctgctagggcaggacaagcatcccagctgccctcgcggcgctgccagaagcccgtgggctgccccggcgctggagctgctctgagtagcatggtcggcccagctccggccattggccctgggacctcttttgggccttaaacttcctaagagcgttttgggggatcggcgcgtcagatctcgcgagtgctcccaagcgctttcgtgagatcacaatctcgcgagattgcaattgcttaaacagcttttaaacgcctgaaatctggtgattaaaaaacccttgaaacggactgtcttcatttcctctaagaatgaattcaaccacaagccggaatccggaatgcttc

SEQ ID NO: 45202 - DNA, 224 bp, Mus musculus
  source 1..224: mol_type = other DNA
ctcccaacaagacctgcatgcagggagacagaaccgctgcagttccttcctcctgcaaacgggttaaccatggcgcgcgcgcgcgccgcctggctggctccgctgagcaaaccgttggcagcctcccgcactgggcttcagaggcccgggaacgtgggcacgcatgcgcgcggcatcggcgctttataaaccggaagtagcttgtcaccctctttcagagcagt

SEQ ID NO: 45203 - DNA, 586 bp, Mus musculus
  source 1..586: mol_type = other DNA
aaaaaaaaaaaaaaagcttttctttagagaaattcaatctagttggactagtatctaactagttaacctttaacaatttatgctgatgtcagactgagcatgagtactgattaatacccccccaaatatttttataagggggggagttaagtatttttgttttatgcagaaatccttcacacacacacacacacactctctctctctctctctcactaatcagttatgaaaaaaggagaaatatgaaatattaagccagccattttgttttaaaaggggattttacccccctctctctttctttatagaggggggtggttttaaaaataatttcaactcagctctgagaaatatttctgagcgcccccctcagaatttaaatatatttaaagcaagagagaagtcgaaaacttttatatacatatatataattttttttttttaaacgatctccctttcttgttctcttgggaggaaagacagaagggggaaaaagtccttaaatttttccaagaacatttttgggggtggtgcggcccccctcctcagacgccggccccgggggtgggtgttctggagccgccgc

SEQ ID NO: 45204 - DNA, 355 bp, Mus musculus
  source 1..355: mol_type = other DNA
gctccgcgtgaacgagtagtccgcggaacgcaaggtcctcccggggaccggaccggagcagcctgcaggatctgtcgggtccaaagatgaccttgcccccagcgggaggaaagacagttttcgccagaaacccttctgcctggctggaaatttcctcccggtgcagacttctcggccaaggcgttctccagctggagcgctagccccgcgatcccgggagcagagtaggctccctacctgccgggacctggggtatgcgcagggaagcagcttctgggctctaagatttgacaacccccgaaatcccccctcccttggggggggtgggggccacgtgggccgtggggaaccgcgt

SEQ ID NO: 45205 - DNA, 459 bp, Mus musculus
  source 1..459: mol_type = other DNA
ggaggcccactcctgggccttccctgcgccccagtatgtccgggcttggcccgtctgtctccgcccgcccgcggctccagccgggctcaatggtattttgtaaaaaaaataaataaataaaataaaaagttttaaacccagggcagggcctctctggggcagggacaccctgggttcccccccgctggggctgcggaggggtgggggggtttacagtcccgccccctcgcactgcactgtctctctgccccaggggcagaggggggctcggtgatttttgtgtgagaatattattaaaaataaaagcaggaaaaaaaaaaaagagacccttgtgttttgatgcgatgcagcctccggaggtggggagcccctcctcagaggagcctgtggaatgtccagacccacagtctgccccttaggatggggatgcctaatcccagagccgcattccaggataag

SEQ ID NO: 45206 - DNA, 349 bp, Mus musculus
  source 1..349: mol_type = other DNA
gcttgcgaatcttcaaaagcaaggatttggagagtcactattctagtctgtggatcaaaccagtgacttatgtcatggccggccacacttctgacggcgtgaaataccgacgttgaaaattatccaagtctggcccggctactaggccccggcgcggcatggctcctggtctacaagaggcacaggctccccggccaccggccacagttagaagcattccggattccggcttgtggttgaattcattcttagaggaaatgaagacagtccgtttcaagggttttttaatcaccagatttcaggcgtttaaaagctgtttaagcaattgcaatctcgcgagattgtgatc

SEQ ID NO: 45207 - DNA, 160 bp, Mus musculus
  source 1..160: mol_type = other DNA
gagagtctttgacgcccctgccgggaggtgctgaaagccttgcttccacccaagaaggcaggttttcctaaactccccgtgtgaccttgggcaaccgcgccgggcagcgaggcggggtggcggggggcgtgggccgcgggatgcgacgcccgctccgact

SEQ ID NO: 45208 - DNA, 518 bp, Mus musculus
  source 1..518: mol_type = other DNA
tcagcgactaaaccgattcggaggactcctgcctctgtgtcagagtggaaagaattagctagatagtcatagccaagacagagtctttgtagccaaggctggcctggaattcgcggccgtcttcctgaggccttccaagtacagggatgaaccaattagctaaaatgtcactttagaaaggcttttcatagtatctcaagtccttatcactctctgtaaagactgttttcacagcctttaattgcacagcaacgaaaactttatggagattaagaactagaaaacattgctatttttttcccaatgccttgtatagtcctgggttaggcagtaagaacttgataattgtagaaattatgcgccctcttgtagttttcgccaaggcccaactacaactcccagaaacctctaggaattctccagcgcttgaggtgtaggcgttccttcccgccttcccgctcggaatcggaggaggatgcggagagcctatcggaaggtggcccgactcccgcgagagc

SEQ ID NO: 45209 - DNA, 408 bp, Mus musculus
  source 1..408: mol_type = other DNA
agagggcgcataatttctacaattatcaagttcttactgcctaacccaggactatacaaggcattgggaaaaaaatagcaatgttttctagttcttaatctccataaagttttcgttgctgtgcaattaaaggctgtgaaaacagtctttacagagagtgataaggacttgagatactatgaaaagcctttctaaagtgacattttagctaattggttcatccctgtacttggaaggcctcaggaagacggccgcgaattccaggccagccttggctacaaagactctgtcttggctatgactatctagctaattctttccactctgacacagaggcaggagtcctccgaatcggtttagttcctgctgagggcaacatctcagggagaatccggaaggacttgccct

SEQ ID NO: 45210 - DNA, 321 bp, Mus musculus
  source 1..321: mol_type = other DNA
cgaggctgactcacagagatccacctaaccatgcccagctagaaatagttgttcctttttcattatttttacccttccttaaaaaaaagaaaaaaaaaaaccacaaatgtgtgtgtgtgtgtatgcatcctttgtacatgtgtgcgaacatgtgtattgtggagcgggtggtctacactgggccatctccatagaagaaggattatgttcctcttttagaagcacaagggtgaccgtgtgtctccctaggtcagtcagcaagatatctggatctaggcagcccccctctgtgggaggacggctgttcttggcacggtcagg

SEQ ID NO: 45211 - DNA, 303 bp, Mus musculus
  source 1..303: mol_type = other DNA
tgcctttgctcgcaccctctgggttcccacctagacacagcagactgaggtcccctgttgtgtcaggggttgctctcctgcagcggagctcgccccttacggatggctgtgagccaccagaggaaagaagagctgcagtgcttcttcaacttcaaacactatcaagttgcgctttaaaagcctgggaaggagacctgtgtcccctagaggaggcgggcgcatcacggagagggaagagcagccctggcctcggggacagcagggcggggtgtgcgcggcgcgcatgcgcggcgcggataaatg

SEQ ID NO: 45212 - DNA, 274 bp, Mus musculus
  source 1..274: mol_type = other DNA
aacatcaaaggtttgaggctttggctacacagcaaatttgagcctagcctgggctacatatccatcaggcctggcttggtggcgtttctgagttcgaggccagcctctcaaactgttaattacagggatttgttaacagaacctctgtcctgagtactggatttaataccaaagacagctacaggaaccggtcgggggtcttgggctccctcagggtcggggatgccccatagccaaggctacacagagaaacgagtccagtcactggacagcg

SEQ ID NO: 45213 - DNA, 404 bp, Mus musculus
  source 1..404: mol_type = other DNA
atttttacaaaaaaaaaaaggagacaacttgcaggaggatatctccttcctcagaatttatgcatcaagttatgtggcatcactaaatttactagaatactagtcaacttagggcaagcatggtaatgacatggctgaaggtcattcccccactacctagttagttcatggtcactaactcttgattctcctatggatgcacaccaaagcccagcgcctgcgcactgggcagtttcccccctttttggagtgtgcgcaccaagaaagaggcaatccgatgcagcgagcgcggcccccctctccctttgtcgttctgcgcaagcgccctgacgcgctggcgagcgggagctgggtcgctagcctagacgcctgcgccttggccctccggctccgcgcgcggcggg

SEQ ID NO: 45214 - DNA, 187 bp, Mus musculus
  source 1..187: mol_type = other DNA
cgatttatttattattatatgtaagtacactgtagctgtcttcagacacacaaggagagcagtcagtgctcttaactgcgggaacccaggttccagagctggggcatcaggtgtaggtgctccagcaagcgtgggctggagatcagacctgcttcatttgcatatgctcagagtcacagacgactgt

SEQ ID NO: 45215 - DNA, 194 bp, Mus musculus
  source 1..194: mol_type = other DNA
ggtagatggatcttgatcaagtccagcctagtctacacaaggagataaccttttaaaaaataggaagatttttaaaaagtgtatcgcatgtccatggtttgggcttaaagatgaaacttgcaatactcagtggcaatcatctgcctagcacctgctggaatgactaagaaaacaaatctttcccctgggggctg

SEQ ID NO: 45216 - DNA, 428 bp, Mus musculus
  source 1..428: mol_type = other DNA
ttgtcccctggtgagaaaatggtagccatttttacattgttttgtatagtatttattgattcaggaaacaaacacaaaattctgaataaaattacttggaaactccaaatgacccacattactaacatttggtaatttgcctcagtgttaggcacaagacgagtgaaacttaaagcctttaatcccagcattctgccggaggcagaacttcgaggctagcctggtctacaaaagtgagttccaccaaaaaaaaattcaactggttggttaggcctagcccagatgatgtaggtgtcaccaatgaggaaagggcttcccatttctctgctgcattgtaagtgtgagtcagctgcctcattctcacgaggtagtcactgccaatcacagcctaaagcttttcatttcctcttccaagagaaggcaaaggg

SEQ ID NO: 45217 - DNA, 302 bp, Mus musculus
  source 1..302: mol_type = other DNA
attcctccttccatgtggtcttcaaacttttttttatatatataaatatatataaaaatgccacggtaaaggatcctttgaagataagctttcgatagatgccatccccggggagcagaaccagtgattgagtgggacaatccccaaaagtgggtttacaatattttcctgaacggaagagactgcccggaagttcctggaggctaaggcctcactccgcacgtgtaaaggtgctcgccgccccgtcgttgcgcgccggcaggcgggcagaggtggccaagccaatgcgatggctggggcgg

SEQ ID NO: 45218 - DNA, 284 bp, Mus musculus
  source 1..284: mol_type = other DNA
gctcaaggtgctgcagaagcagcctcattttcctagcaaaggacttcctcctgcaggggaatccctggctaggaggagcagggcccttcctcttggcagcctcaagcagttgagcagggaactcttcttgggaaacaggagtgcaggcctggttccaacacacccggccatgcctgagtcagaacttaggggccgcccctgggctcctgaaggctggccgctccttctgcaccttctcctgaggctaggggaccctggggacaagggggactaatagtacccta

SEQ ID NO: 45219 - DNA, 336 bp, Mus musculus
  source 1..336: mol_type = other DNA
attcttgttactatctagaaaaagatatatgtactgagctttaagttcgaggccaacttggtctaaaggctgtcctggaactcactctgtagaccaggctggcctcgaactcatttttgtttgtttgtttgtttttaaaaacaaagccctcaaaacccattggtccaatccttgcggggcccctgacattctggccatgcactgggaagcccacgcggactgccacacgcggcaagccaggcgactgtgcgcaggctcggctccgcgtagagctcgagggcgggaccgtccggtggcctagacgcgctgaggtaggcgggactgagcacgagccgg

SEQ ID NO: 45220 - DNA, 349 bp, Mus musculus
  source 1..349: mol_type = other DNA
aagagctggggacaagctcctccctttgaaaagatactatttttattattattgtgacaaaatgttaaatggatattaaagagaataaatcatgatttctcttcggacctgcatgcctccaagctgcagttctggctcaaggtgctgcagaagcagcctcattttcctagcaaaggacttcctcctgcaggggaatccctggctaggaggagcagggcccttcctcttggcagcctcaagcagttgagcagggaactcttcttgggaaacaggagtgcaggcctggttccaacacacccggccatgcctgagtcagaacttaggggccgcccctgggctcctgaaggct

SEQ ID NO: 45221 - DNA, 382 bp, Mus musculus
  source 1..382: mol_type = other DNA
tctacaaagtgaattccaggatagccagggctacacagagctagtgaggcagctgtctctggcctcctgctcagatagctgcactgtacacataaacaactttacaaactatcttttttttttttaaagatttatttatttatatgtaagtacactgtaactcctgaccttcagaagagcagtcaggtgctcttcacaaactatcttttaaaaacatattctttattgcagaggtatgcctccagggtgcattaatcccagcactcagttctgagttcgaggccagcctggtctacagagtgagttccaggacagccagggctactgagtccatcagattggcctataggcaagcccttggtgctgagttcctggggccagg

SEQ ID NO: 45222 - DNA, 246 bp, Mus musculus
  source 1..246: mol_type = other DNA
tgtaacgctgacatcaagcatgaatgaatcactgtgggccgccaccttatttctgaagtcgtctgaaaggtgtaggcgccttagagcacaggcggtgccccaacgtcctggggcctcgaacgacgctccggaggatgagtacgagacgacaggaccaggaacattctcctcctcctgtagccctagcgtcaacaactccgccgcgcgcgctccgtgtaggccggtgcgggcggccccgtagcgcaa

SEQ ID NO: 45223 - DNA, 71 bp, Mus musculus
  source 1..71: mol_type = other DNA
tggatccctgggttctctgaccagccatctctgtgttcggggccagcctggtctacagaatctcagtattt

SEQ ID NO: 45224 - DNA, 179 bp, Mus musculus
  source 1..179: mol_type = other DNA
cagaccagttactctgagtttatgatagggtggaggggaggactgccagcttctccctctttctgtgtcccacgtgtgtcccacacgtgtatggcatacacacgttcttggatccctgggttctctgaccagccatctctgtgttcggggccagcctggtctacagaatctcagtattt

SEQ ID NO: 45225 - DNA, 266 bp, Mus musculus
  source 1..266: mol_type = other DNA
tgctgcccgagcgcaggcgggcttgaaccttcatgctcttcggggagagaagttccaagctttgtgcttatctgcactaatgatcatctgttcttaatccctgtgctcactttggatctataggttccacggggcccaaacagctgtgcccacgcagcgtgctctaggcgatgtgacccttcccagggaacactgcccgccccgcattctgcgggaagccctcagacttcagagtccagagtcggtgcctctcagcggcggcgctg

SEQ ID NO: 45226 - DNA, 288 bp, Mus musculus
  source 1..288: mol_type = other DNA
caggccagccttagctagacagtgaggccctacgaaggaaatgttcattatttactgttcggatccaaccgattatattagacagaataatatactgtctccagctggctgtaacttctcagggtcagcctgggctacatggtagactttgtataaaaggtaccatatgtctttgtttgagatgcagtcagtcaggtctgggtgtgtaggcaccgctgcacctgtatcgtggcagtccggagccacccagactacatgtgaccaccaggaagttacctgtagaatctt

SEQ ID NO: 45227 - DNA, 298 bp, Mus musculus
  source 1..298: mol_type = other DNA
ggaattctggaagaatatacctgaggctagcctgggctacctagtgaggtcagggccagcctaggctatgtgagaccctgtctcatctccgagttaggaaacgaggagcctcttgggctcccagaccttctaactaaatagaatttactttactttacagcttttaaacctcaggtgggttctaagtacccaaaactgtaattaaagatgatttatacagttgctccgggcgggaccaagtcccgagggcggggcgggtgggctggcgtctggtcccccgacaacaggtgcacatgcc

SEQ ID NO: 45228 - DNA, 382 bp, Mus musculus
  source 1..382: mol_type = other DNA
tgccctcttctggcacacaagtgtacatgcgcactcatttacctaaaataaatctttaaaaaaaaagttctctcaaatgatcagagacctttgattcctgggaggcacaggccagccttagctagacagtgaggccctacgaaggaaatgttcattatttactgttcggatccaaccgattatattagacagaataatatactgtctccagctggctgtaacttctcagggtcagcctgggctacatggtagactttgtataaaaggtaccatatgtctttgtttgagatgcagtcagtcaggtctgggtgtgtaggcaccgctgcacctgtatcgtggcagtccggagccacccagactacatgtgaccaccaggaagtta

SEQ ID NO: 45229 - DNA, 338 bp, Mus musculus
  source 1..338: mol_type = other DNA
aaatataaaagtttaagaagggggtgggaagaagtgcccaacccttttcagaaaataactcttaagatctgaggtggggcaggaactcaagaccagcctgagcgatcccatctttaaaataaaagttgccagtttgaggccagcctggtctacaaagtgagttccaggacagccagggatacaaacaactatgtttgtgtggtccagggcctggtgctttagaagatggctcctgccgaggcctgggctaaggctggggggggggggcaaccctgggccttgatgagggaaagccccaacctcattgtgacccggtcactctcaggactttctgggtc

SEQ ID NO: 45230 - DNA, 288 bp, Mus musculus
  source 1..288: mol_type = other DNA
ggaagagcagtccagtgctcttacctgctgagctctttatactgcatgtaacatgtaatttttccaatgctgagtaaatggcaagtattctccaggatggcctgaaactagactgcttcctgcctcagcctctccagcagctagggctgccaaacgatcccagggcatctgtgttgccaaagcgaatgagccgggcacgggcgctcagaagagcaatggaatcccttaggaataatttgaccctgtgaaaaaaattgtcatgttataggttgaaaaagttcttaagct

SEQ ID NO: 45231 - DNA, 320 bp, Mus musculus
  source 1..320: mol_type = other DNA
gccgtaggaggccaaacccaaggccccagctccggacaaggcacctaggcggcggaaagcagcccctaccccggccatagctgtgggtggtcacgcgcggaaccacccttacagacgcctttgtaaaacttctgttgaagagttctcccccttgctagacccggagagcccagagggtgggggagagatgtcttcaccccaatccccccccacactccagagggcgggtgggcaggcgggtgcaagcgaggggtgtgcgccgctctctcggcagggggcgggggaggcggccgcgcggtgacgcgcggggctgctgcggc

SEQ ID NO: 45232 - DNA, 339 bp, Mus musculus
  source 1..339: mol_type = other DNA
cgggggccgagtcccgagcctcgaggcacagtagccaggaggcccggactcctggctctgcgcgccagggcccgcccgccccgcgtccatcccagctcgagagtgatgatccgccggcggagcagccgcagcagccccgcgcgtcaccgcgcggccgcctcccccgccccctgccgagagagcggcgcacacccctcgcttgcacccgcctgcccacccgccctctggagtgtggggggggattggggtgaagacatctctcccccaccctctgggctctccgggtctagcaagggggagaactcttcaacagaagttttacaaaggcgtctgtaaggg

SEQ ID NO: 45233 - DNA, 312 bp, Mus musculus
  source 1..312: mol_type = other DNA
cagtttaggctgtacaataaaaactagaattctaagaatccctcctgcccagatactatgctatcttcttttgaggaaaggagtcttttgagagagtctaaagtctgtcacgcgtgtaagagtgggtcaacgctgtgacagggggagaacacagcgaggtcgcccgcgtcagcgaggcccgccccgcccttgggaggaggatcccggggaccggagcagccacaaggtccgcggccccgggggaggagaagcgcctgctttctgcgcagtcgccccgcccggactggggggcgggacttaggcgacccgggg

SEQ ID NO: 45234 - DNA, 255 bp, Mus musculus
  source 1..255: mol_type = other DNA
acactatttatttatttacttatttatttatttatttatttatgagtgcagatggttgtgagccaccatgctctggaagagtgctcttaaccaactctccaacagggcttcaacccacagatatctgcaagtggatacttgctgctcttcagagagtactcagttctgtccatgcaggcacacagactctagttcccttccagggacacaaaatgcctgttagagcctttctaggctgtcctacaagtgggagga

SEQ ID NO: 45235 - DNA, 395 bp, Mus musculus
  source 1..395: mol_type = other DNA
ctgggctggtagtcctgggttccataaacagtgtacttatatataataaataaattttaaaaagaaagaatttgtgcaagaattgaaaccctgacaaagacacaggatttctctgtgtagacctggctgtcctggagctcactctggaccagctggcctcagactcagagatccacccactgagtgcttggatgaaagctcgcttttttcagtgtcacgacagggtctcgctggcaggccatcacactggccttgatctcacagagatctgcctgtctctgctgtaattaaaggcatgtagcaagtcttaagtgacagagacagatttgactctagaccatcatttcacagcaggcagtctctgggggagggactgtggtttctgtgatctcagc

SEQ ID NO: 45236 - DNA, 470 bp, Mus musculus
  source 1..470: mol_type = other DNA
ccgccgccatcgccgctgataccgcggccgcgcgacagccgcgcttggcggcaccgtggcaaccgcggcggccagacgccctgggggaatacggccggggggctagcgtccgcagctcttttgcgacagtggatggcagaatcgcccgccgcaggcgtctttgcgacgaaggcgtgctggcgcccagatacactttgcgacgtcgcccggcggcattcgccttaacgcaattcccctaacaccgcacgctttaaggcgagaaaaagtagttttataaatccaagtctcagcccttcacagtgccgaggccgccaatgaaactcttaaatcttaaaagttactaataaaaatcctagggtgtcccgttgggtaatctcaagggacagagcggacacctctgagaggttacctgagagctatgttgcggggctgtgacatcacaaggctcctcaccgctggccaggccccag

SEQ ID NO: 45237 - DNA, 525 bp, Mus musculus
  source 1..525: mol_type = other DNA
taataccattgtttattcaacaaacatgttttgggcacatgtggaacaaaggtacttccttaggagacgagacgtatctcgacatattccgagacttctccctcgtcggacgacccagagaacgccacctgggggcccggcagagtgtttggcacactggccacccaggtgcgggtattggcgggaggggctttcgagcccaggggaccagggaagccaccgcgtgggaacctgggctcgctgggatggcccgaaggcatcccgggaatgcgatggctcagcatccgccccctcgggagttcccgaccgggatccaacccgaaggatggactggagactccatcctcgactaaggcagggaacgcggggccgtcgcggccacatccgcaacggtccagcctgttccactggcaaggccggctcccacccatagcagagcccggccagcccacgggggcgtagggcggggcgctaaggggcgggactgtcgcttaaagggccactgaccgctgcccttaggccact

SEQ ID NO: 45238 - DNA, 265 bp, Mus musculus
  source 1..265: mol_type = other DNA
atcctaggctagagctcccttctggaattccagaggatcctgtatgtaaaagcagattcagatttagtttaatcatatgcgctgccacgtaggcagggcttagctgggcctctgagacctctgggagctcttggttgctgagacataaggaaggcctaaggctgtcctgggcagccaataaacatggtcatctatcactgtgacttaaaaaaaatgggcccaagggtcagaatctggatctcagagaattctgactcttccctgg

SEQ ID NO: 45239 - DNA, 448 bp, Mus musculus
  source 1..448: mol_type = other DNA
ccctggcgctgaggcaggtgaaaggtcgactatcagacttcagcctggggcctggccagcggtgaggagccttgtgatgtcacagccccgcaacatagctctcaggtaacctctcagaggtgtccgctctgtcccttgagattacccaacgggacaccctaggatttttattagtaacttttaagatttaagagtttcattggcggcctcggcactgtgaagggctgagacttggatttataaaactactttttctcgccttaaagcgtgcggtgttaggggaattgcgttaaggcgaatgccgccgggcgacgtcgcaaagtgtatctgggcgccagcacgccttcgtcgcaaagacgcctgcggcgggcgattctgccatccactgtcgcaaaagagctgcggacgctagccccccggccgtattcccccagggcgtctggccgcc

SEQ ID NO: 45240 - DNA, 378 bp, Mus musculus
  source 1..378: mol_type = other DNA
ggctaacagattccgggacccaaaatcccagcggacacaccaggctcaggtggcctttcaggtgtgtgtgcgctgggtcactaaggagaagggagccacactcctctatgccctgctggtacgagtggaataaggggtgacataccactactccaagcacagccgggcctcaagcccaggacttcatttagagcaggtgtgaacacactccctctgctgagagggagcccagctcgtctcggggtccccccttcattgtgaatcccaaaggagtctctctgtgcccacatgaagctgctttttccgtggccactgggcgccatgggaaggagccaataaatactgtcctcgctccacaggaaggatttatcctggccg

SEQ ID NO: 45241 - DNA, 576 bp, Mus musculus
  source 1..576: mol_type = other DNA
gcgcattgccgactggttgggcatgcagctacctagcacgcttgcgcgtcggcgcctgcgtactaagacccgtgtgcagcagcggcggcggcgctagaggcggcggcggcggcggcggcagcacagtagcgggttcggaggcagcagttgggctcgcggcgagcggaccaggtcaagtcagtgcgttcgcgcgaggtgagagcgggcagggcgcgcctgcgcgtaacctcggcggctgtcgccgcacgggttcggtgagggccggcgacgcagggcgggggacggcgagccgcgaggccgccacgcgggagaggccgccaggcggccacgccggggcgagggcccggggccagatcggcccagacagggcaaaggctcctgtgcggttgaggaccggcgctgcgcggccactggtcctggcctggcgcagctttggggcaggggcagccgtagcaccggaagtgttccccattggaggctgccctcggggtccgaggccatgcggccgaacgttgaccggggccgcatggctgcacggggacccctcccccctggcccgggccaccggaagccccg

SEQ ID NO: 45242 - DNA, 462 bp, Mus musculus
  source 1..462: mol_type = other DNA
ctaaggagaagggagccacactcctctatgccctgctggtacgagtggaataaggggtgacataccactactccaagcacagccgggcctcaagcccaggacttcatttagagcaggtgtgaacacactccctctgctgagagggagcccagctcgtctcggggtccccccttcattgtgaatcccaaaggagtctctctgtgcccacatgaagctgctttttccgtggccactgggcgccatgggaaggagccaataaatactgtcctcgctccacaggaaggatttatcctggccgccggatcgccgaaggcctcggagacgccgacaaggcgggttgggggggaggggcgggggcgcggagcctaagaccctcgcacgcgccccggcgctgaggcagagaccccggagggacgctggtgccggcgagcgggcggcggacgggcttccgcttcggcgcgt

SEQ ID NO: 45243 - DNA, 416 bp, Mus musculus
  source 1..416: mol_type = other DNA
actagaaaggttctcagaaacgtgtttgtgagctcagacgcatgcgttcttgacgccgcaagcagcacagtggcgtggtcttttcaacaccccgcgtagggacgacgggttcctaacacgcatgccttgcccggtagagcgagctgtcgcgcgcattgccgactggttgggcatgcagctacctagcacgcttgcgcgtcggcgcctgcgtactaagacccgtgtgcagcagcggcggcggcgctagaggcggcggcggcggcggcggcagcacagtagcgggttcggaggcagcagttgggctcgcggcgagcggaccaggtcaagtcagtgcgttcgcgcgaggtgagagcgggcagggcgcgcctgcgcgtaacctcggcggctgtcgccgcacgggttcggtgagggccggc

SEQ ID NO: 45244 - DNA, 317 bp, Mus musculus
  source 1..317: mol_type = other DNA
aagtctgtgtcgcctggtccagagccactcttctcttctctttatttaggatttagaaaggaaaactaaccagggtttagccacactagcgtgagactagaaaggttctcagaaacgtgtttgtgagctcagacgcatgcgttcttgacgccgcaagcagcacagtggcgtggtcttttcaacaccccgcgtagggacgacgggttcctaacacgcatgccttgcccggtagagcgagctgtcgcgcgcattgccgactggttgggcatgcagctacctagcacgcttgcgcgtcggcgcctgcgtactaagacccg

SEQ ID NO: 45245 - DNA, 504 bp, Mus musculus
  source 1..504: mol_type = other DNA
ctggagcaaaaataacgaactttagtttgtttaacacaggtgctatctaccatacataacctataaagaaggtatcttagggtgtttacatgtatggatattttattaaaactaagaaaagagctgcgctttgttctgtgtagcccaaactgtcctggtgatccaagctgacttcgaactcagtaaggctccaggctgtgctacacagaccttgtttcaaaacagagtggaggtcagcgggcccccctcactgcagaaccgcggctgccggccgctacccccacccgggtcgtcaggggcaaccttggaggctcgccccggccccgccaaccaggtggccgttgaggcgccaccagccggtttgatttcccgcggccggtggaaagggttagccaatgggctgccggagtccgggaggcggggctggcgtgcgggcctggggggctgcgcggctacgattggccggcggccgggaggcgggacctgagcgcgccgcttcagccg

SEQ ID NO: 45246 - DNA, 214 bp, Mus musculus
  source 1..214: mol_type = other DNA
taccctggtggcgccaccagcacatgcctggaggctcagggacttgtccgggtcccctccaagaaccagttgccctcccccgcctgggacaggctgggacacccgggacctgacatttgggtttcagaaatttcgcagtccaagattttggatccccagccagcactagggctaggggtgagtggggaggtggcttcagctctccgcatctttc

SEQ ID NO: 45247 - DNA, 184 bp, Mus musculus
  source 1..184: mol_type = other DNA
cagaggacctgggttcaaatcctaggcacactgggcctatttttttttttaagattttattattatatttaaatacactgtagctgtcttcagacacaccagaagagggtgtcaagatctcattatgctccttcgggtagaaggagctgacaggctcaggtgctaagtcctgtacctacctggt

SEQ ID NO: 45248 - DNA, 315 bp, Mus musculus
  source 1..315: mol_type = other DNA
ctccttcgggtagaaggagctgacaggctcaggtgctaagtcctgtacctacctggtcctgggaccaggcctgtgggaggattaccttccaggggcgtctgagggtactggctccgcagcgacccaggcgcaccttctgcaggagaagccgagccaggcaaatgaaggggcgtgaccctggagctcaggtttcttcctcttcacctggacgaggagggggtaccttcagtgacgtcaggtcactcgactgcccccaagttgcagcgctccgggtgcctgcgggggcgcgtccccgacgtcctgcatatatatact

SEQ ID NO: 45249 - DNA, 410 bp, Mus musculus
  source 1..410: mol_type = other DNA
cgacttcgcggcaggcttctgcgcaggcgcgctaggggtctgccccgggaagggggcgggcgggggcggcggcggcgcgcggtgggccgcggcgattctcgggggccccctgggcgcaggagctggggcacggatcgctgggccggagtggcctccccctccccgaggtcaggatcgcttagccgctgaggagcggggctgcagcctctgcagctaggcgtagtgacgtgtcactgaggagggaggggaaagttctgctctgaccccggggtgcagcgttacgcacgcgcactaggttactgcggggcgggacctggctccagtcatggtgcaagagtagctgtgtacagagactctggagcggcccctccgtttgcggtcctttaaggttggaagctggtgacgacatc

SEQ ID NO: 45250 - DNA, 537 bp, Mus musculus
  source 1..537: mol_type = other DNA
agagcttggcggcgaaggccacgaacgtgcgcagccccagcagacactgcgtccgcatcatcccgatgaccccggcaccgccggccccggggcccccgcggcccagctccgccagccccccgggggcagccccccgccgcagggagggggaacgggggccccgagcgtgggggactggcgtgggcagcccgcgggggcccacatgagcggcaccgacgacttcgcgtgggctgcaggcttctgcgcaggcgcgctaggggtctgccccgggaagggggcgggcgggggcggcggcggcgcgcggtgggccgcggcgattctcgggggccccctgggcgcaggagctggggcacggatcgctgggccggagtggcctccccctccccgaggtcaggatcgcttagccgctgaggagcggggctgcagcctctgcagctaggcgtagtgacgtgtcactgaggagggaggggaaagttctgctctgaccccggggtgcagcgttacgcacgcgcactaggttactgcggggcgggacct

SEQ ID NO: 45251 - DNA, 405 bp, Mus musculus
  source 1..405: mol_type = other DNA
cctactgagccctcaggggcctcaggacgccttctgatgtcgtcaccagcttccaaccttaaaggaccgcaaacggaggggccgctccagagtctctgtacacagctactcttgcaccatgactggagccaggtcccgccccgcagtaacctagtgcgcgtgcgtaacgctgcaccccggggtcagagcagaactttcccctccctcctcagtgacacgtcactacgcctagctgcagaggctgcagccccgctcctcagcggctaagcgatcctgacctcggggagggggaggccactccggcccagcgatccgtgccccagctcctgcgcccagggggcccccgagaatcgccgcggcccaccgcgcgccgccgccgcccccgcccgcccccttcccggggca

SEQ ID NO: 45252 - DNA, 428 bp, Mus musculus
  source 1..428: mol_type = other DNA
acggaggggccgctccagagtctctgtacacagctactcttgcaccatgactggagccaggtcccgccccgcagtaacctagtgcgcgtgcgtaacgctgcaccccggggtcagagcagaactttcccctccctcctcagtgacacgtcactacgcctagctgcagaggctgcagccccgctcctcagcggctaagcgatcctgacctcggggagggggaggccactccggcccagcgatccgtgccccagctcctgcgcccagggggcccccgagaatcgccgcggcccaccgcgcgccgccgccgcccccgcccgcccccttcccggggcagacccctagcgcgcctgcgcagaagcctgcagcccacgcgaagtcgtcggtgccgctcatgtgggcccccgcgggctgcccacgccagtccccca

SEQ ID NO: 45253 - DNA, 70 bp, Mus musculus
  source 1..70: mol_type = other DNA
gagtccctgatggacaactttaaagccttgagtttttcagttcactcgaaacaagctagcaagctgagct

SEQ ID NO: 45254 - DNA, 296 bp, Mus musculus
  source 1..296: mol_type = other DNA
accgagctgaattgaatttgccctgtgtcatttggaataatgtgaacattatctcatgaaagttccattaccatttttaagtaagaatatccagatgttactttacattaaagaagatatgttcatgtttggggtggtaaaaggactgtctattactgctgccactggcagaggttgtgccaaatactagaaggtgccattattactaggagaacttcatctccctccccgccactcccctggtggtggggggaagggaactgaagttccggagtggtgcactgcgcgaccggcgg

SEQ ID NO: 45255 - DNA, 382 bp, Mus musculus
  source 1..382: mol_type = other DNA
ccgtagcctaagggactcgctgagaagctcggaactgggcccgggggcccggcggggagcccgaagagctgggtgggggtctggctccgggctgcagctcttcgcccgtcccggacgcgaaggcgcgcccggcctcgtgttcgagtcgaaggggcccggagcctggaccctgggggcgggcaggcggcttgtgcggtctcggagggcccagggcagtggagcgcggccggctgggaactctgggctccgggcgcggacgggggcgggcggtggcctggtctcgccccgggagcgggcgccgggcctcgagcgctatagcgaggccggggagggcgccgcgcccaggctccgccccttggggcggaagggggagcaggggcgg

SEQ ID NO: 45256 - DNA, 295 bp, Mus musculus
  source 1..295: mol_type = other DNA
gctggatctgtagacagaatctctgtccagtcaacctcacttgcaggagttgtctataaaactgtagtgtaaatacagtttggggctcccccatttgagcgaaaaaaggtgtcaattagcactcgcctcgtttttacagacggcctgcaataaagcagagtgggctcttgtgtttgtccagggctgtaattccacaatttggtaggggccaaatctggcttgggcactgtctaatgcccctcagacatctctagtaacgtgactcaaggaagtcacgtgaagcacagtcggacct

SEQ ID NO: 45257 - DNA, 250 bp, Mus musculus
  source 1..250: mol_type = other DNA
cccagggtctctgtatctataggcactgcacccacacataaagttcttttttaaaaaaaagtattcatttcctaagacttatgtatttctcaaattcatagtgatcgtgatttattatctcccaaagtccatgagagactagaggtgcctactacgcgcttttagaagtgttttaagttggtgaaatcttctagatctcagaattcgcgctaggaagtcctagatagtttagcacgcagtgcattgtgga

SEQ ID NO: 45258 - DNA, 160 bp, Mus musculus
  source 1..160: mol_type = other DNA
actcctcactgtgaggacgttctgacaggcctcctgagtgaggtgctggaggcagcacacaggtcactgaggaagccaggagacccccctagccttttaagtttctgagaaatagaatagaggtcacggacacacatgggccctggatggaccctgtccc

SEQ ID NO: 45259 - DNA, 331 bp, Mus musculus
  source 1..331: mol_type = other DNA
atcagacccctccccattaaaaggagggagtggactattgtggttcaaatccattggcaaaagaaaatcagttttctacaatggagcatcatggggtatacccaccatactccaggaccaactcaaaagaaacgtcattgtggtgttctgtggctggttgccagggtcacaggcctgatctctaggtcactcaacagcagactggatcctggccacattgtgcaatgtgtgtgtgtgtgtgcgcgcgcatgtgtgcacatgtgcacgtgtgtacatacaaggatactcctgtctcccttctctggttatgagaaccacagggacccagctc

SEQ ID NO: 45260 - DNA, 342 bp, Mus musculus
  source 1..342: mol_type = other DNA
tgctcttgaagagaaaataaacaaaagcacctgaaggtttttgctttgtttttcaaatagtgctgtttgatctatagctatttccttccatcatccacatttggatgcttaagaagacaaaataataaattctttaaaatgcttaacaaaatgtgtttcctcctctatccttctgggtggagtgggtcctcagactcaggggtcacgttcaatgacagacaccgacattcaatagactgcctctctgttgtaagctcatgaatctgtccgccccaagtcactcagtattggctgtcccattgggccttcggacgcaaaggacatatatgtggcttctgcttg

SEQ ID NO: 45261 - DNA, 316 bp, Mus musculus
  source 1..316: mol_type = other DNA
cagcagtctcagaatgagactcaaggtcaagttcagcctcatcttagaagtcttaacatttaatttttatttgcaaatattccaaagaacagtgtgactttgttcatttacagtgttaaaaaaagttctaagttatttatatttatttgaaccataaaccatcatgaaaatttagctatttattctttctacacacaaaaatattagacttatttgtaggtggccatggagcttgcagccaagccgtgattaacctacccgatttcctatcatattaaaatgacaggcagtccattgaacgcccttctacggtctc

SEQ ID NO: 45262 - DNA, 207 bp, Mus musculus
  source 1..207: mol_type = other DNA
tcactgacagtcaggcaggcgtgcaagccgctgctaagccccacgggccaagggtctccacacctgagccttgagatcggtgacagtagcccccctgcaggtgcttctaggagctacctgcagttcaggacttgagctggggcccaggctcttgacttgccaatatgatgaggaataagataaaactgcaagctgttctttttggtc

SEQ ID NO: 45263 - DNA, 338 bp, Mus musculus
  source 1..338: mol_type = other DNA
agcctggctctcctcacagctcatcaattaggaaacaccgccagaaatttcaatggcattgtttaatgattaaaccaaatgaatcaaaaatcttcaagaaaaacacctgggtttatttctctgaattcttccttaaaaaaaaaaaaatcttgtggatagtataaacctaagttcaattttttttttttttttattacatttgtaaaatggggatagtgccatcttcatagggatagctttacaggatcctcaacaacaaatccgagaatccaagaactcatttaggttttgtggccgggcgaagagtgcaaccgggctcttcttgcgtgcgcagcagg

SEQ ID NO: 45264 - DNA, 249 bp, Mus musculus
  source 1..249: mol_type = other DNA
aaggaactgggaattgaaccaggaccagttcaatgggtcctgtcttttaattatgtaaaacagctaggatcagcctggccaggacccctcagggttaggtcccttgtcacgtgaaccagactacctctcgttagggttgtggcccgaacctggttttattttctgaccactaaagaaatcagctgcggtctaacccggccctgtgtcggtggcaggtccgggcctccttcctcttggggaaaggcgcag

SEQ ID NO: 45265 - DNA, 419 bp, Mus musculus
  source 1..419: mol_type = other DNA
gaaatttcaatggcattgtttaatgattaaaccaaatgaatcaaaaatcttcaagaaaaacacctgggtttatttctctgaattcttccttaaaaaaaaaaaaatcttgtggatagtataaacctaagttcaattttttttttttttttattacatttgtaaaatggggatagtgccatcttcatagggatagctttacaggatcctcaacaacaaatccgagaatccaagaactcatttaggttttgtggccgggcgaagagtgcaaccgggctcttcttgcgtgcgcagcaggtgcgtgggtgtgagccccgcggcgtgagaggcgcggggagaggcggggcgcggccaccaggtacgctcactcctcgcggttccccaaccagggctggggctcgtgcccgtgtcccaggtggctt

SEQ ID NO: 45266 - DNA, 146 bp, Mus musculus
  source 1..146: mol_type = other DNA
gctccagagactctcaaggtgttcagcataagaaaggaactgggaattgaaccaggaccagttcaatgggtcctgtcttttaattatgtaaaacagctaggatcagcctggccaggacccctcagggttaggtcccttgtcacgtg

SEQ ID NO: 45267 - DNA, 297 bp, Mus musculus
  source 1..297: mol_type = other DNA
gaaagtttcctgtagcctggaccgaatgcatccagctcactggtctgaggagtggtgcttgcctacttgccgcgctggaccccggcgtcccgccagactctaagcgcagccgacgggcgggtgtaggaggccggacgcctaggtctcccgagcgtctctcgcccggggttttccccacctcctcgaggggaagcagctgcaggagcttcctgagtccaatacattagaaagaggagtgtgcttatttaatgaaacggagaccccgccccgggctcaccatctggagagcctcagagg

SEQ ID NO: 45268 - DNA, 289 bp, Mus musculus
  source 1..289: mol_type = other DNA
tggagtaaatttctgaaactttaaggttgccgtgatcatggcgtttcctgacaacactggaacagtggccaagtcacagcttgtgtcttgtcttactcaaagaagcagcaggaatatttctgttttcaagtgaagcaaagcaggatgcttagcctcaggagtgtcaaagcatctttcaataggccggcacatcgaatctccaggaccctgacaccaggttacagctggttactcaggccctagcgaactcagagtggtcggcgcccgaggccacgcccccccccccccc

SEQ ID NO: 45269 - DNA, 277 bp, Mus musculus
  source 1..277: mol_type = other DNA
tggagtaaatttctgaaactttaaggttgccgtgatcatggcgtttcctgacaacactggaacagtggccaagtcacagcttgtgtcttgtcttactcaaagaagcagcaggaatatttctgttttcaagtgaagcaaagcaggatgcttagcctcaggagtgtcaaagcatctttcaataggccggcacatcgaatctccaggaccctgacaccaggttacagctggttactcaggccctagcgaactcagagtggtcggcgcccgaggccacgcc

SEQ ID NO: 45270 - DNA, 409 bp, Mus musculus
  source 1..409: mol_type = other DNA
ggtactctgcatcgagatctggaggaggttggacaaaatcattcactgtccttggcctcaccacatggtggctcacaaccatctgtaatgggatctgatgcagacagtgacagtgtatttacatacataaaataagtaaatcttttttttttaaagagagaaagagagatggaaacgctgtcttttcaggctcaaggcagcctgggaatccctgggggttagcagctgggcatcccccaggccctcacacttcttttccctccgtttgaaaaatggtttcaacccctttgcaagttctcctaaaagcccagagaccttgggaagggcctccttacctttcccaaagcctgttcttgggctgggctagcaggttcagactagtctgggcagatccatctttttaaatttt

SEQ ID NO: 45271 - DNA, 393 bp, Mus musculus
  source 1..393: mol_type = other DNA
ggtttctctgtgaagccctggctatcctggcactcactttgtagaccaggctggcctcgaactcagaaaccgcctgcagtgctgggattaaaggcgtgcaccacgcccggctctcagccgttagttaagtagttagctcttaagcaaaatccattgtggattcagggacttttgtccacaggagcacaggagcacctggacagcaggacagagaggtatacccctgtactcacttagtcctgaagagagtcctctctaaagctttgtcttcaaagatcaggtttatggaaacttccagatagggaaattcctggtccttgccaagatgctaagctcacttctcagggctgggcatgaagcccttgccaagtgcatttttaatacaccaggtgt

SEQ ID NO: 45272 - DNA, 314 bp, Mus musculus
  source 1..314: mol_type = other DNA
tcctgcagcattagccaggcatcagcagaagcgcttcttcactgagaagctagagtctccatgattcttcagcaaacatgggctttgaaggccaggcatcgggagatatctggatgctttgaaactcacagggatgagcccagaaaaatgtgccgcctttaaatgctgcacagcaccgcaaccttaagattatgggaaaacccatctgtgtgtgtgtgtgtgtgagagagagagagagagaaccaagatgatttttgagaggaggcccccagcaagtgctgggggccccagtaagtgacagaaggggcggggcc

SEQ ID NO: 45273 - DNA, 308 bp, Mus musculus
  source 1..308: mol_type = other DNA
gtagaccaggctggccttgtcagttgaacttgtgagcctgaggcaggaatattgccacatcatgttatatcagaaaagcccaattcggcttttcagcctggtctttccagacaactgtgtatagtaatgtaaatacacaaatgactgtgggtattttccattgttggaaaagcagtttagaacggagatgccagcgctcagcccgggttagcagtttgcaagccgccccaacgctggcgctcgcccacattgcgcatgccccctcctgccgcagggcgccagccaggccgcagccccgagcggcgtgc

SEQ ID NO: 45274 - DNA, 268 bp, Mus musculus
  source 1..268: mol_type = other DNA
aatggagtgagtgactgcactcccttatagcttcctgggagcataatataatacctgttcctatgtaaatgttttaatgtttgaccctgcacaaaaaaaaaaaaaaatatccctgcacctcgaaggcggccgcctgcttttaaaggggcccaatcgaggcttccccgggggcggagccagctcgaggagggcgggctgcgccgcggcgcgcgggatccggctgacgcagctggccccggctccccgagacccagaccgcgaggggagg

SEQ ID NO: 45275 - DNA, 447 bp, Mus musculus
  source 1..447: mol_type = other DNA
tgtcatgctttccttgggagaggttggccatgcttaataataaattcttataaattcagtaagtagttaactaaatcagagaggtctgagtggcttccaagtcatctggccacccttctttaataagccaattaaaaatggaaagttaaaaaaggatccaatgtggccaccccaccctcagtcaaggtgtgtggtcacaagtggtctgacaagttgttagaactgtgtaaaatctctttctggaagacaaggatagtcaagactgaagagatacaagtatctctttaaactatcttcatttttgaagacttggtctaaactgagatcctgtcagactgtctggcctggcattagcgccctggcagtcagactagaccaggtagactcggaagggcgaggccgcgctgagcatcctgggattgtagtgttcgctgcagtggcctctgc

SEQ ID NO: 45276 - DNA, 177 bp, Mus musculus
  source 1..177: mol_type = other DNA
ggaactcgtctcggtatccagacacaaactccatgtctttagatactcagggcttggacaatgattcaaatcctaaagtgagatttgaattcgtgacgtcagcgtggtcctacgaaccacctgaccctacggctggccggccggagactggagctccgccttcggggcaggggttgt

SEQ ID NO: 45277 - DNA, 292 bp, Mus musculus
  source 1..292: mol_type = other DNA
attccaaaggtgtgaattcaggtattttctgtgatccaaagtaccctaaggaatcagcctgggttctcagactgaggaatctgcccttgtgcagccctaatcccgcggatggacttagtgcccctccgcgcctcatctccggggagcttgttgggacgaggtcacctagccgggggagggggcgcgaggtggtggcgccttctgtcccccggcgcgcgctgtccggaaccgaccgtctggtcggtaccggggagcccgctttgcgcccagctcccagtcgggggacaacccc

SEQ ID NO: 45278 - DNA, 229 bp, Mus musculus
  source 1..229: mol_type = other DNA
agtggaggctcatctcccaggagccgggaagcccctaggcctggcccaggacctggctcggcaccttgccccaggctgaccaaagggcaggatcctgaggcagcctccttatctgtggaactcgtctcggtatccagacacaaactccatgtctttagatactcagggcttggacaatgattcaaatcctaaagtgagatttgaattcgtgacgtcagcgtggtcctac

SEQ ID NO: 45279 - DNA, 320 bp, Mus musculus
  source 1..320: mol_type = other DNA
gaatcagcctgggttctcagactgaggaatctgcccttgtgcagccctaatcccgcggatggacttagtgcccctccgcgcctcatctccggggagcttgttgggacgaggtcacctagccgggggagggggcgcgaggtggtggcgccttctgtcccccggcgcgcgctgtccggaaccgaccgtctggtcggtaccggggagcccgctttgcgcccagctcccagtcgggggacaacccctgccccgaaggcggagctccagtctccggccggccagccgtagggtcaggtggttcgtaggaccacgctgacgtcacg

SEQ ID NO: 45280 - DNA, 214 bp, Mus musculus
  source 1..214: mol_type = other DNA
gctcagcctgtcgagacagggtttctctgtgtagcccaccaggctggcctcaaactcagcctgcctctgcattccaagtgctgggattaaaggccttttttttaaatagaacctgggatcaattgagacaatggatctcatggaggtcttttgaatagagtactgttactttctttacagaaaaagacctctccctgtgggacagaaatcatgc

SEQ ID NO: 45281 - DNA, 372 bp, Mus musculus
  source 1..372: mol_type = other DNA
gcacctattcccaggaacaggatgttgactgggtaaatatcagagctagtactttcccacagaggccaagactttgtgccggcaagcacttcagagaaactctatctttctctgggtgtatctggtgtccaagattctcaaagaatgcagtctccagccttctccattgccagtgctagctctctcatctactaactaggaaatataatttctatcttctacaatcattgcggtgattacatgaaatatacctggagctagtgttaagtattcagtaggccctaatttaaactcagtgggccgcaaatcttcagggttcctggactggagcagattagttttgaatgtcacttaatcctggtcatttaaatc

SEQ ID NO: 45282 - DNA, 295 bp, Mus musculus
  source 1..295: mol_type = other DNA
tgatttaatgaatgaaaaaaattaaattaggcaatgacttgaggggcttgcaagacatccttttaggcaggtctaggggaatttcccagattggtaagggtcaaagcagtaacattagtaccattttcattagtattataatctggagaagaagcttcctggggaattgaaatttttattcccaaggtttccagacctctcggcaagatttccacttggaatgccctaggatctgacctctagggcaaaggacacaagggaggggtccttaatagattaattattaactctctgc

SEQ ID NO: 45283 - DNA, 308 bp, Mus musculus
  source 1..308: mol_type = other DNA
ccagggggccctgcacaagagacagccatatctgggtccttttagcaaaatcttcacgatttaaaatgtattaaaaatataatacataggtgagaatcccaaaaaacaattgtagcttcttcaaaagttcttgtgggaggacaccaatcaggttatagtgtatccaacctgttaacattgcgacacaacgttgttatataatgtaaattaggcttcatttccaagtatccttgcctggtgaggcgagaagaggctgtaatttgacacactgccgtaaagtgcctcaagcagcttcgctcccagaaggc

SEQ ID NO: 45284 - DNA, 479 bp, Mus musculus
  source 1..479: mol_type = other DNA
gctacaaacttgtttacagaagaggaattaaaataataagtccacaaaaatgactggcacataaatgtttattggaggttcatttccagtgaacaaaacctaaaacaatttctggggaaaaaaagttttttccagactgaaatttaaatgaagaatgcgatttctaggtcctcgcaacccaggccgttctgcccggattccaggcagtgctggggagactacccaatggccgcgcgcgcgcgcgcgcgcagtagaggaatgtgcactacgtggatcgcacactggggggtgctggacatagccagcaggtgccccgagagccctggggagtgggcggcctccggagtgggcggcccgggcccgggcgtctctaacgcagggcggggacggcggtcgacgcgacagtcgtggaggtgagccctgggggccttcccgccccccgagggcaggctctgaaccccggccccgccccggccctc

SEQ ID NO: 45285 - DNA, 519 bp, Mus musculus
  source 1..519: mol_type = other DNA
caagctcacctaagcaatgtttatattcattttcagggtgtttggaagagctcttgaaaaagaacatgtcggattggatacagtttcttctgctttaccaatagttctttcctgcagaacactgtgctcgtgtgcagtaggagtgcctatctgctcccaacatccccactccagctagaaagggagtaaagggcagacagtagccccgtccttccctgagtggcccctccttcagcggctccactgttaccatggcaattgggtgggtggacacgtcctatctagaggccagcagccctcgcgtggggagttaccataacaacccccctagtaatagagggggttgggtcccgcctcccttcccccgcaaattatgcgcacgcgcaccagcgggtggtcgcgctccttccactccatagcgagactggcgccctccgcccgctctcctgcgcctgcgcgcaggtgtcggcgccccgcaggagggggcgcccggcgcgttcgcgtcacggtcggctctgc

SEQ ID NO: 45286 - DNA, 303 bp, Mus musculus
  source 1..303: mol_type = other DNA
accaccagtccaagggtgggacagcctacagtgggctggccactcccgtgtcggtcaccagtcacgaaaatgcgccactaatctcatggagacatttttctcgttgccatggaactgagctcttggggcccagggctcagctctggttcagggctggggatatatgcctttcccctgctctccatgaagggcagtccttccaaggctgcgctgtactagcatctgttccgatccgatccgacccaatccgatccaatctgtaacaggtattggtgccagtgcgcacgcacacacacccgcctc

SEQ ID NO: 45287 - DNA, 229 bp, Mus musculus
  source 1..229: mol_type = other DNA
gacaggcagcggatttctggggctgcagcacccaggttctggcagagggctgctgctaaggcaaccgctctgagcagaatgcccacagacgaggcacgcctcgctggtgaggcagttcggggatcctctgggggtgggctcgagcccaggagacgcggcagcagctcagccggggcagagagggttccaagcccgcttcccaccccgcgtcctcaaagatacgttgagc

SEQ ID NO: 45288 - DNA, 359 bp, Mus musculus
  source 1..359: mol_type = other DNA
tattcctctacctcttagccagtgaggaagacctagcgagctttttaggagctcatgcctgcaggccaaggccccagacggcctaggagtccctgcagactaattctgtacagtgacctatagtgtgaattggcccctgtcagggtataatagctgtggtggtttgaatgagaaaccccatgacacacacacaaaggaccaaggctcatgtttgaatgcttggtcatctgaagatgtgggctctcagcctccagcaccgtgcctgcgagatgattatgcatccatctgagacaagggacacaggatggggcagctgcctcccccacccccacagcaggggcagaggattaggtgacagt

SEQ ID NO: 45289 - DNA, 267 bp, Mus musculus
  source 1..267: mol_type = other DNA
ctggtgttatagacagtcctatacctcaggccagcagatgaagctatttgcataatgaacttgatttttaatatacttgagctatacttgaagaacatgtatctagactagagataaagacttaagtctagggcagaatcccaggcacttatggggttatgatacaaaaacctatgaagtcacttgactagaatgtcagcagtccccagattcggagcctttgcccgcaagggagactgttccctgggtcacaggagctgattatca

SEQ ID NO: 45290 - DNA, 350 bp, Mus musculus
  source 1..350: mol_type = other DNA
aaagcctcaggcagttctttagggttgggtccctgcaaaggatgaatagatcctggcaacccatggggtacggggtttcccgtccatccggccagccccaggactcgccgtcgccgccacgtgcacgtacagccccgctcgcgcccaaggtgacaccagcgcgcaacagggtgagggcgcgcgcgcgcacgcccctccgacaggcaaatctggctccagctggaagctggggcgggcgcaggctcgccgatttaggaagctaccctaaattcccgcccctccggaattggaatcgcggggtttcctcgcgagagcaagtgaatcagccgagttcggtgggcctctcgcga

SEQ ID NO: 45291 - DNA, 330 bp, Mus musculus
  source 1..330: mol_type = other DNA
gggctgctcccaaggtcgcgttctgatcgcaggagcagaagccgagtcctgcgccctcctctgcctcacccctaggtcccacttctcagctacatgggggcttagcggagctggtagaaatgtatctttctctagtacaggacttccggccaggtagactgtcttcctatgcccctggaaaagggtttccggtaaggccagtatcgcgagatcgcgagaggcccaccgaactcggctgattcacttgctctcgcgaggaaaccccgcgattccaattccggaggggcgggaatttagggtagcttcctaaatcggcgagcctgcgcccgc

SEQ ID NO: 45292 - DNA, 392 bp, Mus musculus
  source 1..392: mol_type = other DNA
tccctgcaaaggatgaatagatcctggcaacccatggggtacggggtttcccgtccatccggccagccccaggactcgccgtcgccgccacgtgcacgtacagccccgctcgcgcccaaggtgacaccagcgcgcaacagggtgagggcgcgcgcgcgcacgcccctccgacaggcaaatctggctccagctggaagctggggcgggcgcaggctcgccgatttaggaagctaccctaaattcccgcccctccggaattggaatcgcggggtttcctcgcgagagcaagtgaatcagccgagttcggtgggcctctcgcgatctcgcgatactggccttaccggaaacccttttccaggggcataggaagacagtctacctggccggaagtc

SEQ ID NO: 45293 - DNA, 470 bp, Mus musculus
  source 1..470: mol_type = other DNA
aagtagaggggactttcctctgtcacccgggtggcgcccctattcagtgacctctgtagacagggttcagagtactgaaaatgactagagtattatatcgatttcacttttgctcccttatcgtttagataaatgtggagaaggcagcagggcccaacccggggcgtctgcccgtcccgactgctggggacgcgtcttccctcctcggatggtcgcgccgcgctggcttctcactgccccggcgcaggcgcgggcgcacgcgccgccgcccgccgttccttccctcccgcggaggtgggggttggggggtggaggaatgattcggtttaaccctgggttccccgaaccaactcggcaaattttgcaaagtggggggagggttttttaaaaattgcatttgcaaaagttcgcggatggagggagggaatggggcgcaggccccgccccgccgccctttgcaaataaaaatc

SEQ ID NO: 45294 - DNA, 178 bp, Mus musculus
  source 1..178: mol_type = other DNA
gggctcaggttacccctggcctttctaaaagggcactggttcctctttaacctttgcaagagggaaagaccctcccatagcgccccagggccccaggtcaggagctacactgtcccagctggagacactccactcattccaaggaaggctttccgggtggagaagactcttaaaaggg

SEQ ID NO: 45295 - DNA, 342 bp, Mus musculus
  source 1..342: mol_type = other DNA
accgagtgcagagattcacttcctgcggttcgtgatataacaccattctttgataggcaaggattgagcgctgaagcgcccacagtcggtggggaaaagggctcctgaccacacataaatgctgtcccagcaggccaggccagcgctcagtgctgtggcctctcatcgctcatcactggccaagagaggatagggtgtcgaggggtgtcgactttagaccacagagagtgagtgcagggctcaggttacccctggcctttctaaaagggcactggttcctctttaacctttgcaagagggaaagaccctcccatagcgccccagggccccaggtcaggagct

SEQ ID NO: 45296 - DNA, 203 bp, Mus musculus
  source 1..203: mol_type = other DNA
cctggggtggtcccatctgttcctcaagagggcggaggctcaggctggagccagaagctctacccttcctcttagaaaaagaaatagatctactaactgacctcacctactctctctcaggtcggtcagggcctgtgagaatcaggatccagcttcctgccctagggaatgctccagcacgcactgagttcttatcacaccaa

SEQ ID NO: 45297 - DNA, 408 bp, Mus musculus
  source 1..408: mol_type = other DNA
ctctgtctctccgcagaatgagggaactgaagcagaaccaggagctggaggggctgccccagccaggactggccacctgaccggagccccttctggctgtctaaacaaggagagggctttcgggactaggggagccccctgtcgctctggtcgcccacgtaggggccaaagaggatcgcgaggcggagtcccgctcccgtggggaggtaactgtaacatacagagtatataaggcgctgcgcggccgggcgtctgattccctggcgcggcgggagcccccggctggctccacgagcgcctccggcctctctctgctgggggcggggtaggaaggtcgccacgcaagtcgccggcctcatctcgctgccttaagcggggcggagcagcgcgcttaaaggcatttcgtcc

SEQ ID NO: 45298 - DNA, 297 bp, Mus musculus
  source 1..297: mol_type = other DNA
aatttggcaattaagaaatctggagagagtcctgggactccctggactcctgtaggccagcaggggtcaggactccctgccagaacctggtcttgtgttctctctgttctgttattaaagagcaccaaatagagttaggcttccctaaatttgccgagtctcgcccgaggccagaagaattctgcattctccagggctctggccctggacctctgcccacgcgtccagcagcgcgtctcgtagactggcccagagtcccgtgcgcactgacgtcgaacgccgctgtcagccggcgct

SEQ ID NO: 45299 - DNA, 557 bp, Mus musculus
  source 1..557: mol_type = other DNA
gcagggtctgcaggtcctgctttaatctgggcggccatgagttcctggtcctccagtccagccaaccgacggctgcccggggcctggcacctctctgccgagctctcgcgcctagcccgcttggccgggtcgtgcaatcgggacctcggaactccggctccccgcctctcacctcgtcgcggcaggactccccggcggagagcagggagagaccgggggccagttcggggctgcccccgcccctcgccgggtccccgggcggcgggcggcggatcgcgccccgggggcggcagcagaagcggcgccagcggccggcgcccgcccgggcagcgcgagctggggcgggagcgaggggcgggggacggacggacgggcgcgcgcgcggacgggcgagcgggcacgcgctgtcccgggaaggagccacccgggtcactctagttaaaggggcagtgcactctgacgtaggaggggacttaggccggagccgcgcacgtcgtcgccgtcagaggcgcgcctagggggcggggcttaatggcagaccacgcccaggaggcggt

SEQ ID NO: 45300 - DNA, 374 bp, Mus musculus
  source 1..374: mol_type = other DNA
gttttttctcctgaaaagtaataagaagccaagctaggctgtgtatcctagcagttctcaagagatcacttgtacagatgaaagggtttaacatatcaattgtgtataaaatccagtgtataagccgggcacatagatatttttagagtatgattctcatagtatccacaatgagacagtggtaccacacttcaagtgatggtgtagaccagccttgctggtcccaactctgttggaattcacctccactcccaacctggccagggggagccagggaggacacatagctgccccctggagttgaaccctcctccattaactggaaaagtagtaatttgcaaagaagaccattgttataggttgcaggttctgcc

SEQ ID NO: 45301 - DNA, 450 bp, Mus musculus
  source 1..450: mol_type = other DNA
gggtctaaaccaggctggacaggcaggggtctccttcaccggccctgagaaggcaacagcggcctaagaggccacctgagcctgaggggctgactggggctgactggggctgacgggctgtgcggctatgtcggcgacgtctctgcatttggccccatcacctgaggcaacggtcgcaggaaggagcagctccgtagtgagcccggtcgccccacttgcctggctcgcctgaaggccgggcctgagggggaccgcctcctgggcgtggtctgccattaagccccgccccctaggcgcgcctctgacggcgacgacgtgcgcggctccggcctaagtcccctcctacgtcagagtgcactgcccctttaactagagtgacccgggtggctccttcccgggacagcgcgtgcccgctcgcccgtccgcgcgcgcgcccgtccgtccgtcccc

SEQ ID NO: 45302 - DNA, 331 bp, Mus musculus
  source 1..331: mol_type = other DNA
tacaaagaccatggctttagcaactggaaggaaggactgttaattcagaaaacggaaatcacactcaaccctaaatctaggaaccgcggctgctcgacacgtccccgcgggaagcgtggcggagtttgcgcgcagagcggctgctgcggggcggaagtgcatccccggggcccgtctaggaaaccgggaggaccctgggacattccagctagccgaccggccctgtccgaccgggcgaacatgggggcgtgggctcgctggccacctgttcctcccgcgagtgcggctcgcgcggattggccgcagtgcgcccggtaccggaagtggccgg

SEQ ID NO: 45303 - DNA, 263 bp, Mus musculus
  source 1..263: mol_type = other DNA
ccatgttgatattttgaaattgaccatggtaggaatatttacaccgtaagggaatcttcccacaagcagctacttctctgtctcacagtgtggtaggaaatgattcaattcaattaacactgtccactggccgggtgtcacagcctaggctacgctctcttagacactctcttagagtctccttgactcccaggaaagtttaagggagacttcccctggggcaaccccctcccttcatgggcctctgctggagccacgaaggg

SEQ ID NO: 45304 - DNA, 154 bp, Mus musculus
  source 1..154: mol_type = other DNA
ctaagccctggctgatctgtgaacacacagagcatgtgtaatgagaaacgtttacaccctgtcttatagtctctcttgcccaggcagaagggtggcactttctcctgtcaaggaccagaccaagttcttatgaggttaagggattcgtctttgc

SEQ ID NO: 45305 - DNA, 438 bp, Mus musculus
  source 1..438: mol_type = other DNA
tgatgatcattgcaggcataaacagtgtataatagtgtgctcagcagtgtttgtcactactagtaaaaggtgacatgtccgctgtgctgacatcagttgggaatataacatttaaaaaagttgtgttaattttctgttcaactttaaggtatttttacaatccagcacttcatactgcagcagttagtccagggtgtccaaaaggattttacatatgaccacaatttacatagtgttctgatgcttttagactttcaattatgaaaagcttggtttgacatatgtttacttaggtatggatatgaaacaaggaatattttaaatattaaaattaaaactattaaggaaaaaaaacttgtatacaaaatacaaaaatgaaatactgtattagctcgttagatgacagaagacaattcagagtttagaaaaatgattgtc

SEQ ID NO: 45306 - DNA, 257 bp, Mus musculus
  source 1..257: mol_type = other DNA
aggagagaaataacttctatctcacgtgacgtatacatacggagtgcttccctctgtaaccggccggccaacagcccgggcggcggccgggacccaacgctggccaggcctgaacccaaacttcacactcacctgcctgaaagtttctttccagtggggcgagcccacctgcttgtacaacaagcggtgcggagaccccgtatcccctcacagtgacagtgggtttacccagaggaagttgtccagtacgcacagca

SEQ ID NO: 45307 - DNA, 465 bp, Mus musculus
  source 1..465: mol_type = other DNA
actgggcagtggcagcacatggcttaatcctagctctgatcaggatcctccagatctctgttaatgaggtcagcctgctctacagagtaacaatgtgcatgctctaggtttatgtcaggtgctggacacacacacaggcctagcctctgttttggtgtttataaatccaacactcagagactggggcaggagttcctggctagcctgggctacaaggaggctccacgccaccaccgctggggcctcgaaggcgaaccaccaagaaggcgctgccttctgcgtcccacagaaatcccctccgaggccgaagaccaggtttctcgtcggcaaatgcggcggcagagacgggcacgagggtgaagtcgaagccgctggcttctccgcttcggcttacgccctcgcggagccgcaagaacacgacagctccccatcgcccaagggccccacggcagccgtgctgtgcgt

SEQ ID NO: 45308 - DNA, 323 bp, Mus musculus
  source 1..323: mol_type = other DNA
gagttcctggctagcctgggctacaaggaggctccacgccaccaccgctggggcctcgaaggcgaaccaccaagaaggcgctgccttctgcgtcccacagaaatcccctccgaggccgaagaccaggtttctcgtcggcaaatgcggcggcagagacgggcacgagggtgaagtcgaagccgctggcttctccgcttcggcttacgccctcgcggagccgcaagaacacgacagctccccatcgcccaagggccccacggcagccgtgctgtgcgtactggacaacttcctctgggtaaacccactgtcactgtgaggggata

SEQ ID NO: 45309 - DNA, 222 bp, Mus musculus
  source 1..222: mol_type = other DNA
tggcattcccctgtactggggcatataatcttcgcaagaccaagggcctcgattctggatataggtcagccggtgaacctgaacgcattccgcaaggcctccccgactgcactggcggctcccagcagagggcgcggtccggcccggatgactgcagtcctctggggtggaaagcgcttccccgggcgagggcggggcttccggcagcgcgcgaggtcacac

SEQ ID NO: 45310 - DNA, 437 bp, Mus musculus
  source 1..437: mol_type = other DNA
ctgagaaccctacgggttccaaacacatggaggctcaactggctgtaactccaattccattgcagcactggttatgtacaagttttctgcaggagtagtgaatactcgcactagttaaggcaattttagttccactcagaaattacatgatatcagaatcatagaattcacctttccgtaactgaagatactcactagtagcattttcaaaattctttgcagcatccgaaatgactttagtctcagaaaatttcactttctacatttataaatcggagctaccagtgggtaccttaaaacgtacattgtagagtaaatgtttgttacagaaataagtaatatcgtcccctaggatgtaaatgcacagcgcatgctgggaattgcagttcctttcctcggtggtcgcccagcacgcctgcacgtggcgagaaaggggc

SEQ ID NO: 45311 - DNA, 219 bp, Mus musculus
  source 1..219: mol_type = other DNA
attgagatgactttcctaaagactgtattttcattatctgaatagattggtcatctgttacaaattacccaatccaaacttccagttttgagaaaagttccaatgttgccttttctatgcagttttaccaacaagttggcttcaaacgggaagcgcttccttcacggccgcgatgcatgccgggaactgtctccgtacccaggccggccagaccggagg

SEQ ID NO: 45312 - DNA, 396 bp, Mus musculus
  source 1..396: mol_type = other DNA
tatccataggccgtcttttgaaagatgtttccagatagctcgagatttctatactcaatataatagtctttgggtgggcggctcccggaaggggcacaccctttgggactgggaccagacccactgggctggcgccacagctgctcaccacggccgcggtggtgaggacgcaggcggtgcgcggctgaccggcgggatctgcaggtactccagccggaggctctggtccccccttccccttccgccagtatgccaggcggcggggcggactcaaagctggccttcagcctacctcggacagccaccaatcgctggcgccttggggccgctcacgagggagctccttttgacccacggctagccaatcaggagtgcgatccagcccgccttggcgtt

SEQ ID NO: 45313 - DNA, 352 bp, Mus musculus
  source 1..352: mol_type = other DNA
aacgggaagcgcttccttcacggccgcgatgcatgccgggaactgtctccgtacccaggccggccagaccggagggattccctactcctcggagagaagcgatcccgggagtgatggattccgccccttccttcaagctacactcagcggctggaagaaggcggtaacaccggctcctccgaatcgactgagacctgcctcgaacgccaaggcgggctggatcgcactcctgattggctagccgtgggtcaaaaggagctccctcgtgagcggccccaaggcgccagcgattggtggctgtccgaggtaggctgaaggccagctttgagtccgccccgccgcctggcatact

SEQ ID NO: 45314 - DNA, 491 bp, Mus musculus
  source 1..491: mol_type = other DNA
gaaggggcacaccctttgggactgggaccagacccactgggctggcgccacagctgctcaccacggccgcggtggtgaggacgcaggcggtgcgcggctgaccggcgggatctgcaggtactccagccggaggctctggtccccccttccccttccgccagtatgccaggcggcggggcggactcaaagctggccttcagcctacctcggacagccaccaatcgctggcgccttggggccgctcacgagggagctccttttgacccacggctagccaatcaggagtgcgatccagcccgccttggcgttcgaggcaggtctcagtcgattcggaggagccggtgttaccgccttcttccagccgctgagtgtagcttgaaggaaggggcggaatccatcactcccgggatcgcttctctccgaggagtagggaatccctccggtctggccggcctgggtacggagacagttcccggcatgcatcgcggccg

SEQ ID NO: 45315 - DNA, 450 bp, Mus musculus
  source 1..450: mol_type = other DNA
tatccctggctgtcctggaactcactgtagaccaggctggcctcgaactcagaaatttgagtcagagcctcattagacatccaggtacatagctcaagactgttagttttttcatgcattacacaaacatacatgctgataagtggctaacagttttcagacagcaatgcttataaaactgcgcatttgtgcgccatctcattaaatgtgtttgtatgcccatcaaattttaagctcttacattattcatgtctttaaaactagaaacaaaaccctgggggaagctctgcacacagcttggagctttgccccctgcagacagtctcgttgctatggagatagactttgctgcgccaagacttgcaaggtgctagaaactggctggccaacctctgcaacaggctgtggagagaggccccggacccggtagaggccccctgctctgcttgc

SEQ ID NO: 45316 - DNA, 242 bp, Mus musculus
  source 1..242: mol_type = other DNA
agactcatggctctagctgcataatttgaaatgtaaataaagaaaatatctttaaaaagttctgggttagctgcctagctggactaggagtccacttgcatatgaacatgaagatgatgtttgtgagattcaaaaaccgaatgtgacatttgtgtgtgtgtgtgtgtgtgtgtgtaacatacatacatacatacacagtgtagggaactgagctcagacatgagtcctgtggtcagggcttt

SEQ ID NO: 45317 - DNA, 309 bp, Mus musculus
  source 1..309: mol_type = other DNA
gagaagaggagcaaagctttccttccttagcagaatggaaccaaagttctttccttccaggggaatttccatgaaaccttgcctcctggcaccttgaagagtttcccagaatccctctggggatataaatataactattagcctttaggaatactgatagctacagatgagaaatataaaggacctgcccctcatttcacctctgaaatgttctaaaggtcccactgaggctgccttattttttgatcaaagatgagatggaatgagcctcctcacaacagagttcaggaccctgaactctgacttctc

SEQ ID NO: 45318 - DNA, 469 bp, Mus musculus
  source 1..469: mol_type = other DNA
agatatgtaaaccaatttctggcttcagatccaggagcctggctggaccagcatgctccttgccacgactgtgggataaaacacatgcttttatccactgaacttggggacatgtgctctgatccccagcatcctcacaaatgcctgctgggcatagttatggtcttgtaatcccagattttagaaatgttaaacaggaagtatccctagttagctgcttagcgggactagccaagtccataagctttcagttcacacacatgtgaatgcatgtgagtccacttgcacatgaacatacacacgcaaatatgctgttggtgagactctaaatgtgacatttaggagacaaaccttaggtccagggaactgagctcagacatgagtcctgtagtcaggccagcagggcttctggagaaacaggaaacaagctgaaacatgttcaacttctactcccagtgtttagaggaag

SEQ ID NO: 45319 - DNA, 293 bp, Mus musculus
  source 1..293: mol_type = other DNA
aaaaggagggctgtatatagacctattcaatgtgggcagagtgataagcttgcctagctcccccagtatgggacagtggtacaaattttgctagagccggctaggctgggcgagtagtgcgtgtcacccgcggtatgtgcgttgtctcgcaagcccggacagatcacgaagccaagctgcgacccttcctgggagcctagaagaggggggtgcgcggaagcctctaggacccggcggaggccggccgctgtccccgggccgcgcgagtgagcatgtgcagaccgggcgcccgc

SEQ ID NO: 45320 - DNA, 276 bp, Mus musculus
  source 1..276: mol_type = other DNA
caagacttttgagggtgctggatatccccaggattctggccttcctggagaaggagccttcatttatcttaaggctctgggaaagaagcatgaaaatgcttgtaccaaaaggccttctaaaggactggggagagcccgactcctcagccagatcttaatttatcaatttcccccagaactggggtaactctcttacagaaacatctgtggacctttttttttgaggtggcacaaaggaaagaatcccctgggtgatgtcagctgctgtcctcccct

SEQ ID NO: 45321 - DNA, 542 bp, Mus musculus
  source 1..542: mol_type = other DNA
tgcctagctcccccagtatgggacagtggtacaaattttgctagagccggctaggctgggcgagtagtgcgtgtcacccgcggtatgtgcgttgtctcgcaagcccggacagatcacgaagccaagctgcgacccttcctgggagcctagaagaggggggtgcgcggaagcctctaggacccggcggaggccggccgctgtccccgggccgcgcgagtgagcatgtgcagaccgggcgcccgctcgcccgctctgcgcccgccactcgctgtactccgcgcccgcggctcagctgggcgcccgcccgctccgccactgctcagcgcggaagtccgcagcctcggggagctgcgcgacgcgggcctgggagcgcgggtgcgcttgcgcactgcgggctgcgggcttggcgccccggaaggcgggtgccccaatcggtgagtcctgtcttcgaggtctcccagccaggaccctagcacgggctgcgagccggatctacccccgccccgggcaaactgcgactcgcggggttgcacctgctgggg

SEQ ID NO: 45322 - DNA, 396 bp, Mus musculus
  source 1..396: mol_type = other DNA
agaaccaaccacctcagagacatataattaaaaataaaaatattttttttaaaaaaagtcaaaaccatgacccagcctgggtttgtttttttagcttgctggcagactacaggaaagaaaggtggagagggtgatctacagtctgtcccctcctctattaacttcccagggatcgcaaagctcggcagtcccagcctatcgctttggtgacccccgcagcatcctgcaccctgacctgcatgcttgaagaagacgcggtcgcctgggaccaagcagccgggatgtagggaggcgggctggtcggtaacagtgatccggtggcgacctggacccctctgcggtgggcgtggccaggccaatccaagcgccggggcggggcggggccgcgcggagttt

SEQ ID NO: 45323 - DNA, 370 bp, Mus musculus
  source 1..370: mol_type = other DNA
ccagtggtgcttggctgcagaccagggaaggctctagggagccgactgctctcacaaactctggatcctttagtgctaaaggacaaaagctttcctctcttgagactagagcagatgcaggcatccagcatccctggagttgggagctgatggagaagtctgtctcagggtcactgcgccccaggctcgcagtccatgtggcccagtggccgcaatcagtgggctgcgcctcccgcgcgctgcggtggccgcgcggctccgggcgggggtgcgggcccgcgggggcggtgtcgggcgccttccgtcgtcagtccctccccggcggcgcggagggggggcggcgcggtcgccgctcggctcctttaaggga

SEQ ID NO: 45324 - DNA, 457 bp, Mus musculus
  source 1..457: mol_type = other DNA
gcggggactgcgggctccgcagtcctaggctgctgaccattctggcgggccctcacgctgccagtgtacacctgcgtagcccgggcaagggcccccgtgccggcgtcgcagctcctcccggacgccgcccccggccccggcccgctccggcccaagcccacctggtttgggcgcggcgcggccaccaagagatcgtaaggcgaccccacgctaggcctcgcttccggcctctcgcccagtcgtcatggcaacaggcgcgcggctttgaggatcaaggtgttgtaccgcgacgggctttgccgtcactgtccatgaagccagggtggggaccagaccaggtcaggcgtctagttgtctggccctaaggagttaggctcccgtagcaccactctgctgcggcggccccgcccacccggattacttgggccccgccttgggggcgcaggaccctagggct

SEQ ID NO: 45325 - DNA, 486 bp, Mus musculus
  source 1..486: mol_type = other DNA
tgaattcagtaattctaattgtttagcttatcagacaatacctaaaacacagagccataatatagtccatgtctggagatacggtatacatgacttactaaggtttgtctcctacttggcagtagatgtcagcccctctcgaatgactggctcagctttttaaaagagttaaaaagtaattcttagactttaaccggttgtaagataggatgttaaagtcggactcgtgaatcacttagtcctgattgtctttaagacacagcaatttgagaattttaaagaacctggttccaagatccgaatccatagcctaacgagagacggggtacagctcaggcgcttctgcgggtctgcagggcactgctgtggcgcagcaaccacctcctcgaaggtggccaggagcacgggaggagccctagggtcctgcgcccccaaggcggggcccaagtaatccgggtgggcggggccgccgcagcagagtggtgc

SEQ ID NO: 45326 - DNA, 340 bp, Mus musculus
  source 1..340: mol_type = other DNA
gactttcttagaaattaaagatatatgtatatgcgtgtgtgtatatatgtgtgtgtgtgtgtgtgtatatatatatatatatatatatatatatatatatattcactaagtaatgagatcctttaaagttaattgaggttccctaagttgttataaccacaactatcaactgtgattacgttaagcaaaatcaatgtgccagtggaaggtctcagtcctctcccacggccctgcacggccccaagagccagggttggagagtctgagaagcagcacagccagcgacggccgcggcccacggctcctacttccggtcgcggcgggccccacctatctgtgc

SEQ ID NO: 45327 - DNA, 601 bp, Mus musculus
  source 1..601: mol_type = other DNA
tagagactcaaagaatctcattgtccatcagccaggtttatactgcactaccagtctgaaaccttctgtgctggcttcaagttaatagcacactggttatgggttctttccatgaaaccaaagatgcagccattctggcactctgcctggctggcagtagtctccaccctcagggatgacgacgccctgacgtggcgggaggacgtttccgtgcactgcgaggaggtttccacgtgctgggaggacacctcaaggaactgagtcggagggggtgagggagggcccctctcggtggcgctgggaggtctccacctgccgggaagacgttcgaacctgccgggaggacgtctccacgcggtgggatgacgtttcctcgcggtgggacgacgtctccacgcggacagtcgatgtctccttgtggcgggtggcggggcggaggacttgctcctaaggggcgaggccatcctgcccaaccttggtcaggtgctctgcgtcacgtcacacagggaaaggtgacggcacgccccgctcgatatctgcgcgcgcagccggccgggtctgcacagataggtggggcccgccgcgaccggaagtaggagcc

SEQ ID NO: 45328 - DNA, 342 bp, Mus musculus
  source 1..342: mol_type = other DNA
gactttcttagaaattaaagatatatgtatatgcgtgtgtgtatatatgtgtgtgtgtgtgtgtgtatatatatatatatatatatatatatatatatatattcactaagtaatgagatcctttaaagttaattgaggttccctaagttgttataaccacaactatcaactgtgattacgttaagcaaaatcaatgtgccagtggaaggtctcagtcctctcccacggccctgcacggccccaagagccagggttggagagtctgagaagcagcacagccagcgacggccgcggcccacggctcctacttccggtcgcggcgggccccacctatctgtgcag

SEQ ID NO: 45329 - DNA, 420 bp, Mus musculus
  source 1..420: mol_type = other DNA
agacagacagcctttccttcgcgggaatacaacagcatgttgtcttacattagaggaagatcctaggattattaatggttttaaccccctgatttaattttttaagtgtgggtggaatactatgagaaaatgtataatgaaatataagtattaataaaggccaattaataatgtatgaaagatgatacctctttgcaaatttcaagttagagactcaaagaatctcattgtccatcagccaggtttatactgcactaccagtctgaaaccttctgtgctggcttcaagttaatagcacactggttatgggttctttccatgaaaccaaagatgcagccattctggcactctgcctggctggcagtagtctccaccctcagggatgacgacgccctgacgtggcgggaggacgtttccgtg

SEQ ID NO: 45330 - DNA, 407 bp, Mus musculus
  source 1..407: mol_type = other DNA
ccgaagtgtcaataatgtcattgcaccctcttgtgttggtgtcccaaacaggacttagcacgcggcagcaactacccgcgcctgggcaaagacggccggcctgcgcaagcgcgttcgccgaggacagtgaccgccttccttagcggtccctctagagcgcctacggtgcgctggccgcggtggcgcagggctcggccatcgcctctaggagacgcccctccggcgcttaagctggcccctgctggtgaggtgccagggtccagtcctctccatagagggctctgccgcggggtggcagagtcctgggacagacactccccacagaccccgaggggtggctccgccccaggaccgcagggaggcctggcaatggggggcggagttgtagccgcccccaatccggtggg

SEQ ID NO: 45331 - DNA, 447 bp, Mus musculus
  source 1..447: mol_type = other DNA
ctgggggaagatgggcccagggcctcaaaaatcttgatacaaatgtgtgttctgttttagggccttcgacattcacaggctgagaaagcaattgcatatacacctaacacacagtgtaagtgccgtgctaatagtcggtctctatgtttagaacagaagcagccatcctagtcgtaaacacgctaaccatgtcagcaactagatagcatcttgatcagtggtgagagctgactgtacaggaatctggactcagccatgtgtcaagtagcctgtccgaagtgtcaataatgtcattgcaccctcttgtgttggtgtcccaaacaggacttagcacgcggcagcaactacccgcgcctgggcaaagacggccggcctgcgcaagcgcgttcgccgaggacagtgaccgccttccttagcggtccctctagagcgcctacggtgcgctgg

SEQ ID NO: 45332 - DNA, 348 bp, Mus musculus
  source 1..348: mol_type = other DNA
tgggtaactgcctgaggctgtggcacctcgcagttttgcatgcaaattctaggagcacctggaccttaaagttgcctgggagctccagtgtaacccggtcagccaggagacatgcctgtggcagaagggtcacaccttggaccacgttacctgggtaccagtgagcatgggagtttgttttgtttcccagcagaggacaacctcagtttgtaccacaaactgctcaagctaccctggaggtcacagtcacggggactagcccatgctgcagaatggccttctgggagtgtctagctgccaggatctgggaacctcctccctgccgctttcagttttgttttcctgtgt

SEQ ID NO: 45333 - DNA, 418 bp, Mus musculus
  source 1..418: mol_type = other DNA
tctggagcctatagagtgactttctttgttttgttattttaaaacttcacagaaattgttaccaaggtcaacagatctgtatttctggaccacagtcactcatttggctccaaaataaacttatctcaccccgcagggtagctgagaccttccatgtcacccaccctcttggggtgaggtgttacctcatctgaggattagcatgaggaatggacgagtcctgaagcgacctgaacacagtgttgggttcagacctctctgctgctatgagcagaggattgggcagagcgcctggcgattctcaccaggtgcgcctccggatttgggactcagcaaccggcaggcactagcagagccagtgggtggctgcgcgtcacaaaggcggctgtgggcttggccgcagcgagcacagggcgcc

SEQ ID NO: 45334 - DNA, 188 bp, Mus musculus
  source 1..188: mol_type = other DNA
catgcacaccagaaggtatgcactggatcacattgttataaattttatgccttttttttaaataaacgtgaaacgaatcacgtagcagtgcgatcttaaccgagaaaaagctcagtgcttggtgagttttccagagactcggggaacgggaaccccgagtgacccaatctccgcaacgttgcgtccgt

SEQ ID NO: 45335 - DNA, 354 bp, Mus musculus
  source 1..354: mol_type = other DNA
cccaaagttgctcatagcaagattttgggatttggcactttttgctctttcagagaaaccccagctccagttgtgggcaccacacatgctgtgtagatagtcaaataaatatttttttaaaaagtctcacaagtgagtatttaactcttttcctcccccagggatccacatccctgcaaagcagagaaggccggggccaggcatcccgcaccgacccggccagtccccaggggcggggtgtcctggaatgggctgtcccgccccctcggccccgcctcctcactcagcgcccagtcctggggctctaggggtctgccccgccctgctcccgccccctccggccgcccctcgggc

SEQ ID NO: 45336 - DNA, 247 bp, Mus musculus
  source 1..247: mol_type = other DNA
caagacttctctttaagacacacaatgtacaatattacacataagcatagtttccaatgtgggactgttgcaaatagcactgctttgggttggaaccgtgttttccagactgtttccacagtctctgactccgccttctggctggttggtggtgctaagccacacctaggctacccttagagggatctcaaaggttagtctatagctatagtgttgggtttataagagcccccgaggcaggctcata

SEQ ID NO: 45337 - DNA, 362 bp, Mus musculus
  source 1..362: mol_type = other DNA
aattttttttttttaagaaaatgttgtttattttactcactttgtagaccaggctggcctcatatttttatgaatacactgtatctgtcttcagacacaccagagtggattggatccattacagatggttgtgagccaccatagtagtcagagctcttaaccgatgagccatctctttttaacaggcgatgttttcacgttttttaacatttaaaaggatcatttaaaatgccgcggctttgttcgggcgcccgggtgtcgtcaggaactcctctctgagcacacgcgcgtgtgagaacgtacggaagccacttccgccccgccctcactcggacgtcccagtgcgcaggcgccgagacctg

SEQ ID NO: 45338 - DNA, 297 bp, Mus musculus
  source 1..297: mol_type = other DNA
gggttttggggagatggtacccccctcaaaggcctcagcattgaggacttctctatagagacaacagcctcggcctcagccaggggtcctctcccatcgcaggggcagggtgtgagtagggtctggggtacccttcttccgttccgtggccgcagcgctactgcgtgacttgcgcccccgtcaggcgggtggggctgtgcggccaggcgcccccgcaccccccggggcagcacgtgcggggcggggctgtggcttgggtgggcggggccggccgcagctgtcagagccgccggggcc

SEQ ID NO: 45339 - DNA, 262 bp, Mus musculus
  source 1..262: mol_type = other DNA
aacgagaactcctgatagtcttagctccacctcccaagtgctggaattacataaaatttatttagtgtgtgtgtgtgtgtgagagagagagagagacagagacagacagacagagtactcctgtacctgcacgtgcacttgtgtgaggtcagaagacaactttgtgcagttctccccttggtggcaggtactttcacaggctgagccatcttgctcttctgcacaggcagggcagctgcagccccagcagggctagcctgtg

SEQ ID NO: 45340 - DNA, 621 bp, Mus musculus
  source 1..621: mol_type = other DNA
gaccatgattggtgtgtctgaagagaacaacagtgtagtcatatacataagtaaataaatctttaaaagaaagaaagaagaaacaaaattgagtgtcaatgttacttttcccccttttctagaggagtctgatctattatggatcctcatccccagacggagattgggtatcactgtgcaggggtcttctaatcctcagcctcaagtgttgagattacaggagaataccacctgaatccgaaccatttatcaggttgtgaacgttttctgctatgagactcataacatttttatttcaaggaccattctgtgcattctttatgaattatcaccatgcactctattttgcggctgcttaaaatggtgcacaccagtactaaattcggctttgtaacaatgactaattcgcacacctgatgtggatggctgggaggcagcgtcctcgcggggcgtctaccagccgacgcttccgcagctgggcgggcgtggaccttcccaagatggcggggctgagcccactgcgcgcggtgggcggggttccaccgccggaggcggggcagcagggccgaggggtcgggctagcaggagtgctgcttctgaaggaggcaggctcagcgcgct

SEQ ID NO: 45341 - DNA, 327 bp, Mus musculus
  source 1..327: mol_type = other DNA
tacaagttgttagaatttctctaagcaatttaagacattttaaaattcctttattccgttttttttattgtctaacatttaattgaatgctcagtacttaattttaattcatgatcagttgaaagtacttagatttaaaaaatgttttggcaaccatgtctggctagattttactagaaaaagtgactctgtcttttttcatttttaatttaatgagttctaaaagtgtttatatctgcctgatacgacccagtttaagatgcttttacttgttcacataatgtgaatttggtaataatctgtagaccaggctggcctcgaactcag

SEQ ID NO: 45342 - DNA, 340 bp, Mus musculus
  source 1..340: mol_type = other DNA
agtcactacttaaagtacatattcgttacccgggccaagaaaaagtatttatgtcaagtgtggtggcacttgcctttaatctccaggcagaggcactagggtctcttatcagtgtcaggccagcctggtctacacagccaggattatgtagagaaaccctatctaggattgtcagccctctattttgctattataaaaatcatctaatcattctcacattcttacataaaattgtatagagatttgcttgtctggttttagccataaaaattcccaaagccctggagaaatgctatcatttaagtattaggacagcgtatgacgatcgcctgcgcgagac

SEQ ID NO: 45343 - DNA, 514 bp, Mus musculus
  source 1..514: mol_type = other DNA
gaatggttcacaaatgtctgcctaccacctttccacacctctagtaaaggcgagagtgatgcactccgaaagagttcggaacccgaggaccctatggcttcctggctcaactcccggaactgctccagggtgacgaccgcggcccagccgctcttccagccagcgcaagagcgcgccgtggtgcctcggggaggtgcgggccgcaacgcagccgctgcctctcgcagccgagcgggttccaggagtgcagcggcggaaggcagcaccgcggccgcagggccggggccgggggtcgtgccagagtcggcagcccaatcttgatgtgggctccagcccttgggtgctcggaggtgtcgccgccgccgccgcctcccagccacgacctgtcaacctccgacagctcctggcgggcggggacggggtggagaccacagcggcggcagtgacttccggcttcctggctgtcgagcgaggcctgatgtcgcaacggagccgtcaagcggattccatttgc

SEQ ID NO: 45344 - DNA, 471 bp, Mus musculus
  source 1..471: mol_type = other DNA
gaacccgaggaccctatggcttcctggctcaactcccggaactgctccagggtgacgaccgcggcccagccgctcttccagccagcgcaagagcgcgccgtggtgcctcggggaggtgcgggccgcaacgcagccgctgcctctcgcagccgagcgggttccaggagtgcagcggcggaaggcagcaccgcggccgcagggccggggccgggggtcgtgccagagtcggcagcccaatcttgatgtgggctccagcccttgggtgctcggaggtgtcgccgccgccgccgcctcccagccacgacctgtcaacctccgacagctcctggcgggcggggacggggtggagaccacagcggcggcagtgacttccggcttcctggctgtcgagcgaggcctgatgtcgcaacggagccgtcaagcggattccatttgcacgttcagaatctaggctggactgccgacgtcacg

SEQ ID NO: 45345 - DNA, 439 bp, Mus musculus
  source 1..439: mol_type = other DNA
cagtctgagtcagtagctaggactcaaccagacacctcttacaaaggactcaggaagctttgaaaagctcgaacaaatggctttccaccttttattgaatcagattttaagcaaataaccccagtctatttttgttaactggagttacactcggtagtaactttcatctgtgactagagtgaaataattttttaaagcaagcttgatagtttctagaatttgtcaaagcatccaaggcttgaatctttactagattattttttaagagtataaacctagagtagtaaatatctatgaatacctctcttaattagggttattattgctgttataaaacatgaccaaaaacaatttgatttcagtcaccttccatataacaatttgacattgtgtcaagttgacataaaactagccagcatagtaccactatatatttact

SEQ ID NO: 45346 - DNA, 323 bp, Mus musculus
  source 1..323: mol_type = other DNA
tcagtctaaagagcctgaaagcacggtagctctagagactccgaatcagtcacacatgcattcccaccgcagcagtctgaggagagcctcgccgatacctgctcctgccagaggacacgtcgtagacgcggccgagcagtgccaagtacaggcccgggtcccctgggccgccgcgatagcgggctagctcctcgcagggcggggaccccacgccggccgtgacgtcggcagtccagcctagattctgaacgtgcaaatggaatccgcttgacggctccgttgcgacatcaggcctcgctcgacagccaggaagccggaagtca

SEQ ID NO: 45347 - DNA, 501 bp, Mus musculus
  source 1..501: mol_type = other DNA
cccatgctcaggcaggccggaagcttcagagtgcacgggtgctttgggaccggtaggaactaccctggcagccttggtgattccgcggctgcacttagccaaggagtggggatgagatcagctgttctcttggcaggctgacagtgcaggggagtttcccctgtccctccctcggtcagggtcagtccccgccaggcaggaacccctctgcctcgctcgagttcccggggatctctctgaatccccaccgcaccattcacctgttggggtggactggtaggtaacaaagcatcaggttgtttcttccgcgtgcactgcatcggcttcccgccagactctgtgcagagagctttgcagaccgagttcgaggctcatactcggtcccccgccaccctcggcggggcggggcggcggctgctattgcggccggaaggggtgtgggtgcagggcgggtcccgcgccgccccgcccagaggacggagccccgggcacagcatcctg

SEQ ID NO: 45348 - DNA, 279 bp, Mus musculus
  source 1..279: mol_type = other DNA
gagaatgcttccctctgaccctaggtgcacagtgtgagccagcctgatcagggggtcaaccctaattcaacaggaccgtcccccaacactctggggaaagtgttatgttgtcccatccaagctgggtctcagaactccctagggataggtgaccctagtcctggcgagacccttcagttctgtcctgttccggagagcagctcctgtttccggaggcccagcagggcccaggcggagccttgaggggtagtggggctgggcctgggtggcctcactggc

SEQ ID NO: 45349 - DNA, 652 bp, Mus musculus
  source 1..652: mol_type = other DNA
aggcacactcttgtgtccacgtgacgcacgtgtgcaactcagtcaggggacgactgcgcagcagctgaccagctctccacggaagactcacgggagggctgtgggagaagcgctctgctgagatccacacgtgggtgcacccgtccaggcccactccgaatagacacggcctccacccagagccgggcccaaggcaccgcgcgcgcggggcttctatgccgcaggtggtcgggcacccgcatagctggcttagacagatgcgggctcagggaaccatcccgaggacctggccctgcagacacagcgggaatctctgcacccccttctacagcccgttggctgcacagggcggctcagccgtccgcaccccagtgctgacccctacctaggcacctggcgacagtctctgcggtgggcaccaggctcgctcccgctgtgcgcgccccgccctgcccgccttgccgggctaggatcgcccggctcaacccgctggcgccgcagctccaggctgcgctcgctccccccgcccgccgccgcgccggcccacgatcattggctgtgccgcgcagcgccccgcagagatgtagtccggtcctcccgcccaggggtagagggggcgggtcggctcgggaggggccctgcggatgggccc

SEQ ID NO: 45350 - DNA, 366 bp, Mus musculus
  source 1..366: mol_type = other DNA
tgcactaatctacacccggttgggtcagactaactcctgtttaagacagagacacaggtgtctgtgagggcagtcccctcccgggcctcatcccgaaggagggatgctcttgcctctagagagcttcaggccaggctgaggggcccacgacgtggcctgagggacatcgggttccccgagcctgcttgtctgcgggcgccgggggcgtgacgcgtcggggcccatccgcagggcccctcccgagccgacccgccccctctacccctgggcgggaggaccggactacatctctgcggggcgctgcgcggcacagccaatgatcgtgggccggcgcggcggcgggcggggggagcgagcgcagcctgg

SEQ ID NO: 45351 - DNA, 377 bp, Mus musculus
  source 1..377: mol_type = other DNA
ctctgaaaagatttttacagattgggagataggtctaggaagtcccttcttcaatcttactaggaacatttgcaggaaatcttgcttgtgagtcaggatcttctgtagtggcctcaaactagcaattgccccttggtgtaattgggggataagccatccctttccagtttaaatgtaggcagggttttaccttggatctataggcatgtaacccctacactgggccctagtttaaaattttgaccacataatatggctccaaagcttactacggaaataactttgaccgctcagcagttcttagaagtacggccccaggttcctaggtcaccaagggggccctcctctgtggtcatcggcgacggcgctctaggcgg

SEQ ID NO: 45352 - DNA, 399 bp, Mus musculus
  source 1..399: mol_type = other DNA
ctgtggtcctgggggtaggagagggtcctccttaggaccacaccacagggtctggggccagcagctctcccatcccccagaacccagaaggtggcatatgccaagatgacagtggcttgagagagtctatgccactctcatcctgcctgtcacctaccctgagatggaagcccagaacggggtgggaactcaggggttcctggctccctacaggtaactgtgggctcaggcccacagacctggcaagaatgagttccttaaagagtcttcctggtctaggagcctgtaagcccctgtgcaggaggaaccctgcgcttcttcttcatgaggctgagaacttcaccctcttcatcaaaaaggtggcttgacacagctgcagccgctctcagcggctgcttc

SEQ ID NO: 45353 - DNA, 259 bp, Mus musculus
  source 1..259: mol_type = other DNA
gctgggaaggcttacctgtccagagctctgctgggctgtgcagaatggcttcctccctcactgctgtgtgggcaaacttgatcattgaggtagactctccaccgcctgggcagggtccagagctgtgaagctgttacccgcttcagactttgaagacatttgaaattgaagcaatgacctcgtgcctaggaccggccagcctggtctacagagtgagttccaggctacacctcctggcctcccctgcaggggaagggaa

SEQ ID NO: 45354 - DNA, 529 bp, Mus musculus
  source 1..529: mol_type = other DNA
ccctccagctcttgaagaactatttgtactggtggtaatcacaggtcattccaacatgtcttagtatggagattaaaatccctactaagtaacttgctaagagctgtttgagacaggccaatcaaatgatctattttgaacggcacctttcagatgctattatcctttcttagaggataggtcctctaggattggacgacccaatctacggagttcttttacatgctgcaaaagcaaaaggtgagtctgcttactcccttttcgtgttttaggattgaaaatctgaatatctaagatagggcaagtgtcagttatcctggcaaacaggaagcagtcaccctctcaagaggctctccacatccctctctcgggctcttgagacgacacaccaggctcttgactctgggtgcactcagtggctgagccaggcatctgccccctgccggcttccgggaggtcaggcaggctgcgcagccgagggccggcgctaggacccagcgggccgacgggcgctcgcgcgctcgccgca

SEQ ID NO: 45355 - DNA, 435 bp, Mus musculus
  source 1..435: mol_type = other DNA
tacatatatagagggatcagacccattaggatcccacgccttggtgccctagcctagctaccctagaaatttgtagggtttaaatccaggcagccagggacctacctatacatctgcctgaacagggaaaacagtcattactgtctatccctcggggttcctttcgagcgagtcccgtgggaggaggggggcgggcgagacgccttggaaagcaccttccccttcttcctcgcctccgcacacagccagtggctggaggcacagcccggtggtgtcaccgtgtcagcggaggcggcctcatcccaggctgggcgctcgccgcagtcaggctctccgcggcagcaggatcctcctggccgcgctgtgctcgcgcccgggtctgcgcgtctgccatgccctttggagccgcgcgccccgggactgcggcagcgcaca

SEQ ID NO: 45356 - DNA, 579 bp, Mus musculus
  source 1..579: mol_type = other DNA
caatttaaaatcggcctccaatgaggcctcccgacctccttcccgctttgagaatgaggagcaggccgaggatgccggcggtggccccggacagcgctgacactgaggtccggcagtaatccaggaccgcggcgttgcctcgcacggctgcctcgctgatgaacggcggcccttcctggccaccaccgcggccatcgcacccgccggggctccgcttctgccttcacgccgactcacgcggagctgtggagcccgaagcctggcgagctgagcgcacggcgcctcctccccctgggacctccgacgccgtgctgggggcctctgacctccactgcacgccgaaactgaggctcgggccggcccgggacagcagcacatcgcggagttacctgagacgccgcggcacacagtccctcgtgttccctcacaggaaaaagcggagagtcccgcgccgccatcttgcgctggaggctgctgggagggctcggtttgcgcaggcgcacaaactccgccccaccctagagacttcttaagtattcatgagggggcgggctgagcagggctgccctttgttaacca

SEQ ID NO: 45357 - DNA, 472 bp, Mus musculus
  source 1..472: mol_type = other DNA
accaagccttagctctcgaggggtctgtcgggggatgcacaaactctggccagccccaccccctaaatctcctacggctcggcggcggcggcggcggcggcagtgtgccggctggagcagaggaaacgcttcctcgacatcggcgcccgccccccacggccgcccagctggggacaggaggcccagggcaggggagttttctaacaccgacggcggcagtgcacaggatctggcctctgcccagggtcccgggaggctcttaggtcccagccacctctccaggccagggaaggctgcgccccggggcgcaagcgcactcaccacccgaaatctgtcgcgcccggtgagacccccagcgagaatgcccgcggccgcgccctccctggttaacaaagggcagccctgctcagcccgccccctcatgaatacttaagaagtctctagggtggggcggagtttgtgcgcctgcgca

SEQ ID NO: 45358 - DNA, 389 bp, Mus musculus
  source 1..389: mol_type = other DNA
gtgatagtcaggcctgtggttatcactaggggcccagcttgagctgcagcaggctttgaagccctagtacttcttcgcgggaaggtgttgcccgagatgcccccagggtcgtcccggggcggcagctccagggctctgcctcacctggggcccggccaccgcgctctcagtctctgccctcgcagcccgggcgcagctcgccagcaccacgaacccggatgggaggctgggtgcagcctccaatagggcggccttcacggacgtggtgcttgaaccgcacgccggggaacacttcactcagcggcctccggtgatagccgggacagtgcctggggtcccagggtcttcaccagggagcacagggcttcaaggagacaacagagagagaa

SEQ ID NO: 45359 - DNA, 282 bp, Mus musculus
  source 1..282: mol_type = other DNA
ttcctcaatattattgaaaaaggcagccagattcaggcggcgccacatactgaatagtgccaccaacaccagctgtcagtcggtgtccgtgctcaacaccctgcgggcctgggttggggccagaagctagaaacccaggcgctgcccctctggttgtgtgaaagaggggccagctgtcacctgacctgaacttctctctctgttgtctccttgaagccctgtgctccctggtgaagaccctgggaccccaggcactgtcccggctatcaccggaggccgctg

SEQ ID NO: 45360 - DNA, 413 bp, Mus musculus
  source 1..413: mol_type = other DNA
gcctggcacaggctagcaggttgtagtgatcagggatctgggatcccgcctcctgggaacagtcgggaaagtccctgctgcatcagcaacttccctgcggaagatgtgcagttcctgagtgctccacccctttcccagaagccatttgggcatgtatgtagtgctctggccttgagaacagtgaataaatattgtgacagtaacacctgcttgtcacccatgatacatgttatctgttgggaaacatatttttgaaagatggaggtcaagtcttacaactggccaccaggtgtaatgggtcccatttcccaagtgaggagactgatgctattaataccctctgaggatcaaatgactcacgcaggacacgtgggtggtgggtgtggcctgcctgatgccgagggcaggtggcc

SEQ ID NO: 45361 - DNA, 614 bp, Mus musculus
  source 1..614: mol_type = other DNA
atacctcatacaatgtggttaaaatatatgtaatatatatgtaatatatgcttctatgtcgtttttgtatatattatgttgcaaaatattttcaggtatttaagagatttgaatattactggcagctgcttttcatttggtatttagacaacttaaaaaaaaaagacaacaaaagttaaagatgtttcaaagtcactttttaaaaatatttttttagccgggcaggccagcctggtctacacaggacagccagggctatgtctcaaaaaaaaaaaaataataataataataatttttatttcattcattatttgcgtgtttcagaagttggttctctcctcaggattgaactcagcaacgctgtggacagctatgctcaaagaaaggagctgtgctgttcaagaggattactttggaaatgttttaaatgtcagtgggaacaaaaacactgaataaaccatattgttatatttgggaggattgggcttaatgtggtattattttataaataatcattctgaacagaagacaggatttatatgctagcacaattgtacttcgatctgctgaccatctgagttagaccttgcatattttaatccaaatatggtcaa

SEQ ID NO: 45362 - DNA, 446 bp, Mus musculus
  source 1..446: mol_type = other DNA
cttctgtgacagaagcttctcttgacaggaggctgacagtgttaaaaatgaatgctttgtaagaattcagaaactgggaattacaaatgagactttttgaaattattccaaaaaatggcttctacccatagaaaagctaccaacttaatgagtttgttcacctatagggaggagctcagagccattttaaaactggtctcagttctcccacaggtctcctgcctgacccatggcagacgtgtgggcaagacatatctttctgcctcatccataaccagaacaggtttctgtctgtggaagccggctttgtacctcacaagcgacaaggcaaagggcgtcgcttttgcctttatgggcagaaaacagcaagcgtggttagtagcgcaggtgctccagagcgcctgcgcactgagcttcaggattggtgcgcctgcgcaaagcctccc

SEQ ID NO: 45363 - DNA, 210 bp, Mus musculus
  source 1..210: mol_type = other DNA
gaagctttctactctgcccgggtctaagcctctgacccactcgacgaggggtggaaaaggggccccggggttacaccctgtagccccggggttatggccttgatgaacagagatagtctatggttttaaacttcgacaggagccagggtccaggagacattagaaaactcccaagtggaactgaggcatcctcacttggacacttcaact

SEQ ID NO: 45364 - DNA, 300 bp, Mus musculus
  source 1..300: mol_type = other DNA
tttcccagtgtgatggtgcactcttgcaatcccagctaagcatccggctatgtagataagggtgaccgagccctgcagttacagggggcatagctcctttaaaccgggtttgggttgcctggagcttctgatccggtcagccagtttaattacctctgtattataatattttaatcgttcatatggcacatttgcttttatctgagtggcggtccggcgcgctgcagcagagaagcgcggtgacccggcggatcggctgagggtggggcacacggccgcccgaaagatgagcgccactgg

SEQ ID NO: 45365 - DNA, 406 bp, Mus musculus
  source 1..406: mol_type = other DNA
gaccaaactttaggtctgagtccttgtacaggtgtctagtgagcccacactatagtgagcactgtacaggtattaactcatttaatctctccagagaactcacggactttggaatttataaaagatcttttcttgattctgggtaccatcatataagaggtgaggtgattcacccaaggtcacaaaactagtgagacatctggcacagctttgctgaataccccagctcgtgggtaccccagcaggcagcgggcgctgcctcacttagagaggcggagcggatcctggcctgtgggcctgggcgctgtccgcggcagctcccagccagggccggatccgaggattctgctgctcgcggggtgcgaaggcccggatcctggggctccccgaggtcccagggttcccc

SEQ ID NO: 45366 - DNA, 290 bp, Mus musculus
  source 1..290: mol_type = other DNA
tgagactagggttgtctagataacaactatagtaaggatctatttattggttcactgtaaaccaactttatgcatatttggtgataacaaagctgctttagaacgacgcggtcttttgggcgcccgcccaacgggcggcgaacctaggaaacgtctcccggaagccccgcctcaccagggggccgaggcctctcccctttgagcctttaaggctttgaaagagtcactgaatctgtgaactgactcctcgtcgtctgccgtgggcaggccgggcgcgagggcggggcgca

SEQ ID NO: 45367 - DNA, 497 bp, Mus musculus
  source 1..497: mol_type = other DNA
gtctcttatacacatagacactctatatttggattgtcactcaaatagtgaattcagagccttgtctaggctagataagcagtttaactatgttaaatctaaagatctaattttattttttaattaaattgaatgcttgtgtgtactcaacctctgaagatcagaaaacttgcagaaatttgattatctaccaccttgcagcaaagtgcgttcagtaatatttctgaaaagcatgtctgtgattccatcctcagtaggaggattgctattgtttccaaaaataaaataaattaaaagaaattttaatctttaagtagaattggaattttctacagcagctatatattaataatagaaagtagacaggtaaatttgttaaatttaaattattgctatgttgttaggcaaccagggctaccttgttagacctcaaaaacagcaacaaaagtactgttttgcatcattagatcattgaaagtagtagttttaactacgta

SEQ ID NO: 45368 - DNA, 608 bp, Mus musculus
  source 1..608: mol_type = other DNA
aggcagaaaggaagcatcctggcttggctcctgctctagccagcaggggccgaaatgccagtgcaccgggtacccgcggtccgccgggacagcgcagtgaccgctgaggcgacgcaagctcgccggtcggctcgggtacagccgccagctcaccctgcggaagggcgcgcggcccaggcccaggcccaggcccaggcccggcccgcgcatgcgccgcgggccctccgctcccctccctcttcctggcgggtctggggcggcggcggcgcggtgacgtcagggcgttggggcagctcctgtgacagacggagctggagcggcggggcggcggcggagtccggcggccgagcgctcaggcgcgagcgagaggacgagcgaacgctgggctagggctcgagccccggaacggccgaggagcccgcccgcggccctcccctccccctccccgggaccgggcccagcgcgccctctccctccccctcccccgctggtggatgggagtgaaggacggaggcggtggtgcagcgctccggtaaggcggcgacgctctgcgccctgctcgggtggctgcgggccgggccggcggcctgacgatgtggctgcgccgg

SEQ ID NO: 45369 - DNA, 596 bp, Mus musculus
  source 1..596: mol_type = other DNA
tccagtggtgacaccaggattcatactggagacattaactctgcagggataatgaagtaatctcattcaatacttaaatatcctatattgaataattcaaaatcaagtgtctctttgtggaataaattgacatcaaatccccccagatttgtcatcaatatacaattcataatataataaaacacagacatgtcttgtagagaataaagttccggtctttctgtgtttcagtttccagaatctctgatgaatacatgaatcacatctacaggcgattccttccgattaaaaatctgtaccagcaatttactttaggcagaaaggaagcatcctggcttggctcctgctctagccagcaggggccgaaatgccagtgcaccgggtacccgcggtccgccgggacagcgcagtgaccgctgaggcgacgcaagctcgccggtcggctcgggtacagccgccagctcaccctgcggaagggcgcgcggcccaggcccaggcccaggcccaggcccggcccgcgcatgcgccgcgggccctccgctcccctccctcttcctggcgggtctggggcggcggcggcgcggtgacgtcagggc

SEQ ID NO: 45370 - DNA, 388 bp, Mus musculus
  source 1..388: mol_type = other DNA
caaggccagcctggtctacaaagtcaggacagccagggctacacagagaaaccctgcaaacaaacgcacgccaggattttatccttttgccaatgctttttttagccaaatcagtttctttaaaaaaaaaaaatagaatttaaaaagaggtttacctttatgtgtatgccacgtgcacgtgtgccttccagagggcatcgagtcaccatatgacagttatttacatctcacaggtttatctgtaactactgtgtcatcacacagatttgctgtgcacttaagtgttaattgccacctgtccaagactagatttagtactatttagtaagccatcgtgaggtccctttaggctaagtcaaaagtctcgcgagagtagtctgtccagtca

SEQ ID NO: 45371 - DNA, 439 bp, Mus musculus
  source 1..439: mol_type = other DNA
ctgcaagcgcagcgccctgagtgtccgcagagacgcgctgcagtcctctgctgagagatggaggatgccggcaggagtctcccggctccggcttgcatcacgtgggaagaaataaaagtgctctctgcggtcccagtgaactgtacaaagcggaggagggcgaagacttccccttgcgctcaagctttgcgtccagtgacgcagagccgagaccctggctccgtatagctcctctcccaggggccagaagtaagtccgcccgctgcgcggcgcaggccggagcggctgacttcccagcgctcacaatgcgggttcgcgccctcggggcgggagccggccagtcgccatgacaaccgtccctgcggcgcgcgcccggccccgacgcccccaggcgtccgcaccgcacacaccccctccctgccggcagtgggaaggggcc

SEQ ID NO: 45372 - DNA, 427 bp, Mus musculus
  source 1..427: mol_type = other DNA
gtgcggacgcctgggggcgtcggggccgggcgcgcgccgcagggacggttgtcatggcgactggccggctcccgccccgagggcgcgaacccgcattgtgagcgctgggaagtcagccgctccggcctgcgccgcgcagcgggcggacttacttctggcccctgggagaggagctatacggagccagggtctcggctctgcgtcactggacgcaaagcttgagcgcaaggggaagtcttcgccctcctccgctttgtacagttcactgggaccgcagagagcacttttatttcttcccacgtgatgcaagccggagccgggagactcctgccggcatcctccatctctcagcagaggactgcagcgcgtctctgcggacactcagggcgctgcgcttgcagcgtccccagggccggaaacgctcggg

SEQ ID NO: 45373 - DNA, 430 bp, Mus musculus
  source 1..430: mol_type = other DNA
cctcctctccgacgcggaacggaggactcgtgtctcctccggactggaactcaggcgctggcgtgagagcacggcgccgcgctgaaactcgcgcttgggctctgccccgagggcccgagggagcggagcgacagcctcgctgtctcccaggggccgccgcaggcccgggcgcactgttggggaagcgccgggaggcggggcgggcaggcccggcccagcagctgggcggcgcaactcacctctgctcccggcctgcggagccagagtggccaggatccctcgcagttccgatgccgccatcttcgcggcggctgctacagctgcggcgactcggccaccgccgcgcgcacacgacggacgggcggcgcgcgctcacccacacgttcaactagggccttgccggagcgggcgaatcggccgcggagacggc

SEQ ID NO: 45374 - DNA, 411 bp, Mus musculus
  source 1..411: mol_type = other DNA
ccggggcccaacaacgaggtgccctctagagtggcacacttttagtccccacccacggaattcccaatcctgcccgcccattggcgggcggcctggtgatagcagcctgctgtcagctccgcccaggggcggatcccggggggaattgcgacctaaggtctccctgacctgtgtcaccgctgtctcagctaaccgaagccttgggcgcggaaacagcgaggaagcctggttccatcttctcacccccacccaagccacgtgtgcgcgcgcggtgggcggggccatccctggcgcggccccgccctcagtgagacgccgcggccctgcgggcgggggctccggtccgggctttggctgcggccccggtgtagtagcgggggcggcggccgggggcagcgcggctccttccct

SEQ ID NO: 45375 - DNA, 310 bp, Mus musculus
  source 1..310: mol_type = other DNA
tcttggtcaatgagcttaaagtttttaccagcatcagtaaaaatttaaagatgtaacttgagtactaaaaaagtaattttaaaaaattctcaatgctaacagtaatctgagattccgtttaccagtaatggggataataataaaaggacttcggcctaaaatgatcggaggaggccgggttgttcaatctggctgcggagcgctgcgcctccacctccgagcctcggcggaccgtcctgcgcacgcgcacacgccgtctccgcggccgattcgcccgctccggcaaggccctagttgaacgtgtgggtga

SEQ ID NO: 45376 - DNA, 741 bp, Mus musculus
  source 1..741: mol_type = other DNA
ccggcaagacagaccgaccgggggcccggcgggcggagggcagcgcactgcagccacgtccccccctggatccgccggcagccgggcccggggcttccgacatgccccccaggtgggtgggacccgggacaatctggtcctcgtgcgccggctacctcgggagcatcctcaggcgtgggcgcccgggtcgcggctggcccgggacggctgggccgctgctcggcgccgggttcacggcggggtcagcggcccggggccggctctgcccgcacatgggctggggaggagaggagccggcgggcggggctggcaggggcgctgccctggcacagctcggcgcctggcagcggggcgggtggggcgcaggctaggagctgccaccgcctcagggagggaagccgggctgggcggccgccgcaggtaacgggccggcgaggccctgcgggccaggcggggaacaggggcgggcgtgctcgccggagggcagggtccccactgccaccaggctgctgaaattgggggcccgggggccagggaggggggctggggccggcgcgctcctcccgccctgtctggaaagttttccccgaagtttgaggcggcgagccgaggccccggctgggtccagaacgcgggtggggcgcaggccagggtcagggccgcagccggctgtgcgccgtgcccgcccggggcgctgccccctccctcccctgggagctgcgtggctcccccctaacgccc

SEQ ID NO: 45377 - DNA, 274 bp, Mus musculus
  source 1..274: mol_type = other DNA
agactgaaggggcatcgaccctttccctcctctgagcagcctcccaggcaaggcaggtacctggctgcgcaccttaattaggggtgcctccaggggagcctgaggccacagagctgtcttaaagggacagctgtgctcaccactggtgaccatgctgcagaaggctgagggtaagcccgaaggccctgtccactgatcaggagaggccttaggctgcaagctctcagcttggtagctatctctgaggccctcggctcggcggctcggcggtcga

SEQ ID NO: 45378 - DNA, 231 bp, Mus musculus
  source 1..231: mol_type = other DNA
cactgaggtggccccctcgtgccccctggggcactgccaagttggctctccagtacttgtttgtggatactccgtacagggattttccaaactcttacagaagatcttctgctggaggccaagcctggggttacgtactctctgctgacgtcggcagcgcgtcagtgtgtaggagccgcggccgcatgaatgagccgccgcacgagtactacgcgcgcctataaaagcggc

SEQ ID NO: 45379 - DNA, 500 bp, Mus musculus
  source 1..500: mol_type = other DNA
gcccttgcaggaccgaccggcttttcaggcggtacctcctccctgtttggagaatcctctcgacatgggctcagggccggtacactgttccagccgcttctcttgatgacctccagcagcgaagggcaaacaggcgggggctgggctgcgggtgcgtgctcggagaagcctgcggggccggggacagtggccggacgacccgcggatgtggggcaggtacttggacggacgcgggccgaggatcatccccgggggcaggtgcccttggaaggcggcgccgcacggctgagcgccgctgccctgggaataggacggcgctccgcaccgcgggaggcgccccgctcggcggatcgctcggtcctgcaaacgcgcgccgggcgctttcccggagctaggctgtgcgtacgagcgcccttttgcagcagccgctgcccgagggggcggggaagaggggacatcggctggccggctagggggcggcgtcccccctcaaaaccgcc

SEQ ID NO: 45380 - DNA, 335 bp, Mus musculus
  source 1..335: mol_type = other DNA
gctggcttcgaactcagttcaggttgacctcgaactcaacggtgttaagggtgaccttgactccccactctggagctccacatgtgtggcccatcacagtgccaagctctgggcctggcaccggcgccgggcacgcactgcgtgagttaccaggggagagctccgactgttccctccgccaaatagcaccgcgctgacacaggcgcactgcgacccagcgacccggcctcggaagagtcacgtgctctgcctgccgcgcggtagccaatgcggtggctatcggcgtctaggcccgcccctcgcaccgcgctcacgctgggggcggatcggcacgc

SEQ ID NO: 45381 - DNA, 582 bp, Mus musculus
  source 1..582: mol_type = other DNA
tcagcttggtggaccaggggccggcggctgacccaaccctatgcacagctcctgcgccatcctttcaagaaagtggggagaaggtgctggcgtctcaggagacgcgccccctcatttctcccctgtccgcagagcggtgactcagcctagatggccccgactgactgagccagggcgcccacgacagacagacgctcggactgcttcccgcctctgcaagcggagctgtcctctcaggaccaggcgggggcggggcttcgatcaggccgccccgccctacccccaccggaaatgcctccccgctgggacatctttgacgtcacaggactctgacgtcacggtcgcgtgtctgtccgcgcgcgcgggcgacgggatatccccgcccgggcagcgcgccggcaccttggctctagactgcttactgcccgggccgccttcagtaacagtctccagtcacggccaccgacgcctggccccgccccaggaccgccgacccccggcccctccacgcctccctgcgccgctgtccgcggtgctgatgcagtgcaagcgcctccctcgggcacgcctgttcaaggtccc

SEQ ID NO: 45382 - DNA, 486 bp, Mus musculus
  source 1..486: mol_type = other DNA
ttcaattgaaaatgactttggtcggctgaaaaattttaaaatgtcttctgatttggctactgggaagccactggtgacttcgcgttttctctctcgtgaccagagagatgtctaggcatgtttatttgtcttgttttcttagatgtaaacaaactaaaaaaactcgtgtccagcatcctctgatggtcttagagaccccgggatgctcccccgcggcgggtcctctttgcaccgctccaaggccgcgctgctagggccatcgagcccgctcagggtcgtctccttacctcgatggccccctcgctcaggtgtcccaccatggcgcgctcgcgctcttgcaccgcctgagcttctctgccggggtcccgcgggcgtgccgatccgcccccagcgtgagcgcggtgcgaggggcgggcctagacgccgatagccaccgcattggctaccgcgcggcaggcagagcacgtgactcttccgaggccgggt

SEQ ID NO: 45383 - DNA, 248 bp, Mus musculus
  source 1..248: mol_type = other DNA
gaccagagctctggggtcgaaagtcctattatttggcaatcaaaaatgttcttggaacagtttttagagttcagtaaaaatttttattcttcagtttccataaggtattttggtcatagcaacataaaaagctaactataaaaactaagttgtatatgaagaaaccttggctgccttaaaattcactccagtgtattaaggcatggcaaaatgtagtcgagtcctttgtcacagtgtcacaggaatga

SEQ ID NO: 45384 - DNA, 199 bp, Mus musculus
  source 1..199: mol_type = other DNA
agggtttctctgtgtagccctggctctctctgatacctgatgaggccaggagatagcgtcagaggagctggagttccaatcgagctatgtgagctgggaacagaactcaggtcctctgcgagagcagccagtgctcataagccttcagaaggaggggagaagaatcaccttgctcccacctgcagcggctggctccctc

SEQ ID NO: 45385 - DNA, 391 bp, Mus musculus
  source 1..391: mol_type = other DNA
atacaaggtctggtatacataggcatggatagtcatgcccagccttgatggacggcagccattgtcctctggctgcttttccgaatggttcacccttggggaaagggaacactggaggtgggaccctgggagggccggcctccagctgggtctctccagccctcgccttggaacctaggctggagggagccaaccaggatcctggacttgctacagttaggtgaacaggctcctgcagcctccccttcccttgcacacagcctctctgagcctcactgactgtggataatcccctatgttgagggatcggcaaccccttctccaggctcaggcagggtttgtttaaccggatgtacaggtcaatatttacctgctggctgcactgggggag

SEQ ID NO: 45386 - DNA, 278 bp, Mus musculus
  source 1..278: mol_type = other DNA
catcactgactcttagcctgagcacacaagtggttttaagatcttgactagaggcagagaagcatctgcaaggctgtgaccacgctggctggtgctctgattttcaacaggaaatctcaggagagtatttccttttaagattgtgtgccaagtggcaagttattaaccaagtgctttggaaaattaaggcagagctgcgagatcttcttggctcaagagcaagaggcgggatctcgcccggccctttagagacacgtgcggttgtttccgtgtctggg

SEQ ID NO: 45387 - DNA, 321 bp, Mus musculus
  source 1..321: mol_type = other DNA
aagtttatacttcccaagaggcttttggaatttgaaagttgtgtaatctttccacttagaaatcccaaggcaaagtctccttggcccttctatctggcgccatgctgtagggccccggcgaacaaagttggaatgcctggctgaggaagaacaagtcatttgagttgatcacagagctcatatttctggctgggctccttagcaggttgccaagagttgccagctgcaagtgcatttagaagcctcttgcttcttattcaagaaccccttagaaggtactgaaagaggtttggatggcctctgggtcgctggccctgaagc

SEQ ID NO: 45388 - DNA, 400 bp, Mus musculus
  source 1..400: mol_type = other DNA
tgagtcagagaagcgtttaaagatcttcccctaatttttaaaaagacgcttcctctctaaaagtgagggcgaatcctttgttaccccttgagaagccgtgggctcttcagcgatagactagacctccaagacctcgagctagctctccagtgaagaaaaaaagtcctatttgtggaaatttgaggctaaaagaagttccctttaactcacagagcgcgctgcattctgggaagctgagtttaaactgtagtttgacgtaaagctggctaggcgtggcttagagaagctcctccaggcaagggggtggcctccttgccaatcagagcccagacgcggcgggagtaagcagaggtgctggcgcccccgagtgggtgtggtcacgttgcccagcaatgggcgg

SEQ ID NO: 45389 - DNA, 292 bp, Mus musculus
  source 1..292: mol_type = other DNA
aattctatgaacttcattagcattcctctgactttctgactgtcagccagctaagctcaaaacctgtcactctttggtaaggatattcctcttaaggccaaaggggtctagaatctgaagagtgggcagagctcggctctgcctgactggcgtctctggaaccccaaggggctcggagactagtggtgtgagaactaatgtgttgtaaggcctctgaactcaggggacgccatccgttccatggcttcacccgaggtggccccatggctgcgccaatcaatgagcagccgag

SEQ ID NO: 45390 - DNA, 350 bp, Mus musculus
  source 1..350: mol_type = other DNA
aattctatgaacttcattagcattcctctgactttctgactgtcagccagctaagctcaaaacctgtcactctttggtaaggatattcctcttaaggccaaaggggtctagaatctgaagagtgggcagagctcggctctgcctgactggcgtctctggaaccccaaggggctcggagactagtggtgtgagaactaatgtgttgtaaggcctctgaactcaggggacgccatccgttccatggcttcacccgaggtggccccatggctgcgccaatcaatgagcagccgagtcccgattctgccggaggggggccccttcgaggtcccgggcaccgggtgccaggatca

SEQ ID NO: 45391 - DNA, 517 bp, Mus musculus
  source 1..517: mol_type = other DNA
ccaggcatgtccgtggtgggcagacatacatgaaggcaaaacattaatgattctttgttttgttttgttttgaagaatttgaatgtctttttgaaaaaaaaatattttatgtatatgggttctgtatctacagagggcagaagagggttttcagatccccctagttctctagaagaacagctaaagctcttaatcgtttagtcctctttcacaggtctatgcattgccagaaatggttatttgactctttggtacatagttaccactattaacagtaatgtaatattcattgagtaggagttagtactacatatcagctctgaattcatgagaataaatatacgtacgcaaacttattaaaattgtatggctttggcttttgaggaacaatatcaatagccaattaaatgtctcgcggggcgtgagcctaccctgaccacacccctcgcccacccgcctctccggctcgggctgcaacgtcaattggagatgtcgcgatggttgcgcacttcctgga

SEQ ID NO: 45392 - DNA, 220 bp, Mus musculus
  source 1..220: mol_type = other DNA
ttacagacataaagggatctctgagctctgcttttccccattgtgagacagaggactgcctgcctgcctgcctgcctcgctgggtcccagccctgccaggaacaatgctcctcactgaggataaggaacgtctccttatttggggggtatggctcctacccccctctcggggaggtgcctcgtagcagccctggcttcctcaggaaaagccttgggagga

SEQ ID NO: 45393 - DNA, 348 bp, Mus musculus
  source 1..348: mol_type = other DNA
acttcgcccttctgcaggagggtgaggtctactctgcagacagagaggacctctatgccctgctgacattcaagattgtaatcctgaacaaaatgtaataaattttataaatagtgcttttgttttcgcaaggtactgggccctgccttcagagccttgaggccttctccgctggaggcttagaggctccctagactcagggagctgacatacttaagtgactgtccctgcagtccagtaggccaagtccagggatacctgcctggaagttggccgacctgtatccagtgaccttgtagggcacagggagcccagagcaatggccctaaacttcctgggccggaactg

SEQ ID NO: 45394 - DNA, 450 bp, Mus musculus
  source 1..450: mol_type = other DNA
aggtcctcagagcagcgcagctccgctgatgatacagaaaggacggagctctttggacccctagtgatctatcgcgctctccaaagtcagacttagactaactagggcatgccaaggtgaccggcctgaacactgaccggtctagtcaggaggcacctgattccagggacctgggtcggggtgttctgatacccgtagacacggccctggttctctccggcactgcgggccgaaccgcacggtgcttggagcccagctcgctgtggaccggcaacgagaagggcgtggggcgatgcccgcggcggtcaccgggtcgaggggcactccagtttaactgggtagagctgggcctgcccgagccgccccccagcccctccggccggaaccggcttctgctcgccggggggcgggtgggtagctgctgattggccgacgcctgtttccagcccc

SEQ ID NO: 45395 - DNA, 497 bp, Mus musculus
  source 1..497: mol_type = other DNA
ccgtagacacggccctggttctctccggcactgcgggccgaaccgcacggtgcttggagcccagctcgctgtggaccggcaacgagaagggcgtggggcgatgcccgcggcggtcaccgggtcgaggggcactccagtttaactgggtagagctgggcctgcccgagccgccccccagcccctccggccggaaccggcttctgctcgccggggggcgggtgggtagctgctgattggccgacgcctgtttccagcccccgggcccggagccgggtgagctggactcccaggatccgggtctcagacgagggtgcgagaacctgaagcgccggggtaacagcccgacacgggggtcgcgcggttggctcgcgccgccggtttgaaccggcttcgcctctcccatgcggggttcgcgtggcggtagcgcctagcgacctgcgcggcagttcctgtgcggtcccgccaatgaaagcgccgtgggcgggccgtttcggggc

SEQ ID NO: 45396 - DNA, 272 bp, Mus musculus
  source 1..272: mol_type = other DNA
caacttactaagtttttcaggcacaggctctggtacacagcagccccacagccaatggttagtgggtggatgagaagacactaagattttatgttagaatctcagctctatgaaaacactgtgatagaggaagtatatacacacttgtttgacctgggcccagatgctgacacggacccggagccacggcccatttaagggtggaggggtggacccgggaaggccccgccccgcgtgaggtcaacgcgcactgctgcgtctgacgcggttgc

SEQ ID NO: 45397 - DNA, 387 bp, Mus musculus
  source 1..387: mol_type = other DNA
agaccctccttcccagaaaggcctctgttctcacgagggtggctactgaggaccaccggggccaccgcagtggtagcaactcagtgtctcactttcttgcgtggaggcagggaggcaggcacatctgcccggtggttctctgagttcatgagcagatgagctgctctctgccccagcctggccaggcctgctcacttccattcagtgactaggaattaaagtgcagattcttttcaagtactttctttttaaaaaaattttatttgacttttagttatgtgtatgcatacatgtctgtacacataggtgcaggtgcagctgttactggtgcgggccagctcacagttagccacaaatgatttccaaagttatttgaaaatactggac

SEQ ID NO: 45398 - DNA, 384 bp, Mus musculus
  source 1..384: mol_type = other DNA
ggtgagttttggaaataacatcaccgggttcactgtgtccctgggggaagtcctaaattattttgctttattcagcaaaactagttcttggtctgtctcagatggaaaaaaaaatttttttaaatgacgatcaccaagtcacttaaatgaatggaagtgttctcgaacactccccatcctgtccactcggctacgctgcgggacgatcacgaagcagcccgagtcctcgagccacgcccgcgcccttgcgcaaagcaggctgggaatgcggagcctaggtggccccgccaccgcccactcccgcgtccgggccggcggtatggcgtcgggagcccgcctctctgagcctggctcagctccgcctctacggaagccgaagcgcag

SEQ ID NO: 45399 - DNA, 363 bp, Mus musculus
  source 1..363: mol_type = other DNA
cgtgagccagtggagccgctggagccagtgggccaccggtgcgttctgcaggctggccctccacacagcggaatggcgggagagatcatccgtgtggtccagatgttctgatctttgctttcaaatcggaggtttagataaagacttgtaaaagttgtagacgtacagtacaagtaatttcttcccctttctgcacgcaaaactggggttgcccacccaccaagtactagcaccaagccttggcgggcgctggcccaggccctggggagggccaccagcacggggcggggcccaagggcgcgcgcgcgcgcctgagcctgggccttgcgggggatgacgataggcagcggcccggcccctagc

SEQ ID NO: 45400 - DNA, 380 bp, Mus musculus
  source 1..380: mol_type = other DNA
agaagggtgctgcctactcggcaaaccctaggatttgtttcttagctagggaagagatctttcaagagatgtttctcttctggagaccctgtctcaaacaatttcttttctaaggatcagtgtcccgtacagaggctccgcctgtcccggggcgccggcgagagaaatcctgcttccccggtgacccacgggcttcagccctcgtctcgcgcggggtgtccagccccgtgctgtagacacgagcccggaagtgagttccggagctgtgtagacgcggcggccgcgcgggttccgggccccaccctggaactgttcctcggaaaacctgactcaggcggagcccgcggcacgcaggaggccccgcccctcgcgcgccccct

SEQ ID NO: 45401 - DNA, 496 bp, Mus musculus
  source 1..496: mol_type = other DNA
agaagggtgctgcctactcggcaaaccctaggatttgtttcttagctagggaagagatctttcaagagatgtttctcttctggagaccctgtctcaaacaatttcttttctaaggatcagtgtcccgtacagaggctccgcctgtcccggggcgccggcgagagaaatcctgcttccccggtgacccacgggcttcagccctcgtctcgcgcggggtgtccagccccgtgctgtagacacgagcccggaagtgagttccggagctgtgtagacgcggcggccgcgcgggttccgggccccaccctggaactgttcctcggaaaacctgactcaggcggagcccgcggcacgcaggaggccccgcccctcgcgcgccccctcccctcccacccagcccggccaggccggctgcagtgggtcctagggtcgggactccgagccccctgagccaaggggcctgcaaggggcggtgcagggggcgggctggcccctccct

SEQ ID NO: 45402 - DNA, 361 bp, Mus musculus
  source 1..361: mol_type = other DNA
tttttattaattttttgagatagatgaagatgatcatgaactgtggtggatatgggagccccaatagagagaactccattttcctcctgtctcaactcctgagaggttgggataactgtcatggtgaattcagtgacttaaagccatcagctggagaaaagaccggccgctaccaattttgtaggttgaggctccgccccttagacctagactccgcctccccatcctccgcggttggggtctgggcctggcggcgacgcccaggacgccgcatgcgcactgagggccccaaggacgcgggcgtcggtccccttcccggcagcctccctcgggtagagggcgcgtcatttccggtggggaa

SEQ ID NO: 45403 - DNA, 352 bp, Mus musculus
  source 1..352: mol_type = other DNA
cagcagcaagctgatattgaggcaagtgaagcaatccccatggaggattatttatttctaactcatcaatgaggtgcaccttgctcgagctttcttgtccttgtcaattctttaaattggatgagaaaaatccccacaggccagcccgcggtcgccccgcacgggctggccgacctcgcctccagccgctccaggggccgttctccgtcgcagtcgcagttcccgcctcgccacagggccgcccgctgtgccgacggaggaggggcgtctgtcgcgcgccgaactccgggatccgcccccccccccccccgcgccagttgccagggagcggttgccgcgtgcgcaggcggaa

SEQ ID NO: 45404 - DNA, 605 bp, Mus musculus
  source 1..605: mol_type = other DNA
ggagatgcatctgcacacgcagcagcctgctcccagcacagctgttccctgaactgcggcagggatttgcctggcatgggaggcacaagtgtgggccaggcagcaccttgaccccaggagatccctggcctggccttttaagccactcagggactgagtgaggctgtttacatgtgacctgagaggagtaagcagactgtcccagcagtgtcctgggacagcccagggtacacttgtcctgctaggaagtaaacagcctgttccctggcagggtaaaggggattttttgaggagttcctatccacatccccaaatggcccagcacggaagactgccctgggcgcaccatgccttagcatccaccagtgctacacacatttgtgtggaatgcagcccctcatgggctggcacccagtctgcgagcctaagtgaggcaaaggctccgagtggccctgcgcgtctccgtgtgagcgcgaggaagtggttgctctcctggctcgctcgctccctcgctctctccgtgcccgccagcccgcccgcccgcgcgcgcagcccgcacactcaccgcttggttgctgccgggtgacgcgggctgggcccgcccc

SEQ ID NO: 45405 - DNA, 362 bp, Mus musculus
  source 1..362: mol_type = other DNA
attgtagcaagctcgcagtccggggccacttgcaagttgagcacccctggcagagcgtttggccggtgttgaaccacctgccagcagccaggtcttcctggagcaggggtcagcctacaaattagactggacttggtttccccatgggcatatgtgagtgccagctatcagcctgtggcaaatgcccagcgggcaggcagcacctataaggctggccgccttgcctttgggagcttgttaaaaacctcgtgggcaccttacctggagaggtagacagctggctcctcagcagcatctgggacagagaaacgtgtttgtgtttccaggaacagctggcccctgatagcaggttgccttggcgg

SEQ ID NO: 45406 - DNA, 243 bp, Mus musculus
  source 1..243: mol_type = other DNA
ctgtatccccagctcatgagcacggtcttgatcagcagctcaaggcacttgctgctcttgcagaggacccgagccagcacaggtgtggaaagagaaacatatacaaaataaatattaataaatattttttttaaaaaattttaagaaaacaattttcgtaaggtctgcctgggttacaatgagctccagaccatcctttgtctcaaaaaataaaaatggtaaatattttgatccattaataat

SEQ ID NO: 45407 - DNA, 480 bp, Mus musculus
  source 1..480: mol_type = other DNA
ctctccctaagagagctgctcttgctggtctctttgggagatccaagcctgtgacaccctcagaacttccctgcctggactggccacagcctgttcagctgtgcccgggaccagggagtgatcgacgcccccgggagtccggaggagtaggccctctctcctccggggcagacgtgagagccagagcaggccctgctgagcattaagtattaataattagactgggactccttggctctgggctgccagatctagagatattagcacctctcggcgccgtggaccaagggacagggtgcggggccggacgaagcctcgcagctttgccagtcgcggcatgccggggacgggaagatcggcgctcggacgagctgggcggcgcgcggcgggagcgcagcggcccctggcgcttggcctctcggcggtcaccgcggctgggccagccctcggggcggggcggagggcggggcctcgaacgag

SEQ ID NO: 45408 - DNA, 157 bp, Mus musculus
  source 1..157: mol_type = other DNA
tttgctctcacatctgtggcaggagggacagggatgttcgtaaaagctgtacaccagttattgttattataaaagcacctatgagctctgaaagttgacctgctgttgcctataggagcgctgtgggcggagcctgtgacgcgcctgtagcgccgcc

SEQ ID NO: 45409 - DNA, 401 bp, Mus musculus
  source 1..401: mol_type = other DNA
cacgaaggaatgttacttactggcttgctttccatggcttgctcagcttgcttttcctgcccaggggtggtacctcccacagtgggctgggccattctactgcccccacagattgcccgtgggccaatctgatggaacaactgagcgagtgtcaagtgcgcgcgcacgcgcacaccagcacaagggtcatccgcaatggaagtatcccactgccagcaggggagattcgaccctggcctagagctgccccttccaccgcagcttcctcccgagggggtggagcgctcacctgctcgatggcgagttgcacctctggcgtgagctgcagcacagcctccagccaccaggaccccagaagagcaagcctccaggtacggggctcgagggagccgcacttccgg

SEQ ID NO: 45410 - DNA, 538 bp, Mus musculus
  source 1..538: mol_type = other DNA
tttaaagtttagaaaatctcagactcaataattatatacaaattgaaacaagcaaaagatatatttgttatatttctataccattaaccgaatgttaatttattggcatctttcagaaaccatctgttattttatcacagttgaggaaatacgtggcccagaatggctgagcccagttgttcccgccaaacactctaatgagactttgcagagcatttgaagagacctgtagtacttttccatgttactgggcattaatgaattgtaatcacagctgtaatcaggaaacacaggctttgaagcctctttggggattcatccctgagaagccactctgtgactgtcactcacctgggatccaggaccgcatcgtgcacgtcctgcagggaggcccctggccgcgcccgcggggacagagaggggaccaggcgctcctgcccgcgcctatcgcggccggcgcgctggtcacgcgggggagcgccgcgggcgggcggccagtgccggcggggcccgagtggcggcggccgggcggggcggg

SEQ ID NO: 45411 - DNA, 530 bp, Mus musculus
  source 1..530: mol_type = other DNA
ataaaattccattcctaaaactataatgttttttaaaaactaaaaaaaaaaaagcaaattatattattcctgaagcaatttttataaaactatatgtacggaaaaaaataaggcaacccttcccctgcaattccgttccagtgcctgctggaaaagcggttccacagggctatctgtctaacgtagtgtaagcaaggatgtacagcccggacattcggtctcaaaaaccaaacacttcccagcgttgggtcgcttttctcttactccccaccctagcgaggaggcttcagacatctgcccagtagatccttatctaaggagcaactcccgatggcagggggacacagactgccctagaccaaggggatccagcgagcgggttgcacgttggcttcatggccgtggctaccgctctctggggcgcccgggcgacactacggcgctggtgggggatgcgccctgttaagaacccgccgcgttccagggacttgacagccatgcctgcggaagtcagtcctccgctatcccag

SEQ ID NO: 45412 - DNA, 327 bp, Mus musculus
  source 1..327: mol_type = other DNA
tgggggaaagatttcttcgaattcggattcaaagacagtatcagtatttttgctttatgcactaataagaaacatgttcgcatttccaggagaatccccggtttcccactggtggggctacaggatggaggccggcctcgcgactgcgggtcccccagcagagcctcagcctgcccaggaggtgcttttgggaacccacctaggtccatggcggcgacgctggcggcgggctagaccgcccctcctagtccaaggccgcgaacgcgttgcccgcgccacggcacaaagggcggcgctacaggcgcgtcacaggctccgcccacagcg

SEQ ID NO: 45413 - DNA, 486 bp, Mus musculus
  source 1..486: mol_type = other DNA
tctttttagacgttagtcaataaaaatttaaacttgatttaaataaaattcgttaccttaagacactaggatactacacttgtatgaaatagcccagatattggcacactgtatatcactgacccattattcctaccttaatgaggctgacgtctttcagcttcttgcttttcccgaaaaggcctgtgggtgcaaacagagaggggatgattatcccccgggaaaggccttatcgtagcgaagccctgcctcttcccaggtgtgaggggtctgtccctgggaactggccttagggaccgccttgcgaggctgctggtcaggagcgcgcttccctcaccgggctacgccgcagcgcccggacccagcgccgagcgttgaggtcccgagtctggaccacccgcagcaatgatgggagccctggcgcgcgctacctcacccgagcgcgcggtcgagtgttagtgacgtcacccgacgatcccccggttt

SEQ ID NO: 45414 - DNA, 352 bp, Mus musculus
  source 1..352: mol_type = other DNA
aagtaggtactaggaaggcgacttgattctgacctcatacttccgttcaaacttgctcggacagggcttgttcgctgaactggaaggggctttttaaaataacgttttgcacacagctggtaggtgagtcccctttcaaaggcttcccatggcaacgcggagtctagggcctggcggctggggtggccgcgcgcccacggcgtcttccctcccctggtgcggcccggccgcccatcggggtctcgcgctagccccgctcggtcccgggcactgtctggaagcggttcttcactttgaaaacgaagtgcaccccgcccaccaaaccgggggatcgtcgggtgacgtcactaac

SEQ ID NO: 45415 - DNA, 418 bp, Mus musculus
  source 1..418: mol_type = other DNA
tcttttttaaaaatgtgcattggaaagcatctttcaagatggggttaaaattttttttctctctcaactactagcagacctgagataagctatgaagtcaggagagcaatactgatttggaaacgctgcgccatctgttgcatacatttacggaaatggaagagagccatttcccatcggggaatggtttctctctcttgtgcttggcatcagaaacagagaggtggcgcccgccagtcttgttaaaaccctacaagttttatatgagttctcctgccttaaagacggtaccggaggctcgcgccaagacgccagctgctagggacctgcctgcgcagcgcgggccagccacggagggggcgtggggggagtggctgggcggcccggtgggcggggctcccctctcagcctccgctgc

SEQ ID NO: 45416 - DNA, 491 bp, Mus musculus
  source 1..491: mol_type = other DNA
ttaatttaaaataaataaaatccactgtgtacaacaaaccggtcagctaagcagtatctgttggcacatacctctacttaaccatagttgtatgcaactagtatgtatataatactctatatgcgtagccatggcttttaactgatttaaggcttgctagaccaatctttattccttaaaggcttaataactatgtaataaaatacatttagaacatatgtatgccatgtttcaacacttacttacaagtgaatcaggtagctgcatcactgctgcatggcttagaaacaaagcagacacgccgctcttcagcggcttcttcaaatagcatgtccagtgagcacgcactgttcgagttagaactacaaaacgcaccgcaatggggcccctagttgagttagcaatgtcttacaaacttggcagctgtttaaagatgatgcataggcagactttgcttctacaccttcttcagtgtggcgaatctgccgttg

SEQ ID NO: 45417 - DNA, 203 bp, Mus musculus
  source 1..203: mol_type = other DNA
agatagaagaggttttgatctgatgatcaaagcactcactcctgggtcacctgttataggttccaggagacagcctggactgcccttgcaggggtgcagaccccctctgccacagctcaggggtgatcagtcctgactcttctcagcaagctctgctataagagagggaagctactctaagtgaacctcactatcagctcggg

SEQ ID NO: 45418 - DNA, 566 bp, Mus musculus
  source 1..566: mol_type = other DNA
aagctctgtatggctggagccccaaaagggcttaattagaaatgccactatactagtagcctccttccctgggaattcaggaaacaggttgcagccatgggtcccatgtctgacccccatcttccttcaatgtgattgtacacagaggcgtttgactctttgccttaaaggcgcacatgtgagaaataggtccttcctctaatgccaggggatgcttcagtcgcccacccttggtgtgtgtcgggatgggtggcccagctttccagcggggcgcaggatgttaacccagtccaagctgtgctgcccaagcttgtctaggggtggggcctggcaactgcaccagtcccaggtgatgtcacccctgctcagcccaaccaggggaggaggggagcctctggccctgcgccgcctcccggagaccccgcgggagctctgtgcgccggctggaggccatcggtggggctgcgggctgctctcacaccccaccggcccgctgcggctgggggtgggcgcgctgagccttgcgcggattggctaccgcctccgccccccgccccgggcgccgc

SEQ ID NO: 45419 - DNA, 226 bp, Mus musculus
  source 1..226: mol_type = other DNA
gaatgaggttaaacttaatcttatgttgctcctgataaatcatgaatgactctgtagagggactgggctgcttaaaggccctggacatttagggggaatgttgggcttatggccaggctgtaccttatgtcaactctggctgctcacagacatcaccctgtgacaactggagcattgcccagggcgtggccaggctgcccagcccatctcacctgggggcaggtaa

SEQ ID NO: 45420 - DNA, 536 bp, Mus musculus
  source 1..536: mol_type = other DNA
gggttccccggggaacgccaggctcagctacttctggtcctccatcaagacagaggaaccttccaccttgcttgctgtcgctggctaagaatgatgcctgaggctgtcctataactcttggcaaagcctagaggtaccacccagcccccaggagggtgtctgcgtgggcactggccctggtgtggtgaggaacactgaggggttaatacccggtaccttccctcctgcctgctctggaggaagccgtgctggcttttgaggagcctgctgctcaccaagtccctgccaggcctgggcacacgcctgcctgccttgggctctgtcctgcatgcagggccgcattcagaggaccgagggcctcctagggcccactttctgggccctctcctacggattgagctcagtgtacaaggacggaggaagtgacatcgcttggcccgcccccacctccttattccctataaaaagcaaaatggtgactcagagagaggagttggaatcgtcctgcctcccgctcccactgttaattagacgtg

SEQ ID NO: 45421 - DNA, 316 bp, Mus musculus
  source 1..316: mol_type = other DNA
cggggtgacaacctaacaatttattactataatgcatattatactcagccagtaaattgcttggcatgcatgcattaggatgggacaaacatgaaaaggccaggcgtgtcatcatatgtctgtaatcccagcactgggaaagactggggctggaaaggaaaatgctgattgaaggtactttttctttttctttttctgagtactaggattaaaggcatatagaatgctgggggtcgaaccctaaggggagataatggaaattgtgtccatcagcctcggcagaaggcgtggaggtgactctctggccttcaaggcc

SEQ ID NO: 45422 - DNA, 289 bp, Mus musculus
  source 1..289: mol_type = other DNA
tggctttaggtcactctggtaaacaggcagagcctctggcacttcagctggcaggagagacacagatctccttttcagccttggtgagctgattagaaacccaggcagagggccctaataggtccctcaggtctcttctcccagcgaagtgttgagggttaagtttgccatcactggcccagatccctataggctgggccaggctgggctggggctggggctggagagaggctgtgtggcagacacacacacacacacacacacagagagagagagagagagagagcgc

SEQ ID NO: 45423 - DNA, 402 bp, Mus musculus
  source 1..402: mol_type = other DNA
cccaaataccttgggggaagtacacttgccaagcaggtatttctagacatggcaaatctatctcttaaagacagcattccaaaactatagctatggctgtatagatatctcctcagtgagagcagagaagatagttacaatccaacacttttgaatggccactatggaagtttccacttaacgcgacaaatcaaaaatagaattgattgctttatgaggtgtctccaaggagattaagattctttctaacttcctgattttctcaagagtcctttaatctttggaacctttcgattcttttgattactgactctaaagcattaaagcgtagctaagactcagtccccccaagcattcaaggcgcggaggggatccggcgggctgccgcctcccggagtgtgg

SEQ ID NO: 45424 - DNA, 367 bp, Mus musculus
  source 1..367: mol_type = other DNA
aaagtctagacgatcataaatgtcatattttttgatgaatggaaacaatagttcttgacacataaaatgttcattagtaacactaacataaagtatgttgtgcgtgcatgcaagagtgtgtgtgcacacacatgggcacacccatgcccatgtggaagtcagaagacaacattttgtgttggtcatctagtatggcaagtgttgagtaacttaagtatttttaccaataaaataattttagttgaagcttaaaaatctttcaataattaagttatgcaaaatcttcagacttgtcctgtcacagctgtcatttttgcacaagttcaggcttccctggaacttacttcataaagtgttcaaattcaag

SEQ ID NO: 45425 - DNA, 438 bp, Mus musculus
  source 1..438: mol_type = other DNA
ttcaatttaagacttaggttttaggctccatggaaaatctgaatagtagatttacaggttttgtagatattagcaaaaaaaaaaaaaaaaaaaaatcattctccttagcccaagctgggctcaataggaaccactcatgagccttgcagagattggttccaaaatcctttcaaatacaagaactttgttctcactagactctaagcaacaagttgcaattgaaacagtgagggatctgggttcatcagcacggaaccctcagcctctaggagcttgggatcccgggagggcgcccttggagcaatgctggcagtgggtgggtggcttcgccctgccgctcccgggccgaggtgcgggccccagagtctgaaaggccgcccctgtcggccctcccccgggcggggctagccccgatggcgctgactcagcaacgcgagg

SEQ ID NO: 45426 - DNA, 388 bp, Mus musculus
  source 1..388: mol_type = other DNA
taaattcaaggacaacctggtctatagagtgagttccaggatagtcaggggtacacaccaaaacaaaaataacctaaatttttctactttgcttttaaaaaaagaaaaaaaaaaacattacctggtgtttgtatctaatctttgacaatatttatattcacggtattgtgtgtaaaactctacattctaagatatttagatacaagtgtgcacagagtcctgcgttcagtcgccagtgagttcagggtcatccttgccttcatggtaagttcgaggccagccgagctgagcactgactcgcgtccctcagagtgctgagagcccatttccaaactgtcaagagcttgaaagaaagagacctggaaggtcttggctgcttctaagttta

SEQ ID NO: 45427 - DNA, 364 bp, Mus musculus
  source 1..364: mol_type = other DNA
tgagaagagacaggctggccggcccgggtcctgacttctctgcctatctgctctttaaaaaaaaaaaaaaaaaagctcccgtaattttggtgaaaaaaagaatgtgataacattaaattcatttttaagctagacttgaaaggctggtagtttgtccagtgcccaacactctcagatcctcccgggggtgcttattgggttcccgacttaacgtaccctgcccggccctgcgccctggctaggatgagtggggggctctgccgccctcccaccggacagggagcgtggaccccgcccctccccccccccccttcggtctcaaagtgacgcaaaaattcttgcggagctctttggcggcaatagc

SEQ ID NO: 45428 - DNA, 384 bp, Mus musculus
  source 1..384: mol_type = other DNA
ccagcattccgaaagctgaggcagcaagatcttgagttctagggttatattatatagaaaggctttatttaaataaaataatcagttcacattttgaaactaattggggcccactccgactcggtccggattcagcaggcgtcgcgagtgacgaggctcgtccccggagcgcggtccacgagcctctctctgtccccgccctgactttaagactctgagccgagccgcagtaccggaaccggaagtgcgcgtatacacgtcggcgtcagcgtctcgtcacgtccgcgtcgaccaggtccagcggagacgggaacccggagactgagtcgtgcagggccacccccgccccggttaaaggcgggagaaggcgaggaattaagctcg

SEQ ID NO: 45429 - DNA, 487 bp, Mus musculus
  source 1..487: mol_type = other DNA
gtaattcccagacaccaacactagttctaatttttttgttgttgttgtagccctggctatcctggaactcatttttagaccaggctggcctcgaactcagaaatctgccccggctttttaaaaaaaatttttatttttatttttttggttttagacagttctctgtatagccctggctgccaacactagttctaaatggtggatgcacagatgaccagcattccgaaagctgaggcagcaagatcttgagttctagggttatattatatagaaaggctttatttaaataaaataatcagttcacattttgaaactaattggggcccactccgactcggtccggattcagcaggcgtcgcgagtgacgaggctcgtccccggagcgcggtccacgagcctctctctgtccccgccctgactttaagactctgagccgagccgcagtaccggaaccggaagtgcgcgtatacacgtcggcgtcagcgtc

SEQ ID NO: 45430 - DNA, 381 bp, Mus musculus
  source 1..381: mol_type = other DNA
tgagaactgaacttgctctttgtggttatgcacacatagaaaccacaaatcttctgtgtagcactaacaatttcttctctctctctctctctcacacacacacacacacaactgagtctatgtgctggcctcatactgccaaacagcaactcaagaaactggctgtattttatcttctttgggggtgaggaattctgccctaaaatggccaaatatctgtgcccaatcgccatcgatgttaataacctcatcaattgccctgggtattcccccagagtatcttctgaggcctcttcgcggcgggtcgtggctgttggggacaaccccgcccgctgggaattagctgcgcgattgcggcaggaatgcggcgcgcaggcacct

SEQ ID NO: 45431 - DNA, 478 bp, Mus musculus
  source 1..478: mol_type = other DNA
cagaaagaggctcctttttcagagctagttctgatcagatgaaaggcactgtacagcccattgcaaggagcatgggaagggcttaaaccttgtaaggcatcagagaatgccctttgatactaccgacatctagatctcgttccaaatgcatcaaaatttaattagtccaatgtgtagtttgggcattgggatatttaatcttcacaaattgtacatacaactaaggctgttgaaccctctatatttatttacaagggttagaagattcttccattgatacatatttaacttgtgagacctttaaaaactttgaagaccattcggagtagagaaattttctctgcccagcccgtaagcgttgagggatccgcgcgggcgctaggagccttggggcggagcgtcggcgaggcccaccctccggacgctctagaccgccccgcccaggcgccccgccccggacgcgggtgggggagggctg

SEQ ID NO: 45432 - DNA, 500 bp, Mus musculus
  source 1..500: mol_type = other DNA
ggaggtggggaaatgccacctgctgctgtctttgctcaacctgtaggggaaagactgtcttcttcggagagcaaagatttgagaaatatttcgattctcagaccaatgccaaagggtggaggcgcccccaacccacttggcatacgcacggaccaggcggactacaagccccatgatgctgcggggcgcgtcaccgtccgctcgggctgagggccgggctatgcggcttaggggagccggagggtgcgggcgcgcgtccctgcggcggcggcggcggcggcgaccccggggccggcgccccgagcgcccccgctccagctgcgggtccctgctccctccgccgagaggcgtctttggggggtgtgggaggggaggcgcgaggccgcgtgccgccgagtgcccgctccctcccagggcgggtgggggctgctccgcgcctcccgccgccgcctcccgaggacgcccgccgcccgcaccacgccgggcgcgccgcccccgcc

SEQ ID NO: 45433 - DNA, 399 bp, Mus musculus
  source 1..399: mol_type = other DNA
tctctctctctctctctcacacacacacacacacaactgagtctatgtgctggcctcatactgccaaacagcaactcaagaaactggctgtattttatcttctttgggggtgaggaattctgccctaaaatggccaaatatctgtgcccaatcgccatcgatgttaataacctcatcaattgccctgggtattcccccagagtatcttctgaggcctcttcgcggcgggtcgtggctgttggggacaaccccgcccgctgggaattagctgcgcgattgcggcaggaatgcggcgcgcaggcacctgatctcgcgcgcccgaacctgtatgcgagggacggcgcccgccggactttcgcgcgctggacagggcgtagccgctctggcctggccctgccc

SEQ ID NO: 45434 - DNA, 390 bp, Mus musculus
  source 1..390: mol_type = other DNA
gtgtggggtgcacccacgtgcaacatgcactttactgttataagcatatgcttaggtgtaccaagttattactggtgcacacaacactcttaataatcacccagattctttgctttcctatttgaaacaagaatgatgtatttttagtcccacagagagggagtcacagttaagtgacctctagcattgtgcctggggccgagcgtccacgttgcagaccaggcgggcgcgggccgcggctcctttaagaacccccgtccactcccgcctgcgcgcaggcttcctttctccgagaggctcagccacggagctgagcggagcgccggggcggggtgcgggccgcccctcccccggtgggcagggctttcactgcttcctgcaggagcggcc

SEQ ID NO: 45435 - DNA, 437 bp, Mus musculus
  source 1..437: mol_type = other DNA
agaggcctgaaataactattttttgatgtatttcaaacctaaaaagatttgtttaggcagattaaactctggtcgtcaggctggcggccagcaccgtttttcctttgcagcgctcccttgcaagggaggccgagctgagcactgtagctcctcggaccagtgtttccttgggcaaaggagagcgggaatcaagaaagctctggcttcttaaggcttctgggcctaagagtcggtttgccaaaaggggacgcatctcggccgagggaggtggttccatgggcttggagaccaggaggacgcgtgcgccggcctggaggcgggcaggggcgggcctggcggtaggcggggcggggcgggggcgggcctggcggtaggcgaggcggggcggggcgggggcgggcctggcggcagtgcgcgagccgcggtctacgtgggcg

SEQ ID NO: 45436 - DNA, 441 bp, Mus musculus
  source 1..441: mol_type = other DNA
cctaaacaaatctttttaggtttgaaatacatcaaaaaatagttatttcaggcctcttgatcggctagtgcccgagggtcagatgcttcagtctgcctctggccaggtgcagagtcccagcccgcccagttgctggtcctggctgggcggcagggccaggcgaaggagagtctctagctgcaaaggcaagtgaagccagcgagggatcagcgctttgctcccttcttcggatcctgagggtgcagtgacccagggtctcccctggagccagacttcattgagggcaagggtagaagcaggcacctcccgttcaccgcttgtcgcaatcgctgtacaagggcgaggggagctcgacccgaactggctgtctcctcctgaccacgaccaatccggagcgcgcgcgccctcctgcttgggaggactcttgacagccacgggcgg

SEQ ID NO: 45437 - DNA, 414 bp, Mus musculus
  source 1..414: mol_type = other DNA
tgagttctctctggatgagcctcagaggtcaaatgttatccctgggatagcattatatcagaaatcttctgatcttaagtaatggacctggtggctgagcatgtgttacacacatgaaataggtctttaaaatgtgtctgagagacggagactcattgatagtcattgcctggaactcacagagataaagactcttttctgtatttcaaagctcaaagtctctgtggctagactctggcctgggcaccgcctccgccctggaggacacagacaccgggctcttcaggagtggctccctgcgagagtttgaggagaccctgttctgtcacaccaagagttgccccatcagctgggatacctactggggtgctgtgcatctgcagtgctgatgacccggtgtgtggacccccagag

SEQ ID NO: 45438 - DNA, 465 bp, Mus musculus
  source 1..465: mol_type = other DNA
tctgttctagctaaagtcctagactagatctgtgtgtatgtgttttaaaaaactgtttctaaacccacgcactgggtttcactgtgtaaccctgactaacccagaatgtactaggtagaccaggctggcctagaactcttttatactgaaaaagatcttttactctaagtctacaaagccctttgaagttcttatatgtagtgattatgctgcagagggaaggactgcgcggagctcttctccccaggatttccgggatagcacgcacctgacgcccgcgtagcgaaggcgagctgagggtgggactggaccaagcctagcactccgggccactcgggccactcgggccactccgccattcgcgcactcccgagaggacgcccgcgcgcccgcgcccgcgcgcgcatactgtcctgtctcgcgcagggtcgggcctgtcaggcaagaactctcgcgagatctgag

SEQ ID NO: 45439 - DNA, 409 bp, Mus musculus
  source 1..409: mol_type = other DNA
cataacaggttaaattaacagcataaattgcaaatacacctttacatttcaatgttttccttaaatttaatacaaaaatgttttaaaaacccaaaccttaagaacttttaaagggttcctttctttagtctaaaatctattttggttccatagttgaagtgtttgattaaaaaaacaacaaaaacacccaaaaaacttcagtgtagatttttttcattcctcttgctttcaactacaaagaaacaatgatttaagccctttgtccccttacacagataatacgatctatcgagttgtcttaaaaatgtatttatttgtagaatagtggaatctgctaggcccggccgggcttgacgcgcagcgtggctcctcattgctggagcacgggcagatcctctcgcttaaccag

SEQ ID NO: 45440 - DNA, 283 bp, Mus musculus
  source 1..283: mol_type = other DNA
tgttgatagaaaacctgaggttttggtagtagccccagagccaggatctcaaccaaaatctggcagggctgcggtgctggcacatagtaactaccaggctgacaccatgagatgcaggacctacctcaacctgatgttggatttagtcatgtcagttgtcaactctgaaacaagttcacagtttggggagtcacaatcctcctttagtgccttagaagccagaatcctgatctctgggtcacatgggtgcaggacacatgacttagcctgaacatgttaatgt

SEQ ID NO: 45441 - DNA, 539 bp, Mus musculus
  source 1..539: mol_type = other DNA
gaagatgccacttccatgtgtgtggacatgatttcaattcatttgtgtaaatatgaattatatttttaagaaactatcttacagagtgagttccaggacagcacaaacaaacaaacaaacaaattgtcttattgtacttgtgtcattagctggtgcagggctcttggggtgtagctctggaagtgccaccctaggatggcaccatccagcagggctctgcctctgcagagccactctgggaagcggcagcgaccaagcccatgaatgtccagtgcctgccttggtggtcagtgcaactcagcacattacagacatgagcggctagcgcggacaaaatctccaggcatggcctctgggacatggccgcggggtccttggagtccatcgcggacagtgtttgggcagcgctgggctccagcttggcccaaggctggcggcgcgccctggcatcagaccggccggcgtctatgccgccagccgccagcagggggcagccttcggttcgctcggctcgcgcgggcgcgggggggcggcgctgc

SEQ ID NO: 45442 - DNA, 209 bp, Mus musculus
  source 1..209: mol_type = other DNA
gcgggcatggccaccctagcaggatgatctgattcaggcttgcctccatggtgtctctgtcacaaagtgatgaggcttttcaggagttccaggaaatctgagggcttcctcctcagaagcccttccaggacggtctgggctgactgcccagatcccctttaacagctgaggggggcatgtgtcttagaaaattgggcccatgggactcc

SEQ ID NO: 45443 - DNA, 382 bp, Mus musculus
  source 1..382: mol_type = other DNA
tcaggtctacctgtcaattgtaattgaatttagctacagatgtgtagaggcagatttctgagttctaggccagcctggtcttcagagtgagttccaggacagccagggctacacagagaaaccgcacttactgccttctgatgcatctgaagtcagctacagtatacttatgcataataataaaacttttgtttgttttattttatttcattatatagcctgggctgtcaaagaacttaatatatagatcgtacatatgcagatgctttccacaacctttcaacattttaggtagggcacttctgtccttagctcccagctgctctgagaagcccaacagtagggcccctgcacttctggaaggagccgctggccatcatct

SEQ ID NO: 45444 - DNA, 266 bp, Mus musculus
  source 1..266: mol_type = other DNA
ctgggtgctaaacccatttatcctgtaacaatccccattgagcctgctgcctggcacagaaggcttctctgcacatggcccctgtgtgtaggatttattgtccttttttcaacatgaaagtaaaacacactgagaatgatttcccaccagggaggagggccataccctgggcatcctgccaagttcttggctggccgggtagctctctgggctagcagctgagctgggcgaaacctcacactccacccagctctgctctgcagggg

SEQ ID NO: 45445 - DNA, 400 bp, Mus musculus
  source 1..400: mol_type = other DNA
gtcttgttaactagagccaggcaggagtttctaacaaggaacacaagttcttcactgatgaccgaccgttgttcatgggcccctgtttgcagggctgggagctccccacccctccctcctctgcctatgcagcagctggctggtgtgtggagggagagcaaatgattctctgcacgtctcaggaggcctcactcaggctgaaagtgtctctatacagttacttagacgagtacactgtgctgtgattgagttcatgcacgcatgctggtatgtgtgtgtatataaacgcgcatgtgctctgcaggctcagctgtccaggaggagaaggaaagtgccacccttccctctgctgtctgcacagctctggcagggttgggcagctgcagccctgtgctattct

SEQ ID NO: 45446 - DNA, 415 bp, Mus musculus
  source 1..415: mol_type = other DNA
agccagccatgactggctctcacagtctggtgaggagctgaagggacttgacaatgaccatctggaggtctctacctgggatccagcccatgccccgcatggcaagtggggatgctttttccttttatttatttttagtatactagtactaaaaaaaattaagttttaatttttaaaattttgtggatttagtggtcatcaggcttggtggctgcagactaggctgggattaaaggtcctttttacttttaataaataagataatttcatgttatattgagaattaagactgatccattcattactggtaaaattttagaaatattttctgtaaaatgtttatttatttatttagcagatctgtatgtctttgaggtcaacatggtctacacagtgagttcccagtgagactctg

SEQ ID NO: 45447 - DNA, 444 bp, Mus musculus
  source 1..444: mol_type = other DNA
aagcggtcccgttcaccctttgaacggttccatcgggacccaaggcaactgctgcagccgactgaggactccccaaaatggcgaaaggagaagctttttttttttttttttttttggtacaacgcgcctgcgcgtgaggcggctgtgtgaggggacgggagggtggcgacccaacacgcctgcgcgggaccagagcccgtggtccgcacccctacgcgctttcccaggcgcctaagcgaggcctcaggttccgccctccaatcgcagtacgccggcgcacggcggagaggcggggcttctgggctccgggcgaatgccagcgcggctgcgcgccggggggtaccccatcaccgcggctgcgcgggagccaggccgccggctgtcactgcggttgcgcgcggcgagcggcgatcccggggcgcctgcgcgggtggctttgcgggc

SEQ ID NO: 45448 - DNA, 398 bp, Mus musculus
  source 1..398: mol_type = other DNA
aacaatcagctacacctggtgggttgaaggtgtagcagtcataaaagttccaagaccgaagctggtattggcataaactgtggctattcttgttctacagaggaaatagaggaagccccatggctacatggggacccagggtgctgccttcagcaccccacagcttggaatgtctccccgacacaagtgccacactataatatcaggataattaagcttttctgtgagcacagtttgctgctgatgcagctgcctggattgagcgcaaagtaataatttattgtcctttgtacgttcaaaatggagctgccacaagggcaggcgggcctcaccagctggctacaaacccgcaagctgcgcccccgcccccagccccgcgcggcgatcccgggcgccga

SEQ ID NO: 45449 - DNA, 357 bp, Mus musculus
  source 1..357: mol_type = other DNA
aaaggcagaaaggaactacctgtccttcactgtcctaggcaaggtcctgcttgatcctgacaaccctgtcagtgccagcataagaagcctcatgcctctggcctgcaggactcgactccagacacacgaccattctgcatgcacagcctggaggactcccgcgatgggcacagacacctacgcagtgctctcaccgccggcgcccgcccagcaggcatgtttccgggtacttaccgagcacgcgttcccgggagttcgcaagcctagagggcgctcccaggactccaaggtgtttctcctaggcacgccgccagggcacgcaggcgcacgcctagggggcgctcgcaggggccacgc

SEQ ID NO: 45450 - DNA, 465 bp, Mus musculus
  source 1..465: mol_type = other DNA
gcccctcagcgggagatattttgccaactgccacgtggaggaggtctccccgaagagccggaacctgaggatcccagggccccatcttctcagagcgcccccagcgggatagaatgcttttgtagcccagtgggatccctcaaaaatctcagttgtgtgcctcagcccttttccttgtgaaaggaaatgaatacagattcagggatgatatatcagatttctgagcccttccctgagtagtgatctgcccagggaagatgcactgcagatgttaaacattaattactgactgaattcagcccttggcaactttctagctaggtagtgaatccgggagtctgccctagggccggtgcccgaggtgacgcagtagtaactgtgatacaactgaggtgccccaaaggtccccgccctccgccgctacacttccggcggggccgcggccgcagaggggcgcaggcgggc

SEQ ID NO: 45451 - DNA, 300 bp, Mus musculus
  source 1..300: mol_type = other DNA
atttatttattatatataagtacactgtagctgtcttcagacacgccaccattaggttctaagtccctgagcagtaactgttgtcaactctcagagaggatagcctaggctacataaaaaaaaaaagaaagccagacatgatgttttatatctataactcatgagaattcaaggccagcctggacttttcaagtttatattgcttttgataaccagaacccacccacgtggtgggaggtctaattgtgatttaaacacaatttttaatatgtaaaatgggcgactacaaacagtatgtgt

SEQ ID NO: 45452 - DNA, 228 bp, Mus musculus
  source 1..228: mol_type = other DNA
actgaggtctagactgactagttttatgataacttgacacaagctggtgtcatctcagaggacgtggtgttcctaaatggtctagactaagagagtttctcctcttaagccgctaagaggagcttctattcattaggaagacatggtttaaaagctctttacacaactttggcatgtgtttgggagtccaagacgactgttatactagggtatcccttgcgcgtcgcg

SEQ ID NO: 45453 - DNA, 445 bp, Mus musculus
  source 1..445: mol_type = other DNA
ggaagagcagtcagtgctcttaaccactgagccatctctccagagcccaaattcttttaaaaatgtagctctggatatgaacttcatcttttattaaacacttaagagttccattaaatgtctgaatacagtgtacttacatataataaataaataaatctttaaaaaaaaatatagttgtatagggttcagcgactatgagcatcataatcgtaagtattaatatttcaagtactgttgggtacgtctacacagggataaaggtcttctttatcggtttgcaaaaagattcttccacgcctaaaagatttggtctttaaggatccagaattctggtgggataaatctcaattcaagactttagtaatttaggcaagatatgccatgccgaggtgcgcaggcgctgactgccggagagggccccgggcaatccgggctgcgcagg

SEQ ID NO: 45454 - DNA, 455 bp, Mus musculus
  source 1..455: mol_type = other DNA
gattaagctcagaggtcactcctctcatgtaggtcacctcccattcctgacagggttttcagaatgcaagcctgttatgtaacataaaacagaccagacataaggatgggttagattacttgtgttttctagggacactcctaattaaaataagaaacaaatgatactttccatggcagagagccctctctcttaactgattcaactcagtaatagtacagagtgaaaagagtcccacagtgcactgtgacatgtgcgcacatcacacaccaataataatgattacagtttagagcactgactgttcacatggtggctcacaactatctataaagggatctgataccctcttttggggtctgtctgaagacagtgacagtgtactcacatacataaaataaaccttatttttctgtaatatctctgaaacatatgtttgcacagctcccctggag

SEQ ID NO: 45455 - DNA, 438 bp, Mus musculus
  source 1..438: mol_type = other DNA
catgccatgctttggaatagggcaagccagggcttgtttggataggctagcctaatctctgcatagcttagtgataggcaagggtttgcacaacccgaaggcacccctccccacacacacctcttagggagggggtgctggactggggaataataacaccccaagactgggttgggaatgtgggcgcagccagaggcctgagggctggggccgaggttccgctggcccagcgcccagcccgccaggcttcgctgcctagcacctagaagctagggccccgggtccctgagcggcgcgtggcgcaggagaccttaaggtggcctctaaatgcgacctgcgcttctggaagactctcggccacactcggagttccagggcgggctctaggaccatggggacgcggctccgccccctcttccggcgggcggggttgcggac

SEQ ID NO: 45456 - DNA, 330 bp, Mus musculus
  source 1..330: mol_type = other DNA
ggctagtttggggcgggggaaataggaacgttgttagctaactcccttagagctgcaggcgtcatgaagaagtcaggatttcatttcctggagaagcatagggattctgagaaaccgagagcactgtgctcagtagttgttacaaccaagagaccacgtcatgtactcttcaggttggggcagaccggctcggttttggtaaagaacaatcttgtttttttgccgggcaacataagtggttagcctctaggttgagttgccggactcgacgccggctccgccctgcaaaagcagcaaggaggaggagctcccagatgggagggtccgcgc

SEQ ID NO: 45457 - DNA, 526 bp, Mus musculus
  source 1..526: mol_type = other DNA
tcccgctccgcagagcaactgccttactctctggagtggaggcgggcttggatcccgcatcacagtgccagaagccgcatctactccaggccgctgccctggagagagggtcaccccagctgtctgggcaaagccccgccccagcctccaaggagccagaagagggttgggactcaacagttcctaagcaccactcgtgcggggcgcgggagaagcagtctgaggcggcgctcctgagcccccgggttagcgttcagcagcccggtctgtgcgacggtcccgcccagctctgccctgaaagagttgagagaggagcgttctcgcagaacctgcccaggcgtacgcacgagggcggccgaggacgccttcggatgtcgggaggcgccagacagggtgcctcggcaacgatggcgaggacagccccttcgcgctcgaagtcggccgattccgggcggggccctgggggacaccggcctcgcgccctcctcgcggcagaggcgcccgaggggcgggggcaggcggcggg

SEQ ID NO: 45458 - DNA, 548 bp, Mus musculus
  source 1..548: mol_type = other DNA
tcccgctccgcagagcaactgccttactctctggagtggaggcgggcttggatcccgcatcacagtgccagaagccgcatctactccaggccgctgccctggagagagggtcaccccagctgtctgggcaaagccccgccccagcctccaaggagccagaagagggttgggactcaacagttcctaagcaccactcgtgcggggcgcgggagaagcagtctgaggcggcgctcctgagcccccgggttagcgttcagcagcccggtctgtgcgacggtcccgcccagctctgccctgaaagagttgagagaggagcgttctcgcagaacctgcccaggcgtacgcacgagggcggccgaggacgccttcggatgtcgggaggcgccagacagggtgcctcggcaacgatggcgaggacagccccttcgcgctcgaagtcggccgattccgggcggggccctgggggacaccggcctcgcgccctcctcgcggcagaggcgcccgaggggcgggggcaggcggcgggccttgagggctccgcgaaactg

SEQ ID NO: 45459 - DNA, 285 bp, Mus musculus
  source 1..285: mol_type = other DNA
acagtgtacttaagtataataataaataaaataaatctttggaccgctacagtgtactcatatacataaagtaaataaatctttaagccctttcaaagggaaaggtggtacaattatataaagctcatgggccatccttttcagccaagatggcgtcggtcttggatacccgcagagtcgcgactaggccccgctgcgtgggccaagccgcatgggctggttccagtgcaggggattggcaaagccaccgggccggcagcggccgccactgatggccaagggatt

SEQ ID NO: 45460 - DNA, 298 bp, Mus musculus
  source 1..298: mol_type = other DNA
cttactgaaaagtgttttgtctatgggggaagtactcaccagacacaattcaacctagaatttttgagtcattacttggcagttgcataagtaaaaacttggcttttcagaatcttaagaaaaagttgtttcctgtccattgagcacaattttctctatagttatttatttgatctggtctcataatagtaaatagtggataaatgcataaattaaacttgattctttagtcaagagaatatagaggacaacaacactcttgtgttcattgtggatgtcaaggccaataagatgacat

SEQ ID NO: 45461 - DNA, 196 bp, Mus musculus
  source 1..196: mol_type = other DNA
agggaccctagggtaagaacactggctgatcttctgaaggtcattagttcaatcacatgatagccagctacagtgtacttaagtataataataaataaaataaatctttggaccgctacagtgtactcatatacataaagtaaataaatctttaagccctttcaaagggaaaggtggtacaattatataaagctca

SEQ ID NO: 45462 - DNA, 378 bp, Mus musculus
  source 1..378: mol_type = other DNA
tgaattgcctggagctctttaagtaaatcaggttggctttaagacaaaagtcaccgggaggcaggcggatttctgagttcgaggccagcctggtctacaaagtgagttccaggacagccagggctatacagagaaaccctgaaccacaggtgtcagcccccgtgctagacgccagtaaaagtagttttagccacagctgagacagctgtgatttcatttttgtatcttcaaatttagctccaaacatataaacatatatcaatttcttctttacaaaaaggaaaagctgttctggttttgactgttctattccggctagaaaaccctctcacctcccagggcagggagtcgtggagggaagcaccgcctctccttggg

SEQ ID NO: 45463 - DNA, 381 bp, Mus musculus
  source 1..381: mol_type = other DNA
aaccacaggtgtcagcccccgtgctagacgccagtaaaagtagttttagccacagctgagacagctgtgatttcatttttgtatcttcaaatttagctccaaacatataaacatatatcaatttcttctttacaaaaaggaaaagctgttctggttttgactgttctattccggctagaaaaccctctcacctcccagggcagggagtcgtggagggaagcaccgcctctccttgggccccatcaccagttccgttgggtaagtggtcccggggaagactcccagtctggaaaggctccagtctggagcccgggcagcggccgcgctgaaggcggctgcaaacccgggagcgacggggtgcggggcagggggcggcccttc

SEQ ID NO: 45464 - DNA, 366 bp, Mus musculus
  source 1..366: mol_type = other DNA
gtctgtcaatgcttaaattctttacaagaaagttattgctaagttagagtgtcaaaaaatatgagctaaaaataggtgacatttaaaatctgagattcagcttatctaggtctatttactcacctaagaaaataactttagtatctgtttaggactaagtttcctcagactccgaggccccgccccttctaggctcacccggcctaggcagcccacccagagcggtgagtccatagcgcacgtcgtgagaattggacgctccggttcagcggcttaaagaacacgctggcccgggaggccttcgggacctcattaggcgttcgcggactcggaaccaaagcgaccctcccactcccagtgacagag

SEQ ID NO: 45465 - DNA, 474 bp, Mus musculus
  source 1..474: mol_type = other DNA
tttcatgtaattattacaggagacccgcctcctaaaggaaaacagaaatcgattctttctgtaatacagaggaactgctttacttaagatactcgagtacctgatcaaacaatacacatttctgatttaacaaccaattctaatatttatgataggtctttggcatatgtggaaaaaaaaccgtataattactcaacattttgtaaacttaggtctctctttgcgtggcccagattccagacgccgcggagaagatgggatcaagaggtaaccccaggtcacaggttccgggtggtacccctgtccttttcccccctggcagatcagggaaagccagggcccccttccttcccgcagtggggcaccttacgggaccaggccccaggagtctggctggctgagcgttacctgccaccaccgtcgccgctgctgcgttaacgtagtacgtcacctccggctctctgtcactgggag

SEQ ID NO: 45466 - DNA, 447 bp, Mus musculus
  source 1..447: mol_type = other DNA
gcccctatgacgtctcagagatcgtttgagactaactatatcttctagattctctgggttaaataggccagcctgacctcaaaattacctaagtattgtgtgactgtgtccctagagagacaatctatttgtcgatacatatctaagtccaacttggagaagcaattgcacagcctgcgactgggcagatcagaggggcttccagccagctcagcttgtctgagagtgtctctcaagcagtcctgactgcctgctcatcagcctgaacttcctgagcttaaggaactttcctgaagggagaatctagaaccggctgtgtgacctttctgaaacactcagaattctgaataggactttgggttatgtgtactacaggagccaggccactggtacagacacttctggctcagtcccaagcagttttggaatgttgctgacagcagtggt

SEQ ID NO: 45467 - DNA, 193 bp, Mus musculus
  source 1..193: mol_type = other DNA
tgagggatatctgtgaagcagctctcattcatagagttggttaacccagtgtgcatgtgagaagtcacctcaatactcagttctcccaggggtgtagaccaggctggcctcgaactcagaaatcagcctgcctacacatgttgtaagtcaccttactttctcgacatacgttcatgaagattggtacctagca

SEQ ID NO: 45468 - DNA, 398 bp, Mus musculus
  source 1..398: mol_type = other DNA
tatgtggaaaaaaaaccgtataattactcaacattttgtaaacttaggtctctctttgcgtggcccagattccagacgccgcggagaagatgggatcaagaggtaaccccaggtcacaggttccgggtggtacccctgtccttttcccccctggcagatcagggaaagccagggcccccttccttcccgcagtggggcaccttacgggaccaggccccaggagtctggctggctgagcgttacctgccaccaccgtcgccgctgctgcgttaacgtagtacgtcacctccggctctctgtcactgggagtgggagggtcgctttggttccgagtccgcgaacgcctaatgaggtcccgaaggcctcccgggccagcgtgttctttaagccgctgaacc

SEQ ID NO: 45469 - DNA, 407 bp, Mus musculus
  source 1..407: mol_type = other DNA
acccaagtgactacagtatagaattgactctggctcaggatccagggacttgagggtgggcagagcttcccttcatcctgcaggacagctggcctgtccctgcagggcatggtggacaaagcgctgggtttctcatgagacccaatcctgctctttcgggttttgatcaagtatgataaatttttataaagatatatatatataaaacatatatatatatttctaaatgtaattgctctcccaagctaagggaaggagtctgatcctctgtgcctcactccactgagccagggctggccatgggtaccttactttcctccctggggtatgcccaggaggagaaaaaagagatttaaagaaaaaatattttaaatttgatgttggccttttttaattgtattgagtaa

SEQ ID NO: 45470 - DNA, 567 bp, Mus musculus
  source 1..567: mol_type = other DNA
gtaaagggtaaaacaatattcactatttctatatttcaccctgttctgggtggtggatttctgagttcgaggccagcctggtctacatcagacagtaaacaaagttggtttgaggtctttgaattacctcttaattttctctgtaatcttttcagacaggatcacttatgacctacagacacataacttttgtagaccaggctggcctcaaactcagaaatccgcctgcctctgcctcctgagtgctgggattaaaggcctgcaccaccacgcccggcaccagccaggccggctcttaatgccgcccggcgagctcgtgcggactccgatcccccgccctcagcgcgaacccggagctccgcggcgtgccgcgcaggctgcgctctaggtgtagcgcgcaggaccgcgcgttcgcggtccgccccgccctccctccgcgcaagccgctggtcggccctcagggctcgcgcacgcgcgcgcgggttggggcgggtcgggggtcgtggagggagccagccggctggtccacgagccgccggggcggggacacgcgcgcgcgcactaacg

SEQ ID NO: 45471 - DNA, 529 bp, Mus musculus
  source 1..529: mol_type = other DNA
agactctgttgtctatcccagagactatgaagagttgcaaggagttacaaggattgctagaatttctgagctagaaaatattggtgtgcacctgtagttccagctgctccagacgccaaagtaaatcccaggaattaagaccaattggcatagaccatgttttatgttatttaaataaagtgtatttaatgtagtccttccagtccactgaacagctaaagccaaggcctgcttttctttgcttgattctcttcttctaccaacaaaaaaagggggagggcaatggactgcctgttccctggaccactgcctggggggaacagaaaagactccattcacttactttccccatcccccttgggggtaggcactggtcttgaagtggggcactgttagtagagatctcctgattgtggtagagacaaacacaagtccatctcttccctctagggccctgttggcagagggcgtggccttaccctagaccagtcctggggagagggcgggaccaggacgggaggtatctgtc

SEQ ID NO: 45472 - DNA, 478 bp, Mus musculus
  source 1..478: mol_type = other DNA
ttggagatccaaattcagctaagatggagtcattgccccattcttccccttacataattttaaaattgtcacccatgttcaaaaggtttaaaacaagaaattttaatatattttatttaacctagcatatctaaaaatatttcagtatgcaattaacattaaaaaaatagtttttccatacaaggtctgaaatgcaatgtgcatttcacacctgtattatattccctacatgcagcccgcagaaagttactgaccagtacagttaacctattattaatatagcaagcactaaagtaaatatcaactattattcctgaaggccgaaattgggcacttaggaactccctctctggacagcccaaccctgggggaagtgcggctcactcggtcagacacaccagcctgccagatgggtgcagcggctcgtgggggcgtgacgcgcgcaggtcccgcccaccatacgtaccgcggccccgca

SEQ ID NO: 45473 - DNA, 425 bp, Mus musculus
  source 1..425: mol_type = other DNA
actatatagaggctgtgctcaggaatttttcaatgaagcatcctcaatcgctcgaattggaatcgatttttaaatcctagtctatagtctcggcttctcaacattaactaaaataaaattaatcacatagtagccaaccatgctaaaaagttaccgttttgtcagttttatctttaagcttgctcagagatctgatgccctcttctggtacgtctgaagacagctacagtgtactcacatataataaataaataaatctttaaaagaaaacttttcgggagtcaggttacttcatttaagtcgaggccagcctgggctgcgttgtagaggccgagcgcgtaccctctcacgggctccgcctgcgcactggcgtgcgtcagcagtgttgctcgtgattggcagcggtcgcgcacccatgaggcccc

SEQ ID NO: 45474 - DNA, 334 bp, Mus musculus
  source 1..334: mol_type = other DNA
aggagagcatcagctaagccgctcctcgctcctcacctgagcctttctgtatattgggctctttaaaaacatacattagactgttattaaacgttggttgaatatgaggggacggctcgacacctgggctgtgctgcctgcatgttgtagggtgcctgaagcaagctgattcacttaatgtattacaaaaaaaaacattgtcaaaaagaatctacattgtcaacccaggattctggctcccccgctggagacgccaggcggtgggcggggtatgtgtgacccgcctcccgtgggcgtgaccaaggcgggacggcacctggggcccggccggggg

SEQ ID NO: 45475 - DNA, 436 bp, Mus musculus
  source 1..436: mol_type = other DNA
tgtaggcatgcccacagacacataaggtcagataatatgacatgagatgagccacaacacacatgtggcggctgggctctcctgacacacaggtgcatgtcccaacaggcctgggccccacccatgggggctgacatctctgttctggggtgcaggtgggggccacagagccaccccttcccccgcaagccacaggccatgcccactggcagggactgggggcccaggctggcacaggaggggggggacccgggcgcggccagggcgggcacaggagcctgagagccaaggagcaaactagcttcttagtcacctttcacccctcggggcaaggggaagctgatatcataattattggctcacccagcagctaggacaatcaggctgacggactgacagacggtcggagctcctggcccccccctgcttcactgag

SEQ ID NO: 45476 - DNA, 418 bp, Mus musculus
  source 1..418: mol_type = other DNA
cactgcacctcaactgtagaccctgaggggctggggaccaacagcctgtaggcatgcccacagacacataaggtcagataatatgacatgagatgagccacaacacacatgtggcggctgggctctcctgacacacaggtgcatgtcccaacaggcctgggccccacccatgggggctgacatctctgttctggggtgcaggtgggggccacagagccaccccttcccccgcaagccacaggccatgcccactggcagggactgggggcccaggctggcacaggaggggggggacccgggcgcggccagggcgggcacaggagcctgagagccaaggagcaaactagcttcttagtcacctttcacccctcggggcaaggggaagctgatatcataattattggctcacccagcagct

SEQ ID NO: 45477 - DNA, 413 bp, Mus musculus
  source 1..413: mol_type = other DNA
ccctggaggaaatgcctccatgagatccagctgtaacccaggccattgtgggtagttccatccctgggctggaagtcctgatgaacagactccccaccaacttcttggtcatgatgtcaggaatagaaactctaagatagtctccatttgcagcaattcctctataattcccaggattacaggcacaatcctaagactgagactgcctttgcagacactcttgtctgcagaggggtcctggggcggggctcctcagcacactgccctctacagtctaccccagcataaaatgctgagggctaggcctcatctcagacctcgaggctaggtgatagaacaactggaccagagcctcaggggagctggccagggaggtccgcccctgttcttcttagatgggtgctgaactcaag

SEQ ID NO: 45478 - DNA, 302 bp, Mus musculus
  source 1..302: mol_type = other DNA
acccaggtccattgtaaagtggaactgtaacaagtactagcaccaaatgctgcccatgattggtgccaaaatagcgtatgaagcaatatttgcagattctgaaaaaaaaataataatctttattgtctacctactttgtggttggctggccagttgcccccaggcctcccagtagggatcttgggctttaaaattcccaaggatgtgtgtcaactgctcagctgagaacttggctttggggaaatcaaaggcgagaggtgggctggcctggaaagagagcttagctcctgctctgcacagcc

SEQ ID NO: 45479 - DNA, 442 bp, Mus musculus
  source 1..442: mol_type = other DNA
ggaaagtatgtatataaaataatactttcagtgtacagacagggtttctctgtgtagccctgacaaaccaggctggcctcgaactcagaaatctgcctgcttctgccttgctgggattaaaggcatgcatcaccatgctcgacatcaagccttggttagcctagtattgcttagaccaaactggcctcacctctggtgtgctgggattaaaagcacatgccactctaattttcttcgtggcccaccaggctctggctgttcttacacagatgcacatgtgccgagaggcagatgccacgcagctcggatcattaagtgactaatctataaggttgccacgagataatatattcagaattctagaacaaagttacgttgtcaataaatgttagttattgttgcctgaagtgaggacacaccacaggaagcttttgagactgtc

SEQ ID NO: 45480 - DNA, 330 bp, Mus musculus
  source 1..330: mol_type = other DNA
cacatgtgcatctgtgcaccacatgcatgtcttgttcaatgacctcatttattttaaaaaaaaaatggactcattggtctatactaagtgggatttctctataaagaaagttttgggccaaaaatcacaggcttaaagggctttaagaatctcaactgcgattctttaaccatccggaggggacgtggatacatgtagccagcttgcttccacattttggtaggaaatggaagacagctctttacagccctttgcttgcgcctgcgtcgggggcggagcccggcgtcaaatccttgactctgctgctcagaggcgtggttgctgttgagc

SEQ ID NO: 45481 - DNA, 242 bp, Mus musculus
  source 1..242: mol_type = other DNA
gcctgtgatttttggcccaaaactttctttatagagaaatcccacttagtatagaccaatgagtccattttttttttaaaataaatgaggtcattgaacaagacatgcatgtggtgcacagatgcacatgtgatgaagctttgttcttttatgagaagaaaagaaaacccttcttgccccaaaaatccagattcgaagcggggggtaggcaccatggtcccactttataaaaagtaaggtga

SEQ ID NO: 45482 - DNA, 326 bp, Mus musculus
  source 1..326: mol_type = other DNA
gggtggaattcaactcagctttgctgtccccctaatgggggcttttctcctaggcctctgtcctgggcatagggcagggagattcaaggccagcctggtctacaaagtaagcaaaaaaaaaaaaaatatatatatatatattaaaagagataggatgctgggcaagctggtggtgccatctgctccctagccctgctgccaggaggtggatccaactccgatgccaagaggtgaccagcttcttggtgcacaccaatctggttgaactcagatctcatcttccctccagaggcggagccacccactctgagcggcttaaaacccta

SEQ ID NO: 45483 - DNA, 187 bp, Mus musculus
  source 1..187: mol_type = other DNA
ccaatgagtccattttttttttaaaataaatgaggtcattgaacaagacatgcatgtggtgcacagatgcacatgtgatgaagctttgttcttttatgagaagaaaagaaaacccttcttgccccaaaaatccagattcgaagcggggggtaggcaccatggtcccactttataaaaagtaaggtga

SEQ ID NO: 45484 - DNA, 687 bp, Mus musculus
  source 1..687: mol_type = other DNA
acttatccttttaaataggattaattttgctatggatccatcaaagcactgtaatgttactttggaaatgttaacttcatagccaacttttcacatgggcaaattgtttcccacagaatagcatatttctgagagtcactgacccaaaagggcccggggatccctgtagttgtattaaatggcagcccactccaggtgccggggaccccagcctgggaggcaggattcgagctgccctgcactgccagggccctgggcagtgctccttgctcttggcacatgtcccaagcagggcactccggctgcccaaacagagtcaggcctcctggcttccttagtagctaggtagaaaacgctccctagattctgggcccggctccctggcacgacagatgccttcgggtcgtcgctgtggccaccggcggaaggccccctgctccaccgaccggtggcctcgaccctcgggtcgtggccagcgaccgagaccaccagcggctgcccactgctagggcccgtcgggccacacaaccagccatgtcccgcccgagcgcccgctcggctgctgacacagggcccgacccgcggcggggcgccgtcccgcccccgccccacactgccccgcgccgcccctcccctcgggcccgccccccgcggccgcgtgggctcctccagcacatccggcgcctg

SEQ ID NO: 45485 - DNA, 397 bp, Mus musculus
  source 1..397: mol_type = other DNA
ctagcaaggtaagttacatgccagtttaccctattccctaccttaacataagtaaataggtctgaaaaggagaaatgacttctttacaatgtctagaactacgagatggaaggaaaaaaaatcactttttccaaatctgaaaatacgttttgtaacacactaaaaatgaaaccaggcgccggggtcccgtggcattatcaagcagcctcgagctgggcacgcagcttccgggggagctgctcccgttccagttctccggcaagcaaggaagacgccatttctgccgatcaggtgatccccaggcgccggatgtgctggaggagcccacgcggccgcggggggcgggcccgaggggaggggcggcgcggggcagtgtggggcgggggcgggacggcgc

SEQ ID NO: 45486 - DNA, 254 bp, Mus musculus
  source 1..254: mol_type = other DNA
cagatgatgtctgaattgacagaatttagtaatgcttaatgcagcactttagatatggtacatagcgggctatcaaggcacaacaaatagttgtagcggcgcggctgtctttactaaatcaccggcgagccgcctcggcagcgctctgcggccctgacgactgtcggtagaagcttctctccggcaactgcaaccggctgctgccacggagccactaggcccagaagcctttgctcagggggcgccggagtcgg

SEQ ID NO: 45487 - DNA, 223 bp, Mus musculus
  source 1..223: mol_type = other DNA
caactgaggaagtcaaatccggagttcttttcctccttgagtcctagatgacgtcagaccagattccacccagtcctccagtggaaatggagaaacatcccatgtctctcgttgcagtgtgggagtctccgagtccgcggctgcctgcaatctcggctgtgagctcacatcctgcgcccgccgactccggcgccccctgagcaaaggcttctgggcctagtgg

SEQ ID NO: 45488 - DNA, 297 bp, Mus musculus
  source 1..297: mol_type = other DNA
tggtggacagcactcagtgtcaaccgtagcttgcctgtagaccaggctggcctagaccttaaaatgctctatacttagcagtcagtgtacatataaaatcattatttgtgggctgattttggagccagcaggaaagtccggctcgcagcgctcctaaactgctggcccggggtcccaatacggaaacgcagcccgaggctgcacacgcgcacccgccgacgtggaccgctcagagcgccccgctatatgggcgggccacgagggccgccgggggcgggacggcacagctcgggcgcg

SEQ ID NO: 45489 - DNA, 379 bp, Mus musculus
  source 1..379: mol_type = other DNA
tttaatttgtataaattttgcagtcttggtatactgaaaataaagcctctttttggtcaaaatcaagcttaactgatgagtctactttgtttcgtattacgaaaccttgagtttttgaagagttgtagatggctcctatcaatggaccagtgagtcgtctccgatatgagaaaggcgggacctatgtcatatattgcaggcgggattagcacgcagcttcctgcaagaaaaaaaaaaaaagtcacggagatttttgatttttaattggctgcgggatttccccaggagacccacacctggttgccactggtcgaccagtgcgcctgtctgaagcttccggccaggaggcgggggcggggcctcggcggctggttgcgcg

SEQ ID NO: 45490 - DNA, 278 bp, Mus musculus
  source 1..278: mol_type = other DNA
atgcatatacactttacaaaagtcttaattcatacagatatataaagacataaatgaaaatgacaggtagatctcctgatttggagaccagcctggtctgcagatcaagttccagtcctttctttttcaattaaaacaaaatatggcaaatgccagggtgagagttgactctcatcctttccatgcctatcttttaatataggaggaaggacgggtgggggcgtggccgcttgacggcacgccccctccgcgaggacccccggagccggcctcggcgc

SEQ ID NO: 45491 - DNA, 372 bp, Mus musculus
  source 1..372: mol_type = other DNA
gctagggggatttgtcaatatttcactttcataatggaaaattccatgccatgtgtgaatgctttattggaagcattgtaagaaattataatttattcgtttttgtttgttttagaccaggctagcccaaactcagggatcagcctttctctgtctcctgaatcccgggattaaaggcttatgccacccaggtaggacattataatcctatcacacacacacacacacagagagagagagagagagagtggggaaatggtcagacggcatctgtgcccacagctctcacttggtttgagtgatgtaatcaagcacatcatgtgggaacagttatgcaaaatagctctgcagagcctggaggggtataaatac

SEQ ID NO: 45492 - DNA, 556 bp, Mus musculus
  source 1..556: mol_type = other DNA
tagttctgttaagaaatagcccctgcttcctaagaggaactaaacagcgatgtttacttttaaaaaatgaagaaaaaaggcattataagcaattgtcttgttaaagcagctacatgatgtaaggaaatcgggcttttcattataggtagattttttttatacagcggcccagagaagcaagcctcattgaacagggcgtttgtctcatgaaaaagacctgtctttatttctttcaggatataaaacttgtgtttaaatcaattcagagaagcattctgatccgtttaatgaaacagcattatttcattttcaaaaaatgatccttcattctctccctcgattataattatagcagagttgaaaggaagcgtgcctattactgtcatatgtattctaatttgatcaagtgactcgaaatgaagactcccttcaggaaggacacgtccttcaagaagacgtttccagccaactgggcggggtcggatcaggaagcccgcacccagtaggaccccgagtcccgcggatggccggcaccaggcgggggcggggctgcgct

SEQ ID NO: 45493 - DNA, 274 bp, Mus musculus
  source 1..274: mol_type = other DNA
gtgtgtctgaagacagctacagtgtacttacatataaataaaaaataaaaattattaaaaaaatccttggctacatactgggttcaaagccagcctggtctactcatgatgacaacctcagcggtggtgtgtttcttgcaaaatagctctccatggttaagctttcacaccagggagagatgcttatcacagctttctgagcactgttttctctgcacatacaaaggtctgagcacagccacttctggccgagacacccagtgtccactggtcc

SEQ ID NO: 45494 - DNA, 525 bp, Mus musculus
  source 1..525: mol_type = other DNA
gccagcctggtctacaaagtgagttccaggacagccagggctacacagagaaacagagacagggtctcactgagcctgggattcactgattcgtcagacggtctggccaacagagttctagagctctgaactcaggtctttaggcttgtgggacaagcactacccttaattttatttatattaaaaacatttattactttagagtagcatccccaaatctaactataagtgttgattttaggaaaattagaaagtacaaaaaacttgaaattgctccaaacgttggctcactggtccttgtgtcacttctagctgtgtgacagccacactgtaactctcaaggttcttgtgtgccccgaaagtgttagtccccagatgactcacgggaggtgagagagaacggtgctcccccctgactcagttcctgctgtttgcagggaggcagtgaggcagggaaaactgggttctggcatcctgggtccccgcctcatgcccagcacctgctctgggaagtatgtgctgact

SEQ ID NO: 45495 - DNA, 416 bp, Mus musculus
  source 1..416: mol_type = other DNA
gacaataatggtctgtatttttgagcagtataattttttttaaagaaggggatgatttatttctattaatcatcatgatcttaagaatttctacctacatgcacacagtacatgcactagtatctgagaaaatctaagccgttatctgttatcctttggaaggcaatgacatcatttatagatctcaacttctgtggaagaagggcagattctgaggttggccagctcttcaggagacttggggaggcctcagaggtgccctttgttccctgaccaattggacaccactatgctaaagggattaagcacgtgaaacgtctactttgccctttccggttgagggctcaagaccatcacgtcccctgcgtcgaggggcggggcctgatggtctgacgtcacccactacaccccgcctc

SEQ ID NO: 45496 - DNA, 340 bp, Mus musculus
  source 1..340: mol_type = other DNA
ccttatcacatctgtacccaggacctgcaggctagggatgctgccttgggacaagagagggtccacatacatcaggaatattcctgaacattctccatgtgaagttcttaacctgagttgactggctttcaactgcaacctttccagctgcctctagaaacctctggtcagtgatgacagtgatgactatggacagacatccactggatccgcaagtgacctctgaacatcctcaaagcaggtggtgaggcaaccagcccggctggtttcattctgagaatatgtagcgctggctggaactagctatgtagaccaggctagccacgaactcacagagagg

SEQ ID NO: 45497 - DNA, 539 bp, Mus musculus
  source 1..539: mol_type = other DNA
ctgaaatgcataaatgttaggccttttaaaggtctttacagtatggtgaactagtcttcaatctgaattatcatccgtgcaaaaagttttattaacttggttgtccgtcagttatgaggaatttcggattggggaattctagtctccaactttattaaaaagaaaaaaatcacggacttctttgagcgatccaagcccggaggccagcgggggagcggcggtggcaatgacagcctacgcaccggagtcggctcagattctctggccagagccccgcgccagtttaggtggggagacccgcggcagcgagggacgcgcgcctccgggcccggaggagttaggtgacgtcacctccaggaggactcgctttttcattaatgaaaccggccggccgcgggcgcatgcgcagcaggccccttccccgagccgtggaaaggatcccacttccggtgcggcgctagtggggagagccacccacaggcgccctcccctcccgtccccctcccggcgggccgcgcgggcccccgtccccacccccg

SEQ ID NO: 45498 - DNA, 395 bp, Mus musculus
  source 1..395: mol_type = other DNA
attaattactgacactcactatctcaggcagtgacttagtgcactgaagcatttgcctattcattcaaaggaatgaaaaacattttttaaaaggaaacttctgtaattgagtctcacactatcattatctttatttatcaacatttaatctcttaagatgtaaaattcctaaattattttaaaatcatcattaatgctcttacttggtttgaaatcatgataattacaaagcaaattatagcaatccatttgggtgcatgcaattaaatgcagtgaggtattcactggatcctttaagtaagtacatagactttacaaagattttatttgaatgccttaatacttccaaagaggcgaggctccaagcacgtgactggctcctagctatattattt

SEQ ID NO: 45499 - DNA, 222 bp, Mus musculus
  source 1..222: mol_type = other DNA
tgactaattcttcaccataatgacaatattaaggtctttcaaggctggataatggtaaataatttttgtttgtttagcatcattaaggttaataaaaaaaataagaagacagctagtcatttggctaaatgataaatgaaattaacagattaattaattactgacactcactatctcaggcagtgacttagtgcactgaagcatttgcctattcattcaaag

SEQ ID NO: 45500 - DNA, 445 bp, Mus musculus
  source 1..445: mol_type = other DNA
aatacataaaatgtaaacaattattttaccatttgactggtaattaaaagtagaacattaaaatagaagaaacaaaacaaaatatctagtatctactggttatggtagtgcacatctttaattctagcagtgagaaactcttttgtatcaggaaggcaaaaacaaagtaatcatattgagtattcctgtgcttcaattgactgataaattcgaaaagctaattaaatataataatagacataaaaatcaagatttctatcatgacatacatatgaaaaggttacgagacaatttaactgtttttgaaaagaacataaaaatgcaaatagttcaatgaatatcctggaaatcaattcacaaatttttaagaaaaaaaaaagtccattttgttgcgtatgcacctctcagctctgcagtcctcctatgtggtgctgatcaggtggtt

SEQ ID NO: 45501 - DNA, 429 bp, Mus musculus
  source 1..429: mol_type = other DNA
agaacagtcagtgctcttaactgctgatacaaattttctcatgaatttactactagttttaaaaaaaagttcctctaaatgtttagtaaaagcacagagggcaagcagactttcccctttcactttcactgtgtgtgatgatcatgcatcattatgccaggctctgcttgtcggaaatgacttcagacagttgctcccattttctgcaatcgggtggcagacacagaataattcagttatcctcatgcacggctcacctgccatgggaggtgtcttcttctaataagaaatatccctcagaatttacctcagaatagataatttctcaggcaagatcctaaatttttagattatggatccccatgcctggagagtcaggcacttaaagttatatagattgtgtttcaaaatacgctcctgataaacttc

SEQ ID NO: 45502 - DNA, 394 bp, Mus musculus
  source 1..394: mol_type = other DNA
agtcgcaggccctgtgtggtccttgtgccaaactgggtacaagtcccgctctgggcggggctcaggcaaggtctgtgcttgagttgacctctgctcagttgaacttaaggcaaaggttgggtcgtccacacccagcaggagctacgggttcccaagccaccggtgtttctgggccagcggaacggcttctcaggggtctccgcttccagggaagcgaaagcagcaacgcggccggtgcacactggctagccgcggggtgcacgggccgcgctgagttccaaccaccccccaccccccaactccagctcaggtctaggaggggcggagcctggggaggctcgggtccttttgtctgcagccccgccccgccccgcccccacgcgggcccgcggcg

SEQ ID NO: 45503 - DNA, 458 bp, Mus musculus
  source 1..458: mol_type = other DNA
aagaagccctgctttggctttttatcagcaatgttgcttccaaggtggatctcttagaaacactaatttacaatgttgtaaggaagatctgtgtaaatattgatctatttcaccaactttcaaacttttcattgttttctaaaacaaatgacagtttctgctatttatccagtgcctaaaattttgaagtattttgtctacataggtcaagatatttatttttaatttaaaaaccgtgtgtgtattcacgtgggcgggcacacgcgccatagaacgcggaatttaggttgccaggctaggtagcacgatggccctaattatttaaataatacattttttctcaccattttaaacagggcagctgttttctgttctcggtgacgagaacttaaagctcctatcaggtattccgggaggagctttttccggtctccgaggcgcgaggatttagccccgcc

SEQ ID NO: 45504 - DNA, 456 bp, Mus musculus
  source 1..456: mol_type = other DNA
ccccacattggggattggtcctgaatgcattcatggaccggcaagctgagcacagtctggaaccagacttgtagtctctgtcatcttcaaattgttagacaaaatttacaggctttatctgcactaagcagactggacagaaagagccttgctcatgacagtgtctcgtgccactggagtctcctgctaccttaacctttcaaaatagcagtttgatgctggccagatagcaacactatgttttaagtttaaattactgtgcttaagagaaatataaagcactctctcagtttgagggcgtccagagaaaccctgttcctgaaatgctgtagtttatgtacgataacaaaccacacattttcacttctgtaaacaagcttggttgccccaactgcacaggatatgcacttgatcaaggcaggaagtttgtagcctcgtgagttttgcctttataaa

SEQ ID NO: 45505 - DNA, 327 bp, Mus musculus
  source 1..327: mol_type = other DNA
acttaataaacttgtcagcaggtgctggtcatgcaaacctgcaccataaaaataaataaaaatttaaattatataaattaaaagtggtcatctttttaaggagatgagaagatctgctgtgacccaggctttgtctcccaaattctgctcagatcactgctgcagttcgcagcttgaaacggcagtgatgtgtttatgttttcaaatcagtctgtgatataaaattagaaaagtgattttaatgccacactaaagatgccatcatgtaatttccattgaataatactaatttcaaaagcagataagccctccccattcagggggtgg

SEQ ID NO: 45506 - DNA, 523 bp, Mus musculus
  source 1..523: mol_type = other DNA
tctagccctggctgtcctggaactcactttgtagaccaggctggccttgatatctttttaaacaagtacaataaataaaacttcaagaaatgtctttacttcgaatcacctatttgtctcagagaaaatgaagtatctactttgctcgcatcgtgtctccttaatttctgagaaacggccgccacaaaataggtcgctccctttcgtaggcgagcccagtggtgcgatgggtggcttggggcacgtggcggccaggggatccgatctcctcctgcctcagtggagatcccggggcgtctcgggatccgcggtggacctccgctcctccaggggacctctgcccccctgggggcggcgactgacgagaggcgtccgggcccgcggtcggcagcgcgcacgggccaaccaagccgcgcctccgcgagaagcgcctccgcgtgactgacgggggactctgcggaccaacgggctgggcggcccggcggcgcgcgctcccgccggccaatcagagcgccgggcgggg

SEQ ID NO: 45507 - DNA, 316 bp, Mus musculus
  source 1..316: mol_type = other DNA
aaagttattatgccatatctaaaattctgtattgaaaggtttattttctgaaacacaggagcaagcggctcctcttgtttttactatacagcagatatttatcgggaggcccttaccgaagaatggccttctcaagattgctgtacagaaggcccagagctgtagcctcggccctggagatcatgcactgtgcaggcacttagagacgtgttcacgtgtttctccccaccccccggcgtctgtcaatcaagcggcagcgggggcggggccagggcagggcggggcggcgcttccgctgcgcgaggccgctcggggt

SEQ ID NO: 45508 - DNA, 503 bp, Mus musculus
  source 1..503: mol_type = other DNA
tctttttaaacaagtacaataaataaaacttcaagaaatgtctttacttcgaatcacctatttgtctcagagaaaatgaagtatctactttgctcgcatcgtgtctccttaatttctgagaaacggccgccacaaaataggtcgctccctttcgtaggcgagcccagtggtgcgatgggtggcttggggcacgtggcggccaggggatccgatctcctcctgcctcagtggagatcccggggcgtctcgggatccgcggtggacctccgctcctccaggggacctctgcccccctgggggcggcgactgacgagaggcgtccgggcccgcggtcggcagcgcgcacgggccaaccaagccgcgcctccgcgagaagcgcctccgcgtgactgacgggggactctgcggaccaacgggctgggcggcccggcggcgcgcgctcccgccggccaatcagagcgccgggcggggaagcctccgaagcggagcggggctcggaggag

SEQ ID NO: 45509 - DNA, 418 bp, Mus musculus
  source 1..418: mol_type = other DNA
ttctatctggactggtgaatccagtcatgaaaatgtatcaattttctaaaaatgggtagtatctaagtatggaccactgatacaatcagggtacatggagagatgaagacatgaacaaatgtattcaagtctagcttacaaacccgtgagtttattaaggtcactattcacgaatgctgtttagctagatctccctgttcaccaacttttctgaacttacaagtgcagataatgaggaaatagccacactagtctcacatgcctcttttccagatgtgggcaatagtaaaccatggtctctagccaggctagattagatctggttccccttaggcggtggagcttggctgagctgccttgcgaagacctggaggcggggcctgctgtcccgtgggcggggtcggcgaccgaactgtcc

SEQ ID NO: 45510 - DNA, 191 bp, Mus musculus
  source 1..191: mol_type = other DNA
tggcaagaaaatctgtccaagttacctggcaacagccaggtaggcctggctttgctcaaaacacaacaattgttttataaaacatatcacacaaatgtttttctagaatgtgcatataggctccccactgtctgctgtgtgtctgggaacccagaggagactcgccccaaaacaggattaaacctagtcta

SEQ ID NO: 45511 - DNA, 328 bp, Mus musculus
  source 1..328: mol_type = other DNA
aacaaacaaacaaacaagaaaaaatatatttgtgtgtgtgatgtgtatagtgcagatgtacatacatacatgcagagtacagagatcaacattgtctgtctttctgtcagtcagtctatctacatatctatctatataacgacagagtctctcggcttcaaaaatataattttaagattggaggccagcctggtctacagagtgagttccataatgattaggtaatcttagacaaacacgtcttcaataagtcaaactttcgaatctctgaaattcgctcaccgtctgcgcagcctccgacagcggtcgtaggctccgccccctgcgc

SEQ ID NO: 45512 - DNA, 423 bp, Mus musculus
  source 1..423: mol_type = other DNA
aagagcaatcagtgctcttaactgctgctctgtatagccctggctgtcctggaactcactttgtagaccaggctggcctcgaactcagcgcctgccttaaaggcgtacatttcaaagatttacttatttttaagaagagcaaataaagactgaggctgtcttttttttttttttttttttttttaattaattatatgtaagtacactgtagctgtcttcagacacacctgaagagggcatcagatctcattacgggtggttgtgaatttgaacttcagaccttcggaagagcagtttaatgtcatttaatgcatatgagtacactgtagctgtcttcggacacaccagaagagggcattagatcccatttttgtcataactgtaattttgatactcttatgattctaaaatgagttcctgaag

SEQ ID NO: 45513 - DNA, 289 bp, Mus musculus
  source 1..289: mol_type = other DNA
agatgctgcaccagtctggctgaaaaaaaagcccggttgtcggcctttttttttttttaggggagtgttcacaccctgtttttgtgcagctgaaaaccaggcaggttcacgaccaagctcctgctgcgtgaccctgttgttctgtaaaacaagtctgtggcaggcaaacctccggggttttgcgctaccagagcgttgaggttccgaaagctcttcgccgcccgccgtcgtcctcgccgccgccgccgcccgcgtccgcggagccggaggaggcggagctggcttgccc

SEQ ID NO: 45514 - DNA, 463 bp, Mus musculus
  source 1..463: mol_type = other DNA
gctgaaccaggactgagcccctgagcctcccttgaggagcatctaccccagcccgggcactggttagggtcccggtggctggtggttaaccctgacatggcggtgctgagctgagcaggctgagggcaacgcagtccccatctccgggcgggaggagcggcggcttgtcgctcgcctcccggcagccagccctccctctttccctccctccctccccgcgggcggcctgggggggcgggggccccgcgagcagccccgcccccgccgcgcgccaccccggaggagtccgtggggaggaggaggctcgcgcgcagagcgggggccgcgcggagcgggaaggagcgcggggagcggtagggcccggctggcccaagggcgccctgcctcgggcccgcgacagaggccaagaagtttggcggctaggggcccagcgccccgggtcgcgggggccgcagtgagggcg

SEQ ID NO: 45515 - DNA, 341 bp, Mus musculus
  source 1..341: mol_type = other DNA
gaaaatgaaggtgttaattgcaacttctgataataataataatcctttggagctgaaccaggactgagcccctgagcctcccttgaggagcatctaccccagcccgggcactggttagggtcccggtggctggtggttaaccctgacatggcggtgctgagctgagcaggctgagggcaacgcagtccccatctccgggcgggaggagcggcggcttgtcgctcgcctcccggcagccagccctccctctttccctccctccctccccgcgggcggcctgggggggcgggggccccgcgagcagccccgcccccgccgcgcgccaccccggaggagtccgt

SEQ ID NO: 45516 - DNA, 197 bp, Mus musculus
  source 1..197: mol_type = other DNA
aacagatatggtctccaggatcttcctttaaagtttattttatttttattatatgtaagtacactgtagctgtcttcagacactcagattgggaaagagcagtcagtgctcttaacttaatttttatttaattgaattaaaagagcgctcctttagggcaggctcgagccggcgcacaaaggacagcccggccgcgg

SEQ ID NO: 45517 - DNA, 338 bp, Mus musculus
  source 1..338: mol_type = other DNA
ctgaataggcaggtctttgagtgcttaaaggcatgcaccatccatgcttggctcactgcattttaaaaaaaaaatttttttttttttattcaaagacaagatcaggctttgttgctagcctctaagtcttagcctcctgtcttggccttctgagtgctgggacaacagacacaagacccaggtaataagataacttaagctttctctttttgcgattctgaagcacggtcacccaaattgaccatgtcccaattatctttatttattgcggcagcgcccgctcagcagggccgaagcctgcgtcacgtgacccgcacagctctcaccgcggtggctga

SEQ ID NO: 45518 - DNA, 364 bp, Mus musculus
  source 1..364: mol_type = other DNA
gaatgtctcttaggtattaattaaatattttttcaaagactcttgttgagtattgttggacaaatattagtcatttaatttccagattgtcatcaacttagaaggtctccctctgtataggtttagcaacatctttaggttgatccttagtgataagaaacatgcttttttcccctttcccttgatatcttcacagatatcctattacagttgaaggacaaatgtgaatctcaagaactatttagattgaatgattgggtcaaagatgactttcaatccacaatgtgaagaaagacagtgtttcatctgagtgactttgtcgcttgcgggacgctcctgggccacccacggggccccggggtgc

SEQ ID NO: 45519 - DNA, 597 bp, Mus musculus
  source 1..597: mol_type = other DNA
ggtaacagggcagggcacttacctctctggtcacggaagtacttaagcctaatgacctcaacaagattcttgtttacaattgacttgtaattcttcttgcaattttactgtcatcaagttttaaaatgggcaaataagaaacggccagctctccgcaccgcccgcagcctctgccaagggggccgcggcgggaacaaaggcagcacgtgtctgggcggggcccgccctccgccccgcccgccccctcgccctcccgcccgccctcccgcctggagagctccgctgcgcggcgccggagctcacgaggccgggctccgcgcgcggcgcaggcaccttccaggtggagacccggcttcgcgcgttcccgccgcccgcgccgtgtcccgtaatgggcgcgcccactagaggcgccaccgtgcgccgctcgcgctgagggacgcgagtggcggcgacctggcggcgagaccgagcgggcgtgtggaccgcgcgcgcgatccggagaggcggcttgcaaggcgcgcgccggggcggggcggggcggggccggcgggctcgcggcggagacgcaggcgggggccgggcgggggcggggccgcg

SEQ ID NO: 45520 - DNA, 476 bp, Mus musculus
  source 1..476: mol_type = other DNA
taagaacacccagtgtgtcttgaaattggagatcataactcattacaatctatggaactaatttcatggatttcttatttataatacaaactactactataagcttcttggaatcgctagaatcatgaggagatgattcatacattttttaaaaaattactagtataaggtactagtctgatgaacaagttacttaagtttgctaaagcacttagaacagctctaaacaccaccaccgctcaagttataagtttgtaaatttgtaagtttctgtctttagggggcgctgccgcttagccgccgcggctggcccagagcgcgtccccgccccacgcgtgcgcgccgcccaggtgaggaggcggctgggccggggttgggcgggctcatcggcggggcggagcccgagcggccggggcggggcggggcggggcccagcgggacccaggctagaggcgggaccagccgccgccgtctcc

SEQ ID NO: 45521 - DNA, 435 bp, Mus musculus
  source 1..435: mol_type = other DNA
agtttgcagatactgcatcgagttgatggagaaatcacctgcactgcgctatcagctggcatctttaggcccgaaagcagcctattggtgactgtcaacagcctggagcctgccagggtcctggctaggcagtgtttagcaagagccctgggccaggctcttgccccaagtgtgtcactgaccctgacaccagtttccaggctagggcagcgacccagcactgtgtaaactgtgggagctcctaccccccaccccaggctgtccagctggagggcagtgggtgtggatgcatcctgccctgcgtcagtgactgtctcccagctgccctggcctcccgggacgccaatccccaggcggccaggggcctggcggggacggcggcgcctggcagcggcgctggctgggccgccccgccgggggtggatctgggtcgtc

SEQ ID NO: 45522 - DNA, 277 bp, Mus musculus
  source 1..277: mol_type = other DNA
taaactcaagtacactgaagtcatggccacagagtgtgagccttaagctcatctaatcctcttaaccattcaaagagctgggattaatatactcaatgtatagatcattatggtatttttcagagtaaagcaacttaaagataactttatccgccctctagctaacagcaccaggactcggagagagggtctcacagatcaggagtcctccctaccagagcaggttgacctcagccccctgtgagctcatcgataagatgcaggggcattttagagg

SEQ ID NO: 45523 - DNA, 239 bp, Mus musculus
  source 1..239: mol_type = other DNA
agtattaaggaagaattttttttttaaaaaaagagagctcagatgagacagatatgtgtaagacaagtacagttggtatagtgtttacccaccatgcatgaagagcacagcataaatctgtcatggtggcacattcctgtaatagggtctcaagttgtcctcgataatagtgatttgaggtcacctctaaaatgcccctgcatcttatcgatgagctcacagggggctgaggtcaacct

SEQ ID NO: 45524 - DNA, 495 bp, Mus musculus
  source 1..495: mol_type = other DNA
ttcagaggatgaaaagtctaatccagtctagtctagagctgagaatcttatcaaaaactaaaacagaatagtatagattttcagacttatgggatctatttatgcccagcataataaataaaatcattatgaaatttcatagtgaactaaaattaaaaatacacacacacacacacacagagagagagagagagagcaacaatagttgtctcccgagctagagaacataaaagaatgccacaatatgggtcgttttcttcatttaatgacacacacacacaaaacacacgcgcgcgcacgtgtatgtgtgtttatataattatttatatattatatataaaagtatactttgttttcattatatatgtataacatatatagtatataataaatatacatatataataaaagcatctcaaatgtgtgtgtgtgtgtgtgtgcgcgcgcgcgcgcgcgcgcacgctcgcgcgtgctcgcacatgcgtgtactcgtgt

SEQ ID NO: 45525 - DNA, 343 bp, Mus musculus
  source 1..343: mol_type = other DNA
cacacacagacctggcaggcatggctgtgacttatgaagcctcatggtgcattccttccaacatgggagaacacaggggccttccaggccttccaccttggcaccatgaagagatatatttctgatgttggtaaactattccatcaaacaagtcaatcaatatgtaatgttttatccctgtgatatagagatgttatctcacagcccagtgtctggagctgcttctgtgactccccaaggagcctactacagtctctgctccagaacagctttggctgttaccctccgcagttagcaattaatgaggcagaaagggttaattctagattccctcctgcatgct

SEQ ID NO: 45526 - DNA, 373 bp, Mus musculus
  source 1..373: mol_type = other DNA
tctgaagtgtccccctctagcctgcagagggaagtatcactttcctgccatccatggggatatccttcctctgggagtagacagcagattttttaaaaaaggctaaaaactttcttctaacagccttgccagaggcaggccagggagaagggccagaaacccccgcatccttgcttctctcggaggcggagcgcagcgtcctctccctcggcaacagcagccgcagggtcccatacatcccgggaagaagctaagcgtgttggctgctaggatgctgcgccgcggcgccccaccgcactgcatcagcgtggctgagctgcttaacacggggcattatgcgctggttaacaggatccgagctgctcagcgactt

SEQ ID NO: 45527 - DNA, 224 bp, Mus musculus
  source 1..224: mol_type = other DNA
gacccttctggacctcagctgcctgatctgagaatggggagttaccagagctgggagactgcactgtgaagggttccaaccactcctggcccagagtaagcactaggtgagttttatatagaaatttcttctgcaagctgcaaggttccttgagccaggggcaagctagtcagtgaaagcagagccactccattcacacttgtggtcacagtagtacaattact

SEQ ID NO: 45528 - DNA, 383 bp, Mus musculus
  source 1..383: mol_type = other DNA
ttcagtttgacttctctacgttcttttacttggaaaagatattttcatagttaatcagatatttggaaaacgacaagattccaagatctccaagttacagacctgtacagtggtttaaaaacatgtctgcgggttactttactcccaaataaagagctgttttgtttttagtaattaaaaattatattagacacagggtttggaaatgttttacaaattgaaaagttagcaggacttttcatcttcaagtgcatttttaaattcagtcaaaattttagtgcctgtttctagatgcttccttcctcattctacaaaaaaaaaaaaaaaaaaaaaaaaaaaaaaaagcttttctttccaatagtagacagtacagtgttttatct

SEQ ID NO: 45529 - DNA, 167 bp, Mus musculus
  source 1..167: mol_type = other DNA
acatcatgcatactgagatgtccttgaataactctttggacaagggtacaggtggtggttcttagttaagttcctggacactaagattgtatgaccattgaattacataaaaagggcaagcatgactatcatgccctgttttctgagaatttctgggactcaaatga

SEQ ID NO: 45530 - DNA, 296 bp, Mus musculus
  source 1..296: mol_type = other DNA
ctctaagactctaggactttgacactttcagactacaagcctacatatgtgcagtagtgtacatgtctagcttgtggtaatgtgcatgcctaccatgtggtagtagtacagactctgaggaatgaccttgccatttcttcagggttatttcccaactgagttctgagaaaagatgttcttccatttcaaagaaatgagaaccactatccagtgaataaactaagcagtagacagaaactgtacagcttccttcttctgtaggatcctgtcaggctctttgtgtcttataaaagtca

SEQ ID NO: 45531 - DNA, 413 bp, Mus musculus
  source 1..413: mol_type = other DNA
tccaaacacattgaacatgcttggccaagctatgctcctgcaggatgccacccgctgcaggatccctgcccctcataggccagacatagtagagaaactctgttattacagcatttttcagactgatataaatttggaagagccagatctacttaatcctcatctagaatactgccatttagtagtatggagcccatctgggttttgaaaaacccacctgccttagggttgcaaaagcctagtgtaaaagggaccagacttaggcctttctccagaatccctgatccagtgggactgctgtctcatagtctaagttagccaaagattttagcatcttattccagctgccgggaaatcatctcatgatctgatgactattcagcataacattccctgctccctataaaaggcag

SEQ ID NO: 45532 - DNA, 228 bp, Mus musculus
  source 1..228: mol_type = other DNA
gcccccattggcaattgtcccaagggttggccaaacgttagacagacaggatcaacctgtgggtgtgtgtacatgtatgtaggtgtgcatacatgtgtctatgtgcatgaaccaggcagctccagggatcagccggtcagcctctccagctagacaagctgtgtactgcttctgcacttggggaagttcccaaggccactccccctcctcccaggagaggtgagaaaa

SEQ ID NO: 45533 - DNA, 569 bp, Mus musculus
  source 1..569: mol_type = other DNA
gaacctcggaaaagttcaaggtttgtgtaggttcccctgccgagggctgaccacccagaaacggctcgagctggggcgccttagctggcgcttccgctccttcgggggcagcgagtgcctagagctccacgccaccgaaccccagcctggccaggcggcgccgagttggcctgtgctagcgcagaccccggtcgagactggaccccacctcagacgtttcgtctgggcgtcgcctagggtggtggcgacccgcgtcgcctgtctcatccctgcaaggaaacttttccttccccggatggattaaatctctctttgcgaaagaaatcaccaccgaaaccgaggcgattcgttcgcggcggcgcggcgaggccaggggcttcggcacgcggccctcggcagccaccgggacgttggtggccaccgggccctgggaccgcacgtgcggctcccccctctcctcgcagatcctgcagggggcaccagcccggggaggtggagactcctcccgccccgagctgcgcccccgccggctccgagggtgtagccggtggtgcccgggacgcccctcc

SEQ ID NO: 45534 - DNA, 402 bp, Mus musculus
  source 1..402: mol_type = other DNA
agcacttattgtttttgaagaggatctgagcttggactcgagttctagggatctgtcaccctctgacctctgggggcatctgctcacacctgatgcacataaactcagacagatgtgcacacgtaaatataaatctacttaagtggactcgtttactataaacaacatctgcggcggagctgcagcccaacgtctgctgagcgcgcgcacaaggctctcttcctcggctagagaattcgcagcattgctcacaggttttcactgatcagcatcagaatcagagtgagccgcgacaccccgcccttaggacccaaggtgggacgcagcacatcctgcagcccacgggcggcgcagatgttccctggcgccacgcccacactcctgagtgtgggccaatcggcg

SEQ ID NO: 45535 - DNA, 292 bp, Mus musculus
  source 1..292: mol_type = other DNA
cgatcgctagggtcgtcgaagaacccttctggaccctgaatgaggaaccggagaggcggcagtagggggccgccctagcggcatccaagttggcggacgaggctgaggtggagggctgtacctgaggtcccgcggaggcggtacagtgccggtcgacgggccctgggttgccccagaacatgggtctgccacaggagctcgctcttgaccacagtgcgcagctcagcttcccagccggagtccgagtagaggtggaggacgccatgtttgcgcccaggactcaggcgagtct

SEQ ID NO: 45536 - DNA, 523 bp, Mus musculus
  source 1..523: mol_type = other DNA
aaagattagaactacttcatggggtggttagtttgtataccaaacttgtgtatttgacacctaaccgttaagtatcgcccatcccgggatacgacggagcccgaagagcaagcagcacgccgttctgcccacaggctgtgcgggcgagccgcggccgcgcaacaaggcggcggagagggaccggcggcggcccggccccgaccccctgagaactgcccttcccggtggctgcccagggtcccgggggccgcgggcctcccgtgggctcccgtgggggcgccacgtcacggagggtgtgcccccaggctgagcggcgggcgggggaggagccacggccactccagccacgccgcgttcggccccggccctccccacacggcgcaccgcggcccgccgctccgcgccgcgccgcccctcacctctgagctccgcacgagccaccggaccaggcgcacgggtactccagccggaggcagggcgcaggcgcagtaaccgacttgcgccctcggaccccgccccctcc

SEQ ID NO: 45537 - DNA, 365 bp, Mus musculus
  source 1..365: mol_type = other DNA
ctggagcccttgagcctaaggccttccgaacactcgtctatcagcccttcatttctatgaacaaataactgagttctttccctatggaaaaaaagctaaactcttcctcagaaatagaacttagttccacgatctctttatttacctaaattttattttttgaaaaattagccatcttgctcacagagcctatttgaggtttagaagcactagttcgctaaatgacataaacggggccacagtccctgttacattttctaattacctttttaattaaagtagtgccttttaattcagtcaatatctaacaatctgagaaactctaggaagttcaggagggggcggggtccgagggcgcaagtcgg

SEQ ID NO: 45538 - DNA, 299 bp, Mus musculus
  source 1..299: mol_type = other DNA
gtcactgaggaaccatgagtgaataattcttagagactctcttgaattctctagcttggtagaaaaagaaacaggcatgtgtactcacccctgcaagtgctggggttatgcagagcacccccgcctgagcccagcgtgtgctgtttaaggaccagtctcactgacttaaatgttatctaccaggtaaaattcccatctatgaaatctatattatccattacccacatttgaaggggtatatatgtcccttaggagggagttagttccggccctgagttctttattctgaaataaatatt

SEQ ID NO: 45539 - DNA, 409 bp, Mus musculus
  source 1..409: mol_type = other DNA
tcagttctgtgcttcctatctgtataaatcaaagaataatttgtaaaactgctttatttcttccactagatgtggttaaaaaaatcaaaatagtattttatatactcaagcatttccctctggctgccttgggtaccaggcatgccaggattgcatagacatccatgcaggcacatctatatacgtaatagaacttgataaatttggaaaatacatctgtaagaatgctactattcactctgtaaatattgagttagtagaggctggtatacacaagagactcgttgtggacacacaaaatgtgtgtgtgtgtggcatgtgtttgccctcatggtcagcagatggcgctgcaggcctggccctccagtcccggaacccggaagcgtcggccggagggggcgggcctagg

SEQ ID NO: 45540 - DNA, 350 bp, Mus musculus
  source 1..350: mol_type = other DNA
tctttattttaaaatacaaggggtagcaccacttgtctatatctgagcttcttagatcactggctaatgatcccaaacatgaaatcaagggttcaatattcaaactttactataaagctagttagtgatcttaagggacttgttggctcggcctagactggggactccacacctagccgggctccgacagagggcgctcgcggaggcttgcactctagaccgccgcgcgcccgattcctctctatggtggcgggggcgtgcgctcccgcgggggtggggtggagggcggggccgcaagccgggagggcggggccgcacgctggacgggcggggcccacgccgagccgcgg

SEQ ID NO: 45541 - DNA, 407 bp, Mus musculus
  source 1..407: mol_type = other DNA
tgcctgcatggatgtctatgcaatcctggcatgcctggtacccaaggcagccagagggaaatgcttgagtatataaaatactattttgatttttttaaccacatctagtggaagaaataaagcagttttacaaattattctttgatttatacagataggaagcacagaactgaatctccagtccatatccagctgcagggctcatttttagaaatatctcctcagctactctgtgagctacaacccacagtaagctttcagccttagaagtatcagtaggcaaaggccttcttggacagctctaaagaggcacagaagtctggctcaagcccaggcgtttggtctgtccagctgcacagcaaacttcctatcaaggggaggctggccccccgattgttacactctgt

SEQ ID NO: 45542 - DNA, 340 bp, Mus musculus
  source 1..340: mol_type = other DNA
gttgttctcaaaaagcctccaaagagcacacgggtccctctggccttcactggcagcctggattaaaggcatgttctaccacaacctatttaatagttcttataggctctatattctttgaacttgtacaagaggagagcagagactcaaatctgggcaccgcggcccatccgatattcccagcatcccatcctgggaggcacacatacatgcatacatgcgcgcgcgcgcgcgcacacacacacacacacacaaatcaattaatttctctgagttttggagagaggccaccattggcaatcccggcctccgagagcggcggttgcccggcgcgacatgg

SEQ ID NO: 45543 - DNA, 355 bp, Mus musculus
  source 1..355: mol_type = other DNA
agagttctgactctcccatccaccacggtgatggccacttctgtagagggagcctccgtgtgttcatcaacgacacgagtcagcaagtcctgctgggctgaagagaagcaagaagggatcttccttccagagagtcctttctggaagtctccagagggacctgggcagctgctgtgtgtccaagtctatcagcccctcagctctactcccaaaatagcagtagtagtggtgttgcctaggcagggcaagtctccaagctttgaggtatgagtctaaaggtcacccccttcacgtgggcatggatgtccagtccaggcagggggaggtgattccaggagcacctgcccctgtggcc

SEQ ID NO: 45544 - DNA, 385 bp, Mus musculus
  source 1..385: mol_type = other DNA
aagagaagcaagaagggatcttccttccagagagtcctttctggaagtctccagagggacctgggcagctgctgtgtgtccaagtctatcagcccctcagctctactcccaaaatagcagtagtagtggtgttgcctaggcagggcaagtctccaagctttgaggtatgagtctaaaggtcacccccttcacgtgggcatggatgtccagtccaggcagggggaggtgattccaggagcacctgcccctgtggcctctgaggtggaccgcagagctcagagcagtgctttcaggccttcaggcccaatgtcctttgggccctagctatcaggctaaaagccttgtcctgggtgtccagcaaaaggctgaggcattttcagctcca

SEQ ID NO: 45545 - DNA, 215 bp, Mus musculus
  source 1..215: mol_type = other DNA
cctgatttgttcccccagctccagggtccaggaataaaaaaaaaaaaaaggagggctttaattttctgcctcttgttttttgaagggtccagaactattaacgccccttcaaagtgaaaaagaaaaaaaaaaaagctcttctctttcttaaagttaactgaggttactggaagcactggggtttcctggtccatggaacaggactgctcgctcag

SEQ ID NO: 45546 - DNA, 245 bp, Mus musculus
  source 1..245: mol_type = other DNA
ctcctcctcattgctagcagaagcttgtctctacatttttctatatctctggctctagtgaaaagaatcaagttatcagtaatctctaatgggccatctctcgctctctgagtggttcggaaattctgagcttcgtccacgatgatatgttgcacattatcaaaggtatttttcatgaaggttttccgtgtcactgcctggcaaacgtttttcctgtcctcacaatgaacctcttcaaggactgg

SEQ ID NO: 45547 - DNA, 451 bp, Mus musculus
  source 1..451: mol_type = other DNA
gagtctttctacattttataagcaccataatatagttgtatctttatcttttcagtaatttttgaacactgaaaaagataaattaccttttaatattcacttaattactcctgtagtactggttttattcatgtgactctaagtgttactctggtacaaattctggtgaccaagctgctgaattgttttgtttcgtattgaattctaggatgacagtctttttcattcaacactgtacaatctggaaaattagaattttaaatggaaaaacaggtttttaactagaatacacattaacggtgttaaccatgtgtaacaagtgtacatgcagtaggaacaatctgcaagtaccaggggttaacagtggttagttctcaactctgagctcaggaggtgagatcctccctcaggctgaagctcagtctggcagcatgcctgcagccggccagaa

SEQ ID NO: 45548 - DNA, 335 bp, Mus musculus
  source 1..335: mol_type = other DNA
aaaaaatcccactatatgaaatattatgttttctttgattgaaccccttcaggctgagaaggcaatctggcagcatgcctgcagctggccagagcaggtgactagtccacaagtggaacactacccggccgaaggatcttgtcaggaggctggcttctggaaagaaagggagacttacattcctgtctgtttccaaattctgagaagagcttatctccttttgaaaaaattttatcctgtcttgtgtaatttgtatgaaaagatcccataaacagattgattagtcggtatatagatgcagattcacaattattgaagtttagtttctgagtttc

SEQ ID NO: 45549 - DNA, 256 bp, Mus musculus
  source 1..256: mol_type = other DNA
cctcaggctgaagctcagtctggcagcatgcctgcagccggccagaatggccacagaccagaagattctgggccggaggctaggaaagggagacttacattcctgcctgtttctaaattctgctttcccagccggccagggaagggcctggagaagagcttatctcctttcgtatgaatagattccataaatgctaaggttcagaattattaaagtttagtttattaagcacatatgagtttcagcccgcgggcgg

SEQ ID NO: 45550 - DNA, 505 bp, Mus musculus
  source 1..505: mol_type = other DNA
tcaaacttgtcagaaatctgctaaatgtattaatttttaagctagagagttatcttttatgttctccaaggaaaaaaggacacaagagtctactagtcttggctgcttggtttacactgtggacaaacaggataccctgagagtcactccacagaaaaaaaggtttttgtcttttggccttgacatgaattttaattaatacatgactcctagattatacgatttctgactccattgatagctaaggtaactgtagcttgaccttaccctaagggaatccaccactgtgtgtgctcattagtacattatttaactaggtaagactgccagacttcttacagacttcacgatataagttcagatgtaagctttacactgttcggtagagttcttatacatttgcttaaccctaaaaaaatcccactatatgaaatattatgttttctttgattgaaccccttcaggctgagaaggcaatctggcagcatgcctgcagctggccaga

SEQ ID NO: 45551 - DNA, 498 bp, Mus musculus
  source 1..498: mol_type = other DNA
gttaataagtgagctaataaaaaactacatagctttctcagatagagaaatataaattactgataaataccttttaaagttatcaatatgcttgacaggaaacaaaaattaaaactgctttgagattccatctcatagatagatgaatagatggatagatagataggttgattaattgataaatagatagatagatagatagatagatagatagatagatagatagatagatagacacacatgtactcatacacacatacatatataatagtaggtacataaatatgtgcatgcatacatatataataatagatacatacatgtatacacatgtagttgtataataataataataataataatagatagatagatagatagatagatagatagatagatagatagatagattaaaatataacaaagtatgaatcttaattagggtcttaatgctgtgaagagacaccatgaccaaggcaacttttataaagaaaacat

SEQ ID NO: 45552 - DNA, 274 bp, Mus musculus
  source 1..274: mol_type = other DNA
aggagagaggttttccttctctaatttgctctgtagacaactggactcaagttcacagagatctacctgtctctgctcccaagtaccatgcaaaccttcgggatggtatgcaaacgatttgctgccactgaatcactgagtgacaggtatgaatactggttgctagcttaatcaatctactttagactttaagtaatttctccattagaaatgattgcaacctcctgaaacaccttaggatttttccagtagatgatttgattcagaaagcaaa

SEQ ID NO: 45553 - DNA, 407 bp, Mus musculus
  source 1..407: mol_type = other DNA
tccttaggaacgggagagggtgactcattggactcccctcctgacaagtacagaaggaaaattttgtctttcttcatttttgctcctgtactttatttcttaaattagagattaagaaagagattctaaaggtctctgagtcagtttcctcagaaatatttattttattggatattttctttatttacatttcaaatctccccaatcagtttcttaaggctggttagggtactgctttagggtagccctgggaatcccatagagagaaggaatctgctggcagagaggatcctgctgtgcccatcttaaacccgggactggagggactcttaacaagggcacctgctcttttgagcaaatagaaatctgactagtcaagctttcacttcctggagggtgacagttct

SEQ ID NO: 45554 - DNA, 342 bp, Mus musculus
  source 1..342: mol_type = other DNA
tccttctgaggtcccagaagctcaggatgaatgtggcattgtcctaacaaacaaattaacattcatacttataggtgttaaggtggggtaggcttgagtaagggtgctggagtcacccccagtctccacacctgcctgaggctgatggtggagaggcacccacagctgggtttctgaggggctttttggatctaaaatgcactgagccagggaagagttaggagatgcagcttgcaccttgtgagccagtggagaggcttcaacaggtgtcacctgctcttctgagggtcaggacagcagcagccgcagcgaaggagatgtctcacacttcctggagtgaca

SEQ ID NO: 45555 - DNA, 329 bp, Mus musculus
  source 1..329: mol_type = other DNA
ggtgttaaggtgggcttgagtaagggtgctggagtcacccccagtctccacacctgcctgaggctgatggtggagaggcacccacagctgggtttctgaggggctttttggatctaaaatgcactgagccagggaagagttaggagatgcagcttgcaccttgtgagccagtggagaggcttcaacaggtgtcacctgctcttctgagggtcaggacagcagcagccgcagcgaaggagatgtctcacacttcctggagtgacaagctcatcccagtgctgagaaggacttctggagacagccaccactcccactgctgtgggtgtcac

SEQ ID NO: 45556 - DNA, 239 bp, Mus musculus
  source 1..239: mol_type = other DNA
cccagtgcctgctcttggaagccctggagctaaggctttgaaggagacaggaaacttcatttttgattaaatttaaaattttccatacaaggatttattataaatgagcaaatcacttttgtttcttttcaaaattttaaaaaattagttgttcaaataaataaataaacaaataaataaataaaatgaaaatttaaaaaattcgttgttctctttgtcaattcagagttgactcaatt

SEQ ID NO: 45557 - DNA, 351 bp, Mus musculus
  source 1..351: mol_type = other DNA
gacacattagaaacacttgtttcatggaggtgacatcagtgtaaagcagcagctgcctggctcagtggatggaggcagctcccaccttgcctgaggagcccagccccagggatctctgtgcaggagagagagaaaattgactcgagccagttgtcttctgacctccacatggtggtgtagctgtgaacacccagccccccataatgctacattttagggaccagtctgactaggataatccctagagtgccaggcatcctggggaattctcagcttagctgtgcagctaacactgatgactgtgcaaggtcctctgcctcccaccctcaccggagctgggcaggaagtgga

SEQ ID NO: 45558 - DNA, 323 bp, Mus musculus
  source 1..323: mol_type = other DNA
tcaaagacaactgtaacaaatgactagtgtctcatagattccatcagtctgcataatccctggagtaccaggcatcctgggggatgactgtgccaggttttgctgggaaaaggcttgctgtatggaatcttctcaggagagagaagacaaaaggtcatgactcttgatttcatcctactcaatgttgagggatctctgtgtagccctggctgtcactggccaggctggcctcgaactcagaaatatcagaggtcctatattttgtaaatattagaccttctttacttgcttattggctgtaataaagagctgacagccaatag

SEQ ID NO: 45559 - DNA, 506 bp, Mus musculus
  source 1..506: mol_type = other DNA
tgatgaagttctatttaattaataatatttttaaaaatgtagtgtatagatacagtggattttttggttcataaagaacaacattatataattttcaggaaagtggatataattggagataatcctattaaagaaaaatattgtatgttttgtcctggtacatatataggttatttataaatatataaaatcagttatgtatatatgatatgaaagttatgttctacatatatatctgtataaaaactataaaaatattttaaacaggaatgaacattacagaatagcctaatttaaaatgaatacagcttgacctttaattccagcacttctacatagagagttctgggccatccatggctgtgcagtgagactgtgttttaaaaattaaaataaaatgagcacagacgaagggatgcccatcccctttagaagatggaaacacagactcttcttgagtccttatcagccttcctcagtgggtcaatgttatgaaggctaaggtc

SEQ ID NO: 45560 - DNA, 322 bp, Mus musculus
  source 1..322: mol_type = other DNA
tcacggaattttgagaagcaccccaacaatgatttttagctttgccaacatttggaaaactagatttttcagctaactcatcttgagtttaataattctattagatcaaggtggtctcaaatcttaaggctcttcaggaccgggcatctttaattatttagctgtaactccagttccagaagatctgatacctgtttctgatctctgcgggctctgtgttggcatagtgcacagacacacatgtataatcacaaatagatcatttttaaaatctgttttttttttaaaaagtgttcaagataggcagcgtcgctttctgagc

SEQ ID NO: 45561 - DNA, 361 bp, Mus musculus
  source 1..361: mol_type = other DNA
aagctctaatagtagatttgagaactttaatagtctaggttatgttattaactagttaagttaaaagatttatttatttcatgtatatggctgtcttcagacattggttgtgagccaccatgtggagcagtcagtgctcttttttgttttaaagacagagtctgtatagctagccctttgaaatcccttgaataccacagtatgaattacacttttataggtttaaagtcagcatatatatgtgctggaatccaaatcacagtgttgtgaaacagatgagctttaaatcagttattgacaagagcagccagtgctctgaactatggtatagagctttagaagaccctaacctctcaagaag

SEQ ID NO: 45562 - DNA, 488 bp, Mus musculus
  source 1..488: mol_type = other DNA
agcactctgagttcgagatcagcctgaaaacttttaagctgaaacaaacattatttaaaacaaaaatctttaatactttttagaaattcaacaattgcacttctgacagtgactttagtgaagtatggatcatactttagaactataaaaaaacttcaaaatttaaattgaaactaaaaccaatccctttataaggttctcattataactattcagttcgagaatcataacgatccctgccaggaatcaatttcatctagcagaatgtgcctagagctataacttaattttacacatggatgacaagttaagctgtggtaggcaagaatgaatcttttgtcattttagtaaaacttgctgaactttgagctaagcaccacctggcagaaaggacctggcttgatctcccatggcaaccggcgtcaggcagggaccccagctcggcacggctcgagtaccgccctccaggaagcttcgctggaggtcct

SEQ ID NO: 45563 - DNA, 283 bp, Mus musculus
  source 1..283: mol_type = other DNA
actagctgctctttcaaaggacctggtaggtatatagatagagaagttccagtttatagtttcctaatgaaacctgtatccacaacctgttttaggtaccttataactcagatctgaataggtttgtgtttgagcaaataggatatctcacacaggttcacaatcttgttcacggaataaatcccgaaaatactgccctatccctgagacagggaaacctttccgttgctgaggcgacagacacgacctggccgtttggttctcccgcgcacccagatgacgt

SEQ ID NO: 45564 - DNA, 344 bp, Mus musculus
  source 1..344: mol_type = other DNA
gctgcatgcacagtgccagggacgtgtctattgtcatcacaatagccaaaactaagtcgcttttgtcaggtacttgcagcctgaagcattccagctgaccttcacaaaggaattttctgctgagcttttccgaagcaaagctgccctgctaagtaaaagtagttacttaccacattggaatgttacctactgataaaaatatgttggtgtattttagattaccagctttgcttggcactagcctggcctgctgttccctgccgcagtgaagggtgagagtgaccaccctctactccgtccttcaggtgggcatctgccagtcactgactgactgtatcggtaag

SEQ ID NO: 45565 - DNA, 339 bp, Mus musculus
  source 1..339: mol_type = other DNA
gagaaccatttgaaattaagaccttataattttttttttctgactctatatttatcagaaactaggttatgttaatctagatatataaccttgtgtggactaggacaagtccaaggatccttgccttgccctgtgtacgtttatttctagggatttcctgaaaaacaaaaatttggttatatgtcattgtgagttgaaagtcacggggacattaaagtttctccttttaattaaatacttaaaattcatgcaagtatataatgtgttagcaaggatagactggataccttttttctttcatcacaattatggtgtcagttaaatgagtgatatatttac

SEQ ID NO: 45566 - DNA, 385 bp, Mus musculus
  source 1..385: mol_type = other DNA
cagctgaccttcacaaaggaattttctgctgagcttttccgaagcaaagctgccctgctaagtaaaagtagttacttaccacattggaatgttacctactgataaaaatatgttggtgtattttagattaccagctttgcttggcactagcctggcctgctgttccctgccgcagtgaagggtgagagtgaccaccctctactccgtccttcaggtgggcatctgccagtcactgactgactgtatcggtaagtgaaggcagaggctccggggcctttctcgtcctcccaggggagctggtcccgcggcgccccagtgaatccgtcgggctcggggacccagcggaaccccccgcgcccgcctccccctccgccggcgcgagtgg

SEQ ID NO: 45567 - DNA, 394 bp, Mus musculus
  source 1..394: mol_type = other DNA
gcataatgagatctgatgccctcttctggtgtctgaagacagcaacagtgtacttacatatataataataaataaatcttttttaaaaaaagattgtgtgttcacgttttaattctgtgagaacaaatctttatgtaatctcatgctagtgttatttttatgacactacaattttttttaaaaaaagatttctttatcttatgtatcagaagatggtgccagatcccctggaactattggtgctgggaaccagtgtcctctgcaaaagcattgtgctttcacctgctgaaagatctcttcagctctggacttgggtctcaatttcctaactccaggtgcccacatctaggtgtcacccccagccttctctaagcagagcctatgggcagctggg

SEQ ID NO: 45568 - DNA, 416 bp, Mus musculus
  source 1..416: mol_type = other DNA
ttgaggccctgagcctcgggagatgaagtccaaatgtcctgggttcatttgcattttacatatgagtggactgagatagcaacctgtgctcactctagcaaaggctgtcagagaagtctttccactctgttcttacacactgtataggctatacagtctctcctactgatgaagatcatcgacacttgaagtcgatgatcctgtttgtgttctgactgataccaggcatcatgcaagcttactatcatgatctcatgtattatccccattttcccgtgataagaggttcaaaggactagcaggagccgggagcggctacaccgctggcggaggcagccgggttggtgggtggggcggcggccggcactcccgcccctctccgccccctcggtcctccggttgactgacccacaggc

SEQ ID NO: 45569 - DNA, 354 bp, Mus musculus
  source 1..354: mol_type = other DNA
caaattacttgttctacaccaagtctggacagatcttttgcccaattcaacttgaataactcaatgtccttgcagaactctacggctttccggtaaaaccccttagcaacagggtctggttaccagggttagcggatgacaatttaagagttagctgttacaaatcgactttctaagttcttatttataaaaggggagcctaccagacccggtaaaacgtgaatggggcggagcgagctggctcgctttcctcccctagcccgaacggagtggcgtggaatcacccctccggcttcggcgcagtggtatcgcctgccgcgcgctgattggctgccgagggcccgcagtcggcct

SEQ ID NO: 45570 - DNA, 344 bp, Mus musculus
  source 1..344: mol_type = other DNA
gtgtaccacaggtgttcttggtgcacacaggtcaaatgagggcattggtcttccctgattgataagcttattaggagtatcaggagccaggctctggactgaatggagagagagactgattctgtcacagcggaatcaaataacactttcatcctgaagttgcctttgtgagaacattttaatcgcagcaacaaacaagacacaaagtaggcttcttactgtgtgtgctccttgccacacagcctagtgtgaacaacccctgtacttcacatgggttgtcttgaacttgatggttcacaaacactgtgttcctcaccaaagctatgagcagcattatgctgcag

SEQ ID NO: 45571 - DNA, 342 bp, Mus musculus
  source 1..342: mol_type = other DNA
caaactcacggagattggataactgagtgtgtagaccagactgggttctgacagacgttctaaagattttttttcctctgatgttaaagtatattaaaaatatctagacctgcacagcactgcatgtatgtggtagacatacacacatgcatggatataaaataaatctttaaaaattaaagaaaaataattaaagaaggagttgacaacaattttatatatctctggcaagacatataagtttacttttataatctatatctgtcggtcaggggttcaatgaattttataaaaggagaaatccttctggaaatatttactctctctaatcaatttgcatgt

SEQ ID NO: 45572 - DNA, 383 bp, Mus musculus
  source 1..383: mol_type = other DNA
gcatgcgcacatacacatgcacacacatgcacacacacatgtacacacatgcacacacatgcacacacatatgtacacacacatgtacacacacacatgcacaaatctttatttccacagagattcttttagttactaatgttaactctcagatcacatgtcacacactaagtgtaagtatgcctatatctacctagttatctgggaatcaggattacctggcaaaccttgttaacttattgttatcaatgacacaagtcatgactgggctacaacttgggaatttgccaagtgaagaccaatggcttaaattttctttatgacagcaacaagtgtttggtgtggaaactccccaagtcctggggctgggggggggcaggtct

SEQ ID NO: 45573 - DNA, 337 bp, Mus musculus
  source 1..337: mol_type = other DNA
caaactcacggagattggataactgagtgtgtagaccagactgggttctgacagacgttctaaagattttttttcctctgatgttaaagtatattaaaaatatctagacctgcacagcactgcatgtatgtggtagacatacacacatgcatggatataaaataaatctttaaaaattaaagaaaaataattaaagaaggagttgacaacaattttatatatctctggcaagacatataagtttacttttataatctatatctgtcggtcaggggttcaatgaattttataaaaggagaaatccttctggaaatatttactctctctaatcaatttg

SEQ ID NO: 45574 - DNA, 286 bp, Mus musculus
  source 1..286: mol_type = other DNA
ccattttatgcaatcgaggagtgattatttctctgttatgatggactgtaatttgggttgtaagctaaaatacataattcggaattcgctctaggatttgatccatctgcctgctttaagttcaaaacccatcaaatccagaattattttcatttgaggaacctgttcctggtcactgagggcagggctctcagcctgagctgacctcctcaatttccctcacctagaggttgtggcaagccaaattatggtggaagctgttaagtaactgcattcaccagttact

SEQ ID NO: 45575 - DNA, 446 bp, Mus musculus
  source 1..446: mol_type = other DNA
gtgatggagtttaaaaaaacaaaacataaacttatatatgagtgtgaatagatggacattacacactcaggtgtataactttggtagcctctgaagttatagcccaaagttgcagctcatatgctatcgccctgtttagtcttatttgtaagattctcagaaaattgcatgttcacatctgtgaaaggaatcatacctaaatatcaaatattattgaacatagtccattgctttttaataagtatataagcggcataatccattgttatattaatattctttttaagatatctctgtacataaggaatgttttctctataggcaacttttctttgttaaagctgaaattcttgactctcagcttataacatgttgagtttgcaaaaacagaaaatattgcaaatgaccatgtcttttcatgcattctgaatcctgcctcctagctt

SEQ ID NO: 45576 - DNA, 189 bp, Mus musculus
  source 1..189: mol_type = other DNA
acttggaagcacaggtccccagcagctaggaacatgagaaatgttcctagggactgggttggctacacattttgtctgcagcaaacactatataaggctccactgcctggaggtgccgacccccaagtgaagtgacgtgatgtcactgctggggggaagacagtctgtcaggaactcctcacttagagg

SEQ ID NO: 45577 - DNA, 600 bp, Mus musculus
  source 1..600: mol_type = other DNA
agtttttatttttagtgattttttaaaaaaaaattccagtattatttatttataatgcctggtgtgaaaaactgtatatttccagatatttgtagaattcttcactttgtaaaacttgtacaatgtttcttgatatttttatcaccaatgttatgagtgtacttatgtcattttaattttaagagcttcataaacaagcaatccaatgtatatactataatttaatttataattttttcatagtgaaaggttttgtttcaagttataatgacaatggaccagctgtctcaatatttagagatggctttacatttggcccaaaaatctttcctagaaaggctatttctagcttaatggaaaaaatatttttaggcgtgcctagtcactttgcggttggacaaatgtcactgtggtggtaggaggggctgttgtgccaccatccacagctattctttccatggcaacagaacggttctcatgagatgggaccagctaagaatagctgagagctgagacttatatctcagagatgctattcttagatatcctgggcccctgtggtcactgtggaccctgggttgatcatgacaccattgctgt

SEQ ID NO: 45578 - DNA, 356 bp, Mus musculus
  source 1..356: mol_type = other DNA
tttgttttgtttgcctatgttttgacatgacatccacacaacagcatggtgtgtagggcattcccacagctcttggactgtgcaactacaggacaagagaatgtaactggatgtccaggaagcttcaggtacgccctgacactcctcactgagagtctctgcttcattccaagatgctggtatacacagaactaaatacttccttgtatgaatatgagatcatcgctcatccaagagccaagcagtaagagggacacaatgctaaactgtgttcctgactttttcctggttattatttgaaccaacctaggaacaatactctaattgtaactagagacaagtcagatatgaaatat

SEQ ID NO: 45579 - DNA, 247 bp, Mus musculus
  source 1..247: mol_type = other DNA
ctttaggtgagaagcctcaaccaaccaaaaaattaataataataataataataataataataaatcctccttaagctactaatgtcaatacgttaagtttttgtcttagtcagattcctgcacaaacatcatgacaaggggcccttctcccttgatcactaattgagaaaatgctccacagctcatgagctcacttttctgtcactgccatgtagaagagtgctctccaagagcaaactttctgaga

SEQ ID NO: 45580 - DNA, 237 bp, Mus musculus
  source 1..237: mol_type = other DNA
ggaccaccaccagcccagggatggcaccacccacaatgggctgggccctctcccattgatcactaattgagaaaatgccttagagctggatctcatagaggcctcttcttctgtgaaagctcacacctgggctagttgggcatcaaggcaggtcctagctgacacccagcttgaaaaggaacgagaggaggactatctgtggaacagagggtgttctgaggacatacatagtgtgcc

SEQ ID NO: 45581 - DNA, 327 bp, Mus musculus
  source 1..327: mol_type = other DNA
atattataaataatgtcacttggactgtccagctacaattttgtcactgagagtgtatagtctggagagcaaaagagtcaggctctctgctgagggacaagggacactgaaaagagttgccaattggaagtcaacagtgtttcagattctcatctgtagagctgtaaagatgctacatcattatgtaaggaagccaccagtgggccctgacactccttactggctgtctctgctccagctcttactgtgagacacagtgctacagcatctatcaaagaccaattaggcactttctggaaagctagctttactgaggctataaattat

SEQ ID NO: 45582 - DNA, 253 bp, Mus musculus
  source 1..253: mol_type = other DNA
cgattcaaatgatttaactaagacaaaaaaatctgttgaagctgatgccagccatagctaggtaacggctgctcggcctcagacttcagtcggcagaattgtgggaacccttcttgtgtgaggcaaacccatccattcgtgaggaggggcacgtccctctcctgactcgtctgcagattgaaagaagagctctgtcagagaaaagaaaaaccagttagaaattacttttcctatgtagagaaactacttttgc

SEQ ID NO: 45583 - DNA, 231 bp, Mus musculus
  source 1..231: mol_type = other DNA
tccgtagccagaaggcgagctccaggtgtcctgctcccccttggcttggcggggcaggtagctggtgagccctgcagcggcagagctgtctcctttcaagggtcccgcaggcctctagggtccctccaattcgttgtaaccacctgcagacaacctggagtttaccagtccaaaggtcacctaaagtttggctgataaagagtagaatgggctctggcaagtcccaatccc

SEQ ID NO: 45584 - DNA, 420 bp, Mus musculus
  source 1..420: mol_type = other DNA
aagtagctacaaaacttgtatcagctttttttttaaaaaaagggtcaggaatggatttaaactcctatacatatcagtaaggactctcctatataaatgctgtggtcctagttaaaggaccaaggactttgagatctgagcatattacaagaacttctttcaagatttttttttctcatttctaaaatagcagtaataactcattaaatgcacataaaactggtctagtaaactaataacctattataattgtctcagtagttcagcatgtgctcaaagtaaaaggtactgtcagtgtctgtaatagatgcctgtgtctcctgcagaatgccaccggggcgcgccgctcgtgcccgggggccatgaagtcacgtgggcgcgcagccccgccccgtcgtcggccccgacttggtggggcgg

SEQ ID NO: 45585 - DNA, 355 bp, Mus musculus
  source 1..355: mol_type = other DNA
gcaatgtatggccctttcacgaattcattcatcaaacatttatggaaaaaatagatcttcatgtttgtggacttacatttgggataaactaagatagttgctccttccatttttgcagcatgtttagattaaaacctaaatacttcatcggagagcaactcagatcggcttctgttctaacaaggtttcagatcccatgtcttgggaaagtgtctcagttcaaatttgattgaatttaaccaatctaactaaactaggttacagtaactggttaatagtatctacggtaaccgaaaatgcagaatattggatttgtgagagcgacttccgctacggcctgtgcggaagcagtcgc

SEQ ID NO: 45586 - DNA, 344 bp, Mus musculus
  source 1..344: mol_type = other DNA
gactcctggagtctgactcactgcagaggctggaggaagtcgttcctattcattttttatacctttaatcccataaaggcagagggagtctctgtgagttccaggctcccccttgggtccgcacctggggctgtctcgcccgggggaggaggagggggtggtgattagtcactggccatttggacagattcttcgaacgccagctcagaagctgggccggaggcggcaccggggccaggaggacctgcccgcgccgcagcgcgcacgcgcggcgcccggaacccacgctcgtccccgctgcgggcccgcgctcggaagagggcggcagcgcgcagggagcggga

SEQ ID NO: 45587 - DNA, 254 bp, Mus musculus
  source 1..254: mol_type = other DNA
tatattttcgtctgggaacagacaaaaacttctagaaaacaaaaacctccaggttttacttgaagatgctagaaactggactcctggagtctgactcactgcagaggctggaggaagtcgttcctattcattttttatacctttaatcccataaaggcagagggagtctctgtgagttccaggctcccccttgggtccgcacctggggctgtctcgcccgggggaggaggagggggtggtgattagtcactggc

SEQ ID NO: 45588 - DNA, 516 bp, Mus musculus
  source 1..516: mol_type = other DNA
gatcacctgcagattttatttttattttaacaatagacttatattacctgtgtaccaaaaaattgggcaaatctatgaaacagatttttaaatagatatacagcataatagttaagatcaagccatgggttggaatagagctcttccccaacacttggtagcatgatctttgtacaatgcctggcatgcagtattgaaggactccacaaatggaagctcttataagaatctatactattagtaataagagatgttgtgggccccatccatgagtggcatgatgcgcccggggctcgtcatcctccagtccagagcctgggcagcctcagtttctttgcttgcaaaagaattggaatccttagcacatgccaccgggccgcttgtggcgagccaggtaccacgctccccatcccggggcggcgccaccgggacccgcccgctgccagactggaggaggcgggaccgcctcggcgtgctcgcggcacgggaccgcgcacgtgagtcgaggccgcgcac

SEQ ID NO: 45589 - DNA, 587 bp, Mus musculus
  source 1..587: mol_type = other DNA
aggcatatgtcaggtactaaatgtaatcttagtacggggactatacaatgtttttacagcctggtgaacagcagggctctatcaagacctttacagtggcaaagattctacagtacgttctacacttcacattgcaaagcacaatgctgcatttaaattaatcacaggggagcctgcagttaacatccttagagctgcacggtcttgggcaggtcactgtagccgggcctcgaccgggggcgcggagacccacgtgggggttcggcgggtcaggtgggccggggccgtgctccaccgcccagccgggaatacggagctgcggcaccgccagccgccggggggaggggctcgggactcgcccggccgcgccaacctcccccgccgcgtggccccgccgcgccagccggcacctcgtgaccccgcgtgccctcgctcccgccgctcggccccgcgcctcacctcgccacgtcccgcacctcggcgccgaagagcccgccgctgcgcgcgctgtgcagactctgcgtgcgcgccgcggcctgcgtgcgcggcctcgactcacgtgcgcggtcccgtgccgcgagcacgcc

SEQ ID NO: 45590 - DNA, 602 bp, Mus musculus
  source 1..602: mol_type = other DNA
aggcatatgtcaggtactaaatgtaatcttagtacggggactatacaatgtttttacagcctggtgaacagcagggctctatcaagacctttacagtggcaaagattctacagtacgttctacacttcacattgcaaagcacaatgctgcatttaaattaatcacaggggagcctgcagttaacatccttagagctgcacggtcttgggcaggtcactgtagccgggcctcgaccgggggcgcggagacccacgtgggggttcggcgggtcaggtgggccggggccgtgctccaccgcccagccgggaatacggagctgcggcaccgccagccgccggggggaggggctcgggactcgcccggccgcgccaacctcccccgccgcgtggccccgccgcgccagccggcacctcgtgaccccgcgtgccctcgctcccgccgctcggccccgcgcctcacctcgccacgtcccgcacctcggcgccgaagagcccgccgctgcgcgcgctgtgcagactctgcgtgcgcgccgcggcctgcgtgcgcggcctcgactcacgtgcgcggtcccgtgccgcgagcacgccgaggcggtcccgcct

SEQ ID NO: 45591 - DNA, 271 bp, Mus musculus
  source 1..271: mol_type = other DNA
agcacatgcctgtattcccgatcaatgtttcttgatagtaaagactgaaaatactatgttatttttatgatttactgtgtttcataaataaatcaacctattttcctacctttaagtaaaaggttgtttacatggtatgggtgtatatgcatgtatatgtatgcacattataccacagacacacacacaacgcacgcacacgtgcacgcacacatgtcccatagcctgtgaggacaaacactgtccattatggactagtcttataaagagg

SEQ ID NO: 45592 - DNA, 429 bp, Mus musculus
  source 1..429: mol_type = other DNA
taacctacttgccagcctggaatacagaatgaattctgtatagtccaaaaaagtctggactattggctttagagaataataataattatatactctttgctaagagatacaatttgtgtaatagcagctactgccaactgtagacagtacaatagtaataaggaagttgttttatctatactctttccacttattcatgagtatggaaatatacactattccataggtatgcctgtgttcatgtgaacttacggtcataactgtaaatgaatctgagacatcttttggttgagcctcagttactcagtttgcaagtatatataaagcatatctttaggtgttgatgacctttctgggaaacctctagataatgcatcatggcctccaaagtcaatcattaataactgtattcctgggtcttcaggaaac

SEQ ID NO: 45593 - DNA, 565 bp, Mus musculus
  source 1..565: mol_type = other DNA
aatgattgcattgtgttgggaagtcttccaatcaccattaatcttcaatacatactgaaagtatgtgaagtgataaaactagagaaatttgttgacttcattcacctcactccctgacacgcactgtggagggcaggcatgagactgctgtgagctaagcaaaggggctggttgcataggctagcctccactacttcgccagcaggtcgaggggacggaaccatagcttccactccgctctctgccgggaggtggagccgttgggccggccccaaacccgcccaccgctcggccccgaatggcagagccgcactcgggcatcgcctcacgtcgccccgccccgcgccgcgcgcccattggctgacgcgggcccgagcccgcgcctcgccccctcccactggcgcccagaccgcgcggctgcccggagcggggtcggaggtgcctggagtaaccccggacgcgcgcggacctaatggggctgggcggctgaggtgggcggccgggcgggggcgggccgggggcggggcagtccaccgaagccccgccctcctcggccccggtgccg

SEQ ID NO: 45594 - DNA, 450 bp, Mus musculus
  source 1..450: mol_type = other DNA
gagagtctaacttacacatcctatatttcatctagcagggtgcaattacatttatcacattaaggtctttgaaagtgaaggggtctgactgagtcactccatctttgaacagaaaagctgttaatatcaacgcttctgtagtagagtgcaatcttgatttgtggaaccatcgcgattcctaattatttctatcaataaagtcagatcctggcccgaagctgtgtgcctggccgcaggcagttatttcgtgcttaggggcggtcacgtgctccggcgcgctcccgcgccgcgcgtccgaggggcctccggcgcacgcgcgttcgggcggctcgcaaccctgccacggtttcgggcgcctgcgtctcagcttagcagcccagtggtgacgcgacgccccgcccctccggcgcgcgcgcgcctcccggaagttgcctactttctaaacgccgc

SEQ ID NO: 45595 - DNA, 207 bp, Mus musculus
  source 1..207: mol_type = other DNA
ccccagctgcgggagcaaaggatcacaattttctgtgtctcccagactccctgccgggtggactgatttgtaatcccaacaagtctttttaaatatataggtttgtcgctgctagtcgccggcaccgcgcgggcccgccgccactccccgcattctccccggccgggggggacgcagaatcacagactgccgtgacgtcggcgggcg

SEQ ID NO: 45596 - DNA, 398 bp, Mus musculus
  source 1..398: mol_type = other DNA
cgctctgggcgcccgcgctgggcctggggagggggcgggggcattttttgtgccagtcaaaaatggaaagggaccgtccgcttcgggcggacgcagccgggcgcactcgctcgctccccaccgccccagccctgtcacctcggccggtggcctgccaggcagtctgccgcgtcctccgagcggccctccctgcgcttggactcctggggaggcaacacggtctgggcctggacgagcatcctggcttccaactcgcggccgcttgggcgcgcagccttgcatcggccagcggctggaagcgcgcgtctccagcggctcggtcactgctcctggctgtcgcccgccgacgtcacggcagtctgtgattctgcgtcccccccggccggggagaatgcggg

SEQ ID NO: 45597 - DNA, 365 bp, Mus musculus
  source 1..365: mol_type = other DNA
ttttgaaatggatttgaggccagcctgggctgagcactggctgctcttccagagaaccctggtaacttcagttcttggggatccaacaccttcatagatgtacatgcaggcaaaacatttaaaaagatattttaaaagacttaccatgggccaagggcatcggctgcttgtgcagcttgggagaaagtcccaactatgacattgtgccaggattcttcacccgggagcagtccaaggttacagcctctaggctcgcctgcgtcagcggaggcagtgcgactcactcctgtaagcgcacatgtgcgtcatcggacagggggctgggcctccagaacccggaagctggggacccacgtgggaggctg

SEQ ID NO: 45598 - DNA, 496 bp, Mus musculus
  source 1..496: mol_type = other DNA
ccaccatgccttgtggtagagctcctgcacaaaagaaaaacaaaaatattgtttttgttgtttttttcgagacagggtttccctgtatagccctggctgtcctggaactcactctgtagaccaggctggcctttatcaagtttgggtattttaaccatttacttggccagtgaagccaaaggatcaggtacagtgaacaataacccttcctcaggtcaactggccttgatggcagcttactgtcagtcaccagtggtcctcaggcctttggagcgtgcgagcgtgcgtcctcttcctcgcagatggaggctctccaccgccccacttccgcggtgggccccccgcctgtcgcgggaaggacgggctcgtgcgcgggcgtgggcgtgtccggaaaaggtggccactcggacgccatgtggcccaatgcggaggtcccgagggcggagcccgggccggaggccgggccaataggggtgggtctaggcgcaactccaag

SEQ ID NO: 45599 - DNA, 340 bp, Mus musculus
  source 1..340: mol_type = other DNA
gatgaaactaacctagtcacttagactagccagtcacctgccagtatagggggcacaggccggcgatgttgccaacggtgcgggcacaacccccgggccacggccgcaccgatgccccccgaggctcccgtcaccagtgcgccagctctagccgagccgtctgcccacctcgttcggcgaaccaggcactgggagcgcaacttggagttgcgcctagacccacccctattggcccggcctccggcccgggctccgccctcgggacctccgcattgggccacatggcgtccgagtggccaccttttccggacacgcccacgcccgcgcacgagcccgtcct

SEQ ID NO: 45600 - DNA, 628 bp, Mus musculus
  source 1..628: mol_type = other DNA
agatcccgggtcgtcactggcagggaccccggctgctcctgctgggctcgggacacgagcgaggcggccgcggtctcgcgagaagaggcaggccccgcctggagttcgcggccccccctccccggcccccctcccacactccccgtggcgcgagcggctgactgagcctggagaggaaacggcaatcgcagccgcgctcccgcccaggccggccctgacgcgggcctcgtcagccggtaacggggaccgagagctctctctctccgacccgggtgaggactggggtctgagctcgcccccaccccaactctgcagagccgaggcagggtcgacccctcccaggggcggggtggcgccgggcaactgcagcctagggggccaccctgggcggggcgctcagccaggagccgaggcggggatgggcttctggagcccggactcccgagctgggcggggatgtcccggggccagcaggtccttttccgcctcaccctgactggaggccggcgggcggcggcgcgagggggcgggtcccggcgctgcggggcgctggtgatgggaaacgcagcgcggctctcctgtcctccccccacccctttcacccgtggcgaatgtgctgcgaggtggc

SEQ ID NO: 45601 - DNA, 441 bp, Mus musculus
  source 1..441: mol_type = other DNA
cttgaaagacttcatgtgatcaaaatacttttaaaggtcagtaacaacagctttaccctattttaccagaaaatattcgatctggtaggaatggatttattattaaaaccatcaagacaaaacattttccatctttttggcggcctttggccactatcagtaactttgcccaagggagtcccttaagttaatattaactcaagaagttccttttctgtctattgtaacaccccataaggcggccggctctgggtgagtcagggccctttcctccagtcttacaggggtggaagtccgacggtctccagagagcagatcccgggtcgtcactggcagggaccccggctgctcctgctgggctcgggacacgagcgaggcggccgcggtctcgcgagaagaggcaggccccgcctggagttcgcggccccccctccccggccc

SEQ ID NO: 45602 - DNA, 556 bp, Mus musculus
  source 1..556: mol_type = other DNA
taccactggctgagaggtcctgaggcaacttcttctggcatgcaggcagaacactgtatacataaccaccaccaccaccaacaaaccatgtgtgtgggggggggggggttagggcccttggtttcaacattgggtacataaagaatgcatgagcctccaacctaaaacctgtcacattttaatgtctgaaaagttgcaccccagcacctcaccgtaagtccctgcccacgactgagggtctccggcgtgggcgggcaccctccgcttccgcctcgcgagccgcgcttccggccgtcgcggctcagcctgttcttccgggaccgcagattccgcgcgcccccgccggggatggcaacagtccgcaccccgccgaactccccacgcccttcagggtcttgagctgggttgggccgggtgctctccagacctagccgcgcggcgggtccgtgggaggggcgtctcccctccgccccagggcgaggcgggttaggtagagggtccccggagcccgcgtcagcctcgggcaccgcgacctgcagcagagcagcgcaagggc

SEQ ID NO: 45603 - DNA, 263 bp, Mus musculus
  source 1..263: mol_type = other DNA
tcctggaagctggagtttaggttagaccaatggtgacacaccctgcaacagggtctcagagtctataactaaagtctatagtagccttcaaggttagtcatctgactcattagccagagtcgtgcaaatgcacggcttgacactaacccagtgtctggacattgtagatcaaatgtcttttgggttacatgagtcttaacattcacagtaggaagtcatctactgtatcgacactaatccattgcttctgactgccaatgagt

SEQ ID NO: 45604 - DNA, 493 bp, Mus musculus
  source 1..493: mol_type = other DNA
gtggttaccaccaagaatttctggatttctttttgtaagaagtacagaacctggacggatccagcacttccagcactggcagcgtgcccaaggtgcccagggccgggataccactccggaagcacctggtactgagagaacgcgtcctttctgggaaggtggctatgaccctagtcaagggcgcagtttccttaagtccccctttccggccccctgctggcaagctgaaaagtgaccgtgaaggtccttgccctgggcaaaagaaagtgagacgcctccttctgttttagacctccctacctcctcaggcggtgtgggattttgtggcactcaccggtcccacggcccgggcgcccagcgtggtagtcccagcccaggccgcgggagagaaagccgggagctccaggccgcctggcggagcactgcaaccgcggctcgatggcccggagcccgccggctcctccccaggggcggggcgtgcacacgcggcgcg

SEQ ID NO: 45605 - DNA, 222 bp, Mus musculus
  source 1..222: mol_type = other DNA
agattagttctatttaaaattgggaggaggaggaggaggatcttcgtcgtcgtcatcataacagcgtcagcacagcattgcaaagctttcaaggaagggtcaggtacctgaggatagctcatctttcttccggaatccgcttctagactggacaaggcgaagagaggctccgccaggaggaggagccgactcccacgtctagccgtccgggcaaagcctcca

SEQ ID NO: 45606 - DNA, 335 bp, Mus musculus
  source 1..335: mol_type = other DNA
ataaaatatatgtattttaaagctcagttttgatctagaaggaaaaagaggtatcttctcagagaagccggtcgcggccaccgcagcaccaaccgtcatcgctccggccccgcccgtcgaacgccagaacgtggggggcgggaagacccgtcctcgggcgccccggaagtcactgccctcttggccagctgagcgccgcggcgggctacgtgtggcgaggccgccccgccccccctgcgcgctcttagcgtggggtggggcggagcgtggccccccggcggccattacccggaaccgtcccgggccttgggtcaggtgacccgcggcggtgctgg

SEQ ID NO: 45607 - DNA, 355 bp, Mus musculus
  source 1..355: mol_type = other DNA
gagatggaacccagcgttccagggcagctggggcgctggtgccctgctagggacaaagcttgtcctgaccgagcggctgagcacccatcagccggaaccatgcctgcagctcaagacaccgccccggcctcccgctggcatgctggagaagccaagccttacttctgtttcagtggccactgacttaaggcaagtagattaatgaaatacatgccagctggtacttttgtaagtgccccacacaatcatttattaactagatggctacagggcggtggaaaagaaggaaaattacttcagaaactttaccgaggtttacacacaacccccccaaaaaaaagtggggtggggggga

SEQ ID NO: 45608 - DNA, 414 bp, Mus musculus
  source 1..414: mol_type = other DNA
aggctagcctggtctatgttaaacaaatttttcttcttttaaaaaaaaagaaaaaagaaaattgcagatttctgagttcgaggccagcctggtctacaaagtgagcaagacagccagggctatgagaaaccctgtttaaaattgattaagagcaccgactgctctgagggacaggcctggaactcacactgtagaccaggctggcctggagctcctgcagtgctgggataaaagtgatgggtgtttgagacagggtctcactccatagaccttcgtgctgtgcacttttgtgaaaaaaagatcagtcctaaagttcgttgatctaaaagatcaattcttaaagttgaagattaggaacaagcacccagcgccccttcccgggcgcgtcggcgcgtcgcgcgttgacgtcatgac

SEQ ID NO: 45609 - DNA, 538 bp, Mus musculus
  source 1..538: mol_type = other DNA
tttcattaagccctaactaaatcatttcggattgaatcaggcattcccgcaggcctaccctggggcccctaaggggatggcggacccccccgggccgcacagaccgggaggcagacgcgggggtggcggcgtatcggaaagcggccaccgcagccgacgctacctcgagagctacaggccgggccgtggacgtatcgcctgtacctgttgtccacgacagcggagatggcggtgttgtagagcgtctccgggatccactcgagctccaaggcctccgcctccctccgtagcgaacccgtgtgaggctccggaggcttccgaggggcggcgaccacgcgggcgagcgggcgtgcgcgcgcctctcggacccggctgccgggcctctgcgtgcgcgcgcggcctgagggcagatggtgctggcggtagcggcggtagcggcggccacggaagatccgagcccagttccgtccaggctctcagctctgcatgggcggggctgcgtgtgtgcgtcatgacgtcaacgcgcgacgcgccgacg

SEQ ID NO: 45610 - DNA, 293 bp, Mus musculus
  source 1..293: mol_type = other DNA
taagaaaatattaagttgatcactcgagaacttatttcaatttcgtggaaattagattctgccgccgacaggtctccgacctaacgttgtggaaaattccaagtcttcttaagtaaacccacgctggtattttcgcgccatttcgcttgaaataagtggaaggtcaagtctacctttgacctctgcaaattttccacaatcgcgggagggcttcagccgcttacgggcaaggagcgcgctcccccggtcggcgggccgagcgagatctcagcgagccggagcgagttcagtgc

SEQ ID NO: 45611 - DNA, 345 bp, Mus musculus
  source 1..345: mol_type = other DNA
tatgtacaccagtgctgggaatatagggaatatagtgcatgtgttactggaatcccataaaaagagattttcttagactctctatggatccctaaaggactccaacaaaatttcttacagcccttattcagagcaagacgtactcagcaggggactgaacacggactgccagcctagactcccggccgaagtgattggcagctgccacgtccacgtgcttttagcttcaaatcagctgtcgcgatggctgaggtccaaaatccaagccccagcggattggatggattctgaaggcgggtccgcccgaagctgacctccaagggcggtgccgcgccggggccagtt

SEQ ID NO: 45612 - DNA, 309 bp, Mus musculus
  source 1..309: mol_type = other DNA
gcggagaataagcagagcccctgctcctggccagctcaggcctcagcctgggaagaaaggcttcccggggcagcagctctgcagagcagattcttccccagggaggtacttccctaatgggcaggcaaaatgtgtcaaattagataaatgtgtccaaacaattccaactgaatcttcatctgaggttacccacaggaaggcaactcctgtcaggacacttatcagtttactaaactgtgttagtctgacttggcttctgaaagccttcaactactgttgtcagccgtcatgtctctcttttataacacg

SEQ ID NO: 45613 - DNA, 153 bp, Mus musculus
  source 1..153: mol_type = other DNA
gcagaggtgagcctcccatcctggaggctgaaagcctgaggtgagagcacaaaatactaagtgcaagcttgagagcacgcaggctgtctgtcctgataatagtatttgtagtttaaattaaagtgttctgctttgcaaaccggggagctggga

SEQ ID NO: 45614 - DNA, 277 bp, Mus musculus
  source 1..277: mol_type = other DNA
aatatagaataaaaattatcacaaatattacacctatgcataatatatacatatagacaaaattctgtgaagttctcctatcaattggcaaatggaaatacccaaaggaattgaaaatagacatagaaatcatttgtttcagtatcattgctgtcaacagatgaaacaaaatgtgctatgtctctacaatggaccattattacatacacagaaatgaagcttagtgcttaaggtttcagtgccttgcatattcatggcaagcacttaccagcaaggt

SEQ ID NO: 45615 - DNA, 483 bp, Mus musculus
  source 1..483: mol_type = other DNA
agaaggtgcgcctggaggccggcccttctggaaccccaggttcctgagtctaggtggggacccttcgtttccccagcgcaaggcggcgtcccgttcccgcccgtgccggccccatcagggttctgccatggctcaccggctccggacacctgattcggctccgggacctcggccgcccgagcctccctccctctgaagtgcatggacccggggcggtgaccgggaggccaggctgggtcgcaggcaagagcggccgggcctcccggcgcgggagggaaagggcgccccctctcctctccggaagcatgcggctagggggtccttccccaaggccccgggacccgggcgccccctgcctcaggcccttacggcgggtcagatcggtcctctgcgctttccagccctcgcccaggcagcggcgggcgcgggcggcgaggtgggggccaggccagggggaggggtctcggggcccgctggcccgtc

SEQ ID NO: 45616 - DNA, 647 bp, Mus musculus
  source 1..647: mol_type = other DNA
tgccgcggccgccgcccccgccaggcccgggtccggcagaggcttgcctagcgcgccgggcggcagcgctagcgccgggaagaaggagggctgcgctgccgccagtaagccatggcgctggctgccagcgccggctctctcatcgggacatccggcccaggctcctgggagccggggccggggccgggggcgcgcgcctcggacccccggcccgggcggcggcgcgcgcggaggacggacggcccgggcggcgggcgcggcagcggcttctcccggctccccgtcccgcgcacctcaaggggcgcagggctctggacgcgggggcggggcgctgcgcggggctgggctgggctgggctgggctgggctggccggctccggcgccggggaccacgcgcgacgacgggccagcgggccccgagacccctccccctggcctggcccccacctcgccgcccgcgcccgccgctgcctgggcgagggctggaaagcgcagaggaccgatctgacccgccgtaagggcctgaggcagggggcgcccgggtcccggggccttggggaaggaccccctagccgcatgcttccggagaggagagggggcgccctttccctcccgcgccgggaggcccggccgctcttgcctgcgac

SEQ ID NO: 45617 - DNA, 409 bp, Mus musculus
  source 1..409: mol_type = other DNA
aacctactaaaacttggcagagttcacctttggtgctcccaagatcatactgtgcacagctgtgccctgaggcaaggccagactctgtgaacaaggttttgaatcctttggcccaaggaagatttcttttttgcctgaagcaccacagtttggggttggggccctcggatatggggctgcaggaacccggttcctaatttcaggcctgtaagtcccaggagtgtcctggataccctgggccacatgcctagaaggcggtctttcttcaagacctactcctcatacagccccaagccttgggggcagtcagtccagaacctgaagggaggaggctagtgtcctgccctccagcatgctccctcccccagctcagaagggggcggggtccacgtgtgcaggggtgcccact

SEQ ID NO: 45618 - DNA, 525 bp, Mus musculus
  source 1..525: mol_type = other DNA
acttcaggtgcttgaagcaagcaagccctaagaggcttggttggctgagggacccaccccagatatcctggctgccctcagaagaggggcatcttctccatggtcaccctctggaaggggatagacccaggccctgagcatctgggggggagcactcagtgtctgcctggctctctgagctgttgaggcccagtgcgacacagaggagaattggatggtcagggcccttcagtccatttttctgcccaggccacaaggttgtatggccctggaaggaggctagggccagacctctgctgttgccacctgtagctactacctgggcctagctagcccaaattcagcagggctgcccagggttcttggccttcccccagggagggtgaggccaagcagctgctgccctcctcctttggcgcccacgccagctgtgcccctatgctgactccttgaaaaacgctttcaattgacatctgaggcactccccccacatgctcatgcacatgcgcctggtgcttgggccag

SEQ ID NO: 45619 - DNA, 313 bp, Mus musculus
  source 1..313: mol_type = other DNA
agggtggctcttcgagccagcaccaaaaagacgagcaaaaagtaaaccatttatttttcttcacatttcttaacctccctccaatgttctagagtaaaactcggagggggatctcgcggatcggatccgacttcccactctgagagtctggagcgtcctccaggactcttcgttaccgcagcgttaaggtcgcggtctcctgtcactggacccgccagcaggacgattcccggcattttgtgcttcttaaagtctcacagtacaagaatttttttttttccttcaagcacggtgctcgtcttccggtcccgcc

SEQ ID NO: 45620 - DNA, 377 bp, Mus musculus
  source 1..377: mol_type = other DNA
ggtcaagatactttgtatatatgcataaactatcaaagaataaataaaagatattgttagaaaaagtatccaatcactgatttttatctgtaaacctctgaggtttattattctgaagcaaaaactcaatattgtgttactaaaagcccccaacaatctctggtggatctctgtacgatcgatcgagggcagccaggtctgcactccgagttccagcccagccagagctggagggtgagaccctgtctcttagtaccgcggaagctggggctacctccagcctgcgttcacagaatgtaaggacaggctccctggccccgagagcccgccggcgccagcctgcaggagcccgtcccctcccgcggcgggaccggaag

SEQ ID NO: 45621 - DNA, 322 bp, Mus musculus
  source 1..322: mol_type = other DNA
taaaattcactcttgaataggatttttgtaacatccttgtctacataatgaacttataatttgggtacacaccataaaactaaataatgaaaagttattacactttggccttagtgtatagacttatgattaattagcctcgaactcagaactacacacaggtcttgggattctagaactttctagaccgcaccggcaggggtatttaatacattattgttatttaaatgtcgcgctgacaaggtttgtaacactccacgctttcggaggggcgggcctgcgcatgcgcagagcggccctaagctgggggtgcaggttgaac

SEQ ID NO: 45622 - DNA, 392 bp, Mus musculus
  source 1..392: mol_type = other DNA
ctactccagaacatttattatgagataaatagacttgcaatttttaagatggtgagactgtccacatataatattaattcgttcctaaaattcactcttgaataggatttttgtaacatccttgtctacataatgaacttataatttgggtacacaccataaaactaaataatgaaaagttattacactttggccttagtgtatagacttatgattaattagcctcgaactcagaactacacacaggtcttgggattctagaactttctagaccgcaccggcaggggtatttaatacattattgttatttaaatgtcgcgctgacaaggtttgtaacactccacgctttcggaggggcgggcctgcgcatgcgcagagcggccctaagctgg

SEQ ID NO: 45623 - DNA, 526 bp, Mus musculus
  source 1..526: mol_type = other DNA
aaagaatttgaactgatttccaagtaattcaccggggcatccagcagatggcgccatgttagtagccaccagctggccgcccggtccccggggctccgaaagctgcccggcccacgtgacctcgcggcggccaatgggcgagcagagagggcgagctgcaccacctccgccgctgaggagactctgggcttaaggacatcgccgctgccgggccgggggcccggggtgctctgccggtcctcgcccttcccgcccctccgcgggcgtccccgggccgcggagaaccctcccgggcttctgggctcggcccggaagggacagacatcccttcccctcctctccggagagggacgcgcgtccgcgggctccgcagtcccggcggccggccgagcgcggcgcggccctcccgcctgcggcctcggccccgggcggctgggtgcctccgggcggcgggggccgcggcggcgccggggggcggcggggagggcgggcggcccggcggcctcctccccaccgccccccgccc

SEQ ID NO: 45624 - DNA, 485 bp, Mus musculus
  source 1..485: mol_type = other DNA
actactatgaacaaaatttcatgttactggacacgtaactcagaagtgtctctgcaaaaagccaagtgtgtgcaaaacgccagacttttgccaatacttaatttcaagaatcataggaatcctgttatacatatgatgtcctagattttccagttctggcacccggttctggcacgaactagaggtcacacaacctctctgcccaggcagcccagcgggtctggcgtagctagcaacacgcagccggaagccagatcgcggctcccggtacgcagcccgctgccgagcaggttcctgggttcagggcggggcctagatgcgccctcctcctcctcctcccagtgaaggcggggctaggccttctctgctgggaagggcggggccgggatgagcgcggggcggggcctagaggctccttcttccactgggcgagggcgtggcccggcgaaggcgggccgcgcgtgacgacgtctagggagcgcgcg

SEQ ID NO: 45625 - DNA, 404 bp, Mus musculus
  source 1..404: mol_type = other DNA
tgagtttgcacctacacagtgccagataaaatatgaaactaaatctttattatttttaaacgacgttgtttgtttttagacaacatagatgaaactgtctaattagtctgggaacagggactattttaaaaagagtatttttgataagtgcttcacatcaagtcttaacgtctaagactgcattgtaggtaattctattctcactttacagttaaggaaattgagttaccgaagggttatgtaacttttccaagccactgaattagcaaatagcaaagacaagagtctctctttgcctttctttgcgaccggcagtttcagttcggttaagagctctgccaatttcaatttatcacttagacagaaacgcgcaatcctgccagtacctggccccgggagcccag

SEQ ID NO: 45626 - DNA, 445 bp, Mus musculus
  source 1..445: mol_type = other DNA
gtctgaagatttaaggcttgcaatcttacactccagcgctccagaaacacattgctccggggcagcgctcagctagggatcagggcgagccctgcacctgcgcgccccgcagaggcctcacacctagggccaggtccgtccgcccgcccgcccgctccccgactcggccgcgcggcgcctcagctcctcccggagaccgctcgcgtcccccccgggtctccacgccctcgggcacaccaggcttcccgggcccacgccgccaccccggcccccccggggaccccgggcccgtcgtcgcctcatgggcccggacccgccgcagactccacggctgctgccgccatcaccggctgcttaagctcaatgcgtctgcgcctaggccccagactgggctcccggggccaggtactggcaggattgcgcgtttctgtctaagtgataaatt

SEQ ID NO: 45627 - DNA, 368 bp, Mus musculus
  source 1..368: mol_type = other DNA
acagaaccttctgaagtatgttaaatatgtcaggctttttaggcttgtcacaaatgattgtttttttctaagtcaccaaatgtatataagttatatatattggatagcaatcttgcatgtctatcatggaaaaaggccattttataattgatctttaaattttgaaacagtataaggaaaatcctcacaaatgagtacgccattttttattctgtatatttagaatgaagtcgtgaaaaactttataaagacatctttgatgccaattagaaattgcccaatctcttactttataaaaacaagaaaaggctttttgttttgcctggtaggaaaataaacagctttctttaaaccagagatgtttgctt

SEQ ID NO: 45628 - DNA, 337 bp, Mus musculus
  source 1..337: mol_type = other DNA
ttgttatgaccaactacacttggaaacccttttgggagaaatagtccgtgtaaacgaataataataataaaaagtttgctttaattaatctggccatagagcgctttgctcaccatgcacaacgtgcatgaataaataaaaatacttttgaatccatctttagaattcttttccttttcgggctcaacaattacagtagagaaggagtcgagacttacctggagctcgtctcgctcacctcgacaaggaacacgcttcgcgcgcgccacctactccttccgggtttcctgaaaaactagttccggatggaggcgggctccttaaaggagccggaccg

SEQ ID NO: 45629 - DNA, 416 bp, Mus musculus
  source 1..416: mol_type = other DNA
agctctccaggggccagcaggagattcttctcgctctcctggcgtcagaagggcgtgcgtcagggcaaggaagcttgcagctcagtacggtccccctccctggcgaaaccaggcgggggaggcgcgccgcagccagccgcccgaggagctctgcggcggggccgtttcccttagtcaccgcggcacccacgccgccggtgtcctcacgcccaggccgccacgccggcagggggctcaaccgccacctcctccccaggagcagcggacccgcatcacgtgcaccgggaagtgttccccgcagccgcatcagcgaagagcgctccgcgcactgcgtccctgaatccctacgcccgaccgcggcgcggcgtctgtggaaggctacataaggcggacggcgttctgcctcgggatccttc

SEQ ID NO: 45630 - DNA, 358 bp, Mus musculus
  source 1..358: mol_type = other DNA
aaggttttggaaaaagcggagagccctctttttttttttttttttttttttaaatgacagtcctaggaaaagcaataactctgagaggtaatgacctgagaatcagcagcagcgaagaccctcttcattagtgaggttctctgagaaagccaaagccggctggccaccgccagctggcatcacccaagtgcgggagctgcggaagcggccgagctgtgggaaagctcggcttgggctccggacgcttctccggatcgcaggatcctggaagcggcccgctgggctccagccacggtccggctcctttaaggagcccgcctccatccggaactagtttttcaggaaacccggaaggagt

SEQ ID NO: 45631 - DNA, 331 bp, Mus musculus
  source 1..331: mol_type = other DNA
tgagacagagtctcattctcagaattatcctaagtactgggtattgaatcccaacaccacctcagataatgtgtatctgtagaattttcagcagttgtgttttctaaggaacgtacttccactaaaagtcaacttattttaaaacagatgttaaccctgtctgggtgtacaatatatagtgttccggaagtctggtctaagttttgaaaactacagaactacaatggacaaactgtgacctggccctcaggtgtactccttgggggtggtgcctcggggcccccaggagcgcgggcccgtgcgcgtccaagcagaggccgccacgtcatcg

SEQ ID NO: 45632 - DNA, 320 bp, Mus musculus
  source 1..320: mol_type = other DNA
gggtgggtctgccgtgtctcctgttgctaatagactcactaaccattagcaatagggatcccctttcctagttttaattaggaaatttcgagcagggcagagatctccgctccccgggtcctgggaacagccctgcccgccagctgccaggactggcgggacccagaccttgccacactcctcgcacgcgcgccccgccagggccgaggggcgggtgggggttgggggaaagcaggggcggagttccgtcctccagtgattggctccgatgggataggcgcgggggcgcgtctgtcacccggcaagcccccagcccggat

SEQ ID NO: 45633 - DNA, 223 bp, Mus musculus
  source 1..223: mol_type = other DNA
ctcaggatgatcttgaacttccagttgcatactagacacgctgcaaaacaagagctccttttctctgtaagttggaatcacagaagtgcaacaatgtagcacagctgctatcgcaaattaagaaattctcctgccttgtgggttttggcgtattctttaaaactgaaacggcaaccaatctagctttcgatatcttaaactcgagttgagtaaacgtagcgct

SEQ ID NO: 45634 - DNA, 320 bp, Mus musculus
  source 1..320: mol_type = other DNA
tcacagtgagacaccctgtacagccacagcctttgtggctaattactttgcaagtcgaagactctatcctctggtatatagtgaattcaagcccggactgggctatttctagtttgtaaggtaggagaaaagaaaactaggacctggaggctacctgcttgggtcttcttcgaagcacctgcgcgtgggaccacagctgccagacgcccaacgctccgcgccgtagcgcgcctgcgtatctgagcccctttgttgctcgggcgctggggtcgggctgcgcctgcgtgctgagtccgcacgaacaagtgcgctacgccgag

SEQ ID NO: 45635 - DNA, 235 bp, Mus musculus
  source 1..235: mol_type = other DNA
atctgtgccgggcgcggctcctggagccgatgacttcccccgcggcggttaagagaggaaggaactcaattcaggttccagcttccacaacccagtttcaggagactctaaaatgcgcttcaccttctaggccatcggtggacagaccgctgaggcgcttaagctgtaagccgtgctagcacccgcccatctttcaagttcatacttggaaactgggaagcgccgtggcaaagat

SEQ ID NO: 45636 - DNA, 245 bp, Mus musculus
  source 1..245: mol_type = other DNA
gaaatttgggtagattcctataatttgcatttttcgctagcgcccagagaagaattcggtgggacttcaaactatatattgcagtgttaaataaaaaatagtctaagagcctggggattagacgaagttcgggcctaagcctctaagaaaatttcaaaattaaatctttgccacggcgcttcccagtttccaagtatgaacttgaaagatgggcgggtgctagcacggcttacagcttaagcgcc

SEQ ID NO: 45637 - DNA, 439 bp, Mus musculus
  source 1..439: mol_type = other DNA
atttttttaaaaaagatttgtttattttatgtatgcgagtatactgtctctcttcagacacagcagagcatgtcccatatgtgagccaccagtgtgcacatgtgtgcatgtgagtaaattctatttgagagaggtatatttctctttttctaggcaccacatgtgtgctaggactcggacccaagaacaaatactcttactgaatccttttcatttgttttttgaagtaattactcaaaggacttgttcaacattacatttaggcaaaaaacatagtttttcacatatttgccttagtagtaattacagctgattttgttaatatcaattataaagtttttatgatgcccatgttagaaaccaatttccaaaaatatactggtataaatgtttttaggttttgctttattgcactactgtactttacagcgagcagtgc

SEQ ID NO: 45638 - DNA, 447 bp, Mus musculus
  source 1..447: mol_type = other DNA
acacacactggataatagcagatgtgtcagtgattttagtctgtcattcatatagaataaacaaatacaaaactagataacatattattgtaacaccaatagaaagtctgcatttgaaaacaaactaatgatgttttattactagcaagcaatgggaaggaaaaaaaaaataaaagttctcacaaaacatcctattaatttgttagattttgggaaaactggacagtatatacatacaagtaagtgtgttattaactgtaatgtacattaaagaaaaaaaaatggctcagctgagccgtgctagctggcttctgcacactgggtatcccactgaggccagcctgggatatgaatttttatacaagtattttgcccatttacatactgaacaaaatgtacataaatattattttacaaaatcccaaaatttcattgtaaatgaatgct

SEQ ID NO: 45639 - DNA, 460 bp, Mus musculus
  source 1..460: mol_type = other DNA
aaatcttgtttatagttcatataatttttaaaaaatgttgctagtaacgaaaagattctttctagattatcaattctctggattgggttcataaataactttgtaataagcttaagagaagaattaagatttaagtatttgaccaacgcctttatcctccaggaagcttggagacttcactatacgtccagtctatcatgaaccggtccattacaattggagctttcaaatatgcgtttcctcccagaggcggaaagcaaacgggtctccttaggaagactctccgtcccttcctaatactcgggagcgtggcttcttccaattaggacgcaccatgcgaggcgaagggcaccgcgccgacgcccgacacgcctccccgcggcaccgcctcaagtctcgtgtgctgcgcgcaccgcgggaaccgggcgcccgcctctcctcccgcccccgagtgcgcgtg

SEQ ID NO: 45640 - DNA, 502 bp, Mus musculus
  source 1..502: mol_type = other DNA
acatccggtagcacacatgctaaatttccataactaagaaaattaaagctatctgatatactcatcagatctctgagttccaggacagccagggcaggaaatctgtccctgaaaaaaatttttttcccatttccttattttttccataaaaagactgagtccagtcccagtggagggagagagctagctagttcaggtggtcctgacctttgggcagaggctctgtgagtttgaggccggcctgctccacagtttagaaaaaggaaaaaaaaaataatttctgttatacttaaatgattttcttctagttacaggactagcaagttttagagctggatttaaatcagtcaatctgttttgatgtgcagatctaggttacatataaaacttattttcacactgatataaggagaaactcaatttttcttagctttgaattttagataaaaaagataattgagaaattagaaaatgttatctacgtattgtgaagctgcagcta

SEQ ID NO: 45641 - DNA, 521 bp, Mus musculus
  source 1..521: mol_type = other DNA
acggattatatggtaggataatataatataatgacatgcattatacatgaaatctaccacttcaatctgaaaagtcactgttttgaaggcttgtttcctcatctgtaaaacagaatcctaacggtaataacctttgccttaaaaggctgtgaggattaaactgcaaagccctatataaataagacattgttaaaggctttggagactttgaaagggaagcttgactatctttttgagaaaaggaaactacccttttcaacacatatcattagtaaaaggtctggtggaaccaacagagatgtcgaagttggagtgcaggagtccagcgtccttaccactttcttaattagaaccggttgccatggcgacagtctctaggcagcgtgggctgagctctcgggattgcgggtgggccgccgctggaccctgtgcgcgcgcccgccaccaactttccctccagaccggagcggggtggcgcgctccgcccccgcccccgggccgcgcacgtccgagctcggtgg

SEQ ID NO: 45642 - DNA, 380 bp, Mus musculus
  source 1..380: mol_type = other DNA
ttctgatgtggaagcagtcactcctccctcgggaccagaggccggcaggcctgccgtgctcagaaaccgccacactctgagggagctccggagtcccggggtcacccaccggaagctgtgcgtgcgtgcgtgagcgggcgagtgcgtggacgcgcgcgtgggcgccaaccactccctaccgcagccccccaaagtgggaggctggcccacaatcccccgcgagggcgggcctggccagcaggaaactgccaactggtcagtttctggttgctgttccatccaggaggatggattcaaggcctcgtgagtctaggccgcgcgagccccgccccttacgccgcgcgtgtgacgtcacgccactgaccctcccccgcgggagg

SEQ ID NO: 45643 - DNA, 375 bp, Mus musculus
  source 1..375: mol_type = other DNA
ccttccttaaaccaggcggaacgaagacggaggcggcgccaagcggccgcggtgcatcagctggcagctgggagggcttcacctctaggacgtcctccccgcgcaccgctggagacagcggacccaaaccccgccctcccgcgggggagggtcagtggcgtgacgtcacacgcgcggcgtaaggggcggggctcgcgcggcctagactcacgaggccttgaatccatcctcctggatggaacagcaaccagaaactgaccagttggcagtttcctgctggccaggcccgccctcgcgggggattgtgggccagcctcccactttggggggctgcggtagggagtggttggcgcccacgcgcgcgtccacgcactc

SEQ ID NO: 45644 - DNA, 463 bp, Mus musculus
  source 1..463: mol_type = other DNA
cagaactgggaacctggaggtcattgtccagcctgcaggcagctcaacaggttggagagtgactctctctgcagctgttttctcggaagctgagatagtagaatatcaaatcaggattctggaatgcttccaaacccggagtccaggctatacatctaacaaacaaacaaacggaacttgttctttccttttacacaaactgttcatgaagtctgagcatttttatgatttattaggcagagtaagacagtccacaagtaatgtacttttaaaattaacctttctataatttatgaaagaaagcgaaataccatctgctttaggttcagtggtattttcccaactgcttccaaatatttgtgatttttacagtgtagttttggaaaaactcttagcctaccaattcttctaagtgttttgaggcttaaatatttaccgtaactatgaaatgctacgcatatca

SEQ ID NO: 45645 - DNA, 354 bp, Mus musculus
  source 1..354: mol_type = other DNA
aagtgtcctggaactcactctgtgaccaggctggcctcaccagacagattttatgtccctagtagcaaaagcttgtcttagtcctatattagctacaaggctgcatactttttaaataagtacttagtcctcccagaattttgttgttgacagaattctcctagcaattttgagaagtagaaatgaggaatttgattgattctcttaaatgcagtagcaattgaaacagccttgctttgttcagagtagtcccgactgctccttttcaacaagtatttagaaatttttgttctcatctgtgtaatataaaaactgtgtataactctacagtgtgtccatgatcagggtgaggcg

SEQ ID NO: 45646 - DNA, 384 bp, Mus musculus
  source 1..384: mol_type = other DNA
tacatttttaaaagtcacctgaaaaaattttatgtattttaaaatgtcataaataaactttgtatgtataaatttcaatctggagacaaatcacacttgggaaaaagcagttgcctcaatctccacagtgttctgacatgtgcagtttcagatgtctttgggcacggacagaatttattaaatagagcgtgcagtggaaggcttgatccagtagtgtcgcgcgtctgcgaacttgcggcttcgcaaaacgtcccgggcgagcgacagggaggcgagtggctgccagtgacccgtcgcaggcggggacagtctgcgtggtgtagggacgtctgtcagagaaggtgtccccgcgagggcagacgcggtgtgagagtcagtcgccgt

SEQ ID NO: 45647 - DNA, 273 bp, Mus musculus
  source 1..273: mol_type = other DNA
gcttgctggccagctgcctagcggccagtcagccaacctgcccttggggaagggcgcatggcctgccttgctggcctttccagagggcctgcaagatgatctctggataatttatgcagcaaatcctcgagtaacttggatgttcagtcagctcactccctccgggagcagtctctcttccagggatgccaggtgggtgcagccctgggcttcaggagaagctcacgcaggcaccggttgtggctgcagaggtacaggccccgccccaggccc

SEQ ID NO: 45648 - DNA, 346 bp, Mus musculus
  source 1..346: mol_type = other DNA
tgagacaaacttcagcatcaaatcagcttgaggtgtttcgctctctcctcagctgtcctgggagaaaggagagctcgtaaagagtatcaggaacactggcctcctgatagtgccttggagaccaactgatgcccggaatccatggagcaaaagactcctttgtggctggagttccctgcagggaaatctagcagcagttttctggacaatgggacagcagcttcttctggttcgggaagatcccatggaggggtttagcgttgcttaaaagttaaagaacagacttatgggccgagagtcaccttagggatatatgtcccaggctgcagaggctctaactgaccct

SEQ ID NO: 45649 - DNA, 345 bp, Mus musculus
  source 1..345: mol_type = other DNA
tcacggagacctccagcgttactggtgacctgcgtcccgagcgctgccagtccgagagctccttcctcccaggccttctaggagggcagacaaaaaaaaaaaaaaaaaatccaggattttcttttccatcgaccggtttgggaagggaccttcccctttcctaggtcatcgaactacctctcgggcggggtcgtcaccggaagtgactgctaccattccgccccccagttgcgctaccagtaggcgacgggcggccgtacttcctgtccccggagccctaattggctgccagagggacgcgcttgtctggtctccgggtgccggacgtctgcccactggaccagt

SEQ ID NO: 45650 - DNA, 451 bp, Mus musculus
  source 1..451: mol_type = other DNA
tgcaatgtgctgtaaaaactcaatacagttcaaataaaatctctatattagtgctgctttgtatggataaagcgttcgccactggactagccttgttgtacaccgagtacccaggctgggctttataaaaaaaaccaaaccaaactagtacccatgggtagtccctcttgtagcacatacttatcttctttattccaccaaggacctcatctaatttgaatttaagcttctgtatacaagatgaatgagttcatgtactacagttacagtaaaccgtggttccctggcgtgctgccctccccgctgctgccctcgaaggcgtgcatcccaaccgagggggagggcgggctcgcgccccgtcggccaccacgcggcgggaactcgaggccccattggccacaccggagggcgtgccgggactcgtgcgccaacggtccgggcctcggcggcc

SEQ ID NO: 45651 - DNA, 443 bp, Mus musculus
  source 1..443: mol_type = other DNA
tcaaatataatttgaaaatttaaatattacagtattcaaatatgaagatttacaaagaactatattgcatgaaggtagtaattagctaaatttaatctctttacctatactgtttttattagacatatttaacttttaagaaaagattcatcttgtggcagtgcctgtggaggccagacaagcatgtaaatgttgacttcagccctctggatgaacaggcagccagtgctcttaaccactgagccactgctccagctccaagcataggtttaatgcttagcttctatatgcagactaacttagagtcttacactggaagaatctgacagcaacctgaactgaagaaaagcaagtctttttcatgcagttgggctgtcgctcactagccggcttgcgtgtagcggctccaccctcactttgtcagcaggtagagagcgtgattg

SEQ ID NO: 45652 - DNA, 344 bp, Mus musculus
  source 1..344: mol_type = other DNA
cctacaattatgtctatttttgtctctgcaggcgtccagaaaggcaagactgcttgtattcgtgaaggcaggaagatcaggagttcaagataggcaaggcccgcgtcgcgaggcgcagtcccgccagtcgccccgctccaccgcccctacgggcgcatcagctcccagcgcgcgcgccgtcttccgctcgctctcgcgaaccaggtgacgggcgcgcgcgcggcccaggtgaccgggcggccccgcccagcgctcccgcgggaggaaccatcttctccacggggagggaggggcggggcctgcgatggccggcaccggaagcggaagctgcgtgcccgacgcgt

SEQ ID NO: 45653 - DNA, 406 bp, Mus musculus
  source 1..406: mol_type = other DNA
atgtgggggctcatactcagccccccctgtcttccccatggggaaagtgggggttgacatgcaggtgggcgggaccctgcccacatccggcatccttgtgggcccccaaaacagcatgaagacccaatccagttgtgacccacacccctatagtgtgtgtcacctgatcagcgaggctcccctggggaaagtggttggacactgaacctaagaacgatgttggtgtatgggtcagagcaaccctgctttgcttggtgggccctagcagggaacttgtctcctgccaggaagccacctgcccagggcatgtgagatggcctcttcagctgcactccccagggaggggagggctccaagaccgttgggcgcccttccgacccacgtggcctcggggttataagcccta

SEQ ID NO: 45654 - DNA, 382 bp, Mus musculus
  source 1..382: mol_type = other DNA
tgcatactcttctatacatacatgtaatatgacatgcatatgcatgctgactgaaagttacatgacatagcatgtgtactgatgtttagactgctttagagaaatgaatgttaccttctccctacccagttccattggctctggcctgggtggagatctctcgagatctaggtgccccacatacaggcagacacctaggttgggccatttttttttcatagcaagtaaataaataaagaaaggtcctgatctccgcctgaaaggagaggactgtctctactccctttcctctgggtagctttctaacctaccatctgccagcttgcctgccggtccagcccaccagtcccagctgagagggggaagggagggatgatgatgc

SEQ ID NO: 45655 - DNA, 248 bp, Mus musculus
  source 1..248: mol_type = other DNA
aagttgcctttgtcccgagcctggaactcctcagccccactgagagctgggggggggtcctcaggccctcaagggggtcaaggaggacactcagtttaaccacctaaccccagtgggggaggagagtttttacaccccaggcataaaaacccgttgcctcttcatagaccaggcccactagaattgtaaaacctctcttttttcaaaagctctttatttatttattatatgtaagtacactgcagcga

SEQ ID NO: 45656 - DNA, 309 bp, Mus musculus
  source 1..309: mol_type = other DNA
aaagagaaatagtctttaagtatatttcagtgaaggagatgggcaatcactttcctcaaggtgaaaactttaaaagtcactgagatagaagtcatctattaatctctgagctaccggttttgccactgtacagttcaaaacactgaaaggtgaattgacttgaggggtcttgaaaaattaatgtttaatcctaccatggatttgcacatttaactagacttagttctgagagctattcagatctttgaatcttccctgcctagatcaagctggcagattttaagctggaaggtggccgcagcgtcttac

SEQ ID NO: 45657 - DNA, 310 bp, Mus musculus
  source 1..310: mol_type = other DNA
cagggtttctctgtatagccctggctgtcctggaactactctgtagaccaggctggcctcgaactctccttaaatttttttaaatttattttatgcataatggtgaacatgtttgtgcaacacatgtgtactgggtcacctggttctggccaccatcacgcagtgcaccaactttcaccttgggtggaggtgagctttactcacacaggacagctgagggtcccgctgccaggctagggactggctcccgcagacgtggagagctgcgcgcgcagcgcctcccttgcctaagaagccagcgtctccgttg

SEQ ID NO: 45658 - DNA, 323 bp, Mus musculus
  source 1..323: mol_type = other DNA
agaggctcctccagagaagggcctgtcatctcactagcccaccactgctgtgcattgagaggagatcagggcacgctcagagccacagtgagcctttaggtctgggtgacacctcaccatgaccccaggtgtcccctgaggtatttctctgacgactcactcctcatggggagagactttccaaacatccacacaaatctctctctttgtcagtaaattcatcactcattgggtgacacctccatccccagcactgcttcgggttgtggggggcaaatgcatccatgaacccacctgagaggaggtccagaggccttaggggt

SEQ ID NO: 45659 - DNA, 296 bp, Mus musculus
  source 1..296: mol_type = other DNA
agggtttctctgtgtagccctggctgactctgtagaccgggctgctgtctcaatatgggtgaagtcgttttttaaaagatacctcacagccccgaacggtagaggctgtacctccgggttctctcaagtgtcgccagcctagggaaatgaattttcccctcccgagtcaggcctctccgggcctgggcagacagggtcgaggaagcccgcagtgcggggccgggcgggcgcagccaatggggagcgcggacggcggcgcgcgcggcaggggggcgggggcggggctctatttcagg

SEQ ID NO: 45660 - DNA, 209 bp, Mus musculus
  source 1..209: mol_type = other DNA
ctccggcgcctctccaggcctggcgggggagggcggaggaccggcttgcggcctgcggatccggagggcggcgaatccgaaacgaggcaataaccagggacagaggaaagggagggctgggcctcacctttaatcgtaggctctctctgttagagagtaagatagcttttaattattggcaaaatggtgtattttttaaacatgattgg

SEQ ID NO: 45661 - DNA, 408 bp, Mus musculus
  source 1..408: mol_type = other DNA
agcaagcagtcagatgatcagtttaatacctaattgtgtgactggtcacatggccactcagaataaacaaaatattgatcagtctcctctattcttcttaataagtcatagtcagtggcctgagattctgagaacgagacagtatagcagacttagagttagtacctctggtatcctttaatctaaaatagaaatacacttctaagggtaagatagcttaccactttgttgtgaagccaagtttggttcccagcactcactcatatgtgcagcgtgtatacatgtgtgcacaaacatgcacatacacatagacacataatttaaaatataaatattttaaacaaggacacaggagctgatgaatctgcagccattgatgagtagtcatgaagccatggcaacatgacg

SEQ ID NO: 45662 - DNA, 529 bp, Mus musculus
  source 1..529: mol_type = other DNA
ccttggtttgcttttattataattcgagttcattaacaacacgcaagaatccttttgcagataatcttggcaaaataaacagaaccgggatctcggctctgcagttaatcactcttcctttttcatccttagaaaggaggaagaggaaaactcaagtttcatttagatagatcgtctcccgccggcggcaccgaagtgcagaagatgcccaggtttccggagcaacagctcgccctgggacacgcttgcaagataggtttcacccaatctttttagagcgccgagctgctttcagagagggtctacccccgaggggattaataataaccgctttaaccagagcatgtgatttttactaaacgcctggacgttccagccaggacgcgagggactttttcccctccgtgcggagggtgacgtcgcgcgtgcgcgagcgtgcttctcagcacccgttagaggcgtgcgcctgcgcactgggagggacgagccgcttcctccggcttctcttgcgccgagctgataaaggcgc

SEQ ID NO: 45663 - DNA, 312 bp, Mus musculus
  source 1..312: mol_type = other DNA
caactcactttgtagaccagatatctttacagcaattcatacattaaacgtataaggttatgtttcaggatcctggcactagtcttcagactaatagacattcttccatctgactggaaagatggctcagtggtcaagaccacttcatgcccttccagaggtcctgcatctgcctgtatttggcatatatgtaaaagcaagctttaaacaaaattcaggtgaagttcagctagattagttagtagctgaaaaaatttttgataattatgtcacatgtatccattaaatgcattttctttagattactctaat

SEQ ID NO: 45664 - DNA, 542 bp, Mus musculus
  source 1..542: mol_type = other DNA
tccaaccagtagcagtggctgactagctggggtcacctcagtgacatctgacgctgtccagtctgacaatgtactaaaagactaaaatattttgcctctatactttcaaacagtaggcgcttctaaggctgctagaagctagcatcctagttcgtaggtggaagctccaaccgaagccctgactgcgcgacgccgccgggtaccaaggcagagtcacgagaggcagcccagctgtgcccagcgggccagcgccagaccctggcgtcctctgctccagctgcctgagccacggaccgcagcatcacacacccccgcggggggggacgccgcaccccatccccgcccccggccccaccccagcccccgcgcgggctccctgaccccaccgcccgcgggcactggctgagctccgaggcggcgcgccggcggcggggacgcccggagggggtcgaagcggctgggggcggcggcggccgggccggggctccccccccgcccgcgctcgccgccgcggtggtgcgtcccggaggttaccggaagtg

SEQ ID NO: 45665 - DNA, 227 bp, Mus musculus
  source 1..227: mol_type = other DNA
attttagaggaagtctacttcgacgggtctctcaccagctgtggagagcagagcacaggggctggagccagagatctccaagggacctgatgctggagacctgagacctaacctgagcctctaggtgctcagagcagcagtgggaagctgcttccggaatcgtagctggctttgctaacgacttgaatgaaaatacatttcataagcataacactacagtataaagt

SEQ ID NO: 45666 - DNA, 348 bp, Mus musculus
  source 1..348: mol_type = other DNA
ttgtgcccagacttctcagcaaagattgtaagtctttgtgtgcagggctccaacttggaaaattaaccagttgatcgaccgtttattaaaacgtttgtggaacatcaattaaggtgcttcccaaggtctgtgcaggaatgcacagaggagactgtcccagtgtcctcagaggccggatccctattcctgcttccagtcctggggagagggtctgggggtgtcgcagcctgagccccgccgcgcgcgcagccccgctcctccccgcgcgccccacttgtggccccgccggcagcttcgcagggacagctgcatttctcgccgcccgccgctaggaagccggcctcgcct

SEQ ID NO: 45667 - DNA, 270 bp, Mus musculus
  source 1..270: mol_type = other DNA
tgagcagtcagtgcttgtcactacgatcaaccatgatgttcttcgcacaaataccctgatgaaatttctaaggggtgctccagcgctagcgggcgggcgagggggctaagattaggcttagtctgtgctgcatcccggcgagctccacactattccctccaccctgccagagaggagatccacctttccccaggaccggtcgtttgcaggacctgagggctccgccgtccggatgacgtcgaggcgggactgtcatcctcggctcggcca

SEQ ID NO: 45668 - DNA, 95 bp, Mus musculus
  source 1..95: mol_type = other DNA
gaggtaatttatctagctctagaccacatgtggctaggaacatttgcctctgttccaggaacgttgggaaacatatccattgcgggaatatggat

SEQ ID NO: 45669 - DNA, 231 bp, Mus musculus
  source 1..231: mol_type = other DNA
gagagggagggcacaacctatctttcctcccctgctggggagccctccaagctggcttcctgtcgttgccatgggatgtggtatcctggtactacccagtacccaggtacctgaccctgggccagagtaatattattataacgccctcaggccatgggccggggcactctagagctcagatgacctgatctttggagcgcctcctctatgaagaagccagccccaagtgct

SEQ ID NO: 45670 - DNA, 489 bp, Mus musculus
  source 1..489: mol_type = other DNA
ttaatcaaaggcacggctccgtacctctggcggggaagggcgggctggtgttcgtgcaggagggtctcctccatccgcaagccccccagatcccggggttctcgaggactgccctgggagcgcagggtagggcggcgggtgccacctccgaatcgggcgcagggccccactaggggggcccgggggcgctgccgcctcccggcccagcgaacagcccgggccgagctccccgcgcagcccatgtgatctgagccgactcggggtgcgcttcccgtctccccgcctgcttggcgtggccaacccccccactcgagtcgcggggctcgcgcgccgcccctgatgggtcccgctgccgcggggggccgagcgtgtgcgcgcgcggacaggcgggggaccgaacggggtgcgtgacgtcaccgcattggttacacgacgttctagaactccgccccacgtgcgcggggaggagggggaggaggcggcggggct

SEQ ID NO: 45671 - DNA, 641 bp, Mus musculus
  source 1..641: mol_type = other DNA
gccaagaagggggggacccaggcgtccccccctccctcccttacctggtcgatgtcagatcggccattttgacgtgtaacttacaaaagggtgggctgggggagaaggtggcggccccacgccaccccaaggtgcgcgagtgccccaagggtgcgcgcgggggcgcggggggcgcgcgaatgccccgctccgcaccgtcgcccgcacagccccgaacgagcccgcggcggcgcggtgggcagcggctggaaactcacaccgagccccacagcgaagcggagcgcagcggcggccggctccgagccccagatctccgtccctcctcccccgcctcctccccccgcccggcggctgcgaagctccgcgagcgccgagccgggccagcggcgagagcccgtcacacgtgggctcggctcagctcagccccgccgcctcctccccctcctccccgcgcacgtggggcggagttctagaacgtcgtgtaaccaatgcggtgacgtcacgcaccccgttcggtcccccgcctgtccgcgcgcgcacacgctcggccccccgcggcagcgggacccatcaggggcggcgcgcgagccccgcgactcgagtgggggggttggccacgccaagcaggcggggagacggga

SEQ ID NO: 45672 - DNA, 433 bp, Mus musculus
  source 1..433: mol_type = other DNA
ctcttccaggagcctaggtaccaggcacacatgcagtgctcatacatatatacataaaataaaaataagctaatctttaaggcaaggatttctaggcctggcagtctcgtcaagtggggcagatcaccagaggtaacggctgaggatcgcacttatgtaaagtcagtttaaatatccacacgacatgagaggtcctgcctagcaccaaccttgctggcagagtcagtctggatggtgagcctgggccactctcccgcggcagcatggctgaggcccagggtcacagagatggagccatgcctcaggcccgctggtcttagcctagcccggtgagcaagctgactcatgcgagcctcataatgggctggctggcccgcccaaggttagccctacacctctattgtgatggccttacagggcagcaagccagcca

SEQ ID NO: 45673 - DNA, 261 bp, Mus musculus
  source 1..261: mol_type = other DNA
gtggatgtctgagttccaggacagcctggtctatagaacaataacaataaatggttgtgcttaaaccacgtggatacagtgccttcaggaggcagcatcagagcctctgggactccagtcctcctcctgctgtggagcaggctgtgccagtctacatacctgcactggctggcttgctgccctgtaaggccatcacaatagaggtgtagggctaaccttgggcgggccagccagcccattatgaggctcgcatgagtcagc

SEQ ID NO: 45674 - DNA, 382 bp, Mus musculus
  source 1..382: mol_type = other DNA
agctacagtgtacttatttataataataaataaaaatctttgggatgacacgcaaattcgtgaagcattcacgaatatatatatatgtttataaataaataaaataagaattaaattatacattatatccctggctcacagagcatgagtgtacacacacacacacacacactaagccaaacccttgcaggcttttattttatgtgtaatacactgtattacagatggttgtgaaggaagagcagtcagtgctcttaacagctgagccatctctggcaatttgccccaaaaggtcatggcttaaagcaacagagcttttgttacgcttagcaagctgcctctggcttcttatgatgtcatagtcaagctgtcagctgagcct

SEQ ID NO: 45675 - DNA, 390 bp, Mus musculus
  source 1..390: mol_type = other DNA
tgtgggtcttgggaaccaaacttgggtcctgaaaatagaatctagactctaaaccaggctggcttggaactcagcagctctagtcttaaaagacctctgacttcatcttttcagatgcaattttttaaaattctaggcctgagactatgtaatttactcaaattcagttatacattcatacacacatatgcacacttaaaagataaaacataagccttttgttccctacttagtaaccaaggtcagatgacatattctccctcgagagccctttgtaggaggtcctgggtgggtccgaccggcagagggagcgcggaatccttaggagtgtcagggcccacttaggctccgcccctgactccgcccagtccccgcgcaagccgtcacgcg

SEQ ID NO: 45676 - DNA, 403 bp, Mus musculus
  source 1..403: mol_type = other DNA
ggtacctttcctatatttcgttcaaaaaatgtgcactgaaagtgcttcaaggtcaacctagaacttcccagcttgaggccacagtctcggatacaattatctggggctacgagaggcaccatcccaaggcaggaacctgcctgacactccccagcccgagtgtgggacgtaggggccatctcccatgcccgcctctcgcgagagcgccagcaaggcgggcccgtacagctccgggatgtcagcggagagctcctgaccgcgcccctcttggcgcagctgggagagaggcgcgcgcaagtcgggggagggagcggccgatggcgcgcacgcgcaggagagcgagcgggcgaggggggcaccagggagccgagggcgaggggcggggccttgcgtcgcgccgcgg

SEQ ID NO: 45677 - DNA, 233 bp, Mus musculus
  source 1..233: mol_type = other DNA
ggtcagcctgtggcccagtggttaagctcaccgactgctggctcacaaccatctgtagtgagatgccttgtgtgtctgaagacagcaatggtgtactcatatacataaaataaataaatattctgagttcgaggccagcctggtctacaaagtgagtccaggacagccagggctatacagagaaaccctgtttcttgttttggcttagacttaacacacacatttaatctgag

SEQ ID NO: 45678 - DNA, 336 bp, Mus musculus
  source 1..336: mol_type = other DNA
ttgtagaccaggctggcctgggattaaaggggtgcaccaccacacccagcctgatacattcttctagtgtgtggctgaaaatagcagcactcatataaatagaaaaaaaaaataaatcttttttttaaaaaccctgtttcgcattgagctgtttccttaaggggccctagggacactaggagatcactccagccatcagagtgctacttgagaaggcttagaaagctaactcagctccaaacaggttaccattattagcattttggtattttatactttttttaaaggatttatttattatatgtaaataaattgtatatatatgagtagtatttt

SEQ ID NO: 45679 - DNA, 559 bp, Mus musculus
  source 1..559: mol_type = other DNA
tgagggccccatagagacccattctctagttgaaaataaataaataaattggctgtcttttaaaataaatattaaataaccctaaaagtattctacctctcgactggaggtggccagcagccagcagccagcagcagcccctgctacaggttctctgggtacctaggcaccacctggagtgtacagtgtaacttatatataataaataaatcttttaaagaaaatcttcctatttatttagctttctctggaccgtcaacactttcagaatatgaactccctgaggcccccaaggacgtgttgtgtgagttttaaacagtcttatgagaactttaagtctcgcatcacgagaatgtctcattttccacaatttggtgcctttttggtagaaaagtaaagtttctgtttaattacacgaaccgatatcgtagcagctatcctgacagtcaacttgcatgtatgttcgcgaggggagccttacagacctacttgcgcccccaggcggcgcacgctagctgctgctgggggcgggccgccggaccacgccgctgcgaaagcc

SEQ ID NO: 45680 - DNA, 250 bp, Mus musculus
  source 1..250: mol_type = other DNA
attaggttttgttgttgttgttttaaagatcatctaccataaaaggaacaccagatctgaatggatgaccatagggtcctgcagccacagtccatagaattgtgttttacctcggggacacagatctgggagggtgggaatattccagcccctatctgcagagtgcctctgccagcaccaggagggaagcctcccgccccggcccccagggacccacgtgacttcctgaagccccagggcgccaagtacc

SEQ ID NO: 45681 - DNA, 298 bp, Mus musculus
  source 1..298: mol_type = other DNA
ccaagttcatgaccctgatttacttccggtccacatgtaatatacaaacagaactcttaacctgtatgctttatttttccacatgtgtccagttattttattattttattatatttatataatacactggtaactctttgacttgtgttctgaatgaacataacaccttcaaaatcaccgttgaagacccttgaagtctttcaacaaggggagcgccgccgcgagccccgcccacctggccccgcccaagttgtgggcgcgtcaggcccctcccagccctcgccgagctgccggccgg

SEQ ID NO: 45682 - DNA, 545 bp, Mus musculus
  source 1..545: mol_type = other DNA
taggctggctgccacactgctgcctgcagcttgtcgttcttgagcatgatctccttgcacgggaagcgctttccacgcggagcccacagcagtcgcagaaggctccttgcaggatgtgctgcgcgcacacgcagcaacgccagcaatgcttgctcttgcggaagatatccctgcggtgcagctgccggcgcgaccgctgcaggctagggagcaggctctgggcgggtgggccggaccgctggtccccctccatcttctcaggcccaggcgtggcctatggagcgccgggtccagaaggcttgccttcgggcgtggggttgcggctcgtcccgaggctgcgcgtggcctcggccccgggaaaggcgcaggtcgcacccgcgggctccgtgcagtacaggctcgcggccactgcgttcacaacggctgtcgcgctgagcctcgcccgtgcctctctcgcgaggtctccggagacccccgcggtcgccggtaccacctaccgccgtcccaccctcaggccgcgagatctgcgtgggatgaggaggccg

SEQ ID NO: 45683 - DNA, 240 bp, Mus musculus
  source 1..240: mol_type = other DNA
tgcattgggcctggacagaagtcattgctcttccagaggaccagactgcatgcacatggtgtacagacataggttaacttttggcttctacacatatgattctatgtatacacacacacacacacactaaacaatatagtttcattttgaaaaactgtgtgaagagggatttaagctgagtttctcagggtcggagcatggactcagcttcctagagaagattccagccagggcaggggc

SEQ ID NO: 45684 - DNA, 257 bp, Mus musculus
  source 1..257: mol_type = other DNA
agatttagattctccctcgataccttaattcccttacttttaaggaagagatggctggtgtgaagctcatgactttcatcataccctatgagttgttggcttcttttccaagaaagactctttcaaagtcaagtggaaaaatctttttattccctttttgggaaaatgtcataaaatatggacttatgtccttccatggaggcatgtaagtgcccacatacacacacacaccctatctccagttattattgcaaatt

SEQ ID NO: 45685 - DNA, 456 bp, Mus musculus
  source 1..456: mol_type = other DNA
ggcgaaggaggagggtgagaagacccccgactccccgcttcgtggatctgaggggcagagcgctgcgcaacgctgcttggggggaggggacttaccccaagcccacatggagaaatttcttgctaggaacaaaccgggcccccggcatctcctggctccagcgccgccacgagctttccccgggactggccctggcggggcgcctagagccccattgcattgctccaggagaaaccaagcgccaccgccgccgccgccaccgccgctgccgcgccgccgccgcctgtgagctccggcgggcagcctgactgtcggcttcccggggcatctgggtccggcggggcacagtcctgggcgctgccggagccgccgccgccgccgccgccgcggcgaccagtgcagtcgctttccccccgagcccgtgcgtctccggctcctcgcgggtggaggagttgg

SEQ ID NO: 45686 - DNA, 387 bp, Mus musculus
  source 1..387: mol_type = other DNA
aaccactttttttccccttctagtattgaaaaaattgtgtttcagtttattcctgaaaaacaagagggaatgatcattaaataccactttggtaggcactgggatattctacggccctcgactatttaagggcacttatctttgaactccctactttactcaaagaagatctttgagttgcaagacctaaattatgcaagctgcagaaatccaggtaccggtttcaaaatgagaaagaagagcatttttaaaaaattatatatatatataaaactagcatctgaccgagacctttccaccttcagagaggtagggggtaggatgtgctggccctacttccagaagtttgtcaccttgtgaccccgcccccgatctctctaagggcca

SEQ ID NO: 45687 - DNA, 277 bp, Mus musculus
  source 1..277: mol_type = other DNA
tgtgtgtgtgtgtgtgtgagagagagagagagagaaaggtcattgcaacgagaagtctccttgtacggctttctagcttcttcatgaggctaagcctaagctgagcagcctcagttctcttaagggggcccctcactcctaacagaagggggaggtggctgccacctgtgtgctcctccggcagccttgagtcacaggtgataattcttcccctccactaaggtggtcactgtccctttgtgaacctgtgagtgaccttagactttattctttgcac

SEQ ID NO: 45688 - DNA, 416 bp, Mus musculus
  source 1..416: mol_type = other DNA
tctctgaattctccatcgtaagaatgggctctaagctcatgttcctccttgctgtcaacaggcaagctgggacttcagagccttactagtcagcagctatgtagacactagacattttgctgaatacatacatggattaggcataggcagaagcgtttcagtttagtatattacttatgagctttgattccaaaaaaggatatttaagtgtcaggcacatgagaatatacataattcttaaaatgatacagacaacttaaccattgacttttttggtatgtaaaatcaagcgacaaacgaaccaagcacaggagacaggctgtgggagacgcagccattcgcagcctccttggacaaagccagggttcccttggcaaccgcagcatgtgcgcacgttccagctccccctcccgagg

SEQ ID NO: 45689 - DNA, 218 bp, Mus musculus
  source 1..218: mol_type = other DNA
gctggccagcttcccgaatttcactgaactcaacgggcctttgtgactggcatcttccgggatgctggaaactagccagcggctcccacagctaagcaacggctccttattgctaaggaagaggagatgctttttaagtaagggggaattctctctgacgtagtaaatcttgcttgacttcatgctcgaactcagaagtctgcctgcctctgccttcc

SEQ ID NO: 45690 - DNA, 181 bp, Mus musculus
  source 1..181: mol_type = other DNA
ctaagcaacggctccttattgctaaggaagaggagatgctttttaagtaagggggaattctctctgacgtagtaaatcttgcttgacttcatgctcgaactcagaagtctgcctgcctctgccttccaaggagttcttttctgcagcttcacactacaaaaactttttaaatgaatttcct

SEQ ID NO: 45691 - DNA, 280 bp, Mus musculus
  source 1..280: mol_type = other DNA
aaggatggtgatatctaaattatcttcccatatccgtgatggcgatgcaccagcatcaggaattgctatggcatggataaataaataaataaataaataaataaataaataaataaataaataagttgaatttaacacaggcctctgtattaagctttcatgaggtaaaggccagcaatgggacacatgtcatggctttcttgtcagtggctaaggtattaaccgaaagagcttaagttattaaactgagcagctctaatccccgaggtttcccggagca

SEQ ID NO: 45692 - DNA, 407 bp, Mus musculus
  source 1..407: mol_type = other DNA
tgggtgaaaccattcatctttcattcgtttcaaaaagagtaaatactggagcacacctggatttcaggagtgatgctgacaggtccttggcaagtccttttagctttacagaggtttagcaaaatctttccttggaaatttcttgggttaaaaaatagaaaaggacagccgtgttactaatccgtctttacacagcgtaaagatagattcttgctaatggcagcggagccctgcgccgctccggacactgattggccactgggcgcggtgacgcgcaggtggctgcgggcgcacgcagcgagagcagcgggcaggggcggagccgggctccggggcggggcccaggcacccgggggcggaggagccagggaggcgggaggcgggaggcgccggggccgtttaagcgg

SEQ ID NO: 45693 - DNA, 360 bp, Mus musculus
  source 1..360: mol_type = other DNA
gctggggaggcagaatgcctacattccaatcgccttttcacagccttcaaaaggccctaatcttttaacaaagagtttacaaatttattttaattagtattcagaccttctaagttaatccaaatctcctaaacttgtcctggggagctttaaaaatctaagaatccacggccatcttttaaaaatcatcttcttttaaaatcaccaatttatttccacacgcgttattcccagcgcaaggcacttcgccgcaagggccggaaaaacagcgcgtgcggcgatgctacacacgcagccctgggggggcggggtggatgggcgggcccgatttgggccccgcccctgcacgcctatcggcgc

SEQ ID NO: 45694 - DNA, 289 bp, Mus musculus
  source 1..289: mol_type = other DNA
tagggggtgctgtatttccaggcaaatagctgcattcttaccctcagagagtagaacacagcacctttgcatagtactgctaaattaggtaatatttagacttagtcctcttgagggtcaaatggatgagttcgaaagtacttcatttctgacttactaagactaagcttgcataccctttgtaagtcagtcttcggtcatcactttctaaaaggtagaatcataccaagttatcctgtcctacagaccagaaagctctttctttccaaagtaaataggaagatggcag

SEQ ID NO: 45695 - DNA, 533 bp, Mus musculus
  source 1..533: mol_type = other DNA
atccaaatctcctaaacttgtcctggggagctttaaaaatctaagaatccacggccatcttttaaaaatcatcttcttttaaaatcaccaatttatttccacacgcgttattcccagcgcaaggcacttcgccgcaagggccggaaaaacagcgcgtgcggcgatgctacacacgcagccctgggggggcggggtggatgggcgggcccgatttgggccccgcccctgcacgcctatcggcgcgcggtgcgggccctgacgtcactcttgtcagggcagcggcacatggactgcctgatgcgctgagcccggcgctgcggggccgcggagcgcggggagcagcggccgcggcggggaggggggtggggcgggacggcacagcctccggtgctcgcgcgaggggccggggcccgcgctttgcctcaattttgaacattttgcaagactgagtgttggaggcaggagaaagcatcctgcactgggtcggaggagtccgcggcgctagatgcgccttcctgagaacacgaaagttt

SEQ ID NO: 45696 - DNA, 491 bp, Mus musculus
  source 1..491: mol_type = other DNA
aggctaacccagcctagcctgatgatgctaaactagcctaggctgatgatgctaacctagaatggctgtgctgatagccctttgaagggtggcaccagcccgaggcgacgcccccctcccccctccggcgggtgacctcggcctccccggcagggggatggctcaggtgggatccgtgccgcgcttcgtcccctcccttacctggagccgatagaggggcaccgcggcgtaggaggcccccagcatgcccacggcggccgcggccacgtaggtgagcaccgtcttgttctgcgcgcgctggaaagggttgctgctcctcggccgccgtggcggctgcgtcgcgggcccccggaccccgcacgggcgcttccatgtcccgaggcgtctcagaccccgctccgcgcctcccacccgggctgcctccgaaagaatgcccgcctggcggggccgctggcgagatctcgcgagacctcgcgagtctcgcggtaccc

SEQ ID NO: 45697 - DNA, 435 bp, Mus musculus
  source 1..435: mol_type = other DNA
tatgaaaacatttttttatatcacagtgttatgaaatagagagtagggagatatatatatttttttctggtctgtaccctgcagtcttcagatgacgaagttagtaatgactgatcgaggcgatctttgcagcaatggtctcgtgttctgaagaattctcgtcttaagtgatgatccaggagacgagcacttctgctgctggaagggtgctgcataaaaagattgcttaaatacctgtagtctatcatttctggtaatattctaagcagatgttatataacttaacctgacccattaattaagatgtcagttatgaccctgatcaacatcctctgtcacagaatgaatttcctgaggattagtaaattaatgactgggaaagagataactaatttccaggaactttctctagatgcaaacagtttccaggaaaac

SEQ ID NO: 45698 - DNA, 300 bp, Mus musculus
  source 1..300: mol_type = other DNA
aaaccattattttgaaaaagaaatgacctaacttttataaaattcttactatgcttcaagcaatggcaaaaatcatattatattcttaccctcctcatattaaaattaaacttatgcaaggacaagacttgtgtaaattcacatctgcccatggggccctgcgctcagtcagcggcggaaagcaacggggctgagcgaaccccaagtgagagccccgcggcagagctgccgctgggggccgctagggtaccgcgagactcgcgaggtctcgcgagatctcgccagcggccccgccaggcg

SEQ ID NO: 45699 - DNA, 361 bp, Mus musculus
  source 1..361: mol_type = other DNA
ggttttgacatctatgctaaaatatggaagaccaaaaacccttgctctttcgggggaataaacccagcatcctacagatcagaagcatgggtatctgatgttagccgtgccgcaaatagaaacagagaggtttggtttcagggaggtcttggctctcctagacagcacactgtcttctgagttcgcaggcccggggtgcggagtcacatcactccacccgggctcccagcccacctagagtcacgaggtgcgggaagcgccaggagcacgcggcaggtgcgccaagtcccccgggtccccgccctgctcgctgcctggcgcctctccgcggcagccaagcgctggagcggagaggaggagc

SEQ ID NO: 45700 - DNA, 276 bp, Mus musculus
  source 1..276: mol_type = other DNA
acatatagatataagtcgatagcatgtttgcagtttttactttcagtaaagtaacttaatcatgtaaaactttgttaaagatctttgtaaagtacacttcctgtgcaattcaataaatacagagcaaggtccttaacaagtgaatactagcttattttccacaagagcaatggccgtcttacattaataccatatgaattttaccagcacatcagatacttatattatgatccatgaatcatatcacaatgtgattcaacaattagaattatgaag

SEQ ID NO: 45701 - DNA, 117 bp, Mus musculus
  source 1..117: mol_type = other DNA
ctgatccctagtctctctctctctctctctcacacacacacacacacacgcaaaatctgtttcagctgtctctgtttggtccctttgtgacgaaaggaccctcagtgcctggctcac

SEQ ID NO: 45702 - DNA, 291 bp, Mus musculus
  source 1..291: mol_type = other DNA
tcttaaagagtaggccagggtttttttaggatccccggaggctgcagaaccgcacactctgctgcagtccagagaatctctagacttcctagatagatgccacacagtctggatgttcgctgtgtttgctgcatctactgtgcagatcaaaaaacacagtgaaagcttctaagcatgcaatttaaaagaggtaggccagggctagaccttctgcagacccggcggctccggctccgcctgggtggtgggtggtgctctcgccgccccctccttcccctggggcccgagaga

SEQ ID NO: 45703 - DNA, 433 bp, Mus musculus
  source 1..433: mol_type = other DNA
ccgcctgggtggtgggtggtgctctcgccgccccctccttcccctggggcccgagagagccgcgcgctgggcaagagtgcgcgcgcgccggcttgctgggggaccgagatcaaaagccaccaaagcgtttgagagcttttctaaaggggaaacccgtttcccgggaggcctgggtttccgatggtatcggattctccgcagtacggcttttctgtagtgagcgaacagccgagaagttctttttaaagaaaaaagaaacgcggggcggagttccaaggctggcgcctagggtcccggccgaggcagtggcctgaagcgggacggcctccgcccccgggtgcctggccgccccgctgacgtggggactccgggcggccgcacggaagctcctgccctcctcctctccaagtgggaaggcgtcgggatccgtagg

SEQ ID NO: 45704 - DNA, 552 bp, Mus musculus
  source 1..552: mol_type = other DNA
ggagcagaggaaaaactttcttatgtttttttttctccctaagagaaccctaagtcaggggttgagggggggaggggaacccctgaacgtttaacggcccgcgagtggggtccccgagctgcggcgttccgggggccgggcagccgcaggcgtgcccccccccctcaacctcatgggtaggggccgtccgtgctccccgagcccgcggcgccccctccccccccgcgagcagggggccggtgcctctccccgggactgcggcgactacaggggggacccccggctgggccagggccagcgacagcagtggcagcccccggatttccccccttttaactcgggtggagcgtgggaccctcggcaggcgccgtactctaaggaccgtaccacgcgcgcgcgcgaattgttgggaaaaatttcggaagatcggccttccctgaggaactcccacatggggcggggccgccggacggagtgcgtagcgcgcgagcgccggtcacgtggcttgcggcggcgcagactccttccggctccccggggccgggccgagga

SEQ ID NO: 45705 - DNA, 394 bp, Mus musculus
  source 1..394: mol_type = other DNA
aaagtactttgtatgtaacaaaattgcatgtcaaatgccactgttttatacactggagatttaccataatataaaacacatacacctaagtttataataacatacaagtggtatatgctatgtgatttatcatctatgcattgcaaacgtggttcccagccctgggagacatgcagattcctggagctctctgaatagccactggaccagttgaccactgatacatgcatgttcacatgtgtacacacaaatgaacatatgtgtataccacatatcagaaaacaaatatagattagttttaaataggtaagttggtttttgtctaggaacaacattcttaacttgggtgtggttgagacagggtctgattcatccttaaggataatgatgtgtg

SEQ ID NO: 45706 - DNA, 235 bp, Mus musculus
  source 1..235: mol_type = other DNA
ttgagacagaccaggctgacaggctggccttgaatttcctctgaagtctaggcagcccaggctcattcgaaagtcattctgagaatcccagagtggagagtccagctgggctcctgccccgcagccctccgcagccctgcaaggagagggcgtgcatggcaagaccaggcagcctgagcgtcccgggttgggcagcggggtcctccggggtgtggcgtctctcgtcccgccccgc

SEQ ID NO: 45707 - DNA, 314 bp, Mus musculus
  source 1..314: mol_type = other DNA
tggccttgaatttcctctgaagtctaggcagcccaggctcattcgaaagtcattctgagaatcccagagtggagagtccagctgggctcctgccccgcagccctccgcagccctgcaaggagagggcgtgcatggcaagaccaggcagcctgagcgtcccgggttgggcagcggggtcctccggggtgtggcgtctctcgtcccgccccgcttctgggcctcccgggcggggcagaagtatctggaaagccacgtgtcctccgcagcggcggcggtggcaggaacccacgtggcttcctgggccggcttgggtc

SEQ ID NO: 45708 - DNA, 598 bp, Mus musculus
  source 1..598: mol_type = other DNA
aggctccgcccccggggcctcgcctcccgccgcgcgccccgccagagcgtgtgcccgctcggcaggcaggcaggcgggcaggcaggcaggccttcctcacccgcgagctccgcagccgctgcagcagcgcgtcctcgtcgtcctcgacatcgccgaagacgagctgctccaggcaacgctcggcggccggcttatcgtcctctagcgtcaggcggttccgctgccggagccggctctcctcctcctctgccgccgccgccgcggatcccgcgctaggggccgccctcggctcggccggctgtgtccgcgggcggcatcctcagggctgaggggaaaacgccgacgttcacgtggagtaccactgcgcatgtgccggggcggctcgctcttctcctcggcccggccccggggagccggaaggagtctgcgccgccgcaagccacgtgaccggcgctcgcgcgctacgcactccgtccggcggccccgccccatgtgggagttcctcagggaaggccgatcttccgaaatttttcccaacaattcgcgcgcgcgcgtggtacggtccttagagtacggcgcctgccgagggtcccacgct

SEQ ID NO: 45709 - DNA, 104 bp, Mus musculus
  source 1..104: mol_type = other DNA
aaataaataatggttattgctgtcgggaaaaactagattttctcgggaaagtgtcggctgaatcggaactgtccgaaaaggttccgtgcgagcagctgcgggga

SEQ ID NO: 45710 - DNA, 372 bp, Mus musculus
  source 1..372: mol_type = other DNA
tctgagtcagctatggcaaagggaagggcttttgcgagtgtcttccgccacgagtgacgcactcccaagataggtgaccccacctccctctcaagatcagagagggaccggtggtagtggctgtcccagtgtttggcaaaatgcaaaaagtggtactcattttcccttctctctcagtaggaagtagagagagtctcgcctctgcctctttctcacctctcggtccgcgcgcgcgcggcgccgggtgttggcgtcacagccggcgcacgccgccgccaggccccgcccctcgtccgcgcctggcctcccgcggggccccgcccaccggggcgacgcggcgctggccccgccccacgggtgacgcgtagcgcg

SEQ ID NO: 45711 - DNA, 474 bp, Mus musculus
  source 1..474: mol_type = other DNA
gcaggggccaccgtggccactggcgaggacagctcggcctgggatactgtagctgcaccagtttcttggactcctccagcccccgggggagccagaccatatctggtatctggtttgggggaattcaccaaagttcataccccccacaaggggacttggtgcccggggtgggagtcagcaacagcgccggctgcctgggcccgcccttgaatgcgtgcgtgtcctggggccagctccccccaaagcacatgccatttctgtccctggaaggggttaaaggcctcctggagtcgggacagaggcgccagcagcctgcctctgacaggcttcggaggatataaatccaggctcgagcccctggtgttcctctccctacgcacccggggtggggggtggggtgggggggaacatctgaagcctcacagcccagcaggctgcacttggtggagccagtcacagcagctgaagccagca

SEQ ID NO: 45712 - DNA, 507 bp, Mus musculus
  source 1..507: mol_type = other DNA
agtctatatactaatttgtatttataccaatatttttcatttaataatatcacatattttacaaaattgctatgcaatacaaaggaagatagatattagctacatttactgatgtcatccttaggatttatttctttacatgaaataataatcttgtaagaaagttgtgtcaaaatgtttccattgttatataaattttctattttttcttccttaaaatagatgatccataattatatggaacacttatagtagaattaggtaagctttgttatatacacttttgcctaagaaaatgtggaatcaataatccgtctttttgttaaaatagaaataccatttaaaaagttaaattatgagctttataaattataagcaacatagtgcagggttttaattattttctttgaaatgtatgctgaaatgtttcatttctccctttaaaagagccagccatctgtttgataataaattatgtagatcgcaatgggctaagccaagactctt

SEQ ID NO: 45713 - DNA, 315 bp, Mus musculus
  source 1..315: mol_type = other DNA
catggccttagaggacagaaagccttttcaccagcagttcttgctgtctgagtttgtgacctgtgcttgtcacatctcaagacctggacacctggcaggtgtccctccccctgaaggcaggggatgggcctttccacatcctagctggctctgcagtgtattgtaaagacacttggtattcttgtttataaaatagaaaattttcctgtgcctaggaacatcctacatgatagggttttcaggtacattctgtcacttgggtcacaaagctgagacttgccccaggttacgcactccagtggctctgtaaaaagg

SEQ ID NO: 45714 - DNA, 505 bp, Mus musculus
  source 1..505: mol_type = other DNA
gcgcctatccgcgcccctagagtccctggcgtccctattccctggacacctgtgcacagttcataaactctcgcctgggtgaaagttctcaaaatgcacgcgtgggcacgcacacagagtcacacaggcagtttggcagcgtgtcgctctctgcgatataagacaatttttttttcttagctgctgccaggtgacccggggagatttggcctgcaggcctgtgcgggaggtgcagcgacgtggcctcccttccccacccccatctcggggtgaacgagtcccggttaccccgggatggacccacaggctagctcgcccaggagtggggctgcccctcccggccggtccccgccgcgtaccatctatcagcggccgtctggacgtgggcaggcgggacttggccaatgggcagggcaggggcggagtcggcgcggccgcgggtggggagggcgggactgtgacgcgagcggcgcgcacccccgcggaggctgggggcggggaggaa

SEQ ID NO: 45715 - DNA, 341 bp, Mus musculus
  source 1..341: mol_type = other DNA
tttcctaatcttttgaaagtttagaactccagagggtaacctctggtctcctctatgattcctaaaaatcgagactcgctggtagagcgttaagcgttaaggttcccggttcaatccccagacaccacgtggacaaagggacattttctccgtttcaagccgttagagcgtccaccgctccgttgggtggaaggcacggcgggggcggagtcagtgcctggcggggctttgccccgggcccgggccggaggtcccgccccctcgccggagaagccgcgctgcccgccctcgcagcccgggcctaggcgtgtctccacgggcgcacggcatgctgggaaggt

SEQ ID NO: 45716 - DNA, 280 bp, Mus musculus
  source 1..280: mol_type = other DNA
aatattttctaaccaaggctctgagcctcattaactagattaggctttcagaataattaattataatttataagctataacgagttgcattttataaactagaatcaatgttaatcttcatgaaagattctaaatctctgcaaataatgggcatattatagtaggatccttttcagatgctaaacagcctgctcctgaggataaggctatccagtgcggtggttaaacagccggccggggcggcggggccgcggagggtcccccggagccggccttcgga

SEQ ID NO: 45717 - DNA, 356 bp, Mus musculus
  source 1..356: mol_type = other DNA
gggacctgtcctccctgcttcatctgaggatcagaggatgctgactgctccacgtacagtaggcgtggctcgtagcgtataggatactcccttggcccagaaaagggactataaagcttagaggtttaatgacacagccaaggtctgaaatcacatagggagggcaggaccagccctcttactcctgcctctcttgtctggaggcaggccagagggaaagcctttgagcaggcatggtcgccttggggcctctgcagaggccaatagaagccccagctgctccctaccagccctgggaggcaggaagagaccacagagctgggtacacagttcttccttcactcctggaaccaggt

SEQ ID NO: 45718 - DNA, 337 bp, Mus musculus
  source 1..337: mol_type = other DNA
cgaggccagcctggtctacaaagtgatttccagggcagccagggctacacagagaaaccctgtggtttctcgaggcctcactagaattaacctaggttgttgaatcctcagaaaactcagtgtgaaggattctattatggtgatccatacttcaccagtgcaaaagtggggaagagaagggtacgtacacatgtgcatagacacatcacatcatactatagacaatgatctcctatttatatataaagccagaaatgaccctacctttagaaaggacttcttttacagtgagactcattctcacgtcgggactagtacagtcaattaattacccatc

SEQ ID NO: 45719 - DNA, 424 bp, Mus musculus
  source 1..424: mol_type = other DNA
ggtgggaaacagacccccaggttcaagctcagaggctcgtagggctaccctaggggggcggtctggacagtcgtctgattggccccagccttcgggagcgaacccgggggctgggaaccggattccagctgtggctctccccctgccccctcccgcactggcacggcggctgaccaatggaagggcggttctggaccgcacgccagctgtggtgtgcgccgggctcctcgtctctccctccgcgtctcggccggaggaggaggcagtggcgccggcgacagctacggcaacggcagccacggcggcggcagcgacatctccgcctccacccccgcccgggacggccccccacggtctccccgcccctcccggtcctctagcccgccgcggggcggaggaaggagccagcccccaccccctccaa

SEQ ID NO: 45720 - DNA, 310 bp, Mus musculus
  source 1..310: mol_type = other DNA
cacggcagggctgtagttccgcgctctaccgccgagcggcgctcggagaccagccacagggccagagacttggcgaggacagggttctgggcccgctggaccccaacctccggtcgccccactgtgggggtgggccttgcggctagcggcaggtatgagcatatgcctggcgccgcggcataggaagcctttctagaatgatgttggtccttcaaagtactctggagttcttgctagaaaggatgcctgcagtgcaaccgcccagggaggggcactccacgggtgatacagagcaggatggaccattcta

SEQ ID NO: 45721 - DNA, 379 bp, Mus musculus
  source 1..379: mol_type = other DNA
gagatgtgtaggtgggagtctacactctagcccccccgtaattccataccggctgcccagggctgccgttgccgctgccgcagctgacaccgctggcagggctcccagccgcgcccgcctccacaccatcagagtctatgacaggctagggtggaggaggctcaggcatcttaatgtccaccttgctcctaggagaaaaatccaggaagggccatggagcctacacaaaaggtcccttttccatggaggctggctgtattcaccctggcaaagtagaggcctaggaagccaggcctgtctactggttctgccaattccagcggcccatgtacaccaaccagggcagcccgccctcccactggggaggtgagcacaggcc

SEQ ID NO: 45722 - DNA, 342 bp, Mus musculus
  source 1..342: mol_type = other DNA
ataactctttgctgtactcatacttgaggctctggtatgggacactgaagcagcaaggttgtgggttcaaaatcaacctgagctgcatgatgactccttccggaaagcacgcactgcctgctcagatcatcccggggtttctgtttcatactgagctcccatatgtaagcatgtaagtcctcaggccccttggagaggctggtaggtattggagtggcctccattcccaccctcacctacttctagcagaggaggtaggggaatgaactccagccccggcagacagcaggaaggggttaaacacgcccgcccgcccgctgctgaggcagacctgcctggcca

SEQ ID NO: 45723 - DNA, 288 bp, Mus musculus
  source 1..288: mol_type = other DNA
aggggagagaacgtcctcagaactgactgtggtcaataacggcacggtggccatttggtacaactggcgggtatcctgaagttctccttcagacctggggtggggatgcccagccatccccactggtcgccagatgtgggccactgtggtgccaggtgtgattctgcccggggaaaccaaacagggagtttgggacccaccctacactcctacccaggacattcagcacacgggttcctctgcggcggatgatcttatcttaaagaggtgacctttctcacgtaccta

SEQ ID NO: 45724 - DNA, 72 bp, Mus musculus
  source 1..72: mol_type = other DNA
tttcctcggggaggtggaggacacaggtgactgataatttctgaatgctttagagcttgaagactggtcagc

SEQ ID NO: 45725 - DNA, 415 bp, Mus musculus
  source 1..415: mol_type = other DNA
tttatttatatttaaattttatttatttttaaatatatgtgtttgccaccatgtggttgctgggacagctatgtatgtatgtatgtatacagtatttatgccacaattattgattttattattgtatctgtgattatgtgcacacatgagtgtgcacccatgtggagcgaggctctctcttggaactcccacaatcctccgggagttctagtattccaggtgtgagcccagttacctagtaccgaattaactcttaacttggttaccagttagactgacctgattttagtaggcctggctttcagatctgagccaggtacacacagggagccaagaggccgtgtccaccaggtggcgccgcagacacgaggccgtgggctctctagccctccgggagaggcaatacgaggtcacg

SEQ ID NO: 45726 - DNA, 396 bp, Mus musculus
  source 1..396: mol_type = other DNA
ctctgagaccccccttaggggtgggtcctaaccaccggtgaggggaggatgcttgtcacacccagttcccacatttctgtgtggcctgagctcttacgggcctggtgccactgggctccgagaaggggcagaggctgtcagcttgcgccgcaaagcgccgccggctggccgaccgcggtgagacgcatccggctgtcgggccccacttaaataagttctgggaacacttccctctgcccagtggaaccgtccaccccacctcggggtgttggtccagaggttggggttcaggggaagggccctcagccctacacacggtcggcccccagccatcgaggatggggacgcatctcacgtagtagctggctccgctgccaactgcggtcaaggctgccc

SEQ ID NO: 45727 - DNA, 278 bp, Mus musculus
  source 1..278: mol_type = other DNA
caggagaagggaagccacccggccgggggcctttcttctcttctttcccagatcgttcaggacaacgaggagctagttcctccttggatgacgttagaataaacagacgcgtccctgatgccagaggccctctgctccagttggcaggcctcaggggcactcggggcagattcccctactgggcacgtgggggctgcagttccacgcaaaggtggccaggaccgagtcgccacttcccggcctctcctcgccccgccccgccccgccccgcggggacc

SEQ ID NO: 45728 - DNA, 453 bp, Mus musculus
  source 1..453: mol_type = other DNA
cacagaacttatggataatctctaaatagtaaaggaatttattgatgacttacagtcaattcgcccagattaaaggtgtgttccaccacacctttaatcccagatgaaaggcccagattaggtgtgttttaactcggagattggaatccatagccactatggctcaagatcttcaaaccaagatccagataaggatctgtcactggtgagccttccaattccggattgtagttcattccaaatcaatgacaaccagctatccctgcatggattttggaggataccctcagagttggctcctatttgtcatggaaagtgcagtttctgtcctttcgaactcagctcctcccggcggaggtggcgccccgcagatgcagtttgccagcctggacggcagagggcgcgccggtacacgctcgggcctctctggcccagcccatctcagtggccgcg

SEQ ID NO: 45729 - DNA, 229 bp, Mus musculus
  source 1..229: mol_type = other DNA
caaatgatctatcctatagcaagtcttggcaagtgcagggattataggcactactatttcatcgagattacaactaagttactcacgtgtttactggctgagtctcaccagacctaagcgttggtcatggtcatagacatctgaaataccagagtcttgaatatcaattaaatgttttgaacttacgtgtcacgtgaccggagacagtcggtccaggctgggaagtctg

SEQ ID NO: 45730 - DNA, 541 bp, Mus musculus
  source 1..541: mol_type = other DNA
agggtttctctgtatagatagccctggctgtccaccagactggctgagaactcagaaatccgccctggcatttatttatttatttaaaaattaagaaaaaaaaaaaaagcaaacaagttctttctctaaaaataaaataagatccattgtctctatggatttacaggttctgtatatttcataaaagcacaccgtatgcatactatgcaccagtactgcctcattttttatagctgaataatattccactgtgtgacagacattcacgtacaaatattttgaacgagtatgttttcactcttgtgcgtacacttaagtctgcctggaattacacgcaagaatcattctttcaacaataattagtgactgataatctttgcaaatttaacataataccagtaacttaggtttgtaaggaattaaatgaaattagctgagcctcaccctggtccctccctagggaccttcgtgtggttcctggagtgggaacgtccgtctctggggcccacggtccactgcagaagtcgccggaggtcccggc

SEQ ID NO: 45731 - DNA, 376 bp, Mus musculus
  source 1..376: mol_type = other DNA
actgcccaccgtggtctgctgggatcaggtggagctttaaagctgagggcctgcacgcagaatttaattctcggaggttctaaactccaggagtgagaacttgttttttaaatcatcttccaggagattctgacgtaagccaagggcctatgacgtcttgagagtgccagcatttcccaggggtgggggccagctgactccccctccccccatgccctcaggccgcagatcttttgcggtcaggaaatgattcttccccacgcccagcccacgagagggtggggcctcgggccccgccctttgcccgcccatctgggcggagtgaggagggactccggggccccgcgcctgtgcgcacgcccgcggccggtttgca

SEQ ID NO: 45732 - DNA, 574 bp, Mus musculus
  source 1..574: mol_type = other DNA
agggttcttccctggagggtcccttggtggcctgaggctccccacctccgagcaggctggggcccagtcgctcctcccccgggacggggccgcctcgacctccgaggccaggccctccagtaaagggagcgttggggaccggaggctgggctccagcaggctgcctgcgccttgctcgcacgcggcccgtgccccacttgcctggccggggccgcccgcagccccgccaggaccccgcgcgcccccgcgcccggcctgcccgcccgcacggccgtcggagcacctcgcccggctcgtcctcctccaggccgctgaagctccacaccaccaggccctgcagcagcaggatggccagtgcggtggcgatcgccagcttgtagcgccgcaccagcttctgcacccgcgcgctcgccaccatcttcctgcccgggacgcggggcgcgcgtccggccctgcaaaccggccgcgggcgtgcgcacaggcgcggggccccggagtccctcctcactccgcccagatgggcgggcaaagggcggggcccgaggccccaccctctcgtgggctgggcgtgggg

SEQ ID NO: 45733 - DNA, 271 bp, Mus musculus
  source 1..271: mol_type = other DNA
cagctctcgtttcatcccatcgtctgaagaaataaaagtgacatttacagggtatcttagcgtttctatttcaaaggtttttgtcaccaagatggaaagtatggtgtcttgcaggcagacatggtgtccggatcctgagatctggccacaggtttaaggaaactgtttccatccaaaaccactttagggtgggaggatctgctgcggctggccctcgaacagcaggaggagaacatgcattcatgtttcatgttaatatgattgacgaaga

SEQ ID NO: 45734 - DNA, 254 bp, Mus musculus
  source 1..254: mol_type = other DNA
tcctgtatccagggcacatcagagggcggttcagtcctcagcattgcatccagcctggactacatgaacaatggctcagtggtttaagagccctggccactcaaccgcgcctgtctgtaactacagttccaggggattggatgttaatacatcaaatatataatattaagtcacctgcgtgaggacagtgtccaccccagagtcagtgctcactctgggaatggaggccgcactctgggcaaggctggccccag

SEQ ID NO: 45735 - DNA, 434 bp, Mus musculus
  source 1..434: mol_type = other DNA
tgtggccacagctgacacaagacctttttctaaaacatccctggtcaccacttaatgcataagcattcttctggaaggacgtgtctggcatggcagaacagatagcacatatctgactcttagtatctgtgaagagatgtataactgttcacaaatattcctctgcttagctgataggttctaatcagattaatctaacttattcctgcccaggatgcctgaaagattactaggcatggccaggaacccacactcagtatactgagggcccggcccatgtagatctggggggcggagggggggcgctgggtggactcctttcccctttccctcctccccccttcgttccaaattgggggccgggccaggcagttctgattggctgggggccgggctgctggctccccctctccgagaggcagggttcctcccag

SEQ ID NO: 45736 - DNA, 478 bp, Mus musculus
  source 1..478: mol_type = other DNA
tagagactggagctaggctctaatgttagataccagcctgttagtctacttatgtttaaccttaggagtctgaatttaaacccatcctgtatatagatgctggacactggattcaggtctggactgtcctggaactcttggtcaatagaccaggctagcctcagggatgcatctgtcctgataagagcactgacggccctcttctatattataaataagtaaagctacagtgtctttatttataataataaataaatcttcaggcatagctaaagtgtactcctatacctgaagtaaataaataaataaataaataaataaatcatttaaaaatttttttcaaaaaagacttgtgataccaccacaagtgttttttttaaatttaatccaggctttagatctcactaattagatcacactagaactcacagagatttgatgggattaaaggctgtgtcaccacaccctgctctatcct

SEQ ID NO: 45737 - DNA, 552 bp, Mus musculus
  source 1..552: mol_type = other DNA
tttgaaaccagcctggtctacagagctagttccaggatagccaaggctacacagagaaaccctgtctaaaataataaacactaaaagttagcatttttcgtgcagaggcaggcggatttctgagttcaaagccagcctggtctacaaagtgagttccaggacagccagggatcagcactgactgcccttccagaggtcttgccacatggtggttcacaatctgcaatgggatctgatgccctcttctggtgtgtctgaagacagtgtactcacatacaggaaatgaatgaatgaatgaatgaataaatctaatttaaaacaacagtttaaaaaaaaaaaactgtgtgtgggaaaccctggattccaagtaaaattgagaattctaaatgtcctagaattggttcagaaatgtacatatattccatatatgtatgggcattccctatgtcatctggcatatcagatgcccctgttgcctcagaccttcctaagaaggaacaatgaggcttacctcacaatggcccccttgaggtcactgcagagataacttca

SEQ ID NO: 45738 - DNA, 420 bp, Mus musculus
  source 1..420: mol_type = other DNA
gggattctatacctctccccaaaggggtaggtgaacaaaattttacattctgaaagatgaaaaaaaaaaaattcctatggggaattgttaaaatgaagaatcccagtttgatctagcacccaaaagttttgttgctggtacccctgaactaaggacctttagagaaaccaggagctccccgccccggctcacaggctccggccccggaaatccgatccctgtggtaccagtcccccagcggcggcggcgagaagggcagccgctcggtctccggcagccgcggttcgggcagagctagagcgcggcggagcggcccgggtcagcggagcagccacgggcgcggggatgccgggcaccccgagagccaaggcccccggccggagtagggggcgcctgcgccgccagcgccgctgacaccgc

SEQ ID NO: 45739 - DNA, 341 bp, Mus musculus
  source 1..341: mol_type = other DNA
aagccgagtaatagatttataaggctcatttattattctgtgcatgttaaaacatttttttttacttagcgggattccccagagctggaaaggacatcaagtgctcttttgaaacagggtctcaagagcactgactgctgctgacatctgatgccctcttctggtatgtctgaagacagctacagtgtacttatatataataaataaatctaaaacaacaggactctgagacccaaagccctgaagtttcctggtgacctgggagctctgtggggtctccagtagtgctcttgggaaagatcagaagagaaatattttcccacactttgccttaacacagc

SEQ ID NO: 45740 - DNA, 495 bp, Mus musculus
  source 1..495: mol_type = other DNA
ttttacattctgaaagatgaaaaaaaaaaaattcctatggggaattgttaaaatgaagaatcccagtttgatctagcacccaaaagttttgttgctggtacccctgaactaaggacctttagagaaaccaggagctccccgccccggctcacaggctccggccccggaaatccgatccctgtggtaccagtcccccagcggcggcggcgagaagggcagccgctcggtctccggcagccgcggttcgggcagagctagagcgcggcggagcggcccgggtcagcggagcagccacgggcgcggggatgccgggcaccccgagagccaaggcccccggccggagtagggggcgcctgcgccgccagcgccgctgacaccgcctcggaggatgtgagccggtgccgtggccgctgcttcgcgggctgggcgcgcggtcccagcagctccagccagccaccaggccctagagctttcgagctggctgtctttggcagc

SEQ ID NO: 45741 - DNA, 324 bp, Mus musculus
  source 1..324: mol_type = other DNA
accgctggccagatgttggggaccgctgtccagatgttggggagcaatctgctgacccgtgcaccaccatgacagtgtgcctctgggtaaccctgcctgcagggtgcccatgagcatgctcctagagcagaggaggccctggcacaggtcttgctggagaatacagctgatgttcctcttcatccttttctctgatcctatgaaaaggtctgagcaggggcagacagattcccacctcacatgatctgtgggagccccagtcttggggcctatggggccataggggctccacttcccttctccagggaagtaggaacttctctg

SEQ ID NO: 45742 - DNA, 79 bp, Mus musculus
  source 1..79: mol_type = other DNA
agccagaatagctctcagctgattggggtgcccaaagaatctttctaaaatctatgttggagggggactggccgctccc

SEQ ID NO: 45743 - DNA, 163 bp, Mus musculus
  source 1..163: mol_type = other DNA
agccagaatagctctcagctgattggggtgcccaaagaatctttctaaaatctatgttggagggggactggccgctcccgctgagactcccgcggtccgagaagtagcggcaattgggatcccggggccggccgcgggcacccgccgcctcctcccctcggtc

SEQ ID NO: 45744 - DNA, 229 bp, Mus musculus
  source 1..229: mol_type = other DNA
tgggctcccaagccgctaaccactaagatgccttagctcctgggattagctctgccagtcccgcatataggatagcttagtataagctcgcatacccagcaccttcacggttaaggaggtgggcctcgaggagagccacgtgtcgaagcgcaagtgtgcgcgcccattggcgacgtcggggcgccgggacaagccgattggctaggcgttggaggtagggaggaggcgg

SEQ ID NO: 45745 - DNA, 581 bp, Mus musculus
  source 1..581: mol_type = other DNA
tatacatgtatattgccttgaaaaagtagtatttgtaaagcagttagcatagtgcctgctgcatgtgctgttcttatttaattataaaaacatgtagaaaacgagggaaaatgagtcttgttctgcattaggggaaatctgagttagaccaaaacaacattctaattattatttctgatgggttgtcatcaccaccactaaatactccttcatacataacattgtgtaacgaagaagttaagtccggagacccgcagtcacctcttagggactcacatcactgcggaggtccgcattccaggcagccgaacacagtcgaccgttctccgaagagccaacgcctggccagcggggatcgcggtgctggcggtgccttgaacggcctttccagtagcagccgccgcaagcgctgtaccgaaggcgacgctcctaggaagaagctctccgcgggaggggcggcgctgcccctttaagaggcggcggccgagcggggaccttttctctttccccggaaggaaagcggagcccggactggggggaggcggggcgcgctggggaggatccctccctcctgccctcct

SEQ ID NO: 45746 - DNA, 516 bp, Mus musculus
  source 1..516: mol_type = other DNA
gttgtgtagatgtgtgtgtatacacatatatacttgtatacatgtatattgccttgaaaaagtagtatttgtaaagcagttagcatagtgcctgctgcatgtgctgttcttatttaattataaaaacatgtagaaaacgagggaaaatgagtcttgttctgcattaggggaaatctgagttagaccaaaacaacattctaattattatttctgatgggttgtcatcaccaccactaaatactccttcatacataacattgtgtaacgaagaagttaagtccggagacccgcagtcacctcttagggactcacatcactgcggaggtccgcattccaggcagccgaacacagtcgaccgttctccgaagagccaacgcctggccagcggggatcgcggtgctggcggtgccttgaacggcctttccagtagcagccgccgcaagcgctgtaccgaaggcgacgctcctaggaagaagctctccgcgggaggggcggcgctgcccctttaagaggcgg

SEQ ID NO: 45747 - DNA, 340 bp, Mus musculus
  source 1..340: mol_type = other DNA
tgtattttgtgtattttgcggaagatgtaacatagatctttcacccctaacccagacttcctgaagaagaaagtcatgaaagggcacccttgctccagtagggacttgcaggcccaagccttcagaatttaaaattttatatttcacatctgcagtgtcattaagataataaaacaaaacaaaaatataatatatttatatagtccaacctttttttccaattttaaaagtgatcaaaatattttcattttctgtctgtcatttgcatagaccacctccgagcgtgttttgcctcgaaggcaagacttgcagtcggcgactccaattgagtctataaccg

SEQ ID NO: 45748 - DNA, 411 bp, Mus musculus
  source 1..411: mol_type = other DNA
tagaacaaggtgccaagaacaattggaccattttgatgttcaaggagtcagtgggtctatggagagcatcctcgtactgccagccaggctggcataggtcggagctaggaaggccagctgctccccgtcttcaccgtccagtggagctcagatttgctgcaggcaaccggtcttatacccagatcctgcagggtataggtacctatctccaactggaaactgatttctgtttagtgtgtttgatttatatactggtttctgagaccagaactcaaaaggagatctccacctctccatctggattagggcaaatttccgttactccagggggtggggtagggagccctcccgcctggcttttaaatcgaaaccaggtcgaatttaaaaaggagactaccgcagattcctggg

SEQ ID NO: 45749 - DNA, 74 bp, Mus musculus
  source 1..74: mol_type = other DNA
ttgttctcttaacgcaaggacaaggcataaactaaaggtcaggtgacgcaagcctcagccggaggaataggcgc

SEQ ID NO: 45750 - DNA, 348 bp, Mus musculus
  source 1..348: mol_type = other DNA
tccggaagggcggggcgttggtcgccccaatccaggccttgctaagcccgcccacgcacgcggggaggtgaccgttgggcggccgaggccagggtcgggcccttctgtctggtaccgagaggagacagagtagctaggctaaaccgcgtcacgttactcgccggcggctgcagcccgacggttccgattcgggcggcggcagcaccagcaggaacgggggctccggcgggctccgtggcggcctctgtagctgtcccaaaccctgcagcgtctagagccttctgcgcaagcgccgcgggctggaagcgcctattcctccggctgaggcttgcgtcacctgacctttag

SEQ ID NO: 45751 - DNA, 256 bp, Mus musculus
  source 1..256: mol_type = other DNA
tctctctctctctctctcacacacacacacacacaccccagaaagaacagctctgttatctagctgactgtgaactcagtaagtacttattggacatggatctctatgaatttaaggccagcctgtccaaactaaaacacatgttaaaagttctttaaaaagtattttagctgagagttgcagttgcgcttctgcgcgctgcctcgcgacgcttgggaggccgcgcggggtggggcccggcgggtacgcgctcgct

SEQ ID NO: 45752 - DNA, 380 bp, Mus musculus
  source 1..380: mol_type = other DNA
tttccgaaaatgtgttcacatatacatagcatatggtctttgacttgtaggtcagagagcaaccactatcaaacttgatcagatttatcaagggaaattcccagctcccttttaaaggctcaagttaatttacagactaacagctgtttttattgagtgaatttagataggcaaaccttctataaatttatcgaatctcagttgcagtgaaatctcatgagaattgaaaactaatgttttttagttaaactaaatgtaatggcttttcattctcagtcccattgaaactgcttagagtttgacactaccacctttaaagatttcagtagtgaggtccatctgggccgagggggccggtccgcgcccgtagggcagataag

SEQ ID NO: 45753 - DNA, 538 bp, Mus musculus
  source 1..538: mol_type = other DNA
aaggattgtaaattcaacattattctacattgtcttttgttgttttttaaaaggcatttcaataaattgaatttttcacctcgtagagttgagaaaatatgatgactaatactccaaacagtttataaaacactttggtaaacctaatcctcacaccgttcaatgagtgacagggtggttattactaattacccctcggctcggaatagcaacacgtgtgctgcctctaagtgataagagccctgacctatcacagagagaagaggacctggacttcttagccaggtcttgaacacaggttggcgttaggacccagccgaggcctgacagccaactgcaaaaaaaaaaaaaagcctttaattctcttctgttcgctctgcggagccaattgataacatcggctggctttcctggccaccaggaatggagccaagatcttaaagccttccttctttcctagaacgctcctgccggggcaggaggcatttccctctcggaagctctgagctggaggtagctgctccggcctacgagccgg

SEQ ID NO: 45754 - DNA, 129 bp, Mus musculus
  source 1..129: mol_type = other DNA
gttcgaggccagcctggagaggatagatatccttgatcttctttatttctaagtaaggaggaataggcacgtggaaacgggtttcctgaaagagcccgttttcaccaattgaagggtcggatcttgaag

SEQ ID NO: 45755 - DNA, 406 bp, Mus musculus
  source 1..406: mol_type = other DNA
aggaccccactggggtggggcccttttccgaagaacatgctctgagaggcctgttcacgccacccttaaaaatggatttagggagagtcgtctttccaaattctagggggcggaaaagctggtgtccccatcctgggcgtcccaggtccccaggctgctggccggcaggggaggagttaaatccggaggtaccgactgggctcaccgtacctgccgccgccgccgccgccagtgggagggacgaggaagcgggaggcgcctgggcgccaggagcgctccagtctggcggggcgcagagcggggagcgggcggccgcggctcggcgtggcccggggcgtccgccagggggcgcgccacgacggggcgggaggggccgtctggtctggggattagcaccggggacggg

SEQ ID NO: 45756 - DNA, 700 bp, Mus musculus
  source 1..700: mol_type = other DNA
ctcgagggctggaggtttgggcgcaaccgcacggcggggggcaagccaccagctgcccactcgctgcaaaactgcagctaagctggggagagggggcgggggtacggagccggcaccccgggccaagctgagagcggcagacgcgcagcgcccggggcctgcccgccggatgggggctgctccggcctagcgcacgcagctgcctcggcgcaggctcctccggctccgccagcccggccgggcgcagaggaaacgcggctgccagggcgccgccgcggcgggaggcgagagcgcggggaaggggctcctactcacccgggccgccgccgccgccgccaccgccaccaccgccgcttcggcggcccatccccgcggcgggggcctgtcgccgcgccgcgccgcgtcgctccagtccccaccgcccgccgtgcaacgtctgcgctctgggccgatcctcagacccggcctcggccgccgccgccgccgccgccgcagcgctacgtggccgccgctccgacgtctcgcgactcccttccgagcgcgcgaggccgagcggggccgcggagcgggcggcgcgcggggcgggcggcggggggggggcagggaggccggcgggagcgcgcgcgcgcgcacgcccctgcacgcgcccccccctcccccccgcgcggtcgggatcccgacccctacacaccccatcccc

SEQ ID NO: 45757 - DNA, 378 bp, Mus musculus
  source 1..378: mol_type = other DNA
cttgttagctaatagtaccattaattatattaatgattaatagctaattagtcataatgtggtcatgagttgtaatcaataagtcaaagagcgcatgcgcagcccacgactttacctgggcgctcgggagtggagcaggcagccggcggttatctgctcggctgagcgctcacaaggtgcgcccaggccgagccgagggccgcgcatgcgcgccgacccccatagccggggatggggtgtgtaggggtcgggatcccgaccgcgcgggggggaggggggggcgcgtgcaggggcgtgcgcgcgcgcgcgctcccgccggcctccctgccccccccccgccgcccgccccgcgcgccgcccgctccgcggccccgctcg

SEQ ID NO: 45758 - DNA, 454 bp, Mus musculus
  source 1..454: mol_type = other DNA
gagacgtcgccctcaaagatttggagctctggaactcttggacaagcaactccgagtttaggcgcccgagtacccggtaatttggggacagggttccgaggactcggcaggatgccgcgactcctcccggaagggcagagggcgagagggagggctgcttggcgggccggtcacccggctgtcccgcgacaaggagggaagccgggcggtggaagggctgcctgcagagtcctggcgccgagcccagcaggaggcgggcagtgtgacactgactcacgcacgtgcccacgcgcacgcagagggtgccccgcacccacgctcctcggacgggacgcgccacgctccacccgtcccgcccgcccagtctcacggccgctcgcgcggcctccgggacagcccggaggcgtggctcccgggcagcccgcccctttgatgtgcgccggcgccacggtgg

SEQ ID NO: 45759 - DNA, 367 bp, Mus musculus
  source 1..367: mol_type = other DNA
gtgactaccactgtgcagtgcacacatgtgaacgtcaacacacacacgtacaggtgcacttgagagtgtgtttgtgtatttgtgcacacactcattcaagctcatgacagatatcccaaattatgatattgggatagatttcaccttgcagcctcattttcggaataagcaattaggctaaagaggatccgaagcatcttatgctcagcataaccggaggtgccctgggtacgtggggcagcccactgagaagccacagcggggcacacgggtgcggctcctgactccccaccctaggcagccgggcgggcgcggttccggaggggttggggaggaggcggggctgctgcattgccttcacccagct

SEQ ID NO: 45760 - DNA, 236 bp, Mus musculus
  source 1..236: mol_type = other DNA
aggttcctcttctgccaggaggatgacagactggggctcaactcaagcttaagacagactcagcgctctgttcaccagcccactggagctgtactgccagccctcttccatgagtggaaaatccgacccctggtttcccccttctcctgagcagggtacagagaggcccaggcccagggcccagggtctgacttcctcttgtcccggaatgagcatgcctacccctttacaggcag

SEQ ID NO: 45761 - DNA, 426 bp, Mus musculus
  source 1..426: mol_type = other DNA
tgaggccagcctgggctacaatgaactcaagggcagcctgggcaacagtgaactcaaggtcagcctggactacagtgaactctaaggcagcggaggccacacagtgagacgctgtctcaaaatccacacattgtggaaaggtctgcaagggacaaacccctttcccgtgagtgggaagtgtttagatacagcgttatacacataccctctacctctgaggctatggcccgagaacaagggctactgtcagatgaccctaccagagggctatgctgcaggtccctgtgaggtgtatccagcagggcgctgtggttgccccgcagagcctcccggcccgtggggatatcaaactcctgcagctgctgtaactgctgcagctccgccatggcttggcctcggtggggttccctggggagcctgctgcct

SEQ ID NO: 45762 - DNA, 158 bp, Mus musculus
  source 1..158: mol_type = other DNA
tgagagctctggctgacatttgtccaatagcaagaggttcctcttctgccaggaggatgacagactggggctcaactcaagcttaagacagactcagcgctctgttcaccagcccactggagctgtactgccagccctcttccatgagtggaaaatcc

SEQ ID NO: 45763 - DNA, 242 bp, Mus musculus
  source 1..242: mol_type = other DNA
attccgggacaagaggaagtcagaccctgggccctgggcctgggcctctctgtaccctgctcaggagaagggggaaaccaggggtcggattttccactcatggaagagggctggcagtacagctccagtgggctggtgaacagagcgctgagtctgtcttaagcttgagttgagccccagtctgtcatcctcctggcagaagaggaacctcttgctattggacaaatgtcagccagagctct

SEQ ID NO: 45764 - DNA, 407 bp, Mus musculus
  source 1..407: mol_type = other DNA
agggacaaacccctttcccgtgagtgggaagtgtttagatacagcgttatacacataccctctacctctgaggctatggcccgagaacaagggctactgtcagatgaccctaccagagggctatgctgcaggtccctgtgaggtgtatccagcagggcgctgtggttgccccgcagagcctcccggcccgtggggatatcaaactcctgcagctgctgtaactgctgcagctccgccatggcttggcctcggtggggttccctggggagcctgctgcctgtaaaggggtaggcatgctcattccgggacaagaggaagtcagaccctgggccctgggcctgggcctctctgtaccctgctcaggagaagggggaaaccaggggtcggattttccactcatggaagag

SEQ ID NO: 45765 - DNA, 161 bp, Mus musculus
  source 1..161: mol_type = other DNA
gctggcagtacagctccagtgggctggtgaacagagcgctgagtctgtcttaagcttgagttgagccccagtctgtcatcctcctggcagaagaggaacctcttgctattggacaaatgtcagccagagctctagtgaatgcagagtgagcctgaagaccc

SEQ ID NO: 45766 - DNA, 314 bp, Mus musculus
  source 1..314: mol_type = other DNA
acatcggaacgatttcgagtgaaattcgcttttttcctacgtccaagcaaaaaggcattatttgcaggttgcagcgagcgcccaggttatccaggccgtgctaggacacgccttgagatcgtactttctccagcttcacctagttcatcctgaagtttgggaaatcaagccacagatatagtttatacaagtaaataaagcgttagaacctgactgtaactcttctagtagagggatcatgtaccgggacataggctcctggcgcacacatcctggacgcgaggcaaggtccagcgcctgggcgggggggcgcg

SEQ ID NO: 45767 - DNA, 468 bp, Mus musculus
  source 1..468: mol_type = other DNA
acgccacctgtccgctccttgcgtggggagggcgagggggacctcggagctcaacccggtccctccctggttcggggtcgatcggtggtgcgaccacccctcgtcggctggagtgttgtcatccagcagctggactgggtgcaagccagcttttctccagtggggatcccgaaccgatcccgcgctctcagggtcccctgaatcaggacccgggaggctacttagaaacgtagaggaaaggcgtctttccttttaaataaccgcctgtcagtcgctagcagtttgccggggtggggtgggcagcccagtctccacaaaacgaataaaaaaattaccgtacattttattccactggggggatttgggtcgccaccgccctccccccgccaccccccccccccgtgcaggtcgctgtgggggcggggcgccgcttgccgcccccaagccaaggggcccggtggcgtcgga

SEQ ID NO: 45768 - DNA, 308 bp, Mus musculus
  source 1..308: mol_type = other DNA
tagaagcttatcttcctcaggccctaggaatgaatgtggtacacagacatacctctacctctgcaggtaaagcagttatatgaataaaataaataatatatatgcaaataaataaataaataaataaataaataaataaataaataacaaacaaatatctttgtggaaggagttatatctttcttgagcctccaacatatgactgtaaactctaaggttacctcattgtgggggtgtcccttccctcagaaagtgccatcccagggggaagctgaagctacccctgccaccagtgcctggataggaca

SEQ ID NO: 45769 - DNA, 247 bp, Mus musculus
  source 1..247: mol_type = other DNA
gtgttaacaagaatccgatttcatattttattattatttaaatttgtgacacctttgttattataaactatgcataaaggtgaggctgcatcttgcatccagacattatcttaatttctttaatgtacagttaacaagcatctttgttcattcaaactgatccattcagatgttatggagccagtagggagaccataatcccgcggcgcgatgcagctaaagaaatccttagcgattctccgaggcg

SEQ ID NO: 45770 - DNA, 312 bp, Mus musculus
  source 1..312: mol_type = other DNA
tgtctataaacatcgtttttaatcataacgattgtatttaaaacaattcctctgcagaaattcttgagttggattcaaggccagtgtggtctacagagcacaaggctacattgatttgagtcagactgtctgactcatattcatgacgttaagtaatttaaggcagttgtgcatgcgtggcacaaaactaatgcatttaatcccaacattgactctgaattcgaagtgagcttggcttgcatagttccagaccaaccaaccatgggagcgcccccagctagggcggggactggggcccttgcaccgcggcag

SEQ ID NO: 45771 - DNA, 288 bp, Mus musculus
  source 1..288: mol_type = other DNA
ctcattctgtgtctacagtaaagagacttttaatgaagaagtcacatgccttttccttcaggacctgaggataccagaaagctctagagcacaagggcaactttctctcagattttctttcattatttttttaatagacaaggtctcaggctgacttcaaacttggttggcgactaaaaactggaattagaggtattagccctggctgtcctggaactcacgctgtagaccaggctgtcctcgcggcaagggcggggtttgtgactcagtgggccgggcctgcccatc

SEQ ID NO: 45772 - DNA, 273 bp, Mus musculus
  source 1..273: mol_type = other DNA
gccttatggccatagttgggaacggacatctgttgattcacagccgccctcagtccctcagatagaaaggcttgaagctgagttctgaggctgtctccaggcgcactctgactttaataagctcggtggccaaaaccaaagctagggttggctaggtgagcggtcagagtctttgccaaagagctctctccctgagcgtgcaccaagcgcgcatttggagcggggagtttttataaactacaagaggagcgcccccttcaggtggaccctcca

SEQ ID NO: 45773 - DNA, 464 bp, Mus musculus
  source 1..464: mol_type = other DNA
tctcagcactaagaccttgtctcaaaaactattcatacactttgctatagagtatcaagtcagagttaattttcgtattacaaatctcaatatagttctaagaaattgagaatttcaaacccgtaactccaggattagcgggtagagcttggaatcaagcctgatgcttgactatgcctagcatttagtatgccctaaataaatatcgaataaactcaaatgaggtggtcttttatgtgaagggccctaggaaggtggaccttagtcctaccctaggattgaacatcgatggtccctccctttaaaagagaagctgtgggtcgcgcagaatctgcgctggcctggagcgccagctagtccgctagcccccgccccccgctctggaggaccgtgggtggacgctctggcagcacgcctctcgctggtccgggcggaggtgggcggagccagcgccacccgggctg

SEQ ID NO: 45774 - DNA, 276 bp, Mus musculus
  source 1..276: mol_type = other DNA
ttataaactacaagaggagcgcccccttcaggtggaccctccagggaggactgatgtttccccagagcctccttttgtggggacacagggcttgtctcctttatggcatcccataatagtgtccttgctgaaggagcaaggaaaaaatttcccttcctaagcgcactgggaatttgtgacttgccagccccggcggctggcagctgcagcttgcgcaagtggaaagggggagacaatattttagtaaaaaatatgtgccttttaaaatttctcaaa

SEQ ID NO: 45775 - DNA, 154 bp, Mus musculus
  source 1..154: mol_type = other DNA
gacactgcgagccaagcactgcacgctcgggttctcctttgaggcagcccgaagtggagggaagagaggaggcggagccgggctccccgtcccttctccccctgcaatttctgcgggaggattttaatcagcgctcatgcccgggctcttgcgt

SEQ ID NO: 45776 - DNA, 344 bp, Mus musculus
  source 1..344: mol_type = other DNA
cagactggcctggagccttccgatgtctgaaattacaagcatgcaccacctgaattctttgcacgcttgttttttttacctaaactcaagaagcttagtctggccagtgagtccatgttgactgactttagaagttttccagcccttgccaggaagcaacatctcgcgggatgtcggtggtccttgagtccttggacaggactacaaggcccaatccggccgaatgaaagcttgcgtcaagcggccggttgtcactgttgtagaacctctgagtctcgtcgactctgattcgaccaatcccctccgaacacgtgggtgggggagctgagcgctcagaccaaggg

SEQ ID NO: 45777 - DNA, 381 bp, Mus musculus
  source 1..381: mol_type = other DNA
tttggatggaaaggaaggtaacccggtgttccttatttaagggtctcagagattcctggttaaacaagactggttagtctcccgaaactctagttccagggcctggaatttcaagacagataatcagctgctaaaggatgtgtttaataaacatctctaagactaccctcccgcagctctgaggctggggcgctctccctctggtcctccccccccccccaatctgcctggggagagggctcctcagcctgcgtccctcctgaggcagcccgctgcttgccccttcctgtaaaagcgggaggggcccgggcggcccggcagctcaggctgaggttacgtggccgccggagcccgacagcgcgagcgcagccccctcgcccg

SEQ ID NO: 45778 - DNA, 339 bp, Mus musculus
  source 1..339: mol_type = other DNA
agtctgaaactcagggcttcaaagaaaaatttaaaaggttcgagggctaaaactcaaagaagtctttggagcccaggctctgaccttaagctgtttattcagtaggaaaaattttcataagtaggcaggtggccggcaacctccagcctggtgcaggagggctctgctcgcccagccaaggtctgcaggcttctctctctctctctctcacacacacacacacacatggctctggcctgtccctggcacctcccagctacctgcgcccaagccggtataggcgggaaggaggctccgggatgatccacgcggccgcgccccgcacccaccggcggcgcc

SEQ ID NO: 45779 - DNA, 369 bp, Mus musculus
  source 1..369: mol_type = other DNA
gttaaacaagactggttagtctcccgaaactctagttccagggcctggaatttcaagacagataatcagctgctaaaggatgtgtttaataaacatctctaagactaccctcccgcagctctgaggctggggcgctctccctctggtcctccccccccccccaatctgcctggggagagggctcctcagcctgcgtccctcctgaggcagcccgctgcttgccccttcctgtaaaagcgggaggggcccgggcggcccggcagctcaggctgaggttacgtggccgccggagcccgacagcgcgagcgcagccccctcgcccgcaaggagctccgagccggtctggggggggtcgcgtccgaaagccct

SEQ ID NO: 45780 - DNA, 371 bp, Mus musculus
  source 1..371: mol_type = other DNA
cacagaaaatctcgcgtgtttgcttaatgaggctcccccaccgtgcttcagtcgggcggcgggggcgataagcttttatgcataaacaacaactttattgcgttttatataaacctttatcaataataaggaaattgatcattaaagctttaaatattgatttgataacttgtattaaaataccaattacatttataggaccttttaaaactcggtgcaattaaaccgtgttcttttacatttttccgacctgacatttagaaagactccaattgcctcgttaaactacgccaggctcagcctcccccacatcagtctttgggggtgatatctcattaatgtaggtagttaaacagatttaatccgtattc

SEQ ID NO: 45781 - DNA, 199 bp, Mus musculus
  source 1..199: mol_type = other DNA
agtctcagtcaagactgcagccaggacggctgagctgtgctgggcatacggatggtcggcttgccaattccaaaccttcaaaggagggtgtttcttcttttcttgtttctaaaatgaagcaaataagcggacacctcccttgagggaacgggccgcaggggtttgaaaacaggatgatgggtccctcgtgcagtaggcg

SEQ ID NO: 45782 - DNA, 278 bp, Mus musculus
  source 1..278: mol_type = other DNA
ctcaggttggggaaacaggagcagagggaagcggttcctccctacctcccctctcttctgccttcctggcagccacgctccagtgagtgaggcatccgccttccggaaccgggaaagcagcgcagaaatgaggccaggctcgcctcctcttgggagaagagcagcagctcgctgcaagctgcctccagcccgcgggggtcgacagcggcccttaagccccctgatcatattttataacctccggccgtcataccattggccgaggggatatcacgtgg

SEQ ID NO: 45783 - DNA, 368 bp, Mus musculus
  source 1..368: mol_type = other DNA
agatagctggcatctggcgagcttgttaaatcggttcctaggcctaggctaaggcaggggcccaggagaacgaagagtggctgagctaacaaaattcttataattgtttttcacacacaacttcccccatttccttacccaagttggggactggcaaagcctaaggagggaagatcaagcaacttcattttgattatattacccagagttaaaataataatggtgatgatcacagagccagcaaagaggttgccgaagccgccatggcggcctgcggcccgcgctcccgtcaatcgccgggaggtggcgcgctctgctcagaggccaacgattacctcttgaggtcatcagtgagaatttaacgaagt

SEQ ID NO: 45784 - DNA, 300 bp, Mus musculus
  source 1..300: mol_type = other DNA
tgggtgagctcccggaattctggagcggggggggggggcgcggagtgtgcccccaacacaccccaaacaaaaagtttctttccttgggactaagggagatctctctccaaagacattgaaggaacaagaactagatatatatatttaatgttaaatttcccctgtatcattctgctgctctaagctagaagagcgctcacctagcagttaaagtgtcacttaacattctggagaatgtgaaatataccgcgcggtgttttatggacctcacgtgactttctaacttcgagataaaacccc

SEQ ID NO: 45785 - DNA, 295 bp, Mus musculus
  source 1..295: mol_type = other DNA
aaccaatgagggagaaatctcatctacctgaggtgtccccatgcaattaatgttactggtgttttaaaatttatctttaagcccccaaaggcaaaggaaatttgctttttaaaaggacaagacaagatgccctgaaaacataaggttgccatgtgcttcacgaatctggaattagcaaattactattcaattggttttgagaagccccaagctcagcgcccctatgacctagtgggtacccatttcaagaaggcgctccctggtgagctccctcttatcctggggaggagatggg

SEQ ID NO: 45786 - DNA, 336 bp, Mus musculus
  source 1..336: mol_type = other DNA
gggcctcgggtagggggggtcctcctcacacctctaggggggtgtccccttattccagcctccaggaggtcattcggaaatgaactgcctttgaaatatgggggggggggccatctgtttggtctcccagccaaaaggacttttggaaaatatctatatatgtgtttgatcacaaacttggggttttgtattttttcttaaaaaaaaaaaagtcatggctgattctgacttcgaggcagcctcggctgcctttttaaaaaatcttattttattttttgaatagaaagttgaaacgaaatttcctgggccaagaaaaggaattttgtggtcacaaat

SEQ ID NO: 45787 - DNA, 298 bp, Mus musculus
  source 1..298: mol_type = other DNA
tgcttcacgaatctggaattagcaaattactattcaattggttttgagaagccccaagctcagcgcccctatgacctagtgggtacccatttcaagaaggcgctccctggtgagctccctcttatcctggggaggagatggggagggcaggggtgggggctacacccgcagccccaacttctgagggatgcagggtttgtgctctgcccagcggagaaagccaggcgaggagggggtctccccgcgggagcttatccgggaatcgcaggccgggtggccattggctcggaggatcacg

SEQ ID NO: 45788 - DNA, 258 bp, Mus musculus
  source 1..258: mol_type = other DNA
taggaaatgttttcttaccagggattttaaaaatccctttgtccactgtgcactgactttagctttgaaagttaagtggagacacagatacacctgggggcctgtgaatacatctgtcctgcttgtaaattctgagcagagactatggttgtttgccaccaccacacagtctctgaagggaaatcttttggcttttctgggaaggagtttttgaatcaattaaagcaaacctagactaggagacccatgaattccctg

SEQ ID NO: 45789 - DNA, 268 bp, Mus musculus
  source 1..268: mol_type = other DNA
ctctcttcattgctgctctctggagagatatagggagagagatggagagaggcgtccctcatcttccctccacaacactctggctctccagtctctagccctacagccttggggtgttgggaggggagtaaaagtcttgaatattcttccaacttctccccttctttccaaaaagtctttgaagaaagatgttaaactctggcccgcattggcctgggagagatcacatgtgcccccccacccccactccctagccccttcctagggg

SEQ ID NO: 45790 - DNA, 431 bp, Mus musculus
  source 1..431: mol_type = other DNA
gaccttaactgtaaaggacagttttaaaggtgatactctgaggtttatgacacccctagaagtcttcaggttaggaattatcctactgtgtgcctaggagatgtctacggtaatcactgcacacctcagggatttccccaggtaagtgaccaggctaaagaactagtaccctagtgtctcagcccagcactgagaggccctcccggacgggatgttaccttccaggagccaacagatctcctccgggagggcgacagcctgcatttggcggccggtgtgcctgctcggacggcgggcgcagcgagctgcaccccaggcacctgtacctcggctgtcgcctgggggggggggggaggcgctgggcggggccgccggtcgcgcgctcaggaagcggcgcgcgcagccggcggcgggagcccgggaccccgggc

SEQ ID NO: 45791 - DNA, 360 bp, Mus musculus
  source 1..360: mol_type = other DNA
acccactgtcttgagaggtgagctacttctcaccttcacatgttcctgtgtaaaggtgaagacacttggtgccccagaatgtaggccaaaatcttgggatctctaagcaagaggccaagatccatctcttgcacttcggtgtgctagcttctgcattcagcgtgtttcagaagcagttgtggggaaatgaggaggtgtggatacacctcccctcccctctcgtgcatccatctcccaagtttgtgaagactggaatatatatattatacatatatataatatatgtgtgtatacataaatgtacataaacatatttttccatatatctatatatgcatttgtttcagaggccttgaagcc

SEQ ID NO: 45792 - DNA, 486 bp, Mus musculus
  source 1..486: mol_type = other DNA
cttcttacctattatggggatagaatttacagataattttctacccggagtctggtatttaataccaacaggcatgcgcctgttgtactataaaataccaatcaaataaacaacctttgagtacttgttcactcaagttcgtgctgtagcaacatctttggtacctactaccacccaaacttctgtgggcacagcccgagaaagactccagagggaaggacattccctccgtgtctctccattcgctgggactccagatttaatttcgcaagggtttaacagccccaaggtcaaactgctcagtgtttagatgtttccgccaaaacctagcctccaaggctcttgggaatggggctcaaagggccacgccattgactttgcgtgccacctcagtggcaccagtgcacctgcgcccggggtcccgggctcccgccgccggctgcgcgcgccgcttcctgagcgcgcgaccggcggccccgcccagcg

SEQ ID NO: 45793 - DNA, 217 bp, Mus musculus
  source 1..217: mol_type = other DNA
aaggatcctgagtgttttgcttaattccgtttctttagactaacttgataaaggatgttcacagagatggagaaatccccatgatactgctttctgaatggagcagtgattcaaactgggtgatttgataaatctcaggtgacgaatacaatatttttcttttaaacgcagctgctagactgtagagttatgttctaagtaacagtcgactgccctg

SEQ ID NO: 45794 - DNA, 409 bp, Mus musculus
  source 1..409: mol_type = other DNA
gccactggctttaagatatttttttttgtctttttaaaaaagatgtatttatttattacatgtaagtacactgtctatagttggttttccaaatcaaactggcagtgcccttgacagtttagatggggaactgcaacctctgaggttcaaacccagactttcgagatcttagatcttagtaaggaacaccctgaagacgtttaggctcctaagatgcgcgctgattggcccgcctaatggcggtgggcgggacacggcacgcggatttcagctaggcctgggagcctcctctgaccagcgatcgccactgagagccctggtcttcaggggtggggcgtccgggacactcaggattggcccgtcgggagccgcctcccgtcgtgcaccggggcaccggcgactcacccgg

SEQ ID NO: 45795 - DNA, 501 bp, Mus musculus
  source 1..501: mol_type = other DNA
ggagaaatttctatttcccctagtgggatttttaaattccaatcacctcctggccggcctgctaggagaggtgctagcccgaaaagatctgcggccaggacggtgctcagcacctgtctggcctggcctgcactaacatgcccagcctggcttgtgatccctagccttgaggactagccatcgtcttcttaaggaatgggaaactccttccacttcccagcgatgtctgcccagtcacaagggaggaaagtggcaccccttcccccaggactccactgcaccaccccagctgactgactgggctgggtggggctgcccgcccctgggtgcatctcctcaaggagacggaggcggcccagggatgggccggttccttgcggcagcttctccagctgccctggtgcagagattggctcccttctgcagctaggtaacaggcggtgggaggggattggctccttccgcatctccagcggagacttctttccgcagccccagctg

SEQ ID NO: 45796 - DNA, 437 bp, Mus musculus
  source 1..437: mol_type = other DNA
aaaagatctgcggccaggacggtgctcagcacctgtctggcctggcctgcactaacatgcccagcctggcttgtgatccctagccttgaggactagccatcgtcttcttaaggaatgggaaactccttccacttcccagcgatgtctgcccagtcacaagggaggaaagtggcaccccttcccccaggactccactgcaccaccccagctgactgactgggctgggtggggctgcccgcccctgggtgcatctcctcaaggagacggaggcggcccagggatgggccggttccttgcggcagcttctccagctgccctggtgcagagattggctcccttctgcagctaggtaacaggcggtgggaggggattggctccttccgcatctccagcggagacttctttccgcagccccagctgctgacctgggggagggg

SEQ ID NO: 45797 - DNA, 352 bp, Mus musculus
  source 1..352: mol_type = other DNA
gtaccggtttccgtggcgacacgaacgtcgcgaccatcagagccggaccctcaaggacggaatctcgggctccggcgtcgcagcggagaggttcagaatgccggcttcgcctcgtgggtccataccggggggcgggcctgcacacactgtgccgagtttgctgtcaatcaaagtgagggaagccgaggctgggcgctccaggccggccggaggtggcggcgacggcggcggtggcgaggccgggacttgggctgagggcctgctgtggcggcagcgacagactgtgacctcagcagcgggtagccgcggtgcagggtcttgatcgggctcgggccctggacacggccggaaa

SEQ ID NO: 45798 - DNA, 310 bp, Mus musculus
  source 1..310: mol_type = other DNA
gtggtcatactctggccgggttagtccacagtctggcggaggcagcccatggttcttttccccaggtactatgaggggaagcggggaactggttaagagccctggctgctcttcatctgatgccctcttctggtgtgtctgaagacagcgacagtgttcttcgcttgtctccaggacagccagggctgtagagagttcttttttaaaaaagtgacttgaactatttgttccaatgataccttgaaatttgggctgtcagaggccagccacgcaggactgggcggaggggcggcgtcgcggggggcgggca

SEQ ID NO: 45799 - DNA, 316 bp, Mus musculus
  source 1..316: mol_type = other DNA
agagcacacttatatttgagtcacaaaaaatgttttggtactatagttgtataacctttgatggcaaaaacgagttactatgtcctatccctgcctgacgaacaggttacaccaggctctaaggcagacagggggtaccggtttccgtttcagatggcgacacgaacgtcgcgaccatcagagccggaccctcaaggacggaatctcgggctccggcgtcgcagcggagaggttcagaatgccggcttcgcctcgtgggtccataccggggggcgggcctgcacacactgtgccgagtttgctgtcaatcaaagtg

SEQ ID NO: 45800 - DNA, 192 bp, Mus musculus
  source 1..192: mol_type = other DNA
agggtttctctgtatagccctggctgtcctcaggctggcctcaatcgtatttatccgtgggaagaaagtattttttttaactactttcgaaacgccatcgggaaggtgctaggacctgttccgtggggctccgcgccaggctgatgaaaaagcagcctaaaacggctcttgggtccggccggagcgccgctc

SEQ ID NO: 45801 - DNA, 228 bp, Mus musculus
  source 1..228: mol_type = other DNA
tccttaatgagggactctcttaaaccttttactgcaagggaccagggtttctctgtatagccctggctgtcctcaggctggcctcaatcgtatttatccgtgggaagaaagtattttttttaactactttcgaaacgccatcgggaaggtgctaggacctgttccgtggggctccgcgccaggctgatgaaaaagcagcctaaaacggctcttgggtccggccggagc

SEQ ID NO: 45802 - DNA, 302 bp, Mus musculus
  source 1..302: mol_type = other DNA
acaacacaggaaattctttgtgtagcattttgagacagattctctaaggagggaatcccagtcagtctccttgcctgcagaggaactctgggtggaggagagcaggcagcctgggaaccggtctgctaaccagttcaaccagagactggtttcaacccccgggagttcaaagggacctgtccctcgggatcccgtcctccagcttggtgatcccaggaggaccctggctcctgggtggatgcaggggtgaatattcatcagcctgagccagcctgtttcaggttcaccttgactcctggagc

SEQ ID NO: 45803 - DNA, 195 bp, Mus musculus
  source 1..195: mol_type = other DNA
gcgtgcaggcgaagggacagcccttccatctgttagagcagtggctagtagtaactccactgcattgggtataggatgccctgagcccagcccaacccttagggagtccggcccccaaaccatgtttaggaggggatcccttcagtagcccgccactggccggccacttactcaggtatggatccctgctctggt

SEQ ID NO: 45804 - DNA, 327 bp, Mus musculus
  source 1..327: mol_type = other DNA
gtttatgactgttttaagcattttacaaatgcctaaatatagactggtcatacatgtataaacacatgtacactctaaatgtataaaaatgtaaaaggtatcaccactttacaggtggccttgtaagtggcccctgaaagcacaaggcggtcccggcggcagcggcagccaggtgacggaggtagcccgtccacttagtcggccacgtgacccagcgtcgcctggccctgggttcggaaccaattgctagagccccagacaagctagtaagtcctaagttctcggaaccaaggtgcctaggatcaccagagcagggatccatacctg

SEQ ID NO: 45805 - DNA, 265 bp, Mus musculus
  source 1..265: mol_type = other DNA
cgccccagcgagggtgtcaggcgcaggctgagcaacccggtacccggcttgccggaaactgagaagtttgttctagcactgcgcggctaggacggggccacgtgtgccttaagaaggctcgccaggatctgaatcttgttccccgcctggaccgggccagctccgggttagatttccaagggagggaggtggcctggatagccatccttcttgtctgcccgctgggcttcgcctccagccaagcctgcaagggttaaaggcggcc

SEQ ID NO: 45806 - DNA, 316 bp, Mus musculus
  source 1..316: mol_type = other DNA
cagcgtgactgagcggcccctcaagcagggtcgctaggatgccagcgtgcaattctgcccacctgaggcgcaggctagtaactagggacgaccctagggatctgcttttgataaaggcaacacgcctgtctgaagctgagaggagaagctctgacataatgacaattccctctaggaagtgccagccaactcctgccaggtcgtcgactctcgagaggcgatggaaggcgatgcgctcactgggggccgggcaccgcgtatccgatctatcacttatcctcctagcaggcgggactttgcctcccgccagttggct

SEQ ID NO: 45807 - DNA, 294 bp, Mus musculus
  source 1..294: mol_type = other DNA
atatggtggctcacaaccaccgatgtcctcttctgctgtgtctgaagacagctacagtgtactcatatacaataaataaatctttaataaaaaaaatatgccaggcagctcacaaccatctgtgatttcagcttcaacatatttacaaaatttagaaaaaaaacttattttatgcgttttgatgttcacatgtgtgtctggagtccatggagactagcctataaaaatacaaattttaaaaattagtaaaataagaaacaataccgtaatttatgaaattcataaggctgtaga

SEQ ID NO: 45808 - DNA, 431 bp, Mus musculus
  source 1..431: mol_type = other DNA
ccctcttctgatgtgtctgaagacagcaacagtgtactcacttacagaaagtaaatacttctttaaaaaataaaaataatgccttcctcccaaggtgcctttgctttgaagcaatgagtaatcctacattaaatgcctgatgcctattaacagcagacaccacagctgttgataaaagtaaatttcaccaaagaacctgctctttatggagactagagagcgccatcctgcgtgcagggaggccctgggccactccttacccgcccggggcgggagacctccacggaggatcccggccaccgccgcagccatcgctacaggaagttcccatgcgcgctgcgcggggcgtggcgcctgatagggccgctatgcgcacagacctggcgtccagtctcctagcaacgacgcgagacctcaaggaacggttcttt

SEQ ID NO: 45809 - DNA, 262 bp, Mus musculus
  source 1..262: mol_type = other DNA
tggagcagtgccgcagcgtctttagtcctggacactgcagcagctctctggcctgggccaggactttaaaaggccctcctggtgccactttgcctccagaggcctgcctggtgctgcccactgcaccggtggagcagacgattggcccacatactgacctggtagggcattgctctcaatgaggagcctcggtgcgggggtggggtgggacggtgtctctgtcccttcccagtcggtccaaaatatgccatctatttcagcc

SEQ ID NO: 45810 - DNA, 148 bp, Mus musculus
  source 1..148: mol_type = other DNA
aggacagcctggtctacagagttccaggacagccaggtactgattagtggaaaggaaagaaccgttccttgaggtctcgcgtcgttgctaggagactggacgccaggtctgtgcgcatagcggccctatcaggcgccacgccccgcgc

SEQ ID NO: 45811 - DNA, 266 bp, Mus musculus
  source 1..266: mol_type = other DNA
ctgcatttgcaacaattactgtaagtgtctttcacaactttttgatcatgactcacattaaaaaaatgctagcatgcgtgtgaagcataccacacacagctgtgttagaacagcaggcagatctctgcgttcaaggtgggcagccaaggctatcaaggccggccaggtctcaagaaaatccagaaccagagggtggttgtgttataatggtctcctttatgaacaagggtcatacctcacagagccggcactaggaccctgggacg

SEQ ID NO: 45812 - DNA, 612 bp, Mus musculus
  source 1..612: mol_type = other DNA
ttataatactacacagatcttgtaaacgaagtctggcagtccagggccccgacggggtctccaagggcaattaggggcgcctgaatggaaggtgaaccacgtggttctcatggtccggttccgcacagagcgcggcagcaagccgacctcaccatgaaggcagcttcctgtgggcgcggcgcaggactttaacggttcccgtccccgccccctccgaggcccgcgaaaggctcgctttccgtacaccgcggcgagtgacggctctccgtagcgcgcagtccgagccactcgcgcgcagctccgccccaccccggaggcgtcccgtcgtgctccgcgccagactcctaagagcctgggcgcctcccgcctttccgcgcggcggcgaccccgaactccccgcgcacagccgggctgagcccgaaggcctttaccgggccagcccaatcagcggcgccaaccggaccttgaagcccgcaggccaatgggcgcgtggcggcccttcaacgctagccgtccggccaatcgggggttccgcgtggccccggccgtagccaatcgctgggcagcgcggtgccgccgcggagaggtccggcaaggatatccctccgcctc

SEQ ID NO: 45813 - DNA, 270 bp, Mus musculus
  source 1..270: mol_type = other DNA
gcctccagaggcctgcctggtgctgcccactgcaccggtggagcagacgattggcccacatactgacctggtagggcattgctctcaatgaggagcctcggtgcgggggtggggtgggacggtgtctctgtcccttcccagtcggtccaaaatatgccatctatttcagccaccttcgatggcttgaagccagcagttgttctcctcccgagagcaggggggcagagctgagcggcagcccggagcgctggaggggaggctccgacgtct

SEQ ID NO: 45814 - DNA, 334 bp, Mus musculus
  source 1..334: mol_type = other DNA
acctttgtttttttctataatagaatggaaacagagggcctgagggactttcaggcaaaggaagtgacttacccaggtacccgagtcacagtcagagtcagccctgggactctgaaccagccagcccagcccaccgtgggctgctttgggtgcaatcttcttgggagacagcttccaagtttcctcctgggctagagggacaagcatcatcctcgggcctgactttgtgtaaagtcaaatatctgttgactatggatagtctgagaatgctcagatggtcccatctggggaaaacttcctgggggagagaaaccgtttctctcctcgaagtttc

SEQ ID NO: 45815 - DNA, 480 bp, Mus musculus
  source 1..480: mol_type = other DNA
ttacaagtttctataaaagaaatacgcttttaggaatatttttgccttgatttaaacataggtcttagttacagaagtcacaactggtaaagggtcttttcagttaaaaaatggcatggcgcttgcccagcctgtgtagaggctttgagacagttgatcattattatcatctgtgttttctttggaactcactctgtagtccaggctggcccatgatgatcgtcctgcctcagcctttaaatatgaaatcgtgggatcctgtatttctagtctttgaaaccacttaagtgtttcctcggaaaactgtttctctttcctgccaccggccgacgacaggtgcagcgccaagcgcctcctctcgccttccccgttcgccgaccgcggcctcgccgccccgccccgccctcggcgcgcgccctcagcggggtcgcgcccgccccgcggggtcgcgcacgcagccgccgccgcctccctccccgc

SEQ ID NO: 45816 - DNA, 526 bp, Mus musculus
  source 1..526: mol_type = other DNA
ccaggatgacctggttatcacactgggattccagttctgccaattatttgtttaaatttgaattacatatttagtatctctggcccaaccatatatgtaaaagcaggaatatttattgcttgcttacctagtaaacaattttgaaataccagttattaccaaatttggtaagtggtatttttggaaatgatatgttttgggaaatgaccttttcagtaatcacagcggtcagcttccctaacggaaaggtatgaaagaattttcaaattccttgtaatgaaagaaaacacttatcttaaaggcttctgatttccgtttttttcaccgattgtaaataaggtgtaacaatgtgttagcctcctgcgcaggcgcagctggctctccccgtctccgactggcgtcattgcgcacgcgcgaacccactgcgcgtgcccgcgcgcccctcccctggagagcgtgcgcgtgcgcgcgactcacctttcggcctggggcgcgcgccctggaaaattccactccccagatctgc

SEQ ID NO: 45817 - DNA, 541 bp, Mus musculus
  source 1..541: mol_type = other DNA
cagagcctctccctgtctctgtgccagtgtaccgcagtacccaggtagcacacagtgggacctcacagcatacacatctggattctgtgctgttgtgacataagcatacactggtgtgttgagatacaaagtctgaacttgtcaccctttgggagggtgctacccaaaggcctgccccacatgtgttctggagcctgaaacagtagatgccagcttgcttgcctcttcggtcactgcccctcagaggatggctaagggccaagcccagaggctcggagctgctgtgctggctttggctgtgtcactgtaatgacagggccacacttcctggagtggctcaccgaacagggcatggcaccctgcctcagtccagctgtcaggggcaccttgaactctgccagccccagatgtcaacatctgggagctcccacgacccgccatctccagtcagccagagggtggggcccaggcattcctgtggttgggagccaaggctggaggccaatcgggtggcggcagctgctgacgccaccaccgacgc

SEQ ID NO: 45818 - DNA, 674 bp, Mus musculus
  source 1..674: mol_type = other DNA
ccccacccccaaccttctgcagcactgggggtggctgagggggggcggcagctgagcggcgctggggcagaccctgcagggcccctaggtccccagatggcagtgatgcggggcccccttggtggactccaggctgctgaggccagagtccgctgtgcggtcgcacgcccacggactccttccactcgttgaagttgaggtcggtcagcgggctctgcaccaccactgtgtggcggcgccagctactccggcgccgccgcgtctcgggcgacagtgggcgccgcagccgcacggccagcatgtcgtcggcggtgccacggagacgtagccgcagggcttccacgcgcgaaggtcgtgagccgagtgccggggcggccgccgggggccgcagcgactcctggctgctggacgatgccgagcccggtggctccggaccgcggggacacgcccgggccgtacccgcgcccggaccctcggcctccgcgcggctgcgagacaggcgacggcgtgccagagtgtcgcatggcatgaaggatggccggcgcgacaggcgccccccggggcctgcgcccccctccgtgtccgctgcgttcgtcgtccgcctcgtcgcccgcgcccgcgcgccgcccgccggtgcccgagcacacgctacggtccatggtggacagggtgga

SEQ ID NO: 45819 - DNA, 481 bp, Mus musculus
  source 1..481: mol_type = other DNA
ttttcactgttctctttcatcaacagaggaaaatattagtaaaaattcttgttacaattgcagttagcacgtgccacgtcttggattttcttggaattgtgtatatccattcttcatttcaaattcatgatgagattatgctaactatatggccagacagtgccaaggtccacgaccctctcccaggtccagacccgggtcccgaggcctgcactgctctacacaggacggtggacagggcccgggcgcccggggcgggccctggacaggaagtgacgtctaggggcggtcctcggcggcagcgcgcggcctgggctcgcgctgggctccgcgcgcccccccccccccgccccctctatgaggcagaggccgcggcggccgttagcgctgtcgctccgggggccgcggcgggcggggctccggcggggcccggcctagtccccacccagcccggctcctagccgcctcccttcgccacccc

SEQ ID NO: 45820 - DNA, 381 bp, Mus musculus
  source 1..381: mol_type = other DNA
agacaaaccctagttggcctgactaggctggcctcaaatgtgtggcatgggattatccttaaatttaaatgagagtttagcagacattttctggtttcaaagtggcacagataggaaacaatactttcattccttgttgctcagtaagcagtacaaatctctggactccggaggctttctctctcactggatagagtgtgacaccccagcgggatggtgggagatgaggcccctgcaccctcagctccagctgtgtcagtagcaagctagtggtgggctctcctcagaactcgtggaggctgcctgagcctcctctggactgtgggtcctttagcctgaaggttaagaagccgactctgactggttcttcagtgatgatga

SEQ ID NO: 45821 - DNA, 414 bp, Mus musculus
  source 1..414: mol_type = other DNA
tgaaccagggtggggcactcctcctggcgcctctgctcacgcctgcggtaggacgtccgtctgggagccaggtccctggcccagtgcgcgctccgaggtcaggggagcttggagacccaaagagtcacctccccaggtgcctctttcgaggccactctggggtcaacgcattgtctctaccgcagcagttgggggggggggaggagcgtgagcgcgccccgcaccctagtccgggcggcgcgctgcgggatccgggtgtgctgctggagggcgcgaggaggcgcagtgccccttcccttcccccgctccatccggccacacgcgcgtgcccgcatcgtgcgcgctcccgcccgcagtgacacacccgcgccggccgcacgcgcgcactcgcgcgcacagcacactcggtgacac

SEQ ID NO: 45822 - DNA, 411 bp, Mus musculus
  source 1..411: mol_type = other DNA
cctggctgtcctggaactcactctgtagaccaggctggcctcgaactcaccaagtcaaaagtcgaattccagcctggtctatagttccaagacagtcaggaagaaggctgtctatatacatacatacatacatacatacatacatacatacatacatacatacatacaatttaaataaaaataaagtcagcatgggtctttaattccacactcaggagtcagaggcacaaaatagtaataataataatatcaaaataaatttaattattttctgttcctttttaaaaatacatttatttattgtgtgtgcacgtgcaccactgctgtcttcagacacaccaggagagggcatcagatccctcttacagatggttgggagccaccatgtggagctggctttgagatttcaaa

SEQ ID NO: 45823 - DNA, 317 bp, Mus musculus
  source 1..317: mol_type = other DNA
gaatacctaaaaaagatttgtaaagtaagtaaaagttggacagcaccctcatttccctagggttgaaacccggcggcgggcgggccgggagcgagcgagcgagcggaggcgcgcggccatggctgccgcggccgggcaggggggccgggggggcggcgcgtgagcgggcggcgcggggcgggcgggcgcccgcgatgtgccactcggcgcctcccccgccgggccctgcttgcaccgcggccgggcggctctggtagccggcgagcggcgcggaaggggagcgcggcgcgcgagtctgcggcggcggcggcggagga

SEQ ID NO: 45824 - DNA, 462 bp, Mus musculus
  source 1..462: mol_type = other DNA
tggccagtttggggttcccttggacgagggtcacaaccccttggtccctgtgcccaagaattggtggcttcggaacaacccaaagcttttgggacgtttcactaaattggtttaattcggtgaatttgacctaactctcccttaaggtcatttaaaaagaagatttaaacaaagtcttgccttcttctaaggctctgcttgtgaagaagtggctctccctctaatcctggggaaccctctggagaccaggctggattagcagtgggtaccggtggctgagctgtcaggactgatgcaggtccctcccttaagtgagggccaccaacgacgcgcgccagcgcgggcggcgcatcccgctcccgcatctacgcacgtccccgctgcaaagggactggggcagagagggcgaaacagaaaattatttccgccctcgccccgccccgcccgtccccggagccagaa

SEQ ID NO: 45825 - DNA, 258 bp, Mus musculus
  source 1..258: mol_type = other DNA
attatcagagcatgttctggaatcaggatccagatggtcgagtcctgggatctggaggctcccaacacttccaagtcagcttattgtcacatatatagcgaatccctgttctaccggccctgagctttcccattttacagatgcggaaaaaccgaccaggagccgtgcgtctggcccctcgcacttccacccgcgcgcgcctagatccacgcgtccagcagcgcccaatcagaggcgggctcgcagccgcggcgctgg

SEQ ID NO: 45826 - DNA, 492 bp, Mus musculus
  source 1..492: mol_type = other DNA
gggaggtggggtcagggagtccctctgttccctccagtccagccccacttgggactgaagacccgaaggccttcctaagggagcaaggaagggaagccacagattgcaaacccaggggctcattttccaagcctggttatttgtacgaagggcagttcgtaaacagcacttgttcttttaataaaagaatgttttactaaaaaaagaaaatccaaagagaccttgctttgtctggctttatagtgacccctttttctcaagtacttgtaagaatagttcaaaactctagagccagggtggcacctgccgactccagggcggctcggccgtgcccatcctgtgcgggcctgggcgggggcggagcggagagggcggcgacccggacgcggctacgcgcagagcggccatgcgcagcgtgggggacgagcctgcatgctgtcccctggccgttcggccccgcctccaccggcccaggtcagactccacccctcg

SEQ ID NO: 45827 - DNA, 266 bp, Mus musculus
  source 1..266: mol_type = other DNA
gaacggagactgcactcactacattctcagtagagaggactggaagatggaattcccagctctgtcttcatgcctgggcagcctggagatgagcacaatttttaaatgttcctctttaaagattcattctgtgcgaggccagcctggtttcgtataagtattttgcgcacacatatgtaaatgtaccacgtacctggtacttgtaggatggcaaatcttcaggagctgcagttacagaaggttgagcagctctaaactgctgagcc

SEQ ID NO: 45828 - DNA, 496 bp, Mus musculus
  source 1..496: mol_type = other DNA
cctactctgcccggggcccggagccgctggggaccggagagcgagcgctgggtggagccgagggcgacagtcggagtgggctggcaccagccaccttcgcgctcgccggcccctccgcggccgcgagggaggcgcaccggcggcgaaaaggcgcgcgtcctctctcgactcctggctcggcgcccgagttcgtgtctcgggctgcccgagcacgctgagcgcgccagcctcggccacagccaagccccgaggccaccgtgcgtttcccgcgaggtgcgaggaccccgaatcccaagggatctcactcggacgcgtggccagcggcgccgcgtcccccgcccaagcgccctttggtagcggcgacgcaccgggtgccgcgaaaggacctttctctcctcttggtttgggggaagcccagcgcaaggcggtggggagcagctgagctagcctctccccctcctctttgtctggaggaaaaaagccattttgccccccc

SEQ ID NO: 45829 - DNA, 227 bp, Mus musculus
  source 1..227: mol_type = other DNA
aggcctaaaacagtacttgccgttggcacagagaagtgtctactagacccctctgcaggctgagagctgaggctggtggggtcactgggcggacagacttcacagggctcctgataagcggtccagtgtcttaaaggcttttcaggcagcctactctgcccggggcccggagccgctggggaccggagagcgagcgctgggtggagccgagggcgacagtcggagtg

SEQ ID NO: 45830 - DNA, 418 bp, Mus musculus
  source 1..418: mol_type = other DNA
gtttattcgagatttcttggagcaagaatgaaaggattattacaatactggcccccgggaaagggggcgtaccttgcgggtggagcgagccgtcggcccagggtcccccggggtggagatggtattcccctcccgaagcggcggcgctgccgccattttaaagcccggccttgagggtgtccgagtagggagcccttcttgccgagtgcctcgacccccgcgtgaagccggctgggttcccttcaggccgggctgcaagcgcccggggacgggcggtaccattccgaatccagtgggcggtgccgcccgggggcggggtgaggatcaggctggcctgctccccggggcggggcggggcggggcgggccggcgcagcgagggcggggcgtggggcgaggcctggggccgctcgctggtg

SEQ ID NO: 45831 - DNA, 129 bp, Mus musculus
  source 1..129: mol_type = other DNA
gccgatgcgcatgcacacgtcccacctgggctgccctggagccgttggcccaggctatcctcggtcagcttcccattctgcaaagaatgggcgcctcgagccaaatcccggtaactatgcatgtcggcc

SEQ ID NO: 45832 - DNA, 300 bp, Mus musculus
  source 1..300: mol_type = other DNA
ttctgttgtgtctaaagacagcaacaatgtacttatttatatataaatcttttcttccaggctggccttgaactcagatggctatagtttagcatatccagcgttttacatagaaagacactgtctaggaaacggtatttccagaagaatgatctcaaactttgagctggccagtttgatagcatctatttctataaaacaagccctgatgcgttgccaaggcaacagaacccgcctatggcttttcaacaaaagtacttgcgactctaggttcacgtagacttagcggacaccaccccg

SEQ ID NO: 45833 - DNA, 382 bp, Mus musculus
  source 1..382: mol_type = other DNA
aagacaagttaaggcataaaagtccttagctgtgttccttgaatccagcagccctgttggacaaagtatccaagtggcaacactgtagctatcaaaaacttgaggcttgcctggcagtggtgatgcacacctttaatcccagcactcaggaggcggatttctgagttcgaggccagcctgtgagttccagcgagtcagtgaagccctgtctaccttgctacttagactgaacttaggagggttctgagaagatttggccaaaatgtggacaaatactagactgcactacttcgtagaggaactgttcgcactcatatacatatgaaatgttaaaacgtgtgtgtgtactatgcccaggcataccagcatcacgataagatgg

SEQ ID NO: 45834 - DNA, 360 bp, Mus musculus
  source 1..360: mol_type = other DNA
gatgttgaaatcgccgcaattcagctgttaagcaaatttaatcgccaattttgggtgtagaggcccaggccttacgtggctgagtgggcggggcctccccatctgccgcgcgggatggcccgcccatcccttggcgacggcccccggcggcggtgatagtttacagtcccggggccggaggtcgacgggactgcgcgatatctgcggtccccgcaaatgcagacgaggttggagcctcgcagtctccttcttccgcaggaggatgcaaataatgggcacggccgggtcccgtgacaagtgcgtggtagccggggagcggccggccctcgccgaagcgaggacgcggtgggtcctccgggg

SEQ ID NO: 45835 - DNA, 404 bp, Mus musculus
  source 1..404: mol_type = other DNA
taaaaggttatctttttacctgttttaatgacccagggtcgaatcaagatcatacttgtattgaaacgtatttttattgtcattgaagagatcttaagatgctgtcgcagctgctacacaggtagaccccaccatcgtcgggtgcgtggggttgccccctctcatgggccacctccagcgcgggaagggccatggcccgggcccgtcctcggtcgcggagcccaggggcacgtgcaccccgagagctcaggggctcctgcactcccgtcccgcagtcctccccgcccccacgcagccccacgtcgcccggggagcgcgcctggtcgcgcgcgcctctttccgcgcccgaggcgcgtccccgccctagccagtgcagcccctcctccccactgtgtttattaggg

SEQ ID NO: 45836 - DNA, 201 bp, Mus musculus
  source 1..201: mol_type = other DNA
tgggcttggttctctgatgacgacacgaggtaaattccatgtgacacaaatgagcttgggctctgaggatctccctcaggcttttgcagaaactgtatctaaatagagatagcggtttttttgtagggcggggctggcttcctgggaagaaattaaacctctccttagcttcaggtccccgggagggggagggaacaggaa

SEQ ID NO: 45837 - DNA, 526 bp, Mus musculus
  source 1..526: mol_type = other DNA
gccagcctgtctgttttaaaaaaaaggagaaccctaaaacattattgctgagtttttctcttttcactaattacatttccaaaaaactaatataatattgaatgtgtttaaagatgtctactatagcaattatataatttctcattaaataactgtgcttcactttcatggccagtaaagctgtaaatggacgagccgttgatggtaagtaaaaactttttctctagcgagttctctctctctctctctcatacacacacacacacaacatattatagaaaaagtaagtattaaagtacatactttatttgtttgccttttgagacagggtttcatgcaacacagactggccccaaactactccaagttattcacttactgagcatttatgactcagtggggtgcctgccctatgtaataagctatgctttgtcacaatcctgacttatgtaataagctatgctatgtcacaatcctatgtgataaactatgctgcatcataagccgtcattgtcactgccactgt

SEQ ID NO: 45838 - DNA, 319 bp, Mus musculus
  source 1..319: mol_type = other DNA
tgagtttgaggccagcctggtctacagagtgggattataagcaagcataaactatcctatatttaagctttacgaaattttgcacatctttaagaagcaatctaagtctaagaataattaataataagtgtcactaatagagtattgttaactctcatgaccacttaattgtacatgttctttaggaacccttacagaagaatttattttactcatgtatgatgttgaaatcgccgcaattcagctgttaagcaaatttaatcgccaattttgggtgtagaggcccaggccttacgtggctgagtgggcggggcctccc

SEQ ID NO: 45839 - DNA, 407 bp, Mus musculus
  source 1..407: mol_type = other DNA
tctgtaaataaatgagaatttaatattaagagtagcttaggctggtttagcctcgcatctaacaactttttaatgaaaagctcttgtgacagatcctgttgtggttaagagcactgactgctcttgtggctcataaccatctgtgatgaatgccctcttctgggtgtctgaagacagcaaaaacgtaaagtaaataaaatcttttttttaaaacctgagtgtaaaaaaacgtaggggcttttaagggcctcagcctttcgcgagggggtggggcctcctcccgtgcgtggactcctgggagtgctccgagcgataaagagccgaggatcccggcgtctcatcctttcttggctgctcgatattcatgagggggcggagcctcctcccgctggggctcctgggagaac

SEQ ID NO: 45840 - DNA, 318 bp, Mus musculus
  source 1..318: mol_type = other DNA
tgcagccttcttctggggataagtcccaggaagcagtacacagaggaagccaggggcccctcagtccccatgaagtaggtcacaggcaccttcgttctattaaatctcctaaattgcgggtatccagtctcgagcacctcgcaattcgtgcctcttgggagccaacggcccaagtaggggcgcttcctggggcccttgcggggttctctcggtaaccagagatgtcccggcgcggtcccgggtcccgtggggtgcggcgcggagctccgggaggcggggaccccagcgttgcgccccgccctctgggttctcccgccc

SEQ ID NO: 45841 - DNA, 297 bp, Mus musculus
  source 1..297: mol_type = other DNA
attctctccacttccaaatatgactccttttaaatatgcagagagagtcttccctcaaccccaggccatcttaggctggggagaggcggaggaggcccctggggcgagccctgccgggtccaagctttgatctgagtgtgtctaaaatacacaaacagatctgactgttccagagctggccagtgccaggcctagaagccccaagtcctacccccagtaggtggcgggagtggggggcgcacatgtagcaattctgcttgtaacctgagctcctgggggaaccggctgtgtgggcca

SEQ ID NO: 45842 - DNA, 421 bp, Mus musculus
  source 1..421: mol_type = other DNA
ggcctgcaggttgcatgcaattgcatgtagctaaggatagctgtgaatgccatctaacacaaaatgggaaaaattacaatactaaaagcacttgctgctctttagttgggtttccagtatccaagctaggatctgagtacccaaaggtatacatgtatttaaacatatggcatgtggttcagcgtgcgtgcacgtgaaaacacacacacacacacacacatccagtctggtctacagagagttctaggactgtcagggctacacagaacaaaaagttttaaaaaattactagattggattagcaaaacattttgagattctttgtccaacttcagttttctcagggtaaagaggactctgggcctagtcttcgtggtgacgccactgtgggattcccaggtctcgagctggccctccggcc

SEQ ID NO: 45843 - DNA, 340 bp, Mus musculus
  source 1..340: mol_type = other DNA
caccttaaatttggaggacagctgctccgctccggagctccagatatttgaacttttggcccccagatcaatgtagggtctcctcacaaagatgcatatgaactacatcgggggcactgagaaaaatctcttggtttttgcctgcgcgcgagctactactctctgggagcgaaagcggggtagtgtccgctgaaggccctcactgcgcatgtgcgccgcggagtcggactgaaccattttgcccgacgaaaggggtattttgtgttttacagtttaaaactgattctcgatctccagtatctaggatcacgatttctctccccttcgcagataatgggcg

SEQ ID NO: 45844 - DNA, 401 bp, Mus musculus
  source 1..401: mol_type = other DNA
aggctggcaatcatggtgatttaaattttttatttttattacttttaattatatagtcctctggaagagcaacacgggcctgcaggttgcatgcaattgcatgtagctaaggatagctgtgaatgccatctaacacaaaatgggaaaaattacaatactaaaagcacttgctgctctttagttgggtttccagtatccaagctaggatctgagtacccaaaggtatacatgtatttaaacatatggcatgtggttcagcgtgcgtgcacgtgaaaacacacacacacacacacacatccagtctggtctacagagagttctaggactgtcagggctacacagaacaaaaagttttaaaaaattactagattggattagcaaaacattttgagattctttgt

SEQ ID NO: 45845 - DNA, 328 bp, Mus musculus
  source 1..328: mol_type = other DNA
tccaccactgcttggtggaggtcgacccccggagccacagttctgggacatttgttcctcagagcctatgagacctcagtaactgattccaggcccggctggggccagtagccaggatcacagggaccgggaagttccggtggcccaagctagagtcgctcagggagaccagcttctaatcggaggacagcgatcgagcccctccacgttctggaggccagcggggctacgccactcggccattgtctgcgcgcagccggttgaggggctcgaggggcggggccgcggcgcggggcgggaaccttcaggggcggaggcggcggcggcg

SEQ ID NO: 45846 - DNA, 223 bp, Mus musculus
  source 1..223: mol_type = other DNA
accaggctggcggatagtttaaaatcattcaagtataagggcctgactttaatctccagcctctattggggctccacggccagccactctagccaaattggcttacaatgagagactcagactcaaatttcttggtagattcctacacgtgcgcttctcatagcctgttctctgcttattcgggccgccgggtgcaaggctggggcccagaggacggcggagc

SEQ ID NO: 45847 - DNA, 224 bp, Mus musculus
  source 1..224: mol_type = other DNA
tcaaaaataaaaaatgtagactgctaggatagttttttgttgtaccaggctggcggatagtttaaaatcattcaagtataagggcctgactttaatctccagcctctattggggctccacggccagccactctagccaaattggcttacaatgagagactcagactcaaatttcttggtagattcctacacgtgcgcttctcatagcctgttctctgcttattc

SEQ ID NO: 45848 - DNA, 334 bp, Mus musculus
  source 1..334: mol_type = other DNA
tttggagggtcctctcaaaagtccgcggggggtggggcgtgatccccagcacaactcttctggattacaaaacaagcaaaagccaggtgattcatgtttgtgtgtctacatccaacactgcaggttgttggagttagcatagacttggaaaatctagaaaagttatctgttcccggtatctcagataaaaccaggttggatttctcagaaatttgccacctggttgtgagggctcaggcccaaactgggaagcttttctctctttagccggggctaaactgcttcaccctgcctgggaaccagggagcactgcatttctccacagggtggagga

SEQ ID NO: 45849 - DNA, 691 bp, Mus musculus
  source 1..691: mol_type = other DNA
agggtgagcagccgctgcagcccattgggcgccagcggccggaggggcggggacgccaatggcccttgtgccttgcccgcccccgccagcccctcccccggcccaaggaatgggtactgggctggggcattgcaccccctgatcccgaggtgtagcctcgctgccagctcctgtgcagagctggcgctacgtcctcagctcctgccttctggagcctggcactgagagccatccgccccgcaggggccccccaggcctccctgcagcaccccgtaatgcaattcaccggggtgggggaggcggcggcagcacctacggcggcagcggcggcggcactgccccaacctatcaggccgccggggaagtgatcagatcagagctggggaccctaggctgaaagctcaggttagccctcgcagtgctggaggggcttctcgccggtccgcgggcacgcgcgcactcgcacccgccccacacccccccacgcccgcgcgcgcaccgaagcaggcgcgcacttgggcacttccctgctgggctggcgcccggtcaccccacgttccaggcgctcgcgggctcaccgtccggggctgcgccgggtgggggaggggtgggctcgcgccgccgccgccgagcgctcctcccctcccccgacgttccgaggcccgggcggctctgcccaatgaggagcggc

SEQ ID NO: 45850 - DNA, 420 bp, Mus musculus
  source 1..420: mol_type = other DNA
tgtgtgtgtgtatatatatatactgtacctgtcttcagacactccagaagagtgagtcatgagccacccaggacctcctgaagagcagtcggtgctcttaaattaactgatttcttttttttaaacaacataactgctgagttacaagtcttgtcactgtagccttggctgtccagaaactttgtagaccaggctgtcactggaaatctttcagtagagattattttgtaagaggtgctcaaagagcaaacattttgtttcgtttgagacagggtttctctgtgtagccatggctgtcctggaactcacactgtagaccaggctggcctcgaactcagagttccgcctgtctgctgggtcaaaggcttgaacaaattgtgtaacttctgacacacccttagacgccaaggtgtgacaacc

SEQ ID NO: 45851 - DNA, 529 bp, Mus musculus
  source 1..529: mol_type = other DNA
tgtttttttttttttttttaaaccctattaaatcaaaagacttcttaatatttaatcaaagaattaccatttaggtttaaattttaaaggtaatctccgtataaagccccccaaaagggggagttggaaagcgagaatctatcgcgggagtccagcggagtctcgcgatacttgcgctccctcaggcctaggccgcggaggcctggcgacaggaagccagccgccccgagccgggcgaccgggtaggggaagggcctgcgtagtcctcccggggctccagagccgccgtcggccccacaggctccggcggacgccgagcgccagggctcgcgggcccgaatatcggctcggcgggggtgggcggccgtgaggggcggactcgagcagctcccggcgtcgcgctcctcccgtgctccttcaccccccacctcatgtaggagggcgctgaggcggcgagagggaggaggagcctcgcctgcggtccctgccctccccacccccgtctaggggctcttcggggggcgtggag

SEQ ID NO: 45852 - DNA, 418 bp, Mus musculus
  source 1..418: mol_type = other DNA
ccactatatattttttaaagatttatttatttttttgtatacaagtggtctatctgcatgtataccaccatgtggttagagaagatggtgctctctagggatctctttaatttaagaatgttctcttttggtttatatctgaaatttatacatctataactaagaagtgagaaccaataaatacatattttatttcaatattatgggaaaattgtcttctctcttatgagagaaaccatttaattccccaattaaatgggggattgctgtagctacagtctgatctatagatagtaggagcaacagtagcccaagatttatttatctattatatataagtacactggttgtgagccacccctgacttgggcttttgaaagctcaaaagatttctattcctgatgactaagcactcaaa

SEQ ID NO: 45853 - DNA, 347 bp, Mus musculus
  source 1..347: mol_type = other DNA
tccagatctgtgcccaccttaacccagataggcttgacacccaaggaaagatctcctgtgtgatgactatgagcactcgcgtgcgcacgcacacagacacccagggaggcaaatctttccctttctctgtatggggcttgggccagggatgccccccacacccaccctggaaggagcctcagctgtcccttcaccgaggtcccttctccacaccccagggtctggtcctgacccacctcccatgtgggtggcggcgggtcccgggggagccggctctcccccaatgtcatgtgatagctgctgcccgtgacgtgccaagcccatatggcctggcatagaggctggta

SEQ ID NO: 45854 - DNA, 239 bp, Mus musculus
  source 1..239: mol_type = other DNA
cacatgtgatagcacgtgtacggggaaggcagccccccaaccctgcccctgggctgattctgtcccctcccccagtagctgcggagaatgtggcagggactcattccgtcagccagagtcccggctgcagctgcccctgcccccttctggggatactgcagggggcccccgggccgctcccctagccctcgcctgggcgccagtccctggcagagaggacgggctgggaccccagggtt

SEQ ID NO: 45855 - DNA, 294 bp, Mus musculus
  source 1..294: mol_type = other DNA
catccaggatcaatgcacagtgttctgccctcttgtcagagaggtaagaggttctgagaagagtttaaattccaaccctcttactataaagaaggcttaggaaagcggccgcagacgtcctccggaccctctccccctccccagccctgcgcgcgcagcagcgagtggagaggaagggggggtgtgggctgggtcggaccgaaccaaagacccgtcagagcggaaggagagctcccggcggcgctacttccgccgctgagcggtccgcccctctctcggagacgaggtccggaa

SEQ ID NO: 45856 - DNA, 221 bp, Mus musculus
  source 1..221: mol_type = other DNA
cctaccagtggtgggcgttgagtccccaaccctcgcctgcaagatggccacacgggggactcctctttcaggggtcaggatcttgcctctcagcccttcccaggaaggagcctttcctgcaggctatacgcatggcagaaataaccaagacaccctggggttttccgcttccggacctcgtctccgagagaggggcggaccgctcagcggcggaagtagcg

SEQ ID NO: 45857 - DNA, 205 bp, Mus musculus
  source 1..205: mol_type = other DNA
cgccccatccagtatcttcctttcctcttttggaagatggagatagtatatgcatagtgcctaatgaacacacgttagttagcatgctgtccctgggtcctaaggtgaaatcctggactcagtggaaaagagcctttgtggttttgtttccagcactgccgggaaaacaaacaaacaagtgggagacatgggcccttgtgaaaaa

SEQ ID NO: 45858 - DNA, 237 bp, Mus musculus
  source 1..237: mol_type = other DNA
taaaaagagccagcttatgcaggcagaggagaaggggccacctcccccactcttacctccttcaccctgggatttaggccttctcctgttctgctgctgtcctccctgagcaaggggggagcagagggccaaggtggcacgaggctgcccatgtgccagagcatcttgcaggctttgaaagctgaagtctgggttggctctgcttatagcatctgacgccagaggggctgaaaatag

SEQ ID NO: 45859 - DNA, 374 bp, Mus musculus
  source 1..374: mol_type = other DNA
ctaagcaaggcctgaaggccaggccctgccatctatgccaagagtgcgcatgcgctgcccctctagcggccgtggcagtaccaagaacatgctctgttccgtgtcctggacctggtagcctgcaggggatgcccggatgttctgcttgctaaaagcattagcacggcatgctcagggcagagacctgctcaggacccagggtcctcaagacagaggccagaacagagtgtccttgggcaggagcgatgttctaaagggcgccccccacgcccccgcgcgtctgttgctcagacacacagagatgtggtggcctcaggcgcctcatccctcagcagccacccacccctgtgacggaggggtccgggcggggggac

SEQ ID NO: 45860 - DNA, 330 bp, Mus musculus
  source 1..330: mol_type = other DNA
ctttgccaggccagggcttccttcagactggcctgtcagcaagtctacagaggacactctcttgattaataattgacatgggagggtccataccactgtgggaggtgccaaccctgggcggggtgacataaagcaaaccccaagttggtctttatcacagtaacacaaagctgttaagaagttcttcagctcttttaatggcagcgtctttaatcaagatgctgacatacttaatttgctcctggaaatcgccccttctccttaggtgctgtatatgaaaagacccgcccactgaaatccgggattttaaagaacacaggtacttccggt

SEQ ID NO: 45861 - DNA, 376 bp, Mus musculus
  source 1..376: mol_type = other DNA
aagcttcttagatccattgaaatatggatgagaatctgatactctgagttcaatccctgggacccacaaaagcatgctatggcaccacaaattaataaataaatgtagtaagttttaaagaataaattcacacttatacacatatatacgtaattaaaatattcttaaaagttaaaaaaaaaagaggtgtggtttcaaacgctatcatcgttacaggcagttcgttagtaagcaaatccatgactgtgagcattggatgccaatgagctctcagaacccaggatcagtgctggtccaggatattcgctctgcagctggatcaagatgtagcagtacctgctgacggcagagggcgccccgggacacgccccccacg

SEQ ID NO: 45862 - DNA, 186 bp, Mus musculus
  source 1..186: mol_type = other DNA
accaggcttcatgctcttgcagaggaggtgggggccataatttgaaataaaaataaggcgtcagggcacagggcgcgacgcacccaggcctgcgccggggcagccactcccagtcttgctggttggaggggtgggggggcgagccgggagcgcgcggctcccaatcaccggcggcggaggaggcgg

SEQ ID NO: 45863 - DNA, 189 bp, Mus musculus
  source 1..189: mol_type = other DNA
tttgcacagggtctctgtacagtcctcactgtccatgtagaccatgctttccacattagtttttcaagcggaaaagctaagggatgccttaaaactaggaacaggacaacagcctgggcggctggactgtggttggaggtcaaagggcagagcacctcttctggcttcccttttaagcccctaggggga

SEQ ID NO: 45864 - DNA, 242 bp, Mus musculus
  source 1..242: mol_type = other DNA
cagggtctctgtacagtcctcactgtccatgtagaccatgctttccacattagtttttcaagcggaaaagctaagggatgccttaaaactaggaacaggacaacagcctgggcggctggactgtggttggaggtcaaagggcagagcacctcttctggcttcccttttaagcccctagggggactctcctagcacctgctgctcagtaggaagggcaagtgaggagtctccacgggagcctc

SEQ ID NO: 45865 - DNA, 332 bp, Mus musculus
  source 1..332: mol_type = other DNA
gtgggaccattccttccacatctcttaggacttcagcgtgatgaaccgctgagctttgaaaaactctctctaaagtgtagatagtgtcctatttagaggaaggaaatgaacacacatatgtactgctgtctttttttataaatctgaaccaaagactttttaaagtttgttttctgagaaagcgggccactccaaataactcaatgaagtgagttctcactgacagttctcaagaccgtcacttccgtgtcaggcaaatctggaagttgggcttaccgagacggtcgctgaggcactgtttccccgcggcctcggagcgtgctttaaagcgg

SEQ ID NO: 45866 - DNA, 403 bp, Mus musculus
  source 1..403: mol_type = other DNA
gcacagggttcagaagaactttgaaagactattttggagctccctgagagtgacttatctcacatcagctgaggaatcgaagggacccattctctaaagcaaagttacttccgaataaatttgcatggtgaaaaaaataaaggtttaaccttcctccacgcacccttctgaagcacagaggagagggcagtgaggatgtgacgttttgacagatccagcaacgctagcaacgttagctcggggttccagagctgagccctctccttgggctgctcagagccgccgccaccgtccttaggacccagaaaggctcggagggtgcagcgctccgcaactgcgcgtgcgccaggaggcggggctctccatctgcgagcgcttgccccgcccctcgtgccaagccgga

SEQ ID NO: 45867 - DNA, 334 bp, Mus musculus
  source 1..334: mol_type = other DNA
gctttgtatgacattcttttgaaatatcaaagcaagttttgacagctgtaaaactgagattaagacaagtcatttgtccaggcttactagatgtacatacactatatgtacctagcaataaagtctgtgcccttcttttcagagcttccagacatgaaagttgcagaaatcaaagctcctcacgtctatgacataaatcctattttatacctgatgtagaaagatgcccacaggctcctgtcctctgcatttagggtcaggctatcttagcagggccttaattcccaggaggcgccgggcgggccggtgaggaggcagcgtggtagtgacgtca

SEQ ID NO: 45868 - DNA, 270 bp, Mus musculus
  source 1..270: mol_type = other DNA
cttctgtgtatactggtaccaagctatgcatgtgtagccaatgcacatatacacataagggcagattatcagctcctcatgcatgcatgcgccataagtgctttctggcagaaagtcttggcctctgagatcttagacccattctctgttcttgggaacaggggcataaatatttgtcaataagactttgtgagtctcaggccagggcccagtgcctgaggtggggcacttcaaacagactgatactggtggagtctgtgggagtctaca

SEQ ID NO: 45869 - DNA, 310 bp, Mus musculus
  source 1..310: mol_type = other DNA
ctcggggatcctcgtttcgagcaacccacacacttctgagtgtcttgtttccattatttgattgatgcatttcgagatcctccatggcccctggcagggtaccaagctatgcatgcatgtgtagccaatgctcatatacacattacaaagttgaagggcagattctcagctcctttgctgcctgcattcacatgcatgcctgagtaccctcatctcttagcaggccaggggccagggcctgaggtgaggcacttctaacaggttgatgctggcggatctcctccagccttgatggatgcataaagcagcc

SEQ ID NO: 45870 - DNA, 306 bp, Mus musculus
  source 1..306: mol_type = other DNA
cagtaatagaatatgtagtcctcttctggtatgtctgaagagagcagcagtgcacagcatacatcctgggctgtccgtcatctcactgatatattccatatacttagagatgcttccaaattatagaagagttatgcatgtgtagccaaggcacagttgaagggcagattttcagctgctctgctgcctgatcagggcagatcacgcatgcatgagtaagcaacacagacacctgtgaggcggggcacaaacaggttgatgctgttctccggggtctgtgggagcttacatccccgcctccatgga

SEQ ID NO: 45871 - DNA, 311 bp, Mus musculus
  source 1..311: mol_type = other DNA
tgtagaccaggctggccttgaactcaaagatctccctagtgctgagattaaagttgtgtaccactgagattaaaattatgtaccacaccaaaggcatgcaccaccacgctgggcatgttgggtttttcagtataggactcctattattaaatttgactaattctacatgcagagaaggtatgccttatacgagctcagtttatcgaaagccaaacagcctagcctttctggtgctggaagcatctgtgagtaggtcctacagagtctgttgtagcccagcttggagtctaaagtgacctctcgcggacgct

SEQ ID NO: 45872 - DNA, 338 bp, Mus musculus
  source 1..338: mol_type = other DNA
gatgggagatgcagctcctcctggagccccagagggtcttgattcattcaagacagaccctagggtgctgtggagggctcagaggacaggttctttctcccaggtataggtgacttgagaatcacaaatgaggggctccccagcacgtcgacagaagcagtcttgatctgagcacccaaccagccttgttggacaactcggccagatccaacaccctgcagcgattcaggcctgggtgtcatcaaatttgcataaatcctgggaagttattactaagcctgagccccagccccaggtaatttcctcccggggccttgatggctttatgtataaaggcc

SEQ ID NO: 45873 - DNA, 372 bp, Mus musculus
  source 1..372: mol_type = other DNA
ttagatttatttattattatatgtaaggacactgtctgtcttcagacactccagaagagggagtcagattcggaccttcggaagagcagtcgggtgcttcttaaacagtttttgagacactcagagacccagctgcctctgccgtccaaacagtattcaggatcagtgaattctgggatgtgtgctgctacccacacttcagtgtctcttttggaatagaaatatgaaaatgagagctctagtgcctacaggtgttatgcctttctggagagttggtttctccatagaccctgagactctgggtaccagcgtacctcagccttcggattatctcagaaagaaccaattagattaatccttctgcctgttggc

SEQ ID NO: 45874 - DNA, 409 bp, Mus musculus
  source 1..409: mol_type = other DNA
cagcctctcaaggacggtgattgcaggcacgagccactacaccctgccaattcggggagttgaggggtgggaagccctgcagagagcagaccccccttgttctcctttttatttcccagacaaagggaaatgactcaccccaaagtcacttgagtgggcagtgtggtcagggagtccctagggatatccccgtgctatgccagtcctacccgtgggggtgagccaatcacgtgaaaaagcttgccaggcgcaggcgcacagatctcaacgtgccggctgctggaaaagtgtgtcactggggcacgaggcgctccctggaatcacatggtacctgctccagtgccgcgtgcggcccgggaaccctgggctgctggcgcctgcgcagagccctctgtcccagggaaaggct

SEQ ID NO: 45875 - DNA, 370 bp, Mus musculus
  source 1..370: mol_type = other DNA
ggttggcgcacgtgcgcgcgcgtgcgcgcgcaagggtccggaagagacctctcctttgagaaaaggagtccacctatttgcagcacctctgataaggggctgtagcgagtcttgtccacccccattccccaagagtgtccaagcaaatgaaagctattttatttgaaaatgacatctttctcaaaagggctgcggggcggccggccaggagctggggagcggggaccggcgactgcgaggcggcctgcagggagcagccgcgagccggccgggcgcgcggagctggagccccagccggagcggggcgggggagggaggagccagagcggccgccgcctctgccggaggagccgcggggccgccacactcg

SEQ ID NO: 45876 - DNA, 346 bp, Mus musculus
  source 1..346: mol_type = other DNA
ttcttcttcagtaagaggagggaagatcctcactccctcctcgcttgctttgcagctcaagtcagcttcaaacagcctctcaaggacggtgattgcaggcacgagccactacaccctgccaattcggggagttgaggggtgggaagccctgcagagagcagaccccccttgttctcctttttatttcccagacaaagggaaatgactcaccccaaagtcacttgagtgggcagtgtggtcagggagtccctagggatatccccgtgctatgccagtcctacccgtgggggtgagccaatcacgtgaaaaagcttgccaggcgcaggcgcacagatctcaacgtgcc

SEQ ID NO: 45877 - DNA, 603 bp, Mus musculus
  source 1..603: mol_type = other DNA
ggtaggcgtccgcgaggggcgggagcatctacctccttccttcctccccggggtcgtgggcccccgcgcctcggtcccctccccctcgcggcggcagcggtagccgcggcccctcccgctgccctctcggcgcatgcgcgctccggtcggcggtggcggcggctgcggcggctccgttttttttaaagggaaacgccgagggagggggacccggcggcgcggagaacccccgggggaggcggcagaccccccctcccggagtaggagggctctgggcggacccgtccctcccaccccctcccgaggaggagcaaggggggggaaacgagctccggggcggggggccgacgaggcgggcccggccgggcagggggggccgaagcgagctccggggatgagctcgggggcggctgggtgcgagctcctgcctctgcggcgaaggcgacggtggcggcagcagaggcggcggcgaggccaccatgggtcggcggcgggcctcagctgcggcctccacttctccgctcgccggcgggatggcgcccgggcctcggagaagccgcgttagcggaggcctgcggctgctctgctgagccgagcccgcca

SEQ ID NO: 45878 - DNA, 378 bp, Mus musculus
  source 1..378: mol_type = other DNA
ttttaagtttttttaaagagacattttctgacttacgccataaggaaaaatcttctgcactttcataatcggaagaaaagacaaattatgtgatatgtaataacataaacgtttgttactacattttgtggacgcagcaactttctggggcagataaaattatagtttctgttgacgttgtcaggtgttattctaacatatacatggccttaatttacatccacaagaattcaagataaagtaaaatcttcactctcctgggaggaagaagatcatggtgatttccagacgcggggagcccacccgcagatcgagaatccttccccggggctctgggtggatgcagacagcccgccccctgccgggtcgccgccctgg

SEQ ID NO: 45879 - DNA, 404 bp, Mus musculus
  source 1..404: mol_type = other DNA
ctatttatgaaaacagctcagagtcctcttaactcatctatttgatgtatattaacaatatgcagtaataaattagcttacaaactatatgttgctgatcatacccaaagcattcttaaccaaggagctctgatgttttaaaagcatagtaagactctcaaaatgagattcctttcccctaaatttagactgaggtgaagaatacagtaaaatgttctgtccccgctcccaggcgccctccgcccgccggggctaggggtgtgggggtgtggggagcgaaaacgtgccgcagggtgcaggccccgccccgcggaaagaagggcggccctccctggacgtgaagcacgctgggactccggagtctcgagcttcccggcagcctccgcggcgggcgtggtgcgtaa

SEQ ID NO: 45880 - DNA, 387 bp, Mus musculus
  source 1..387: mol_type = other DNA
aagcaaatgttcaatgtgacatttagcacttggcttatcatgctttttgatgagccttacccacgaacacacagttagtgagtggggattaagctggggatcactagttaagtggttacaacgacctaaccatatgacaccagagctttactctagaccatatggcttatggtgtgtgtgtgtgcgcgcaaaaaaataaacactacatcagttagctcactggttctctacctgcaattttagaacccagttgcagtcccaagatgcaaacgggacttccaactgcggactcgcgaccttctcaagatggtggcgctccgcccccacgtgcgccggtagagggcaggcttccctgagcgcatgcgtcccgcggccctcggccctcgg

SEQ ID NO: 45881 - DNA, 374 bp, Mus musculus
  source 1..374: mol_type = other DNA
agcagaaaagcactgctgccttttctgttgagagatgagagctctgcactctctggtgggcgccttcacccgtctgacccagaccacaggatgcacgtgcttcatcctctgtgggcatcagttcccagcaagcgcaggaacctgttcctcctggacagacgtgcctgccctctggggcagctcctgccattgcaccctgtgctgaggagctcctcctcttccaatttatgtatatgagtacactgtagttgtctttcagatacacaagaagagggcattgttgtgagccagggcctgagttgctattcagagcaggctggcctgctgagctcactttattgttttttaggagccatattaaaggaaagtggtga

SEQ ID NO: 45882 - DNA, 290 bp, Mus musculus
  source 1..290: mol_type = other DNA
gccttgctgaggcacagtaggggtgggacctggatgtgttcacactgtctctacagccaagggcaatatttctcccattctatggcgggggaatatgggtaccgcccccagtctttataagcctcacctgtgcacaggtaggcgtgccaaggttctgcgactgtcagaaacccaatcgcggtcagcgccagagcccaagttcaagcctcgcgcggccgggcgggggcgggcctaagcaggggaggagggggcgcggtctcaattctgccaccttccccggggccaggagc

SEQ ID NO: 45883 - DNA, 217 bp, Mus musculus
  source 1..217: mol_type = other DNA
tgggtcccagaccctagtgaagagattttcaaattaaagagacataattttactccctatgatgtatgtatgaccttgaaacaagtcaacaaatagtgagactttacggcgtgacgcgctcgtaaacgcgcgcctttcctccgaggtctcaaaagttaacgccctcccgggcgagtgggtgtattggctgccggccgtcaccggcgaaggcgtggtg

SEQ ID NO: 45884 - DNA, 376 bp, Mus musculus
  source 1..376: mol_type = other DNA
actgcatagtggactcaccctcctccagtgcagtgttagaggtggaaaccttaacctccggctggcccggaggactccaggaaagaaggatgttctatggagaagacggtcttccctttgtacttcggctttacagatgagaaatactaaggtccagggggcaggagtcagtgcgtcaccacctccacacacacaccccgaatctctttctggcgtgttgagggagggattctccccgcccttccctgggtctattaaggagagaggggcgggtgtgagcggacccgcccccggttagtgattggcccgtggcatgcaggggcgggcctgcggcaggggggcctccctcccaccccagctccatctagggctccgg

SEQ ID NO: 45885 - DNA, 424 bp, Mus musculus
  source 1..424: mol_type = other DNA
ctagggaggaggcccatcctggttcccgggctgggagacaccctgggcggagctttgctcgccggaagcacgcagagtgtgggaggagagctcattccggcgggtgagccggcagccggagtctcacatgatgtcacagacagtgacacaagctggatgtctcattccgacagctgcacaatgtcacacccgggacacccagcatgctgcattgggccacctgcaattgggccctgtgcctactgcccgtgtgggtccgagatgggggccagtgggcgagccccgagggggcgtgtttagggggaggacaccgggaccaccccacctccccgccgctgcatcttcctgcaggggaagccaggggcggcgcctggccggggcggggcggaggctaggggcgcgcgcgggcttggggggtggtggc

SEQ ID NO: 45886 - DNA, 343 bp, Mus musculus
  source 1..343: mol_type = other DNA
ccagtggggtggggccagctcaggatagtccctccccccacttcctcagcagggactaccctgggctgctggctacaggcctgggaaggtgaagggctggaccttgggatttaagttcaaaacctagatatggaaccctcagaggggttacccgctagccagctactggagatggcaccaaacaatttttaaagagcacagctctttcatctctataaggagggaagagaggaggcctatgcctccttcctgtactttttggagcagaccaggattggtggaggccagggcaccccccttgtccttacgtcttggaaaaagttagcacaacaaagggctcctt

SEQ ID NO: 45887 - DNA, 295 bp, Mus musculus
  source 1..295: mol_type = other DNA
gagctcttgtagattccctcagcatctcatgagggcctctcagctccactgaagaagcatgaatgaatctttgtatcagggttgcgacctcaacatagcgtctcatgttgtgatgcccttaccataattattccattgctacttcataactgtaattggcgttgtttcctcggtcaggaaaaaaaatctgaaataaagaatgagcatccgttttctagttatattttctgtcagtaccaccaacaattgctattggttattcgaaaaggcggtcttttgttcgaataaaagacga

SEQ ID NO: 45888 - DNA, 463 bp, Mus musculus
  source 1..463: mol_type = other DNA
gtggccctggatctatttccagggtggagccggaccacaggtcaccctgtccctttaagagaagggggagagctagcccctctcgggacaggtcccagctggcccaggtcccgggggggttggggctctagaggccactaaggggggctgtgcccggtctctgtcagcttccaaccgagacagtgggggctcacccggcctggccctccccttgcgtagaattctagactccagtagccgctcttgctcctggcacaaaaagccaggccagcaaggttggcccctagaatctggggaaccttagggtctccctagccaagcaggcccaggccaggtgtgcggggaaatccctcctcagcacccggaatcccatagctgaggatggactatccggcgggcgggggacagggggtattcagcccgccccagcctgactaccccctttcctcgtccccagcgtcat

SEQ ID NO: 45889 - DNA, 323 bp, Mus musculus
  source 1..323: mol_type = other DNA
aattcccgtttccaacagaattgctgcgaggggaagggatatatttatcaataatccctttatcacccaggggcaaagtggcgtcgggaaaattaaaagttgcagttttgtacaaagccaatggcagtctctcctaggtgtctgggaaggactccttcgaggtcgagggaggggggcaaagcaacatccccttcgtttccccgaggctctccgcgcgcaggcggtggcggcgactcaggccagcgccccctccccccctcccctgctctcccacctcggggacggcgctgggggtgtggccagggggccggtataaagtcccg

SEQ ID NO: 45890 - DNA, 339 bp, Mus musculus
  source 1..339: mol_type = other DNA
agctagccagtttcttccttcaaggatacattaggtattcgtcaagtctggcatctgctgcatcacctgtggcaggcgctttcctccaacctgctcagatgggggtctgagtgtcctcctaaggaacccctcttagcagagcttcctagatatcaagccctaggcagagccctccagggccttccacttcttcccttaggccagaagccttgttcccaggctggaagaggcatccagagccatagcataggtctggggaagggtttaaggtgagagggaggtaggagcttggggccctgccccacctgagcagttaggacacctctggggcggggccag

SEQ ID NO: 45891 - DNA, 349 bp, Mus musculus
  source 1..349: mol_type = other DNA
cgcacacatacacgtgtgtacgccaggcatggtggcatatgtctgcaggtagatctccatggaaaataaaataaataaataaataaataaataaataaataaaatctcttcttgataatgacttagacttgatgtcctctcggttagtagagaaagccgaggggctccaggcaccgtttagcttaagtactaaaaataaacactcaaactttcacttgttacgagctgcgcaggtgtatgtcggggctgcctggcggctgctcaaaagggagacttttattcaggcgtgcttggcactcacagatgtaagcagctcctccctgagtctctacaaggcaacttaaaaggg

SEQ ID NO: 45892 - DNA, 408 bp, Mus musculus
  source 1..408: mol_type = other DNA
actggatccctgtctctttgtgttaaaaaaaaaacattttcagatcattcccttatgctatgcattcatctgaaaacaaaacaaaacaaacctctcctttagtctttttcgataatttcaccagagtatgaaaatattggggatggaagaactggacagtattatcacgttgtcacaaccaggataagggccaacaggtagtcccgtttcttctactttgtataatccgccaaagtattcgttaattagtttaaaaaaaaaatatctagcccttagaaatcattggtaattatgacccatcaggtatgccagctggaaggagtgagctgacatcaactcccgtgtcgcttaggcggaggcaggggagccccgctgggcgccagcaaggacctaaacgcagcgacccgg

SEQ ID NO: 45893 - DNA, 520 bp, Mus musculus
  source 1..520: mol_type = other DNA
tctagcccttagaaatcattggtaattatgacccatcaggtatgccagctggaaggagtgagctgacatcaactcccgtgtcgcttaggcggaggcaggggagccccgctgggcgccagcaaggacctaaacgcagcgacccggtcatacgtccatcagcggaggactgaagggaactgcgtcccaccctctcccgggagaggctccggcgagcctttcccctccggcgcccgcctcacgcggcggcgcccaccgcctcagtgaagccccgggcgcgcagtctgcgcagttcctgccgccgggccgcgaaccagggcccgcaacgcggcccagccttctccgccctcctcgccgtgacgaatcggcgcccgactgggacgggatccaaattggaagacttccaggagcctgacgaaattttttttaaaaatccttggcgccagggctgttcgtctgccgggagccggccgcggccggcagacaattcccgggagcgcgagcgcggaagctccggcgcgag

SEQ ID NO: 45894 - DNA, 429 bp, Mus musculus
  source 1..429: mol_type = other DNA
ccatttccatgggacattagcattttgttaaaaaatcaaaacatttttttttaaaatactataaagaaaagtttaaactatcatatttggagcccagtataattatttttttaaaagaattatttattttatgtatatgagtacactgtcgctgtctccagatacaccagaagagggcatctgaagcagtcagtgctcttaaccactgagaaagctaaataaatttcgtgtttgactgaccttgaactcaagatcattctgcctgagtgctaagataacactgtggttgtgaacaggcaaagcattcactttgcataggaaacctttgcagtgagagactccgaaggtctctgctgtttgcataattaattagcaacctggggctgtctgctctggcgacgcaggcagggcaggctctgccgcagcggc

SEQ ID NO: 45895 - DNA, 304 bp, Mus musculus
  source 1..304: mol_type = other DNA
tcttaagacttgattccaaagtgcttgcctagcaagcacaaagccctgggttcagtccccaagccagtacaacactgactgtggtggtgcatcttccctctccctagttccaagctggaaccatctgaaccgtcctcagtcagtgtctgcctgaatgagcgtggccctttcaacacagaccaaaatactttctgaatacttggaattgccagtcatcaaaatctgaaagaaaaaaaaaattggctccaccttatttttttttttctatgtctgacctagcctcataaaaaagatatcggtgtgt

SEQ ID NO: 45896 - DNA, 336 bp, Mus musculus
  source 1..336: mol_type = other DNA
aatgttctcaccacagaaatatgtgagggaagtctatggtgtagtgtaatttcaatttgttatttaaatgtgggcttttcattataagaaggaaagatgacattcttccttccagcaattaggggtgtgatcctaattaccaatggatgagaggagaggacaactatgctccctcgtaagtgtcaacaaagtattcatttcccatcgggtttggagccgcaagcgttatctgcttcggctggaagtaaccgatgactcactggtaattttaaattgtaataatgagttagttactaattagaaaaaatcatccaattacgttagctggcaagccag

SEQ ID NO: 45897 - DNA, 409 bp, Mus musculus
  source 1..409: mol_type = other DNA
ggctgtcctggaactcactctgtagaccaggctggcctcgaactcagaaatacgcctgaaggcgtgcgcccgcccgactgcttaagagcttgggcgaatgcttgtcatcccccccagcactgggaggctccaagaattcttattggcaaaaaaataaatcactaaatatagaaagtttctgtctcaatagggagcaaatatttccaatgtgaactctttgacccttccaggggtcaaaaggatataatgtctcatcttggtaacccaggttgttactaacactgtgaggctatgaattaggatcactgtccctggcacttttttcatatataaaaaaatatcctatgaaaaacagcaattaggatatgaataatgttttattacagatcggcagagctaagattgaatc

SEQ ID NO: 45898 - DNA, 222 bp, Mus musculus
  source 1..222: mol_type = other DNA
tccagcatctatggaaatactataaaccaagagaaaactttctgtttccaaaaaagaacctgtttttgtttgttaaattattttttggcttgccagagaaatacagatgctattggtcaaaggaaaaagaactgttatctattacacttcttcttaattctttaaggaattttatacattaggggaaaatgtcacccacttagggataattctcaatgagct

SEQ ID NO: 45899 - DNA, 441 bp, Mus musculus
  source 1..441: mol_type = other DNA
ttttgctacaactttattaaaatatacttacatcacgcatgcatatataaagtaccacgagcattcctccctgagagtagaccacttctctttcactttctacttaagattcattccaaattcagtcctagacagggtagccacagactgtgtcactagccaacacatatgtgttacagctacagaaagtattaccaaggatatagttatttaaatgacacggtttttgttctcatgggataaagtacctgtttctccaggcagacagggcccgtctctgtctcacttagccattgacactggattgcccctggaccagataatgacagtgtgttcatagggtctttactcattcaaaattaaaagtcaaaataatgaacttaatatagaattaattattttttaaatcgcccaattatgcatcatttcatgctaatctaa

SEQ ID NO: 45900 - DNA, 341 bp, Mus musculus
  source 1..341: mol_type = other DNA
ccaaaccaagtgagttttacttagtggaaatgaaatttattcaggactgtcttgtgcacaactctcttttaatttttattaaaaaaatttagccctccatcctggtgtactttaaaagcatttaatgcatgaatgtaatcctagcatatctccatgttcaagggcagcctggtctgcgagttcctgaacagccagggctacacagagaaaccccgtataccactccactgcgtttgagcagagatatgtcccctgctcagaacacaaatctattttaagttatttacactcaacgtttagtgaggaatctgctgcttgagcttaattggtctcagaaatca

SEQ ID NO: 45901 - DNA, 546 bp, Mus musculus
  source 1..546: mol_type = other DNA
tctgtaacctaaatttatgtagctacaagaaaacttttcgtgcaataaacctcttaaggctaagttcatggttttgtcaagaatttaaattcattcctgtgtacaaagcaagaaatatgaatatactctcaagatacatatatataatctcttacgtatacgtgatatatcccatatattaatatatactatatattatatgtacacatatatattacatatacatacatataatttcctaaatcttgcttcttaaatgtggcaatttcttaacactaatagttcagctatctaaaacaggaatttgaaaaatccttatttcaactacaatttataagcaaagttcttttactttttgaacctagcaagtactaagtacaagctaaattaacattagaaaattagatttttaatagttactcaatgatcttcaaaaggtaaaatgtactcatgtgaacagcaaatttcccatctgtactcagggcaaattcaaaagcattgaaaaggtattggttattactgaagataatttatgcaatcataagc

SEQ ID NO: 45902 - DNA, 301 bp, Mus musculus
  source 1..301: mol_type = other DNA
taaaattctcaggatcatgcttcccaaagaattcattttggctgttctgtgataaatgcattcctctccatccaccgagttgatatactattctcacaggtaatgccattgaagaaagaatgccaatcttttgttaactataaatgttcgacttccaagtgttccattttcagagcagatgctctcagagccttgcaagctcagattctaatgtcgggcttcggaaggattccttaatgctccgtcactcttctggtgtctggaagatacatattcgattatagctatatcagtgaattac

SEQ ID NO: 45903 - DNA, 415 bp, Mus musculus
  source 1..415: mol_type = other DNA
actaattagatccagttggttatttttaaaaagaaaaagataaaaagcatggatgaaattatccaaaaatgctatttaaaatatctttttttaaaaaactccaaaacagtgtcttgttacacaacacgggtgagactgtaaatataaattctagtaaaaaaaaaatttaaagaagcataaaacattttttaaaagaaaatcatttgaacaagccattgtcttttcgaattattcatatagattgtaaatattctttatttgtatacaggatgaaaaaaaaaaaacctgccaaggtgcaagacctgaaaggacaccgtcctttttgttatctctgtttattaaaaagaaaaagcctttaaaaagtgcctctggtagaaatttcattcctgaggtgacacggcagcagaggaggagt

SEQ ID NO: 45904 - DNA, 329 bp, Mus musculus
  source 1..329: mol_type = other DNA
tcaacctctgccttggcagaaagttaagatgcatcacatccccccagtcattcattaattaattacgactgtaattgagggtttgttctgaagagtgattcctttgaaattactttccatcaaacgaaaggaatcagatattcagagccctctctgtttccttccgcacgggagcagatttcctccaggaagattaatggttggttttttttaaaagaaaagctataccacacaatgtacattggaaattttccactgcgagattacccacctggtggcctgggccacgcctccgggttaccactgggagttggcccaggggcacctct

SEQ ID NO: 45905 - DNA, 304 bp, Mus musculus
  source 1..304: mol_type = other DNA
tttaagtgacatctatccaagcatacatgtgggtcacctctagaaggaacaaaaccaagtaacttattttaaaaattagaagaagaaggtgaaaagctgttggattggtcaaactctgtttaaatattttaatctatattcaccatctccaagtggtaaaaatggaaataaaatgctgatttctaagttctccggtaattacaggatattactagtttcccttttctggagaagaaaggaaaaagacagttgcgacgggtaataacttagtacaagtaactcttctcgggcagattaattcctg

SEQ ID NO: 45906 - DNA, 484 bp, Mus musculus
  source 1..484: mol_type = other DNA
ggaaggcaggcaggcaggcaggcaggcaggcaggcaggcaggcaggcagtttttaaaatgcatctaaaatgtaaatgagaaaacaattcagatcttgatagtcatattttggctcaattattctcatcagtctaaaaatgaatgcacacactatatgcttcaagctcactaaattaaatttaatttaatttaatttaatttaatttaaaaaccacttcaagattgttaagttggtagcacaaacaaatacatgcaatttaataagctgtgatgtccgttaatcaattttcaaaataaaaccctatgggttttaatatttctaatgacctctacctataattacttcgttcaaaaggataatgcttactatgaccatttgctgaaataagaatttttatccaagcagcatttatcctccttttacgaggcataacatcggtgtgtcctgtaaatacccatttccaaaagtcctagacctttggag

SEQ ID NO: 45907 - DNA, 580 bp, Mus musculus
  source 1..580: mol_type = other DNA
tgaatagtaaaggctttgaaattattggacatttacatttgtccccataactctatctggtaaatatttctacttcagaataattagaaacaaatgagaatctctattgccactgttatcaaagcagatgcttgagattaattaaaaagcaaataattaataaaatgaaatcttaaagtaacccaaaagttcaattattgataaatactaggaaacattaaaaatatatatgagcttatgcaagaaggtacgttatagaatctacataaaatgattccaaaatataaaaatagatgattgcatatagtcaaaaataatcccatcatatttatatgtgtgctgtgtaatatcaatagatatttccagatgatatctttatgctcttttacattttcaatttttaataaatatgtaatattttgtatagaaataataactatttgcaaggttctatttctcatcaaaccactttagtgtagtgttaagcagtaactaaaatgcagttcagcactctacagattactgtcatagaagccttttgtggtacatcataaagttctttacaggcatctaaatggca

SEQ ID NO: 45908 - DNA, 508 bp, Mus musculus
  source 1..508: mol_type = other DNA
aaagtcactaacatgattttttttaatgaagtcgtaagtgtgtgtgtcactcacatgaaaatgaatgacgaccaggttagttttcttttcatgacatagaatcaaggaaagccgtgggttttttggtttttttatactttgactcatctttaagaatagtgaagctgtaggaaaacaaaacagcattttttttaaacaattaaaaaaaaaaaaaacctttccattatcaataaataaaagatagctatagataaatccaattgatcatttgagctaatttctctagaacttttccatacatgttactattgaaaacttagaagaactgagaaattttaaaccctaaaagtgcccatgagttgtcacttgagcaaattacacatctcatacaagtgtgggcatgcccagaattctgtaaaggtaaactgtgatggtattttgacaaaatggcagccaaactgattagataatctcagttcatacccactgaggaaggtataaaacagtc

SEQ ID NO: 45909 - DNA, 439 bp, Mus musculus
  source 1..439: mol_type = other DNA
gagatatacgttatatcaccttaatgtccagagactcttagcatgttggaggctctgagacctgtctcctagagcagcggttcgagaacctcagtttagaaacacaacacaactcatctttgagtgataaataatctaagtgcatggtgcaatcagacgaagttctaaggatagagctcttgatggccatccacgtgcgaaaatgagagatttttctagaattctatagaaaagtacttctttgagacataaatctaattttttttctcactttttagtcagagagtctatattatctcatagaaaaccaagtctttgtcagtgtgcaatgacaactgaccaatgtgaagagtccttactcccttttatgaggtaaagaatgtgtcttaggtaataaacacttaagtaattagaaggattttgggaaaatatcttgacc

SEQ ID NO: 45910 - DNA, 401 bp, Mus musculus
  source 1..401: mol_type = other DNA
acacaaaatacataaagacttaagactttttttttcaggatatttgtcttcacggcaaagaagtctttgtgggcagcgctacaacttgaaagtgctcttactcactcttgagtggttcaggcgttcatgaatcctgaatcagattcagtaaacatttaataagaagtcatttagttcacagtgaaagaactctctggcctgaacacatttccaatctattgaaatggaaagagctacgaagaccatttgatgatgttacatgtatgctcaatttggcaaatacaccaatgctttaaattcaatagaatttagtctatctatgcaagagagaaaaatatacagtaagaagactctaaacaagaaaaatatgttaagaattttataaacagcaacttgcttga

SEQ ID NO: 45911 - DNA, 253 bp, Mus musculus
  source 1..253: mol_type = other DNA
tttatacaagatatagacagttgtctagatacatgataagtgctcagcaatcattagtgataacgaaccattagagaaggaggcatcttttctgttgaacttccatgtgagattcaagaaccaattacaaatgtcaacactgagtaatttttgactctccttaaatagtgatccaggctcatgaatgactacttcactgtagtcaagaagtctaattgaacaccaaataaaatcagctttttacgggctttca

SEQ ID NO: 45912 - DNA, 546 bp, Mus musculus
  source 1..546: mol_type = other DNA
aattagttaaaatgattgacataatgttaaaaatattgacatgaatttccacaactaaaattataatttacacatgcataaagccaaactttattgaaattgaataaagaataaacaccaactgccaatattggttatctttgttacactagttttgaaaaagatatttgcatatgtgtatgtctgtgacactagggaaagggaatatcagttttccttatatgcttgttaaacatatccattgatataattttacacacacacacatatatatatatacatatatatatatatatatatatatatatatatatatgtaagtatatatgaagacagaaaacaatgtttcggtttagttcatgtttttatgacatcaatattagtcttaccgagtctgagtaaactgtttatgaaatcatgagaaacttgtgcctaaggttaaggtcagtgttaggtaatataccttcccttagaccagaggggaagatcactttctaattactcagatactgaccaatcaaagactgactttgcaacttgcgtcaa

SEQ ID NO: 45913 - DNA, 582 bp, Mus musculus
  source 1..582: mol_type = other DNA
atgaagcagaaaaaaatactattttcctgactccattcctctttgttgcacacatggcacaataacataaatgacataaattgaaatcaactctgactttgagatagcattaattttttaatgcacataaagaagtataaatttcacttgaagattttgtgtataaaattttagcctcttcttcaaattgaattggagtgcaacaggatttgttccatatactcttctgagtgacaaatgtttcctcaaatattaataacttaagtgtagaaaatacatatatacttttctaaatatatgtatatataatatataaataagtatatttagaagagtgtgtatatatatatatatatatatatatatatatatatatatatatatatatatacatacatatatatggaggaatctgtaaatacctgtcaatgtataatatatcactttctgagcaacactgtgatcttctagaagcataaagacagtcttttggtgagtatgtccccattattataattccgatgtaacatgtctacctcagatgagcatatgtaatgagcattagctgagatatgttacctg

SEQ ID NO: 45914 - DNA, 471 bp, Mus musculus
  source 1..471: mol_type = other DNA
aatatttctaagagtgcttgctgctagcaaaagttccaggtccagggcgtccaatgcccccttttgacctagtatatacacatatgtataaaaataaaataaacacatctaaaatacattttaattttctgcatctgagctgtttgtattatcttgtaccaaacagtaaataaatatattgtcaaagaatcccatataaaacaatgtgtctagtgcctgtttggtttacataccttattatacataattatgttgaaatccaggttatcttaatgttgataggactgcagttcatgatgttgcataatcaaaatgagaagacagaatttggagtgtcttcatcactgaggagtgatgaatgtctgagatcatagtaacttgcctcaggaatcaatcaaatgagttcatattacttaatgagggcaatcaatgactcaaccattagccaaagagacattggcttaattagtc

SEQ ID NO: 45915 - DNA, 298 bp, Mus musculus
  source 1..298: mol_type = other DNA
tatggatgcacacacatgtctgtgctggcccggtggcaggagccatctcaccagttaaagaacgtaacgtggtcacttttacaaagtttttcaccttaaataggaaatttcaaggtattaagtgtctcatgagaagtttccagttacgggacaatttccaggaacaaggtaataatccattttccagaagccctacaccgactcagagactgtgaacaaatctgtcacatggtctagcctgggaggattgactgaagaaatgttgcctggcaactgaatccagggctctcttttcatt

SEQ ID NO: 45916 - DNA, 537 bp, Mus musculus
  source 1..537: mol_type = other DNA
tgttttagaattttgagaattcccaaattatgtgagactcaattcttctaaacaattataaaagtatatacaccattaaaattcttaaagcaaatactccagtcatgtttggctgtagcatttactaatgtttgacattgagaaaatcactttaatcctcaccttgtagggatttattaagaataaattaatacatgtatttagttaagcatgatgtttgacacagatagcattgagcaatattaaataaaaatagtaaacaatggaattccttttgtctcagaaaagagatagaaaattcgtattaactctgtcaacactcttgctttgttttgtgcagagagttgaacaatggagaagaaacagcaagatgatttgctgaattcacttccactgtgagtaagtaaccccaatggcacaggagctcttttgcgacatcaactttgaagttagagccattaagttcatatttgaaccataaatagcaagatataattgtcattaagtcctcagtcctggggggtcatcagcactgcc

SEQ ID NO: 45917 - DNA, 242 bp, Mus musculus
  source 1..242: mol_type = other DNA
tgataagtaaggggactcagaactcagatctcacactgcacagggatatgtgggcccatagactctccacaatcctttggaagcaggttttatgatcaacgtggaagttgagttcaggttctgaaggctgcccgtgtggtccttcatcagatgtgaaaccacaaacctgccaaaaacaaatattagaaatattccaacaatgctaactcttctcttaattagccagagcatttacaagagtg

SEQ ID NO: 45918 - DNA, 540 bp, Mus musculus
  source 1..540: mol_type = other DNA
catgtatatgcacatgcacatacatatgcatatatgtatatatatgtatatatgcatgtatgtgtgtgtgtgtaatgagactcagagactcctggtgacctgaattccggccccaggtcccacatggcgcgtaaatgctaataaaatatagtacctactctgtacattttttaatgtcttggtgagcaaaaaaaaatctactgtgcagtttcatgattaaaagatgaataaaatttccccactcttaatcgttcttcagaaagacatacaaaaaaactgagtttctattatttctaggtagttgcaccactgccaaccttaaatgagatctgataatttagaatgttctcaggtctgcacatatgaaagatggacagtctccttgtggaagagcatttctatgattctgtgacaagttacttgtagcaacaggtgaccatcaggaaaaagaaatgtcatgttttctttcttttggagtatttaactagaaacattacaattatgtaattaaataattaacttttccaagaaggaaaatac

SEQ ID NO: 45919 - DNA, 546 bp, Mus musculus
  source 1..546: mol_type = other DNA
actgccaactgggaatgcactgacttaaacacatgattttattgactttattaagcatgtgatttccaacaacccttggaaaatctgacaagctcaaaagaatgcttatgactttataaaacttctccaatatacattattgagaaaaataaagaatatgaacaagacacagctttttaaattattttcatttattctttaggaatttcatgcatgtagacaatatattaagatcattacttgtacatattcactaggcttgttgacttaccaaaagatgaacataaaactaaaaatttaataatttttaaggtgcttttgctattcaaaagtaattatcactgcaagattgttttacctttgagagattaaataagacaaaaactagactatttgagaaatacagtattctttgtcattctgaacatatgtgtctactttaggggatataatatcaaagtgagaaaaggaaagttgattctcttgggctttgccaaattggatagcaggaaaaggaagcagctttttctatatatagataacaca

SEQ ID NO: 45920 - DNA, 509 bp, Mus musculus
  source 1..509: mol_type = other DNA
ttaactgacttctgcagtagattctatggaaagtaaactcactgccagcgctcactaacagtgatgattcctgtgatcttgctcttcactgataagtacatgagatatgaatatcctttgtaacatagcatactttagtgttaggaaaacaagcaacatggaacttttttttcttttatagaaagcagaatccactgcatatgctggcttatcaggagacagatgaaacccattcatatttctttggcattgaataatgctcataaaatgctaaccatgtgggtacaataattacagctatgaatatacttgtccctgattgtatacaagtaactgcacttaagcttatgacacatgtattgtgtgctagtttcttccttaattcaatgaatcatgtaggaaaagaaaatgatgccctttctaaacattgggatatttaaccttgtaaacatgattatgctttaatagcactaattaatttcctggttaggaaaacaaggaagggagct

SEQ ID NO: 45921 - DNA, 441 bp, Mus musculus
  source 1..441: mol_type = other DNA
tgtaatttctgtgtaagcacatataagattgaaaataggtcttgtatccatcttaatgtctctaaaaaggcatacgaaattatttcgggtacttaaaactattaggtatattactctagctcagatctcagccccagagatctgtggggcataatactgattcatgagtcatgcttaatcatttcacggtgcaccggggtgcgaaggccttaggaatttcatgagtcctacataggcatcctggattctcacttttgaaaggtgagagctgccgcccagacaatgtctcccatgtcacatgacaagcaggtgagaaaagtgaagtcattatttcctacatattagtagatttttctagaaaactacaacgtattaagttgcttttgtatcatataaacaataacaaggaaaaagtattttcataattacagaaacaactta

SEQ ID NO: 45922 - DNA, 339 bp, Mus musculus
  source 1..339: mol_type = other DNA
ttttaaaattatttcctttaattttttgagattatagtattagtacagaatcctccattctgtatgttgtatgagtaaatgagtacatatatacatacatatgtatatagctatgatctacataattacctaatgaatgatatccatttaattatgtcatctgaactagagcatcgtaatgcatgagccatcagcctaaagcgtctttatcttctggggtcaccaaacgaaattatataagtatacaaatgacaggtctcttggaagaaatttttttaaaaagctacttaatttttcaattcaccttgaaagtataatcaggtgataatcacctaataa

SEQ ID NO: 45923 - DNA, 499 bp, Mus musculus
  source 1..499: mol_type = other DNA
tttacatatgcgatatatgcatacatatatcatatatatcatacgtagatcacacatatttcacacatgtaagttttgtgatatataatcacaaaactgacacatgtgtatagttatatgtagtaatataaagcaaaattggtagtgccacataattatcaaatgttaaaaagtaagtcttggaaaaattttcccgagctgagaaacctgaactttgtgagacacttgagctctgtgacccacagcaatgtgacccataaatgactaataaagattttctggcatccccattcagttcccatattgaaattggtacaggaaatgtaatgagttgttggaatgatgaatctccaacactacttttaggtccttagtaatcatgattatctaagacacaagatcatgtcttcatcaagagctgatggtgactcttagtgttttccatctaccttgataatttagccaggaaatggaacttgcctaatttgataaccacatg

SEQ ID NO: 45924 - DNA, 503 bp, Mus musculus
  source 1..503: mol_type = other DNA
taagtcattaatgtatcctgactataaataaataatagccgatagcctttcatatagaagtttccttttaaaaattactcattctttttccattttttcataggatgaaggatgaagtcaagtttacttacttgagtaactgaagctacaacttagactggagttgctatctttgagtgttacagttttctctctgaaaaaaaaaatcaaaatttcatcatttagttttctacctaaaattgttctgtgtttctcattgaacaataatctataacgtaaaccttagtccacatggggtaggagatatggcttctgacccattatggatgagccatcagtatgataaagttttattcttctgggtcagcagaaacaattatggcttagtcccaatggttatctaaggatagacagtagagctgtctaatatgaggctccccaattaccttcataatttagttaggaaaaaaatcccctaatttgggagtcaactgtttattaac

SEQ ID NO: 45925 - DNA, 456 bp, Mus musculus
  source 1..456: mol_type = other DNA
aatatttgatatgaatatatatatcacatattattacacatatatcacatatgtaagtatgtgtaacatataatcacaaaacccacacatgtctatatacacacatgaaaaagaaaggagtctagtcctttctagactccactagaaacattacctaattatcattgcaaagggtatgacctcatatgctcgaaagaaacctaaattttgccagacacttgaggtctgtgatttccccattcagtttcccatattgaaattggtacaggaaatgtatgttggaatgacaacactattttaggtccttagtaatcatgattatctaagtcatatagtgactagacacacaagatcatgtgtgcttcatccagagctgagtgactcttagtgttttccatctaccttgataatttagccaggaaatggaacttgcctaatttgataaccacatggggg

SEQ ID NO: 45926 - DNA, 450 bp, Mus musculus
  source 1..450: mol_type = other DNA
ataaagttattttcattgctacttcatgattgtaatttttctgctgttatgaatagtaacataaatatctgtgttttctgatatcttaggcaacccctatgaactgtctaataggagttttgacattttgtaacaaaaaaacattttatctttgggagagtgcaacattttaccatctagagcttactatctggaggttattctgtttccagtttaaaaataaaatctggaaactgtctgatgtctaaccttgactcacctgagtcattatgatgggccattaaattaatgtagcttcatcttcctcagtcatgagatatgaactgtaggaatcataattactaaagcacaatgacacgacacatagtgtcttgtgaaaatagtcttttacattaaccttgataatttagccaggaaatgaaacatgcctaatgtgataatcacccattt

SEQ ID NO: 45927 - DNA, 299 bp, Mus musculus
  source 1..299: mol_type = other DNA
ttttagagagagagagagcgagctacattttaccatctagcttactatctggaggttattctgtttccagtttaaaaataaaatctggaaactgggtctaaccttgactcacctgagtcattatgatgggccattaaattaatgtagcttcaatgtagcaatacaatgacacgacacacagtgtcttgtgaaaatagaactcttttacattaaccttgataatttagctaggaaatgaaacatgcctaatgtgattatcacctatttattaacataaacaataacaaggaaagggggga

SEQ ID NO: 45928 - DNA, 297 bp, Mus musculus
  source 1..297: mol_type = other DNA
attttagagagagagagcaacattttaccatctagcttactatctggaggttattctgttttcattttaaaaataaaatctgaaaactggaggtctaaccttgactcacctgagtcactatgatgggcctttaaattaatgtagcttctgtagcatgagacagatacaatgacatgacacacagtgtcttgtgaaaatagcttttacattaaccttggtaatttagctaggaaatgaaacatgcctaatgtgattatcacctatttattaacataaacaataacaaggaaagggggg

SEQ ID NO: 45929 - DNA, 388 bp, Mus musculus
  source 1..388: mol_type = other DNA
atgtactatgtttttatagtgaaaacacacaggcagatgtcttctgagctgaaaatctgcaccttttcacctcctgttcatgaataggctttatggagcaagggactggatcccatgctgtagcagacttggcagccaaatttccctaagaatacatttagggtgttttgtttggcaaaaaaggtaatatcaaaatcactattgtacttgaaaacagtgttgtatttcccttgttgtttttggacaatcttaccagtaacaaatccctgaggtaattcttacacatcaggaagagacatcatgtttcctacccaatctgaaaatgtaaccaggagagcaatcttgtttaattttataatcacatattatttatcaacacaaacaataa

SEQ ID NO: 45930 - DNA, 503 bp, Mus musculus
  source 1..503: mol_type = other DNA
tatacatatacattgtatatatttgcttgaagaagcatataagtatacttaacttggagtatataaaaaatacatttacttgaagaaataatgaaattatactacttatatgtaaaaattctccaaaaacttaaaaatgtgagtaaaaaaataaacaaatgtttactctcctcacactgaagtgggggcatctctggcttcagagagacgcactctgaagaccattgcactctgaagaccatttccaatgtgtttcattaaaaaaaaaaacaaaaaaaacactgaaatgtgtgcacctaatttcttttgtggcaaacactgaaagtttaaaacatcaaactaaataattaatattaaaacctttgtctttcaggaaaatattttaattgtttatttaccaattaggaaagtaaacatctattactaagggaaatttcaaattgcttaaggagcaacatcttcctacaagttctgctcattggcccaaactttggggcatcata

SEQ ID NO: 45931 - DNA, 620 bp, Mus musculus
  source 1..620: mol_type = other DNA
gatagagtgactatgtcccaataaatacctactctcttaatataataaatatttgtggccattaagcatgtctgattaccaattaatttggagaaaagtttgggtatacaatgtgcataaaaggttcatttttattattgcagctccttagtaataatacaatgtatgatataatacaatataatagtacaaacaataatataatacaaaaataatacagagttatgagtttacagttcagcagagaagcctgcttcacaatcaaaaacacaacaatgttatttgtctcagaaaaactgaggtacataaacatcatttaccctaactattctctagaaattgagcaaagtcacgggcattcctgcccttcttgagaaataagaacatgggatggtcctcatgcccatgtcacaattcaaactttcttctagtactttaaaagtttctttgtcaaagtgtctttagatacatatgaatcttcatggtaacaaatgagatgctggatttagtttgctatgtcatcttatgactatcagatgagtcagaatagaactttagtaactgtttatctattaagagaaacaaaaacaaggaaatgacccttaccctggtaacagtat

SEQ ID NO: 45932 - DNA, 390 bp, Mus musculus
  source 1..390: mol_type = other DNA
ctgtgagagaaaacacacatgtgcactgatatgaaggacacatgattttctgtatcatatctggtcatactacatctaaaggggtatgctcatctttgaaagtacactataatacaatttattttaaaattaaggtatcatcttatgtcatttaatttacagggttcagatcaaagctggccaatgccatctgaagtgactaatggcttcatctaaccactgtgaatgtagctctccatacaacttctgtagccacagcaactatcacttgagcaaatgatgatcctgatgaagacttctagaaatgtccttccttgaattatccaaactcaaagagcaacttcctgctgtgagaatttcctcttgaagaataaggaactgcttattggt

SEQ ID NO: 45933 - DNA, 408 bp, Mus musculus
  source 1..408: mol_type = other DNA
aattattctctcaagtaagaaataaataatttacaggttttagtatgaatagcttagccctcatgaaaatgggcaaaaaactagattcatatcaaataatcataattttccattgaatagaaagaaaagaaatgctgacactgcagccagccactgtgtgctggaggtgctatgtaacatgttatttcagacaccgctatcacacagcacctacagaacaatcttgtgcagagacatttgtacttctaagtatgaatacttggagaaagttgcaagaacacagtaatcttgaccttctcatataatcaggagctaacaaaggcccagatgatcatcagatgaatccctgatttgttgaaaaaaaaaaccttccttgatgaacaattaaatattaataaacaaggggga

SEQ ID NO: 45934 - DNA, 326 bp, Mus musculus
  source 1..326: mol_type = other DNA
cactgcttacacaaccccttggctttgggggctttgtgtaggcatttgaagaagctacatttgcatatcctactagaattgacagatttgtaggtcatcccaccactcgaggggtaggcagaaagtggggactgatgatcacccacacatccccaatgcctgaaacacgttattccagctcatcggtgttgagttcatggttgtgaatacactacactcatccctcttgacgtttcagcgttacaacaaagctgatgggatgaacctctgatttattgggaaaacttcaagtaagttatcaccagataatttgtcttataaaaggc

SEQ ID NO: 45935 - DNA, 329 bp, Mus musculus
  source 1..329: mol_type = other DNA
ttctctcaaatgagaaattaataatttacatttattagtatgagtagtaaaattaggtacatgattccagcccctgtgcactggatggagtccatgattgtgaatacaccacactcatatgcagagacatttatacttctaagtagtacagtaatcttgatattgcaccatcagagttataacaaaactggtgggatgaatccctgatttgttggaaaaacttcaagtaagtcttcaagtaagttatcaagtaatgaatgcttgcaaatgattcagagcattgggtaaggaattcttccttgatgaacacaaattaaggctgttgtata

SEQ ID NO: 45936 - DNA, 433 bp, Mus musculus
  source 1..433: mol_type = other DNA
tataacttttatttgtacaaagtgatcatctctccttgagaaatagtgagtattgtttgtaaaaattagataaatttgtacttcttacctgattagtaatgagactggcatgtttatcaatatgtacagtagatcttccaaatgttttaaatacatttgccgccacaaacaaattaggaaccatttcaacttatttttaaccctttggtatcttctcattctgacatgttaccatgcccatatggagcatatggtgccagatatcttccttggttttcacagtgatatcattcagagatacacatgatcagataatgatcaaggatatggtagtgcaatacccttgataagaatcaactttcaaatgatgcataacattgagaaacacttccttatattggtccaaaccttggaggtctggcatataaaatgg

SEQ ID NO: 45937 - DNA, 333 bp, Mus musculus
  source 1..333: mol_type = other DNA
aactgtgtcaagcacttcctagggacagatgtctacaggacatcctttcacagatgtgcatggcacatacatgtacctgcactcatatacttatacacagtaaataaatgcaatatgttcttttcttaaaggaggttcagtttgccaaatggtgggctgtggccactgacagttacagtttggaaatctcatccacaactgagctccttactgtgtgcagtgcagtcaggttgacttgtttgccctatccaatgcaagtcagtaaataaacatcttctttatgggcagacaaacaacttctagatcaacacatgttggcataataagatgttc

SEQ ID NO: 45938 - DNA, 371 bp, Mus musculus
  source 1..371: mol_type = other DNA
tttaaaaaaaaagaatagatttgtttcttggagcaatggctgggttcaactgaattaagactatcccacattatgccatcttattgtaaaaccatcatggtgaacctgaggaggctaccttaaaaacttttagagcgttttgtggactgtgtgcaggcaaatactgtattacactgtgtgcaataagtaagctttctaagtattcctatgtggacacagtgacgtttccaagtagactcctcactgggatgagctgaacaaggcaaagagctttttaaggcctaagaaatctgggaccaggaccgttggcaaagttggttacttgctctttctgaactaaccagcatgattggtgaggagtcctgacatag

SEQ ID NO: 45939 - DNA, 180 bp, Mus musculus
  source 1..180: mol_type = other DNA
aagggaaccgggttccttgtccaggtcggtgtccaacaagtgggagttccctcgattgagataagctaggctatcattctgcttctatggcagtggctcactcaagtgtcaggggccctcacagagtatgaaggttgggcctttcatgagcttcaccccacccaatttggagtggatata

SEQ ID NO: 45940 - DNA, 340 bp, Mus musculus
  source 1..340: mol_type = other DNA
ttccattatagaaaggtggggctgtgggtagcaggtgctgccctgagttcttcctgcctacatagggagaagtaagaaggttcactttatctcagcttagagagaatgcggctccaatatttgctttgcaatattctgctctactgcagcctcaagtgtaggcagaaggcttattcattcttactcttcaagtgttcaagggctctccttttcgccatgggagaggagccagagcagattccttggccagcttcccttcctctctcccctggctaatgacaggtcttttcccaggtgtatttttaccctctggacaaatagcatacacccctgggtgagg

SEQ ID NO: 45941 - DNA, 334 bp, Mus musculus
  source 1..334: mol_type = other DNA
ctccatgtttaatataaagtgatttttttttggattgaacccaaaatgatcacatgcctcatggaaaaattagatgaacatgttcttatttcttgcaactctttaaaaactgtctcttctctcagaaaaagccactaccagtctcttaagtgataagagaggtcattatgtggtcctgtaaactacagaaagctctcctcacatccaaggcttagatcaagcctggaaggtttcatcagaagaaacaagagctgatggctgtaaactgaccagggctgggccatgtgaagatgttacatactgtgtccacaccctctgtagaaggcttataaag

SEQ ID NO: 45942 - DNA, 283 bp, Mus musculus
  source 1..283: mol_type = other DNA
aagcatgcaactttgtgttcatgaaaacactgtaaagtggaaattttcattaggactactaatagttttgattattattaacccaatacttggctttaagtgatccatccatccatccatccatccatccatccatcccaacgatgtttgccaaaagttcctttgccatggttaaatcagcagaagaaaggaattttctgcctcctttgaaggcatctaatgaaactctgatttcattttgacgaaaaaaattagcttcgggaccaggaaagagaattatgct

SEQ ID NO: 45943 - DNA, 389 bp, Mus musculus
  source 1..389: mol_type = other DNA
ggacatttgcataaaagaagtcttttcttcttctttgggatccagggatcaaacccaggtcatcaggcaagcgcttcagcctgccaggccatcttgctgacccttattttactctttaaaattagcttaagtgggatgtatttatgtaaatagatatttattcattttgcttttcctgcaaaatctatatttttattttttccagatgaacagcagtttatgaggtcttgggcaaagactctttgaagaaagtcctgacttagcaaacccaattcaacattttttttttcttttacaaggaaagaaattctgatggatggcaaaaatgacattgtaatgagatgggctttctgggaccggacagggctttcccaatatataagcacccc

SEQ ID NO: 45944 - DNA, 209 bp, Mus musculus
  source 1..209: mol_type = other DNA
agtgtccactgtagagaggatgctcacctccatctgggctggaaaagacatgtcctgaaacatggctctagctgtcgccaggaattcctagcaaggaagctggcaggctggagaaggcaagacagggttgagattcccacacctgcttaacaaggaggctgagtgcagactgggtcttcccaggatgtagggcccactcgtccaacggg

SEQ ID NO: 45945 - DNA, 286 bp, Mus musculus
  source 1..286: mol_type = other DNA
gcactagtactagtgcacaaaataaatatatacaattagaaattgagtgtaaaatacttaggctctaagcatcttttaatatttatttttaactattggtttacagacagttgtaagccctcatatgggtgtcaggaccagaacttgggtccttgcccagaatagcaaatattctcaatgaggctaattctttatgatcaacaaaatttgtgatcagaattgttgaagaagtctgaagcagaacactgctccctctgaatcatcccttttgttaaggattaaaaag

SEQ ID NO: 45946 - DNA, 372 bp, Mus musculus
  source 1..372: mol_type = other DNA
ataagaacatgttcatctaatttttccatgaggcgtgatcattttgggttcaatccaaaaaaaaaatcactttatattaaacatggagcaaattggctttacagtttgtaacggctttaacattaaaaatcgctttgaaatttctagttaaacgttgctctgggcatccaagctccagcttggatattatatcattgaatccaagggcttagatgctaggaaagaaaatattgaaatgccctgaaatcacaggactattctttagcaggagtggctttggctcgcagccagaggctccgaaaaaaagagccttggacttgtaataaaatcaaattttcttctcccacccccccaagactttgaaagtgggtg

SEQ ID NO: 45947 - DNA, 473 bp, Mus musculus
  source 1..473: mol_type = other DNA
tcccactggggttgcaaactgagccctccctttgcaccactgtagaaagtaaaaggagacctagttctaatttgttcaacctcagtccattccacggtggctgccctcttcgagtggaggacctagagcagagtgtctgccttctggagggattcctgacagatccaactgaaaagctgtcttagctgcttgggaggatgagacatatctgaggcttctggtctagacatttccttgtgaaggggccaggcctcttcctacacgaaatgctttcattaaaggggcatctacctttctgcaggcttgcagccttccctagggcaggtgcaggcgggggtgcagtgggcagcacctgctgccacaccctggtcccgggccaaatgataagtttggccttttttatgaggaaaggaactccttattggaaaccaaattacaaattaattatcagtttcctctggggccaagtataa

SEQ ID NO: 45948 - DNA, 294 bp, Mus musculus
  source 1..294: mol_type = other DNA
cctcatagtgttgaggcagagcctctagctcagcccctcctcagctggcagcagttgacaagggcagcgacatgtctgccccaacgtgtcttgggagcaagctggcaggtgacagggtgatcaatcagacttctgtcagctcgggagctacctacctaggggtgaggcccacaagctgtcagagtgtgctctttctcctgaatcatctcttttgttgcattaagagaaaaaaaaaaaggaaaaggttggctccgctcaaggggaggaggcgaggcccccaccccctctgaaggg

SEQ ID NO: 45949 - DNA, 204 bp, Mus musculus
  source 1..204: mol_type = other DNA
gggcctgtgcctcagccaggctgagagtcgcttattaaagaaactcaattagaggtcttgttaattgccacctaggacattgtggcagcagggtggggcaaccttgtcgagggggcactctcagagtaagtcactgagttgggccagagaatggggaaagagcccatatttgcactctgggagcttggaaatttctgagggcat

SEQ ID NO: 45950 - DNA, 374 bp, Mus musculus
  source 1..374: mol_type = other DNA
cacacacagacacacacatgcatacatgtgtatgcatatgcacacaataaacatacacatacacacatacacatatgcatacacatgtacatacacatgcacacacatacccatatcacacacacacacacacgcacgcatgcatgcatgggtcagacaggcccattatgtgggtcagacaggcccattatgttccggaaccctgaaggatgcatagctgtgcaaaaatggactgagtttcccatctgatgggggcatcaccagggtatctcagattcaaggtcagccagacaccagaaataggtcagcccctcagcagcagggctgcgggcagtcaccaaggttgccaccttcagcagggggtataagtaggc

SEQ ID NO: 45951 - DNA, 405 bp, Mus musculus
  source 1..405: mol_type = other DNA
gaagctgggtccacagaacttctgcaggctgagtctgtgtacggtccagccctcatcaccagtgcgttcctggcctggtgctgaccggggagtgaaactccagagacttccttccgctcatccctgcaggcttggctgaccgtgcaggaacagttagctcactaatgagtgaatcaggctaacacgcagtactaattattataattaattataacaaggcgcattgcccttctcctttggaagcaaagaaacacccagagtgcagtccaaggatggaggtctaagaccccacttgggactcaagcactgtccagctcagcactgcctgtcctgggccgggggagcttgactcccaggtgcaggacacccagacagggtctggcttggacttcatacaaattcgaa

SEQ ID NO: 45952 - DNA, 243 bp, Mus musculus
  source 1..243: mol_type = other DNA
ctttcataagggagtctcctatgcattgatttcctgcccagacctagttctcaagtcaggatgtgtacttggtctttcagatccagaaagacacctcaggtgtgtggggtgcctaactccctacctcatttcccatcaaactggggtggcagctgcctgggagggctgggtagaggtgatgtcgccagctcttcttgtgggggcccatagccacctgggagctggcgggtgtctggctgccag

SEQ ID NO: 45953 - DNA, 377 bp, Mus musculus
  source 1..377: mol_type = other DNA
aggatgtctgagtcagccctctgcctctcagctcagctatcttggcatccgagaggacatcttgttccctacctgctttgaggtcaaagttaaccctcagagctttctgcagtagaaacaatgggtggatgctctttcctcccacttttcagaagagcaaatgagggctctgagaagagcctgactctgtgcaatagctatcacagagggctcaggggaagctgccttgagtctgagccacctggctggctgaggatgttcccacccattgggttcctaagggctgtggctcccagggcctcatgggaaagtgtagcccgcaggcccacccctcccctggtgaatcatgcctgaaggggaatggaatacgccaggcc

SEQ ID NO: 45954 - DNA, 344 bp, Mus musculus
  source 1..344: mol_type = other DNA
attcccttctactaagggtcctgcaggcatgcttctttgtgacttgtggacaccacttgtccctgtggagggcctgttgcaacctaggtctaccattgtaggattcatacgacagtcctcactgtggggcagggactggttgactcacagcctgaggacgcgcctgccagaggttgcctgcacctagggctccttgttgctctcccctcaggctcctggaacagatgagtccacagactgtccaccctgggctgaacaacccagaatagggtgttagacagactgactgaggaaatccccaggggaactggagtcagcagttggaggtcccgccttcccctggt

SEQ ID NO: 45955 - DNA, 414 bp, Mus musculus
  source 1..414: mol_type = other DNA
tgtactagaccaggctagcctcggtggcacttgcctttaatcccaccactcatggggcaaaagcagaccccatgtggccagcctggtctatagagtttgtccttgtaagggactacttccttccttagaagaattaatctaaataataatttttggttaccaattttaaaacatgctaatccaaatgataccctatataaggtccaaattttgatcacgttattttatgctgatgagctagtgcggtaggcgcaggcgcgctcgaaacctccgccagttttcgcggccgctcagacaactaccatgcccactgcgcaagcgcgcaggcggaccaagctttaagccgcagcgctcgggcgtccgggagctggccgagacgtgagggcagcgcgctggcgtcacaggggcggcgtg

SEQ ID NO: 45956 - DNA, 189 bp, Mus musculus
  source 1..189: mol_type = other DNA
gcaaatgtctcatctcagttatggaaaaaaaagtctagagattgttataatttcaaataaaccaagaaatgtatcatttttctttcgaaaaaatgactaaccactttaagatgtaatttttttgttgcaatgttatgaattctttatgcaaatcaggacatatgcgcactgctctggagcccagaaggc

SEQ ID NO: 45957 - DNA, 479 bp, Mus musculus
  source 1..479: mol_type = other DNA
aaaaaagatatcagtgggtttctcctttattatatatatatatatatatatatatatatatatatatatatatatatatatatatatatagagagagagagagagagaggtacagaaagtgctctacctgctgagccatagatgaagaaatcattgacttcttgaaaacctgaggctatgtcttaccttgaaagcttggaatagttccaagagagctgaggctaccccaacttagactgagtggccctaccaagactgtcatgtatggggcaaatatccacgtctttctccccgagaccctggaatgtcaggagggaccagatcgccttcctggttccccccaagaatgagcccaattccacctttgttttggaacagaacaatggaccactaagaggtcacccatgctcaggctgggcggtccagcccaagcctcaggccgggtggctggcaggctcagcctggctataaagggtagc

SEQ ID NO: 45958 - DNA, 150 bp, Mus musculus
  source 1..150: mol_type = other DNA
aacatttaagcaggatcccctccgaagatgttctttttggaatgtttgaagaagtttctaggcagaagctacgggtccctctactcaagtccagggaagcggcgccacggaataagctaggcactagttcatctcgccacgcgtgggccc

SEQ ID NO: 45959 - DNA, 505 bp, Mus musculus
  source 1..505: mol_type = other DNA
gcccattaaaaatattcttttaacatggatcatttcgatcgaccaggctggcctctgctccagcactttttaagaactgtctcgaactgagacagtttaaatactgacattcctcagctgtttaagtgctgcttatttcatttaatctctccaacctaagatagataaagacccagcacaaagcctatgaaatgctttacaaacatcttattactgtgaaggcgtcagtcctttcccatgcctccccctgactcacctgttggacaggtagggggggaaggggtgctcagggctagggtggggcaagtcacgccccacccctctgtccaatcataaagaagaaactttctatttgccaatatgagacctcaagttggcgtccaccccagagtcgagtggcagtccctggggccaatggtgagtcccggcgcgaggctccgcccctcgatgggatagtcaggctgggcagccagtgagatagcctcagagggtgggagtctcccta

SEQ ID NO: 45960 - DNA, 396 bp, Mus musculus
  source 1..396: mol_type = other DNA
tctccccaccccgccctggcgggtccacgtggaatgggggctggggtctctggagtccaaggaatttgccacaaagatctctgagtctccaactccatccgggactgagacccggggcctggcccagagggaggaaagttttttccagagtcttgggtcctaaagcctgttggaggaacccaactctcctcccgcgaaaggttagaggaaagggggcacaggaatcttgctccggcggccaccttcgtccactttgcgctttctgggcgtgaaacgtagccccacccacccgtgtctgccagggagggccagtggtggccagcccacgtagtggactcgagcgtcaactgacgcagcctcccggctctagcctagggcccggcgctaagacccagc

SEQ ID NO: 45961 - DNA, 567 bp, Mus musculus
  source 1..567: mol_type = other DNA
tagggccccacccaggcctgggggacctgtcaccgtgagctccgggaccaggcggagcgggtcaaagtctgctcggtcgctctggggccctgggggaggcgcgaactccgaggcacctgcccgcggttcaccgagcctggaggggcgctccaacccagattgcttgtcccaagggtcccgcgccccggaccccagcgcgccccctgtcgctggtgtaggatgcgctggaaccagcctcccggccgcttccgatcgggtgtacctgagcgtggagccgggctgagccgaatcggggtcgggtctggccgggagggagccggcgcgggcagcgaactgagctcggcgcactcgggcggcggctgctccggactctggccaaggtagggagactcccaccctctgaggctatctcactggctgcccagcctgactatcccatcgaggggcggagcctcgcgccgggactcaccattggccccagggactgccactcgactctggggtggacgccaacttgaggtctcatattggcaaatagaaagtttcttctttatgattggacagagg

SEQ ID NO: 45962 - DNA, 392 bp, Mus musculus
  source 1..392: mol_type = other DNA
cttagcgccgggccctaggctagagccgggaggctcgtcagttgacgctcgagtccactacgtgggctggccaccactggccctccctggcagacacgggtgggtggggctacgtttcacgcccagaaagcgcaaagtggacgaaggtggccgccggagcaagattcctgtgccccctttcctctaacctttcgcgggaggagagttgggttcctccaacaggctttaggacccaagactctggaaaaaactttcctccctctgggccaggccccgggtctcagtcccggatggagttggagactcagagatctttgtggcaaattccttggactccagagaccccagcccccattccacgtggacccgccagggcggggtggggagaggag

SEQ ID NO: 45963 - DNA, 409 bp, Mus musculus
  source 1..409: mol_type = other DNA
acccgctgacccgagagccgcgatgggcatcaggacagctgggtctctccgcacccgcgatcccgccacgcgggaccgtccccgcccgtggcctcacctcctccgccatcacgccgctggcctggtgggcggccccgaagacagcgcccgccttagcgtcgcctctctaggagctgcaggccgtttccaggctggctccggatactggcaggagggatgaggccctgtgcaaagaacaacccactaggtattcaagtgcattttggtgtatccaggagacacttccctaactggcaagaccctggccagcatgatctgcctctgcacccatggggagcccagagagagctcccaaccgttctgccctaggtctgagctgagagcacaatcctgagtgatctcactgccc

SEQ ID NO: 45964 - DNA, 357 bp, Mus musculus
  source 1..357: mol_type = other DNA
tccatctccatggctccttgggaccaggggagagaggctgctctcatggggggccccttatcaggcagcccaagttccagaatcctgggcagtgagatcactcaggattgtgctctcagctcagacctagggcagaacggttgggagctctctctgggctccccatgggtgcagaggcagatcatgctggccagggtcttgccagttagggaagtgtctcctggatacaccaaaatgcacttgaatacctagtgggttgttctttgcacagggcctcatccctcctgccagtatccggagccagcctggaaacggcctgcagctcctagagaggcgacgctaaggcgggcgctgtct

SEQ ID NO: 45965 - DNA, 408 bp, Mus musculus
  source 1..408: mol_type = other DNA
gccagcctggtctacaaaattgggtgtgctcaggaacattttagtaatcccaaaaataaataactttaacgaagttatttttctttataagtactctctcagagaatcagtttgattgttggctcccaacacccttatcaggggggttttaaccgcctttaactccagactttgataagaataaaatttaaaaattactttctctccaaagtcaatcgttaggtcctcgaactcagggagatcagcctgcctctgcctcccaagtgctgggattggcacaggccatgtgagttccaggctatcatggtaacaaacaaacaaacaaaaaatgtgtgtgcgtgtgatggcgtttcagagggcgtaagcacggcagaagtgcgcaggcgcggctccgccccgcgcgcacta

SEQ ID NO: 45966 - DNA, 437 bp, Mus musculus
  source 1..437: mol_type = other DNA
cttccactccagggaagcagtgaattcctgatttccaggaccttatgattctgccccagaagttctcggaatatgttctatctttcgcaagtaacagaaaagaggctaattaatctcagataaatgatcagctccgcccagatccgcgctcaggtgagcctgtaagaggactgtcctaggtcggacagtcttccctggggtagcttttcaaaagcaggtctaacgcactgggtttgtgggccaacacagctacccaacccggcggctggccggcccagcccctgaaacgatcagctaggccccgcccacggccccgcccacgtccgggactatcccatcagccccaggtcaggcctgagggcggggccaccacacgcgtgtgcccaatcgccgggctgcttagcctgtgagctgatggggggccggaacaaaagccg

SEQ ID NO: 45967 - DNA, 396 bp, Mus musculus
  source 1..396: mol_type = other DNA
attcatctttaaaacaaaccttttttgggggatatccagcaaagaagactgctgaaagtcttcagggtttctctgtgtagacctggctgtcctggaactcaccctgtagaccaggctggccttgggcttttaatcataaaaaccaggttaggacatttagggagttgtgataaggtctatgagcctgtttcaaaattttaaactatctgacagcctgcctgggaacccaggactggtgatgtctttaatccaactctgtaccaggccagcctgatctacgtctcagagaagggaaaaagttaaactttaacttttaaggaaccccgggggcgcgtgcgcagaggctcgggctgaccccgccctgtccgcgcgccccgcccccaggctatgaaaggg

SEQ ID NO: 45968 - DNA, 427 bp, Mus musculus
  source 1..427: mol_type = other DNA
cccgggggcgcgtgcgcagaggctcgggctgaccccgccctgtccgcgcgccccgcccccaggctatgaaagggaccctgcgtgggggggccccggacacccggagacgcccgtgtccctcacgcaggcgggcggccccggagcggtgacggcggtgcgcccactcatcatggtgagcgcagcgttgaagttgcctctgggtcctccaaggcagccctccttggcgacaccagctggccgttgtagatgacaactgaaaccgctatgtcttgggggcacagatctctgaatacaggtgccctgtgccctaatcctacagatggaccatgtccccctatacccagacaagagagtattatctgggtggagggaggcggtctttgggtcaccctcccctgccctcaccctcccacactcaagagagcca

SEQ ID NO: 45969 - DNA, 409 bp, Mus musculus
  source 1..409: mol_type = other DNA
ggtgctcttgcagaagacccagccaagactgttttaaaaaaccaatatagttgaggcagttaactgagctagctatctaagatattatgggtactgtgtgcttgtgcacatgtgcatcacttactcctgaatggctgcagaattatgtcaggctagaccttagtttagacttgctattagcaagtgttccataactatgtgacattgaaagctaacattgcattctcatgcaaatcctcacgtccctgagtgcttggtcaagcttaagccttaatcctacttggaatgagcgccagcgtcctgcagccgccggccacgcgctcagcacttgtctgaccggtgtgcgcagcgtggcgacacaggcgcatgagcacgctgggcgggctcacccggaggcctaacaccgcca

SEQ ID NO: 45970 - DNA, 325 bp, Mus musculus
  source 1..325: mol_type = other DNA
agcacttccagagtcctggtaccctgcctgttccaggcaccctctttgcttttgtgctatggaaatagaaacaagactgcctctacctctgagatggattgatcttactaaccccacttgtagccttggttggaactggccctgcatgtctggcacggaaggtgtcaaagctcacagtgtctttgctgttgggcagcgctgtgacaccgagaagcctgcttagagcaggggactgctgactggggcaagatgaaactatctattccttctcagttacatggacacagaagaagaaagcaccaaaagagtccctgttgtggttacc

SEQ ID NO: 45971 - DNA, 430 bp, Mus musculus
  source 1..430: mol_type = other DNA
cacactttccttaagggaaatttaaattccattgtctttaaattaacactgttgtgtgtggtagtggtactacaaagacatctaccccatgagctgccttataaactccggggcaggggctggcgcgccatgtcatcctttctaggccgctgagatggcactcccaagcggctgacatgaaagcagcctcatacgccctgcgttcggggacccctccacccaccagggactcccaagcgttaccggaggaaagtggcgccccctacgcacaggaaccgtccctgggcccccgccccagcgcggagaccaccgtggacctccagggatggaaggccgctctggccccaagcggagcctctcgttggtagacgggctcgagggagtccctctgggcgcggcgccgccgagcggctcgatgctccgaccggaa

SEQ ID NO: 45972 - DNA, 474 bp, Mus musculus
  source 1..474: mol_type = other DNA
gaaactgaggatcagttaggatatttgcagtctctaagtttattcatgttgaacagatgaaccaggaaggaagaaaaaaattgtttcccccccccccgttgttgaaaaatgggtgaaaaattaaattcgttaattaaggcagtgctttttttggcaaacctctatctccaaaaatatttacattacaattcataagagtagaaaatttatagctacaaagtagcaacaaaaaataatttgggtcacagcatttcaattcaataaggttagggactttgacacacactttccttaagggaaatttaaattccattgtctttaaattaacactgttgtgtgtggtagtggtactacaaagacatctaccccatgagctgccttataaactccggggcaggggctggcgcgccatgtcatcctttctaggccgctgagatggcactcccaagcggctgacatgaaagcagcctcata

SEQ ID NO: 45973 - DNA, 426 bp, Mus musculus
  source 1..426: mol_type = other DNA
attacagtaaatcaccttaatttatagagacattccataagttgtgtgactctagagaacccagactgatacaagaaatgtcatggttcaataacagcattcatcatggttggttttaattgttactttggctggctaattattctagacaatgaatttatggttcaatcattctttgtatatggccctacttaaggcacaaacaagacaaagtaggacagggtctctgtatagactatgttgtcttcagaaaactgggattcaaatgtgagcctccattctaagttcaaatctctgtgatttggtcactgtcttttagagagagaacatcggcttaataaccagacacaagttctggtgggtatttccccgccggcctctgggggcgctgtgcgatccgcgctcactttacgccgccggttgcgg

SEQ ID NO: 45974 - DNA, 397 bp, Mus musculus
  source 1..397: mol_type = other DNA
ggcggcggcctctggcagcctctcgagtgtctcctgaaggggcgattactggcgctccccgggtgcctgtgtcaggaagtttccctttagaaggacctctctctgcagtctcaagagagtttataaatattcaactgggaatggttaaatggaatttattgccatccaaattagtcattcctgagttcgaggccagcctggtctacaaagtgagtccaggacagccaggaaagaaagaaagtttttctccatatttgcacactctccctgaggaaaagatgtcaagaagaatctaaaatccctgcttctttcttcacggaagcagctgggagccagcttggggtacatgagatatttgtggaacttgtgcacaggaacaaacccggccagctgtttt

SEQ ID NO: 45975 - DNA, 345 bp, Mus musculus
  source 1..345: mol_type = other DNA
ccacccccccattaaggagtgggcagcaggaatcctctccatcttcaaagctgcctaggcgagccagaagaggggaccacctctttgttcttttgaaaataaaaccgtttctgtttaacagcaaagccatttctgagttcgaggtcagcctggtctacagaatgcagaagttaattcataagtgtgaacaccacagtacaaatagtagaattaatgttacattttatctctattgtagctgatgtgggagccaacctcaggcccaggcctgttaagaggataaccaagcgacatttggttgtctggacatcgtgcgccggggccgtgacgcctgcgcactgtgcg

SEQ ID NO: 45976 - DNA, 430 bp, Mus musculus
  source 1..430: mol_type = other DNA
ctgcattctgtagaccaggctgacctcgaactcagaaatggctttgctgttaaacagaaacggttttattttcaaaagaacaaagaggtggtcccctcttctggctcgcctaggcagctttgaagatggagaggattcctgtttccctgcccactccttaatgggggggtgggggtggcagtttcttcccatttcctggaagatcagaatggctcagtccagagaacaattttccttgccccaggcccgattcttaagggcagggtagggcagggccggcagggcagggcagggcagagcaagccagaccttatcagctcccaggatggagctgtaacccttcctgccctctgatgtgagagaagggctggatgggaagagtgggcgggcccttcctcttcgcacccgccccggatggggggttggggag

SEQ ID NO: 45977 - DNA, 291 bp, Mus musculus
  source 1..291: mol_type = other DNA
tccgtttgggggctcccggccccctctcccggacagctgagacgtctggtctggggccagcccatgcaggctgagcatcctgagcctggtccccatgcctattcagtgagtagccttcacatggaccattcattccttggcattaatccctcggagggaacaataaagctttttttttccccttaacttcaggctacactggtgccactgacccctgcaatatatagtggggtgatggaccaatttcctgactcctggtccaggaaacaggcagcaggccttaagctcagc

SEQ ID NO: 45978 - DNA, 303 bp, Mus musculus
  source 1..303: mol_type = other DNA
ccaaaaccacaggcctggaccaccagttgctaagggtgggaagctttaaaagggagagctggcagcagagactgggggcagagctccggcagactgcaggcccatctaatgctttgattctgctgataactcgaactggccaggccttgggcaccttatctgaggagctggctgccaggacccccacacactgctcctgcgcagagtaggcttgtgagcatagactacaatcttattgtttgatatgcttggtactgctctgcaggaaagaaccctgtggaaagggcagggaggcacctgttg

SEQ ID NO: 45979 - DNA, 260 bp, Mus musculus
  source 1..260: mol_type = other DNA
gggtgacaggagacagaagttctcctggaagaagacagacttcctagcaagaagcagccgctgtcagctcctcactagacccacagacagggtttggaattcgagacccttgcgcagccaccaggtgctcaggtgagcggagagcaagttctactggcccacttccttcctggcactgcaggaggtaacaaacctgggctcccttttgctgacaaagtcagccctttgtttcggggggtggtgagtaggtcacactctac

SEQ ID NO: 45980 - DNA, 271 bp, Mus musculus
  source 1..271: mol_type = other DNA
agacaactccttcttttaaaaaaaaaaaattacatttcttcaagtaaaagacaactagtgggagtctgtcttactccatgtgagtcacggcactcagtcaggcttggctgcaagtctatagagctctcagatcacagagatctgggcttggcttctccaagttgccgagggcacacgaccggtctgcgggaactggcagtgacgcgaagcaggcctggaccggctccgccccaccggcagccggtaggcagcccccggctccaagatccgg

SEQ ID NO: 45981 - DNA, 343 bp, Mus musculus
  source 1..343: mol_type = other DNA
gaagaaagagactcttcttcacagcctgagttgaccttgaactcagatttccattgctgtagcagtcctacaacagtaatgtcagtggacaaagatcttgctgtcaagacaactgagttcgcactactggagtcgcagcgtgggccgcgcggggaaacccgtggggccacgctggtgggcgtgtctccgagtctctccccaagagacacgcgtgggccgctcccctctgggaggagggccacagaggagggcttcgggtgtctctggcggcccctcccggtgcggagccacgtggtgggcgcgggccgagccctccggggaaaacctgacccgtggggctgcg

SEQ ID NO: 45982 - DNA, 312 bp, Mus musculus
  source 1..312: mol_type = other DNA
accaggctggcctcccggctttatcaagggcttcttaaaaggaccctgaaggagatggcactgctccaggactttccattgtttccatggaggaaaaggccctggaacctgatagtcagtgggggtgagagggtatgccacccaggtaccctcccgaacttagattcctgggtgcaaggtaacctcattaggaaactgccctatctccacagggcggccattctttgggtccaacctggaaacggttcccctgcaagatgctaatcttagacatgcctttgtctggtttaaggtggacacacatactcatgt

SEQ ID NO: 45983 - DNA, 224 bp, Mus musculus
  source 1..224: mol_type = other DNA
cagtggttaagagcactgactgctcttcagagtggtggttcacaaccatctgatctgatgtgtttgaagacagctccagtgtactcatataaaataaataaattttcaaaaggtgagaacaggacctttctcagccctggctgtcctgcacagctgtggttttgaatggaaagcaagccaacaagttaccttttaggtaacttgttcctttaagtcaggccgga

SEQ ID NO: 45984 - DNA, 301 bp, Mus musculus
  source 1..301: mol_type = other DNA
atatcccggccatcactttcaaaacaatttattgattttatttactgctatataaaaacaaaatgaatgtgagtttgagaaaagtttgacattttaattttgtcaatcacctagagatttgaaatgtcactcttatcaccagattactatcatatttttattctggcttattcatgtaaaattgcttgccaccaaacctgaggacccaagtttgattgcagaggacagactctgtcctctagaaagcgtgaggctttatgatctaacctctttcagcttcaactgaccttttagaaggaaa

SEQ ID NO: 45985 - DNA, 414 bp, Mus musculus
  source 1..414: mol_type = other DNA
ctaaaataagtaccttttaatggaaacaagttggtcaaaactatctttcagaattttgtcagctgtcatgcataggctctctgcatttctgtgagctgaccaacttccgggtgtatgcccataatcacgcagaactgaagttcaggtctccacaaacccaaagggtgacacctaccgcctaagtggctgattcccacgtggtaaggagctcacaaactcgcccccacgtggactcagctgagttttcagcaggacattccgtcccttggtcgcggagggaggagcacaaagctctcagaacagccaactcagggaggtgtgcccagagctctcgaccccgccggaagtacagcgctcgcccggaggcctcagggtggcctagccagctggccattccttaattatgcatggagg

SEQ ID NO: 45986 - DNA, 622 bp, Mus musculus
  source 1..622: mol_type = other DNA
ctgcagctgaggtttctacagctgtggcgccgggttggcccttggagggttgccagggaaaccactggccagctgctttctctcacacatacagcaaccctccccaacattggggaaagggtagtagagaccctctaccccatagattcacccaggggcaatccactgatccagttggcccggtcctgcctgtgcccatcggggtagtgcgacaggggccctggtttaaacctccctccagggacttctgccctcggcctgagagctagaggacgcgggcctggtttcccggcgggagggcggtgggcgggccgcggagggggtgtcccaatctccaagaccaccgccggggtcccggagcctcgagggggtgtccagggcggctgggcgcgggctcggcctgcagcgggagcgcgcggcgcaggcccagccgagcgcgctcccgcgctccactgcgcgcagggggttccggggccccgcagggcggtcgcgcaggggcgcggagggaccttggggctggggagcgcgcgcgggcaggaaccaggaagcggggcgcgctcggggttacgggcgggcgcgcgtccccggagcctgagcgcgagagcggcgcgcgcccccgtgg

SEQ ID NO: 45987 - DNA, 435 bp, Mus musculus
  source 1..435: mol_type = other DNA
agcaggtctgctgcccggcaaagtctgcaggcagatgtgaagttagaaagtgccggctaccccttcctgcgcagctggtcacagtctgatgatgagactgtgatgtgaccacagtgaggtcctgggcaggccccttctcttctctggattgacgtttcttacctgcaaaggtcagcttacctgaacatgcgcgtgtacacacacacacacacaagattttattttatttatttatttttaacagatgataaaactgaggtggcagctgcccacccccggagccgcaggggagcacagaccgggagtcccagtgtgtgtgtagggagggggcaccccgctgtaggggctgtcctcagcccagcgccgcccagcctagtggtcggtcttgtaagcggggcgccctggcgcactcgccggggcgccggtaatcgaggg

SEQ ID NO: 45988 - DNA, 235 bp, Mus musculus
  source 1..235: mol_type = other DNA
tttacagcagtagctaattagtgacagcttgtgtgtgacaggtgtcactgtgagccctgagtcatggcatttagtcattaaaggaaccggtttcgtttgcttttatggatggttcatctattgattaacgctaacgatgagtcaaaacctccgtcagagtttctaaaataatgtgttaaaaataacacattgaagaaaataattggcttcctctcatgtgaatgtaatactcaat

SEQ ID NO: 45989 - DNA, 335 bp, Mus musculus
  source 1..335: mol_type = other DNA
ggtgttcagcaccatgaagaacctgccccagggaaaggtactgaagagatggggttccgtgatctccctgaatgctcacctaatagaacccaagggaagaacgagtccgacgctcacattcttagaattaaaaccccacaagatttgggggacaatgggggcagacccccaaatctttgaatttacacccaattcacgcgccatttggacctcagcttgatcttgccgcagcctccactgccaaggggggccctctgaacagggtggggcgcccagctcttgggttcccgggtggggccagccaatggccgacgggggtctaggagccgggcaac

SEQ ID NO: 45990 - DNA, 320 bp, Mus musculus
  source 1..320: mol_type = other DNA
ccaagcagataaaaattatcagtacaagttgcttttttttttttttttaaatcactctatcaatatttagaaaaggagctttaaaaaaaaaaggtaggtattattttgcattcaaaagatattagtaagcaagataaaaataattactttgtcaacatttccaatttggatagatactttgtaagtcgagatcctatgtctctaatataggacttatcatttctttcatgctgctttctccaagaaaaagttgtgaattgcccagatgacttccaaactgggcactgcggcagcgcttgcgtacgctggtcggcgactct

SEQ ID NO: 45991 - DNA, 227 bp, Mus musculus
  source 1..227: mol_type = other DNA
caccgcagacctgctgagttagacagctagccgtaggaagccctatggatgtaactccctagcctccccaggataggcttgtgtatagtgagtgcttactctttataaagacccaatccctttagtcaaagggaatgtcatttggttctataagcttcttcttttactagctgtgcagccaggaggaaaaggagctctcaggcagaccctgcatttgagatccccct

SEQ ID NO: 45992 - DNA, 370 bp, Mus musculus
  source 1..370: mol_type = other DNA
ccagcatcctggaagctaagaatgttatctgaagcctgcaactgattcccagattcattcaaaaaagtgttttgatatgtgttactataaaaacttcaaattatttccacattggaacagggcagctgtctccagcgctcatctcccgggagcactgggattgcagcctcccaatgctgggacagctttatgtggattctgccaattcaaatgaaactgagacttctctaatacacatttattaagcgcggtcagcagaccctgaccagtgtctgagtccggaaaccaggttctcgagccaaccttcaggtcacgtggcccgaggtcggcagccgattggatgctggcagccctgccccgcgggcccgga

SEQ ID NO: 45993 - DNA, 595 bp, Mus musculus
  source 1..595: mol_type = other DNA
tgctcatacggtctggagcctggagccctaacacctcgtaagtgccaggtgcgcatggcagctgtcatcccagcatttgggagagctcaagagcacgctggctaacgtgggcgaactctaggctcaattgagaccccacctaaatgactcctggtgtcaaccgtgggtccccaagatgcacacacacatgcaaatgtccctgcccacacacatacatatatatatatatatatatatatatatatatatatatatatacacacatgcatgctgcattcagggaccgtgggtttacatgccaacatagtgccacagacactgtataaacgttctgagaaattttaccacgtcatttttctctagtaacttctaataaaaattattttttaaattattttttcaacattcttttgtaaagatttgttttatgtgcaccacatgcatgcctggtggaggccaactcctagctggaattacaggcaggtgtgaccttttgatctcaaaattctttcatagctgtagagaatgtcaagactgctcggcattatcattaccacaacaggccagtctggctgtgcttatcctgtacacttca

SEQ ID NO: 45994 - DNA, 368 bp, Mus musculus
  source 1..368: mol_type = other DNA
gcgccccaccccacccccgggcctgggaggagacagggtatggagggaaacaaggtgctttcttccactccagacttggggcttaaagtaccatttattacattaaagtaaggtgcacatgcggaccagctccataaggagtctgaaggcagcctaaggtaggtatataagtatctagtatctacttggttatctcaaaaccaaacgaagtttctttgtaaaagcgttttcagtttgaacctaccgatctagctgctactacctatagagcttgtttgatcaactaaggtagttacaaacagcaccctttggtgctttgacccacaccaggctggggcaagccttccaaggaccaactcccttgccag

SEQ ID NO: 45995 - DNA, 344 bp, Mus musculus
  source 1..344: mol_type = other DNA
aacactgtgtgggctagtaagttctatgtaactgtgccaaatgtaagactaacacatgttttgatttgcaagaatcttgattccttaacaaattagttactttacaaggcggaccacagcacaagagtctcctctcctccaggaatctagaggctagtttaaagaattctatactcagaaaaccaatttcctgtgtgtgaaatggggagctttgccacctcctcctggcaaactggaagaagcgaaaagggctttgcagctctctggtgccagggtttcgctcagcccggaagcctctgccctcggccgccccgcctcgccccgccccaggagtctctcggcga

SEQ ID NO: 45996 - DNA, 446 bp, Mus musculus
  source 1..446: mol_type = other DNA
acataaatataactaataccttgcgggcatttgtcaattgttatgtagaccaggctggcctcgaactcagtaggttgaaggactgaaaaattaatactgtgcccttccactgagctgcaaggacagctgctctttgaccgtcagcagacctcagaaactagaaatatttatttcaggctcctccggactggccactgtggtcaggaatggaaagcacctgccaggtgtggcagctcataactggagacttcaagctttgtggcttgaggtgtcgagcgccccactcctgtggaggactgcggcgtggtagatgacccggctcccacactaaaggcagcactgcgggcccaggaggcggccgctgacctgtcactaaggccggggactgcgagggctacggggtcccggaaggtccgggtactcttgcctcctcaccggaaggaggc

SEQ ID NO: 45997 - DNA, 373 bp, Mus musculus
  source 1..373: mol_type = other DNA
gctaagctgtgcaggacacagagaagcttggaagtccgcctagcatgctggaatgagcgatccgctcacccagtaactgattgagtatgttatagactttactgtaagcttaacttaaaaggcatttttataagacttacagatcatgtgatgtaggagaagccaggcggaccagctgtgcgcgtgcgtacaaggtgtcacactgtttagcactcgggttctaccattttggaggtgctccattgcacagaaaatcgccaccattgaagattctcattcggaggccagtggggacccttaggggctgacattgcctaaactggagcggcgcaagcgcagcgctatcacaccgctcacgactacaagtggtggg

SEQ ID NO: 45998 - DNA, 472 bp, Mus musculus
  source 1..472: mol_type = other DNA
caggatgggtcaagtcctgaagcctcccaactcgctgccagtcccgccagggtcctggtcaagtcacttgggcagtgccctccgtggcgaactcttcattcggcacagtgggatttggccttgggactccctagtgtctaggccaatgactggacaggtgcgagggcctcttgcacctaaggaacctgggaggcagagggtctgggaggttcgctcactctgattgcgcgttgcagtctctcccgccagcaacaccgccgaccgctagcgcgctcgccggcaagacgcaggcgaatgggagctgggttctgcagatgaaatttcctgcgagttgcgcgtgcgcggctccgaatcgcgctcagcgccgggaacgcatttcgacgcagtgttctcctgatgaatgcgcaccggagcgtctgcgcatgcgcgcgtgggcgttccggcacttgccccgccccgcccccgccggccg

SEQ ID NO: 45999 - DNA, 339 bp, Mus musculus
  source 1..339: mol_type = other DNA
ctggacgtactttctaattacatttatttatttattccttgcaggtttgcatactccaagagtacgtggcagtaagggcctttatgcaaactttgtatttttcatagtgtaagaatatgaaaatagctgaatatatgtaaacacacatacatgtacacccacatatgttggcttaaatgtagcccctcaattttggggctggccaaatgttaccgtgcgcaagcgcacatagtgacaggaagcgtggcctcgctctgcgcctgtgctgaattccagctgcaattggatgggctctgccgcccgccggctgcggagaggcccacactgcacacgcgcaga

SEQ ID NO: 46000 - DNA, 221 bp, Mus musculus
  source 1..221: mol_type = other DNA
ttgctgcggagactcatcatgcggagctgaccaacgctgggtgtcagcctggaccccgcgcaagcgcatgccgaaagggcggggtagacaacctgccgttgggaaatacccccaattttataaataaaataaataaaaataaaaatgttttctgaaaacaaaacttgtgcaagaccatgcaagcattccttttcctttgacgggcaaggtgggatggaaac

SEQ ID NO: 46001 - DNA, 216 bp, Mus musculus
  source 1..216: mol_type = other DNA
tccgcccgtaaccgcgggaatcgccgctgagtcagcaacgcgctcgagtatgtgcgcgctcccactgtttttcatctcaaaagtggaggtggctaagatctaaatctggacccttttaactccaaggatggagctgcgggttttttaatttgctgcttggtgagccaagagttaaacaacgtagaccctaagagggaggcggggtctgggaactct

SEQ ID NO: 46002 - DNA, 557 bp, Mus musculus
  source 1..557: mol_type = other DNA
atggtctcgaagtgaaatcactttctctcgctaacaagaggcaccccggcttactgcgagcgacacgggatggtaccagattctctggcccctgcgagcacccggggtgccaaagcctggaggcagggggtgtctcaccagaacgccgcgttcagccccaggcaccacagggcgctcctggccggccgctcccacaccagggctgcctgcacccggctcagcagaggctcgtaagggcccagcacctccaccagggtccgctgcgccgcctcaacctgctggtcgcgctcccaggagccggacatagctcggcggcccctgaaccccgaagctggacccggggccgcggccaccccttcgggccacggccccggccggcgggggcggggcggggcaagtgccggaacgcccacgcgcgcatgcgcagacgctccggtgcgcattcatcaggagaacactgcgtcgaaatgcgttcccggcgctgagcgcgattcggagccgcgcacgcgcaactcgcaggaaatttcatctgcagaacccagctcccattcgcctgc

SEQ ID NO: 46003 - DNA, 221 bp, Mus musculus
  source 1..221: mol_type = other DNA
ggtgctagatgacagaggcctgctgtcaggcagggaacacagccacagagtttccatcccaccttgcccgtcaaaggaaaaggaatgcttgcatggtcttgcacaagttttgttttcagaaaacatttttatttttatttattttatttataaaattgggggtatttcccaacggcaggttgtctaccccgccctttcggcatgcgcttgcgcggggtcca

SEQ ID NO: 46004 - DNA, 333 bp, Mus musculus
  source 1..333: mol_type = other DNA
gaggccagcctggtctacaaaattcaggacagaataaataaataataaaatattttgaaaaaaagaacctgttcgtttctgaattaagtatcttgtggagaggtttaaaaaatattctgtgtctgaagacagctacagtgtacttacatataataaataaataaataaatattaaaacaatattgctgtcttccaaaatttgactttaagttctaaacacataaagtcttcaagaagagatctgtggctccaggatgacttttcgatccaccctcagagtgcgcacgcgcacggaggggaggcgcggggcgtggccgcggcgcaggggcgtgg

SEQ ID NO: 46005 - DNA, 240 bp, Mus musculus
  source 1..240: mol_type = other DNA
caattctttaaaggtgagcatctcctagcacacagctcagcagtggaagtactgttgggagaaacagagagctaaacgttagttttgattctttgaaaaaagcaataagttttgattctttgaaagaaacgcagcagattggtgacaagaaccgttcccatcccactgcggcgcctcccgagaggagtccggaacctttctgctgtgctgtcagcccggacatgctgaggcggagaccgg

SEQ ID NO: 46006 - DNA, 328 bp, Mus musculus
  source 1..328: mol_type = other DNA
aaagaagaatcctttggccttctacccatgatggtcctttctggccagggccaggctcaggcttgactggagtatacccaacccatctactcctgattaggacttggtagtgctgccttatcagctggtggtgcccctccccctcgctgaggcataggagcggcggcctctcctggtgcgggagcttacctcagctcttgccggcagcagtcgagatgaggggcagtaccccagctccacactgcaactcgccaggctcacaaggggtggccctggggggaccggagccgggggcgggtcgcggggcaggccagtcgggggctggggc

SEQ ID NO: 46007 - DNA, 262 bp, Mus musculus
  source 1..262: mol_type = other DNA
atggcagctcacagctgtagtttcaggtgattggataccctcatatttaaaaggggggggactccccatgatttaatccccatctgggcagtgagactttgtctttaaaaataaaaataaaaaaaatccgggtctccctgaagctgcccgtccgtcccgcagcctccttcacggctgttctgctgggccaagtgaagcagggcgctttcggagtacttggacagtttacgggatccatatcgaatctctagggcggagagac

SEQ ID NO: 46008 - DNA, 505 bp, Mus musculus
  source 1..505: mol_type = other DNA
aggagattcctccagagcaggagaacttttcagttcaagttgcctcctcctctataaaataggtgacttggggctgaggttccaggagcagcagcagcagcaacagcaaccacgaaacaaagaatttacattgaagggggtttatttagactttaactcctcccggacacatcagtgggaaagtggggcgggcgcagctcttgacgcgcctcagatacccaggcatcggaggcctttggagctcccaactgcctccttcttccccaggtctgggacggcagctggtccccacccctccggtgcgagaaggagtggggtacagggggagctgtccagccccgcagcccgagctggaagcgagagtgggccagggcgctccgggccgagcgaggcgcgggtgcggcagtgactccccctgcagcccgccccccacgtggccgccgccgtgccagcccctccgaggaagcggcgcagcttcctgcggctcgggccggggatataggcg

SEQ ID NO: 46009 - DNA, 315 bp, Mus musculus
  source 1..315: mol_type = other DNA
ggcagcggccaaatgcatcgtgaagcgggttcaggaaaccacaaagcacatgggctcccaaattaatgattttggttattactaagccaatacgcgctgcgtatatatagtaaggggccccgatgcccaggccggtcatgatgttccgggtccgccgctgtggcagtgttttctgccactgggcaagttgcacctgccgcataaactgcaactgcgctggggtcaatttctcccgcgacgggtcgatgcgctgagcgaatggagcatgggtcaccagctccaggggccgccatgttgctggtctctccgccctag

SEQ ID NO: 46010 - DNA, 357 bp, Mus musculus
  source 1..357: mol_type = other DNA
ttctgagtttgaggccaggcctggtctacaacgagaaaaaggaagtggctaaagttatttaatttttaaaaaatgtgtctgctagaaccatttgattgcatggaataacaggaaaatggtaacctttttcctctagaactgggaggatttgattctagtcaagtcattggaagcaacgtgttgtgtcttagataagccacgaggctccccggaaagcccggtgcaatggaacgcgttaaactagggacccgggccgcgggcttctccggctcatcttgtgcctccaggaacctgtactgagtatcagagcggctgcgcagggcacgtgctcatcctccccggagtgccggcgtgacg

SEQ ID NO: 46011 - DNA, 370 bp, Mus musculus
  source 1..370: mol_type = other DNA
gagaggccttggatatgattccagatacacacatatctctctctctctctctctcacacacacacacacacacaaatgcattggtgttttgcatacatggataatccttttatttatttacattttgttatatacatacataatacacacatacacatatatacatacatataactatcacctttaatgtatttgcattttattatatacacatatacaaacatatatacatacatacacacatacacatacatacatacatatataatcacagcccttagggcttggtctacagggcgagttccaggtcaaccagggtggctcagcaggggtccttgcgtcagctcccgtcgtgacgtcacttctggtc

SEQ ID NO: 46012 - DNA, 388 bp, Mus musculus
  source 1..388: mol_type = other DNA
aatcatttctaatgagatctgatgtcctcttctggagtgtctgaagacaactacagtctacttatttggcagtggtgaggccttcttctgagttcgaggccagcctggtctacagagtgagtcaggacagccagggctatacagagaaaccctgtgtaagctacagtgtactcatatacataaaataaaaataaatcttttaaaaaaatccacttatttaagttcagaaattatcataaatcataggtttctgagttaaatttcttcccttcagtttaaaaaagttacatgatgaaatattatgggtattggttttaagtaaaatattaacatatggtggtcttccagactctaacacctacagttggcagttttagtaaatttgctg

SEQ ID NO: 46013 - DNA, 535 bp, Mus musculus
  source 1..535: mol_type = other DNA
tagtgtctgtgatcgctgacctcagagtctatacacacatgtgtacacactagatgaaaaaacattttaaatcttttaaaatgttttttttaaatatttttatctactgagtcagttacagacatttgtcatgtggtgaaactgacaggtcctcttgaagaccatccagcccagggaaaaaaacatttttaaaggattgttttcttgccctaagaagtataaaactcaatataggtggaccccagatccacgtgaacttggtgaaagctgctgtgtattttgtatattttaaattaataacttaaaaggtcacttcctttgtcttcaaatagatataattgcagacttcttgcaagagtcatggttgaaacagactctgccctgggcctctggcctggcttcaaggaccaggaaggagggcagaataattggcctgcatcaacctactgatgatgcacctttgatcaatagattttagacaaaagtggttttttgagtccaaagatcagggctggattgacctacagactgaatc

SEQ ID NO: 46014 - DNA, 94 bp, Mus musculus
  source 1..94: mol_type = other DNA
gaacttgctatgagttcaaggctggctttgaaatgataatttataaaaaatgttttggaatactcaaacgccaaggaatctttctttgattctc

SEQ ID NO: 46015 - DNA, 344 bp, Mus musculus
  source 1..344: mol_type = other DNA
tgaacacgacgcggtggtcctcaatgagcacactgacgtcggtgctgtcctcagggcaggcccaccccctctcacccacagtcacagagacgtggagtctggggtgctggtggcggcctgaaactcaccgttccatggtgactccagcttttggagtcccaactttagattctaggaggctcctagcagctgcctctccttatatggtaggattctacatctcggggtctccagcattaaagtcccgagggggcgggccctcccgagattggaggagtgcaagacccgcccaccactcgtccaggcttccctgccagagcccgttgccatggcagcaagggggc

SEQ ID NO: 46016 - DNA, 179 bp, Mus musculus
  source 1..179: mol_type = other DNA
gagacctctacacaggccccctttacatgtaatcaagtccctgtattgcattgattctggcctgggcaagtttccaggagggtgggaaagcccacagcagattcttgcctgaggcaggaaatcctgtacagaaaagctgggccaacctgcctggacggaagttcccaagggtaaccctg

SEQ ID NO: 46017 - DNA, 357 bp, Mus musculus
  source 1..357: mol_type = other DNA
aaacttccagcttccagacgttcaaagtttgtaaggggtgtactgaagaacgcactggtcagtcagaaggccccgttcagagaaccccgttattaaccaggatggcagagcagtctgaaaacactgtcaggacatcccacggggcattaatttcaatttccatggattccaattcacttcccgggtctgccagcccctcgagctcgcgcaggagacgctgctgctccgccggcgccccgcgcactacctggcgcagacggaactgcacctgcgcgaagtgcgaggacagcgcgagcagggccgaatccagctgccgccgctcggcttccagccgcctcagcgtgcggacagtcgcgt

SEQ ID NO: 46018 - DNA, 427 bp, Mus musculus
  source 1..427: mol_type = other DNA
ggtctcaaaacaaacaaaactcttctttaagtcgaagatgttcattttaatgttatctcgttttgaataaccgtgtaaaggtacacccaaaactgttaagtttaagttagagatgtaactcgggagtagagctacattcatgaggctctggcaccttctaggctccaggccagacctggctacatggtgagaccctctgagttcgaggccagcctggtctacaaagtgagttccaggacagccagggcttagtgaataaagtctgcttattagtaaacggtagagttcaacctgaggcacaatttcaccggagtctgatccacaggtggctagattataaattcagattttaaattatccttcagactgtgtcaacaacttttaattcgtataaggctttctacgaataaatcaagtcttagactgg

SEQ ID NO: 46019 - DNA, 267 bp, Mus musculus
  source 1..267: mol_type = other DNA
gtttcggagttccaggccagcctggtctacaagacaggtgtacttacacataataaataaatcttttttaaaagaaaaaggttaccaatgtactcaacagctgaaccctttatattttggtcacagagatccctgcctctttgaacgctggcatcaaagatgtgcctctctgcatagccctgctgtcctggactactttgtagaccaggttggcccagctagagctgcagtactgagagcctgtctgtctggaagtcttaaacccaa

SEQ ID NO: 46020 - DNA, 383 bp, Mus musculus
  source 1..383: mol_type = other DNA
aaaatctaaatctcaacatatatgtgtgtatatatatatatatatatatatatatatatatatatacaaatatataatatatattttaatttaaaaatatattttaaaagctaggagtaccacatgcttattgtagtcaatatctgacaatgttggagataaggatactgtctgatcttttcattttgtttcttatggataataattttaaattatttaaattaaaataaattgtaatttatttacctatggaagacagagtctatgtaacctattgtctcagcccctcaaacgatgggattaaactgtgaatttcagactctgtcctcctcctagtggcagagtagaaccggaacgctctgttcctccgtggggcatggctg

SEQ ID NO: 46021 - DNA, 281 bp, Mus musculus
  source 1..281: mol_type = other DNA
ggtcactgacattggcggactagttacccgagaatcgcggggctggacgggaattgtagtcttcccttttagtctattttctgtgcacaaaacacgaacacagaacgctgcgattcatagcagctaagacgcataactgcgaggaggtgctgtggagaaggcctttcgttccgcaatgcatgcttccagggactttctcttccgtctctttctagtgacgacatacaggaaaaaaaaatccgaaaggctagcgctaggcgccaagcggccggtttccttgg

SEQ ID NO: 46022 - DNA, 437 bp, Mus musculus
  source 1..437: mol_type = other DNA
tcatgagtgctaagactgaaggcgtgctttcacttatgtatgcatgtatgtatgtatgtgtatttatttgttcattcattcattcattcattcactttggggcttagctctggcccagcttagctgtcgtacttggctagaggaacttagtccatgcttctaggttggtcaggtccgtacttccatttccctaagctctgtctggacccgagtgccgccgcgcgtgtccgccgcactagcacacctgcgtgcacgcgtgggcacacagaaggctcaggccttgcgcccccctcaggcgctcctggggtcacagctgcgcgctagagtctaaccgccccgtcccgaaccccgcccctcggctgtgcgggtgggaggcggggccagaggtgcggcccgcgggctaggggcggggcggagggggcccgcagccccgggcg

SEQ ID NO: 46023 - DNA, 202 bp, Mus musculus
  source 1..202: mol_type = other DNA
attttaaaagacacttaaaaccttcccaagagtcctgtttgaaaacgtctgggattctccgagaagagaggtgctggatcctctggctgcacgggcagcggccgcgcagccgcccaaggaaaccggccgcttggcgcctagcgctagcctttcggatttttttttcctgtatgtcgtcactagaaagagacggaagagaaag

SEQ ID NO: 46024 - DNA, 556 bp, Mus musculus
  source 1..556: mol_type = other DNA
gttaacccacagcacccactgagcagtgtctgtcaaagtaattttgcataaattttatttaaggagaatccagaaagggaaagttagtagtcgtccttttactgactgtcacagtggattggaaggacaagcatgtgtttccgtggaatccccttgtgaggtatccagccctaaagattttattcatgtttgagaaaaggtatctgaactccagctcaaaggggatagttaaaatagtattatttaacttagttggtatttataataaatggcgatcttaattactcataatatgtttatttacaatctaactcttgaatgcttctaaataaaccacaattcaaaaaccaagctgtttattgtttattggagggacctgtccatctaccgttgtacttgcacgtagcaacttaaaagaattgtgaatacgtgttatttgaaactcgtacctgaactagtttcctgtgagactcgcagagccggaagtgtcttccagtggcctctcggcggggcgggagcgaggggcggggccgagcccggcttggactccgagctt

SEQ ID NO: 46025 - DNA, 281 bp, Mus musculus
  source 1..281: mol_type = other DNA
ccaaggaaaccggccgcttggcgcctagcgctagcctttcggatttttttttcctgtatgtcgtcactagaaagagacggaagagaaagtccctggaagcatgcattgcggaacgaaaggccttctccacagcacctcctcgcagttatgcgtcttagctgctatgaatcgcagcgttctgtgttcgtgttttgtgcacagaaaatagactaaaagggaagactacaattcccgtccagccccgcgattctcgggtaactagtccgccaatgtcagtgacc

SEQ ID NO: 46026 - DNA, 220 bp, Mus musculus
  source 1..220: mol_type = other DNA
tgcgccccggttgcgctctacagcgcagaagcggaaaaagcacgagctttcggcgcggcttttcgtggcgtcttatcagtttaatatctgatacgtcctctatccgaggacaatatattaaatggagagcttgctccgtccactccacgacctggtatgcagtacctccaggaacggtgcaccccctctggggatggaatcgttaagctccgccctttac

SEQ ID NO: 46027 - DNA, 288 bp, Mus musculus
  source 1..288: mol_type = other DNA
tactaaaaactcaacatttttaaactttctggtagaagataatccagaactatgttataccctttctggctgtctttcctatgtagaacatacataggaatttgaattcacagagatctgcttttgaagaccaggtctctcagagaaacctgggctggctgctctgaaggaagatcgtgaattcaaggtcttccttggctacacttctcttcttcacccttcaaaataaaaaattaaaaaccagatgtggtacacatcatcagaggcagtctcactacgtcctgagat

SEQ ID NO: 46028 - DNA, 162 bp, Mus musculus
  source 1..162: mol_type = other DNA
ctggcaccagtatctagaatcaattgtccaatgagtaacccataccttggtcatgtctccttggaaaaggtggaactctcctcctaggagctaacacttgtagtaagttctaggagccttccaattccggctccgtagtcgttgacttgattggattcctcg

SEQ ID NO: 46029 - DNA, 324 bp, Mus musculus
  source 1..324: mol_type = other DNA
aggcatgcactaccactgcctggtttcatgcctttaatcttaaaggcagaggaccctagtctacataagggttatatagaaagaccctgtcatcccttgaagcaatggctcagtggttaagaaaccacatggtggctcacaaccatctgtaaggggatccctatatacattaaatgggcttagtattatgaatcagctgtatcagagctctatgagtgaatctcttcgagctctgttccaaatactccatttccaggctggggctgcagaggctggctcagtccccgcctccgggacgctgattgggccgcgtcgtgtgacgtc

SEQ ID NO: 46030 - DNA, 454 bp, Mus musculus
  source 1..454: mol_type = other DNA
agagaggttctcactgtgtaactttggctgacttcagtctcagagaacagcttgtttctgccctccgagtgcttcaattaaaggagaagccaacagtagcagagggggctcattttctattttcttgttttttacacagaatactaagacactgaatttatgacctcaggttcacaaataagctttgctggaccagataagcagccagaatctagcgtctgctggtgtaaggtcacttgagatcacttgccatgaggtcaggaactgagctgatcaaggacaagccaacttgcttttccctctgctgacggatcacagaggcgcgcaggcgggtggagtcttcccccccgctagagacagcgtaactcagtgcgtctgggattcctgccagaaactttacttgacgtccctgtaaacgacccggaagtggaagctgtggcttcgcgttctggcc

SEQ ID NO: 46031 - DNA, 479 bp, Mus musculus
  source 1..479: mol_type = other DNA
cacagaggcgtgagctaacgccagcggaaggagctcaggggtccttaacccgtggagaagctgccgggtcttcagcttccgtctttttttctcaattctttatgaatgaactaaagccgaaaggagtttatttttttatgccagcccctccctcaagctcagctagccgagtctgaggattggcgggggctcacaactgtctgctgcgcccggaaaacaagccggggctctggggacccggggctcaggccgcctcgctccggcctagcccccgggcatgctgagcatccccccgcggctccggcacagacgcccggacctcaggtgaagctgcggaaggggaaggaagggagagtgtctgtgatttccccgcttcacggcgcccgcttccgcacattccggggcgggggtgggaggcggcgtgcgaatggtgtgcgccgcgcgcgcgcgcccacataccccagctcaagggagcaggt

SEQ ID NO: 46032 - DNA, 427 bp, Mus musculus
  source 1..427: mol_type = other DNA
cacacacacacacacacagagagagagagagggggggggagaggttacttttaattctccctcccttttctgttcccccagggagaggtagagagattttggtggattctggattcgactgaaggcttttctaaatccaagacttggggaattttgttaacaaggcaataaaaataactttattgtgttaccaggaggctcaaaaaaagtgtgtgtgtgtgtgtgcgagagcacatttacgcgcgcgctctctctctccttaaaaaaaataaaacagacaatgtttctttaaaagtcctagacaggtgtggacacgcacatgtgtgttcctggccacgtcaaaattttttaaagtttccattcaacattttcctctactgtttaattttttttttaattttaaattacaaaactctgactagaaaaa

SEQ ID NO: 46033 - DNA, 274 bp, Mus musculus
  source 1..274: mol_type = other DNA
ttctgcttcctatcataaggagtaagaaccaactgtgtacctcaggtgaggttcttccattttcatttgtaaagtaaaatggaaaccgcacagaggcgtgagctaacgccagcggaaggagctcaggggtccttaacccgtggagaagctgccgggtcttcagcttccgtctttttttctcaattctttatgaatgaactaaagccgaaaggagtttatttttttatgccagcccctccctcaagctcagctagccgagtctgaggattggcgg

SEQ ID NO: 46034 - DNA, 427 bp, Mus musculus
  source 1..427: mol_type = other DNA
ggaccctgggttcctgcctccaaatgcctccagggtcaaggactcagaggctctcttgagaagagctctgtggtctcactgagaaggtgagaacggccatttagacaaagagaacctttttctttttctggcacacacacacacacacagagagagagagagggggggggagaggttacttttaattctccctcccttttctgttcccccagggagaggtagagagattttggtggattctggattcgactgaaggcttttctaaatccaagacttggggaattttgttaacaaggcaataaaaataactttattgtgttaccaggaggctcaaaaaaagtgtgtgtgtgtgtgtgcgagagcacatttacgcgcgcgctctctctctccttaaaaaaaataaaacagacaatgtttctttaaaagt

SEQ ID NO: 46035 - DNA, 254 bp, Mus musculus
  source 1..254: mol_type = other DNA
agactgtgtgtgtctttatctccctagagagaaagaaaaggttaaagaaaagcctttgctggaaaaggcacatcttgtttcttgagacagggtctctcactgattactaatttctggccaggagctttaagatctgccttccaggtgctggaaatacatccatgtgctgggaattgaacttcagtgagctcatatttaaatgacaccttggtggccatggtaacagtggtagcggagtgaccaatggcccacct

SEQ ID NO: 46036 - DNA, 421 bp, Mus musculus
  source 1..421: mol_type = other DNA
taatgagggaaatgattttttgctaagaaatgaaattctgaatcacatgtaatggagccccaatgggattcctttaaaggcatccttcccaggagcgtgagaccaccccccaaaaaggcatccttctgcctctgggtgggtgtaacaaatgaccttggctagaggaatttggtcaagctggattccgcctttgaggggcccagggagccagcccgtgggaggtactgggagagctggctgtgtccctgcctcaccaacctcctcgggtcacctgggaggtgccagcagcagaagtcttgggagggctgacgctaagcacaccccttctccaccccccccaccccacccccgtgaggaggagggtgaggaaacatgggaccagccctgctccagcccgtccttattggctggcatgaggcag

SEQ ID NO: 46037 - DNA, 373 bp, Mus musculus
  source 1..373: mol_type = other DNA
tcactgggggcctgcgccctgggctgtgggctctgggctagctccacaggttcctttacagctgttcctggggtagctgccatctcactgtgagccacatggtgtcagtagcgagtggaaaatggcccggtccgtattgcgagcctgttttcccagaaaaacttatggtttcaactgtgacttcttagctcatagctcaaacggcagaatgagagttagagtcccaccccaacctccctttgtgagcctctgcctgtgccaggcagggaagggatatcatgcctttcttttctccatatataaattttagaaaacttttagaaagtgcccgtcataactgggtaactatgacaccttgtcatggggagaagtg

SEQ ID NO: 46038 - DNA, 541 bp, Mus musculus
  source 1..541: mol_type = other DNA
attctttactgaagtcagaaatgtttgagactttacgatataatatatatactatatgtagtgagtggatccaagtctaaacatgaaatccattaatgcgtcacatataaatatatcctgaatacagttttgtacagtaatttttagtgtgcgactgtcacaggtcaggtgtgagaattctccatttatattgtgtttacactcaaaagttacagattcgcctttaaaaagttcaatgctgattcacatcaaacattaaaagaagtgttccagaatagggctctttcctgtaaccttgggtaaggatccatctgctggtgtgcagcgagaagggttcacagcaaaccccaggggtcattgggttcagtaaatgaagtgcctgcgctccactgcctcggccaggaacgtgccccggggtcctgcggcgcttggccagtcgcgcgtgtcctcgtgaccgcagcttcccgcacccagtgggcccgcctccggggcgggacggggcggctcccggttgggcagccccgccccgctgacccggctt

SEQ ID NO: 46039 - DNA, 285 bp, Mus musculus
  source 1..285: mol_type = other DNA
tttccaggatcttagaagctccgctccccaccgagcgcctattccatagggtagcggaggggttagggggcaaggaaggccccggcttgcacagactgaatgcgggctagcggggccggacgccgtcactacagactgtttcttctgttttcttaacttgcttttccaaaactgtgttaggaaaggacaggactggtacgctggactaagcggtcccgttaaggggggtgatcccatcggtgggctttgcggtgcctgttaaccaccacttccccgcccgacgta

SEQ ID NO: 46040 - DNA, 418 bp, Mus musculus
  source 1..418: mol_type = other DNA
cctataaagttgctttctgaaaatataattttaaatttttaataaactaaaaatagagtgtacaggttgtttttccaggaccctcaggagatccagtgccctcttctggcctctgtgagaactgcgtacacagggtgcacagaaatgaaaataataagcttaaattaagatgctaaaaatagggatatagtttaaaatatattatcagtgatttactaattaacaaataagcttccatatttagtactttaatactaaaaactaataatttcccaaatagtgaagtatttggggatatcagcaatgaacctctgagaattatttatttatttatttatttattttgagacagtggaactcactctgaagaccaggctggcctcgagagctgagctcgctggctccagcccggcagaag

SEQ ID NO: 46041 - DNA, 355 bp, Mus musculus
  source 1..355: mol_type = other DNA
ctgtcctgagagcagaacatcgggagagagagaggcccttgctcccttcacagagccagtgactgctcaagtggcttctcctgtcacgaaggctgaccctgagtcttggacaagcgcactcccctgggacagagctctgtgctgggaaaggaaacagctgccaggaactgtcccttccccaagaggatgtgagacatccccttgatctagctggattgaaggcccgaattccatccctcatggtaggggtaaagcctagcttcagcaccccaaggaaagcctattggcgactgggatacggacccccatgagaccttgtcatggttggccacagtgcccgtgtttcagaaaccag

SEQ ID NO: 46042 - DNA, 392 bp, Mus musculus
  source 1..392: mol_type = other DNA
tgctgccctcttacagcctgcctgttcactgcaagctgcaagtttctttaactgaagcgaggaaatacacccaggcaggcagcatccagctgccttcttcccatccccagggcagcgtgcaccgataaatctttcgcagcacgtagcattgttgccacgggttggccgggctgctgcccgctgcacacccctctcccagcccctggcacagtgcctggcacttgcggggctctcaatcaatgttatctcggcggagcaggtgtccaccgggagccgggggcgctgggcggggcctgcgaggggggcctgcggggccgcgctccacccctccgggcccgcgctgcgcccccgcccgtgcgcgctgccccgaccccgcgcgccgcgacagggag

SEQ ID NO: 46043 - DNA, 313 bp, Mus musculus
  source 1..313: mol_type = other DNA
accatgccttcaatctcagcacttggaggcaaaggcaggcagatctctgagttcaaccctgttccttaaaagaaaaagagcagggttccttagcttaggctggccttgaattgcttataaagtcaaggatgaccttgagcctgatccttctgattcctccatgtggaggacattcccaaatgtggccaggcctgcctcccggacctccaaggaactgagagtacacaagtcctgcttgcggactttggcgctttctaaatccagcattttggtagcagatcaaagagaggcgccaccctctggtctgtgactt

SEQ ID NO: 46044 - DNA, 514 bp, Mus musculus
  source 1..514: mol_type = other DNA
tttcccaagtatgtatatatgtatgtatgtatgcatgcatgtatgtatgtatgtatgtttctacctatgtcgtaagaatggatatgtgctctgttactgagcaacattccagagctacttagatcctatatgtcatgcatgtatgcattacctcacttaccttaggaggcaaacgttattatctgataattgttacaatcaaaaccatggctttgccagttttgtgaccctgacaattttaagacttcctgtctaaaatgacagatgctcactaagtagtactaagtagtatttagatcccaccgaagaaacataagtttgctaatttgcttacggtatttggtaaatggcctcagattctaatttgcttagccctctaatcgactactttataattggttataatcattttgagtgacaaatgaggataatattttatagagttcattcattaaacgtttttgccaggccacgcccctgcgcatgacgtcagcacgcctcgcgcgtcgcgtcg

SEQ ID NO: 46045 - DNA, 507 bp, Mus musculus
  source 1..507: mol_type = other DNA
agaggcgccaccctctggtctgtgacttcgagtctgatccagcccagatcagcgcatggcgacggcgtgggtggccacagccctgcggtctgctgcagcggccagaaggttgcgcagcccgggaggtcctgggggctcacggagactgagtggcagcgcgcggcggcgcggggcaaagagcgccagcccgggacgccggctcagcaccgccagggctcacgcagaggacgccgagggcgctaaggtcgaggagccgtcgtggacaccgcttccaacgccccgcctcccgccggcagatcactggtgcagcgggacatccaggccttcctgaaccagtgtggtgccagcccgggggaagcacgccactggcccgtcatggaggtaagccgatcccggtgtcgtcgtgtcactgtcatgagatggtgactgtctcagcaggctgggaagcccgggcctccgtcggctgagctcctccccccaaggtgtcccagagtccaaggccgctgg

SEQ ID NO: 46046 - DNA, 273 bp, Mus musculus
  source 1..273: mol_type = other DNA
caagggtagtgcatgcttttagccttaaattccagcactccggaggcaaaggcaggaggatctcttgagtttgtttctcgcacataacataatcccttctctccaaatggtccagatttgagaaaaatgggaacaaggaaccgggacacagagctggttcccaggttcatcggtcccctgacccggaacagcagcgggtttctgcactacgctggcagcccacgtgctagcaacagcggccacgtggggccttgaggaaacgccttcgcaaag

SEQ ID NO: 46047 - DNA, 450 bp, Mus musculus
  source 1..450: mol_type = other DNA
gtgatgaggtgcccatctcacacaaccatctatgataggatctgatgcccctttctgtcatgcaggcatacatgtaaatagaatattcatatacataaataaacaggctcagcacttaagagcactgacttccagaggtcctgagttgatatacaaccaactgtaatgagatctgatgccctgatggtgtgttaaaataaataaaaattcttaaaaaaataaacaagtggtctatattttgtttttaatgttcacgtacaccggtatgccagaagagggcatcagatccctttaaagacggttgtaaaccaccttcctaaacaaatcttttctttttaaagggaaagaaagggcaaattgactctgagttctcttcggagcgttcagaaaggctgacaagagctttgtttcccgacgaaaagaaaaacagtcagggaccggaagttgcct

SEQ ID NO: 46048 - DNA, 557 bp, Mus musculus
  source 1..557: mol_type = other DNA
atggatggcccttgtgcaggaattgatgtgttacgcagcacaaaatccatgctaaataatcatttatggtccctcgtgggccccagactgtgtcaccttggcatcagttgcaaaagacagctatgtcctgaaggtccagctgatgaagctgcttctgcaatccctgtctctctttcaatggagaaaggacacaatggaatgtctgtccagtgaagcctcatccttacaatgtcataaccaggttgggactgaagcacacagggctgcttccagaaaggagctatcccaggttgcacaggctggaggaacggcatttcccatctccatcccatcctatgaacaggctaaggaagatgggttagtctagatccaaactctagattgcgggtgaacaccggattcaggcaaggcaccctttccagaaggaccccagtccgaagatgggactgccccctcagcttctgctgaggtggagagacagcacgtactggctggggtggagggagggaggagacaagccctcccctgctggctcccctccctccaagtgggatagc

SEQ ID NO: 46049 - DNA, 354 bp, Mus musculus
  source 1..354: mol_type = other DNA
ggtagtgcatgcttttagccttaaattccagcactccggaggcaaaggcaggaggatctcttgagtttgtttctcgcacataacataatcccttctctccaaatggtccagatttgagaaaaatgggaacaaggaaccgggacacagagctggttcccaggttcatcggtcccctgacccggaacagcagcgggtttctgcactacgctggcagcccacgtgctagcaacagcggccacgtggggccttgaggaaacgccttcgcaaaggtttgtcccctccgctgtccagtagagaggaagaccagctacggctccaactcgcgcgtgtcagggactgcgacccccggcgggt

SEQ ID NO: 46050 - DNA, 217 bp, Mus musculus
  source 1..217: mol_type = other DNA
atgtgcaaagcatcatgtgtttgtacacatgtgccttgttctagtcatatttctatggctcagacggctactgtgctctgaggaaaagacacaccccattggaatggtgttgaacatttgcttagcacgtgcccctcctcattcaccagaggatgatggcgcatgagggttctggtgaggatgaagtcactctcaaatattggtgccttccctttaa

SEQ ID NO: 46051 - DNA, 239 bp, Mus musculus
  source 1..239: mol_type = other DNA
ccgtgcccagtttcagcactaccctctagggtacttatctaaagtgtggcccaaactttgagtcagttttacctttttaagacttaaattccacccaggtctttaatcccagcattcctgaggcaaagagtctgtcctgtaagtctctatccatctcaggtgctgaactgaaattctgtattacaacactgactggtcatatcgaggctgcaggaccctggccctgttgaccaacaaaa

SEQ ID NO: 46052 - DNA, 453 bp, Mus musculus
  source 1..453: mol_type = other DNA
ttgagcatctgtatgataacttactaaatagatgtctcctagtttatttgcagatacctacctgatggatatttatttaggttgtttctgacatctcatataacaaacaatctcttcctatactcattttggagcacaatattttcttagaatacattttttgctaggaaaattgctaggtcattgacaaaacaatgtaggtttaatgatacagtcagccagggacaacaagccaagctaatcttatgcgcctgcaggggcttccacttccaaggccccctctaccctccccctaacgagggaagggcgtgttaggtccagcccctgcagcagccggggtccgggttgaagagatcgggatccctccaccccagcctaaccttgggctggggtcccgcccatctgaggggagggccctgagcctatttttagctcggtcgggtcacgtgacga

SEQ ID NO: 46053 - DNA, 406 bp, Mus musculus
  source 1..406: mol_type = other DNA
ttaagagcacttgttcttcttgccagaagacctgagttctctccccagcactcaaagaaaaaaaatcctttcttaagaaggcactctatttgttctctgtatagccctggctgtcagacccggctggcctcgaactcagaaatttaaaatgccttcccgcttcatttattaaagctatacgaggtagaaatcttcaagtacttaagactttaatttgcgaagcagtaatgaatctcattagctctggagctagagaaccctccaggaggtccgaggccacgcctaatgggcgtggtcttactgccggaggtccgaaatcccgccattttatttaaagattacgtttacgtcagtccgccttacgtaggcggggaggcgggacttcctgtcctggatgttaacagct

SEQ ID NO: 46054 - DNA, 453 bp, Mus musculus; identical to SEQ ID NO: 46052
  source 1..453: mol_type = other DNA

SEQ ID NO: 46055 - DNA, 734 bp, Mus musculus
  source 1..734: mol_type = other DNA
gccgccgcgggagggagttgcggctgtgcccggccgagcgggggagggcgccgcgctcagagccgagaagggagccgccggagcggggagctcagaggccgcgctgcgccgggtaaccgaggcggcggaggacgtgcgccggggccggggctagggagcgagccgcggctgcggtagacgccgagggaggagcccgcgtttctccggccgacaggcgcagttctcgccggccgccggagggggcggcggggccggtgagcgaagcgcccccgcctcgcggccgccgtcctcccgccctctgcttggctcggctccccggaggccggggcgggggcgccggcagggctgggccgcaggctcggggaggaggcggccgttcccgccgcggtcgcgcctctgcgccggtggtggcggcggcgtctccggccccgggtggttcggggacgggggacaagctaggccgcttctccgactgctcgcctgcccggacaggcggggaccgcgttgggagcagcgggaatccagatctagtccccgggggcggtccggccgctgcgctcccgggctggcggcggctgcgcggcgtccgggtccccgccgggttgcggaggcggggggaaccggccgggaggagactgaggcgcgtgcccgcttccatgcccgcgcgcgccctcccccgccctccagcctggggcctccccggggcgggcgctcaccgaggaggaggagctagc

SEQ ID NO: 46056 - DNA, 751 bp, Mus musculus
  source 1..751: mol_type = other DNA
taggcgccgaaacctcgcaccgcgatccgggagcgtgagtcccaagccggtagccacgctccggggaccagggtggtcgctagcccgctcccggaggcgggagtccagagcagggttgccggcacccgcgaggctcgccggccaccctctcccgcgccggccaagcctgctagttcccccgcggggctggcgaggtcgctttagccgcccgcttgctcgcccgcctcggctcgcagccccgccgccatccgggcggctgcgtgtccccttccccggcggcagcaacagcagcagccgccgccgccactaccactcggccgcccgggtccccccagcgcccgcccctcctcccagctgccccccgcggagcccgcccgggcaggctgtgggagggagcggagccggcgaggcgggcgggctggcgctcgctccccgggggtcggtgtgcgctctacggggaaggacgcgctcgctgccccgcttctccctccctcctccccgctccggcggcggaggctgctgcggcggcggggggtgtgcgagctgaggccggggccggcgggcgggcgggcgggctgcctgcaggcggagggcgctgtgctttgtgcttttcgccgcgaggagcagcaggcagcagccacagccgccgccgccacagcagcagcagcagccgccgccccagcgccgccgccgcgcccggaggaggagccgctgccgccgcgggagggagttgcggctgtgcccggccgag

SEQ ID NO: 46057 - DNA, 375 bp, Mus musculus
  source 1..375: mol_type = other DNA
aggctgccctggtcccatggtcagtacaggagccatcagaactcatctgtcagtcagagataggtgccctccccccagcaagaggagagaacagtcctgtatgcaggcactctctgcctaggggcctgggctgggctgccacagaggagccagtgtgcccttgtttcaggctgactgtcagtgtcttagaccctaggggccagctctcaggacctctgcaggtcccctgggaggcggtcagtgccctcctaccagagacctggaagttctgagaactgagcagtcaagccttagttcacaccccaggggcctgaagggcccaaagaccttagggacatgcacagctgtccaggtttgggagcctcccccagggca

SEQ ID NO: 46058 - DNA, 496 bp, Mus musculus
  source 1..496: mol_type = other DNA
gcttcagggttggagggagcaggcaggatccctcacagatccccctgccttgcccgccccgacaggagagcgagagctcgctctaggcagctggcttggccggagactggaggagccgccaagcgacggactggcggcggcgtacacgcccgggtcgggcgctgcagagcttggctagctttcaacccgcgctcggcggctccagccccgcgcacccccgcccccagccctgccggaggccccgcaggtgagtgggagcttggaaaaaaaaaaaaaagcaaaaaacattttttttttttttttttactattcctgagccgcccggaggaggcggaggggccaggcgaggccggggcggcccgggaggcggcggcgccaaggcggctctgacgggcgagcgctcggagcggcgctgcgctgcgctgcgccgaggcgggcgggcgggcgggcggagcggggcgggcggagcgcggcgcgtggggctcgccattagccg

SEQ ID NO: 46059 - DNA, 394 bp, Mus musculus
  source 1..394: mol_type = other DNA
cccggttttcctcagccctgggaagtttctcttaatagaagagaggctgccctggtcccatggtcagtacaggagccatcagaactcatctgtcagtcagagataggtgccctccccccagcaagaggagagaacagtcctgtatgcaggcactctctgcctaggggcctgggctgggctgccacagaggagccagtgtgcccttgtttcaggctgactgtcagtgtcttagaccctaggggccagctctcaggacctctgcaggtcccctgggaggcggtcagtgccctcctaccagagacctggaagttctgagaactgagcagtcaagccttagttcacaccccaggggcctgaagggcccaaagaccttagggacatgcacagctgtcca

SEQ ID NO: 46060 - DNA, 375 bp, Mus musculus
  source 1..375: mol_type = other DNA
cctcgccgggcaccgaggcttcagggttggagggagcaggcaggatccctcacagatccccctgccttgcccgccccgacaggagagcgagagctcgctctaggcagctggcttggccggagactggaggagccgccaagcgacggactggcggcggcgtacacgcccgggtcgggcgctgcagagcttggctagctttcaacccgcgctcggcggctccagccccgcgcacccccgcccccagccctgccggaggccccgcaggtgagtgggagcttggaaaaaaaaaaaaaagcaaaaaacattttttttttttttttttactattcctgagccgcccggaggaggcggaggggccaggcgaggccggggcgg

SEQ ID NO: 46061 - DNA, 271 bp, Mus musculus
  source 1..271: mol_type = other DNA
tgcaaatcagatctgataagtcattgatatccataatgtatagccttacattccacattaaaaggaatcgaattcgggtgttcaaatccccatttttgaccggccccgccaagagactgacagaagaggcagcttctgtggcagcctttagttaggtccccagccttgagtgtgggggtggagaaagggcccttctctacagggatgcgccctttgcggattggtcccgggctgccggaggcggggcttatggccctgacgtcaccggccg

SEQ ID NO: 46062 - DNA, 301 bp, Mus musculus
  source 1..301: mol_type = other DNA
ccagggctacacagagaaaccctctctggaagtgcctcctatactgcaatggagtcctggagcccaaatggtacccgctgtgccacctggtttcaggacacccagaatatgtgtctttggtcctgatgctgagaatcaaaaacataatagcgtaatacacactagtaaagttctttactatggaattgttttgctggtgagactaaagatgtgtttccttaaggtttaaggggtggactaggagtccacctagaaccctcttctcaggactcagactctaggcagaggctgagccagtcca

SEQ ID NO: 46063 - DNA, 431 bp, Mus musculus
  source 1..431: mol_type = other DNA
ttgtggggggaggcgtctgcttccacttctacaaaacctctctagccagatgtctcctccagaaggaggtcttgtgcaccggtgcacctgtcagacttgtgtcagagaactcacagagctctactaggtagagattattatgattgtcactttaaaggatacatttgaaatcatgagttcgaggtcattctgaacttcagaccatcctctttaaagcagaggcaccacaggtcagcttcccaatgttggatggagaccgcagcctcctcaacactacggagccggtgtgggagaagaaaattctcactctttccaactacagcccttaggagtaggcaatagctgccgggtgggctgcaggcagagccgggcctcgagggggcggtgcccgctggcccgccgtgccgggtgtcgactgcagggggcgctgg

SEQ ID NO: 46064 - DNA, 173 bp, Mus musculus
  source 1..173: mol_type = other DNA
ctttcagcttcaatttaatgcagtgctatcaatatggatttaaatctaacgcgtgccctcagggcagctctcctaactgtgggtgcccttaggcatgaggtgtgggctatgttgtcatatgattctctaatcacatgatccctaggtgggcgggccatcgtgcggccaagccc

SEQ ID NO: 46065 - DNA, 478 bp, Mus musculus
  source 1..478: mol_type = other DNA
ttcagtaaggattattaaagaaccaaaccaactggtttagtctcaggttaatttcctaagaatccactttcagctaaaatgaagaggttgtcctcaaaggactatctgtgaggaaaggtggtccagttttccatcgtggtgggcgcccccagggccctaaacgcaggaaggccaatggtggcaagtgcaacccgttgctcttcgacctcagtgagtctcaagaatgggatggccgggctccagagctccacctttacttggaaacctaggcttccaaattttccaaaccttcaagaccgggcattgggggaagcccgaataggcctgtgccccctggcagcacgagaagactccggtaggaggctgcttcttggctcagctccaaagcgggggccgcgcagagtactcgccctgtcggagagttttcgtcccaccaaggacctcgggccccgggggcccgcccctccgctacaccacg

SEQ ID NO: 46066 - DNA, 554 bp, Mus musculus
  source 1..554: mol_type = other DNA
tgcggaaacagcgctgtttgaagttttaacttgagtccatttcattttctgtaaaatgggggtacctacgtctgtaattacctactatgaaaagttttggtagaggccatttctggcctacattggaaactatgccagcaaaggttacgaaacttctaagtattaaaagtggtaacaagaggtctgtaaatttgcccagggccacaccacgtctagcccaggttgcaggtcggctgacaaggctgccctgcaggtcactggggttgcaaccccgtttcatcatccgtaaaagaggatggtgctgcctcagcgatcgcaggtctggactccccggacaacactcctgcagggcggctactggagccgggtgcaagcgccgtccagtcggcgaccttgacctgccggccgcaaggagcgcggggccgcggcgacccgcccacgcggccgcggcgcaagggcggaactgggggggtgggggagggccgcgagtgggcggagctcgttgcactccgtgcgcgcggccggtcggccacggggcggggcttcgccttctg

SEQ ID NO: 46067 - DNA, 290 bp, Mus musculus
  source 1..290: mol_type = other DNA
tgtgggctaggccctaggacagctgtatgccatggtgccatcctgaggactcacgaggtttcaatctattttatttatgtagatactgtcaaccaaaaatgttcacttgaacagctggtgctcaaccttgccagcctctggtcttatcaggggagggaaggggaggacttcccatcagcatccatccccggggtgggccctcccccgtcctagtcgacgtctagaggcctgctgctcagccatgagctccagtctgataagctgaaacttccggtggtgggaacttcagg

SEQ ID NO: 46068 - DNA, 209 bp, Mus musculus
  source 1..209: mol_type = other DNA
gctgggctgtgggctaggccctaggacagcagtgtatgccatggtgccatcctgaggactcacgaggtttcaatctattttatttatgtagatactgtcaaccaaaaatgttcacttgaacagctggtgctcaaccttgccagcctctggtcttatcaggggagggaaggggaggacttcccatcagcatccatccccggggtgggccc

SEQ ID NO: 46069 - DNA, 282 bp, Mus musculus
  source 1..282: mol_type = other DNA
ttctcttgcacctttctgaaagacaggagcagcttttcctgcgaccccgtgggggaaataaatgaatacatacatacatacacacatacatacatgaatacatacatacatacatgcataaagaagtgattccttgggtgtctgaagacagctacatgtatttataataaataaataaatcttcttggtgtttgtttgtttttcagtcctgactgtcctggaactcactctgtagaccaggctggcctggctaataaatcttttttaaaaaaatgaaaggaa

SEQ ID NO: 46070 - DNA, 343 bp, Mus musculus
  source 1..343: mol_type = other DNA
cctccaagctcaggacgtccctggaccagagcggtgtgtgtgtgtgtgtgtgctaggatcccaggcccaccccctctgggagggggcgtcctcactccgaggaggcctcggcaccctgaacaagaaacttgccaaaggcttgggccccttccccagcccctggccccagctcagctgctttacatgagaagagcgggctggcctggccttacccgggcactcaaagaggcggtagcccctgacagcccgggctgccccttccccctgcaataggctcgaaggacgcgggtctcctgccgggacacgggtgggcttgctcaagctggaggacccttttctctcc

SEQ ID NO: 46071 - DNA, 386 bp, Mus musculus
  source 1..386: mol_type = other DNA
tcaagctcttggtagctagctttaaaggctagctcctatgtagccaaggataagcttgatttatatttacaactattaggttaatttattgtggtacctcttaagtaacattattatgtattaattttaaaaataccttaaaagtactctagctgtaaagtcagatctcatgctactgtatagcattacactgtatattattacaccctccggaagcgcttacgcgcgccggcgcgagtgcgcatgcgcggcccgctggggtcgctcggggccgggcgtgaaaccgagcggttccgcctccaggcctgcgcgccttcgggattcccgtcggaacgacccccctccccacgcctgctgcgcgcgcccggtgggcgtgggagggggcg

SEQ ID NO: 46072 - DNA, 337 bp, Mus musculus
  source 1..337: mol_type = other DNA
ggttttctcactttgaggtgccactaaacacaaagaaccataatgggctcctttgtgctcgctatgggggtcccggcccctttaagagcctcttaaagagacaggctctcgttaagtgacacttttacctcgactctctgagagagagacgtctttgcaagctattcgtagtgctttaaaaacatacatatttctctcttttataactgggtcggatgccactttgagatgtctccggatctttcctacagctcctaatataataatagcttgtctctttaaaaagggcggggccgccagtgggggcccccttgaaaccgacagctagggcagcggt

SEQ ID NO: 46073 - DNA, 344 bp, Mus musculus
  source 1..344: mol_type = other DNA
gctccatgcatggatgcataaactatgtatggccaagcagatcatacacctgtatgcagacaccctgcctctgctttgtgaacacatttcaaacagtggagatatgaaccccaatgattatagacatcagtactctgagatgggaggtgtagatgtccagtctcctatctgagacacaaccacgcggggcctgagggctggggcccacctctcccagccccctcccccttcactcgtgtgcgggggccctggccccacccggggaacaaggctgggattaataagcgcccagctccgaattcagagccggctctgtctggggcggcccaggcctcagccccagc

SEQ ID NO: 46074 - DNA, 440 bp, Mus musculus
  source 1..440: mol_type = other DNA
gagctaaatgattaatccggtgcgtctcaaattttgatttgaagtgcaaacaccctaatcagactatgtcatcattagctagaaaacagcaaactatttttagctaaattactattactagctaaataacaaaaattcagggtgaagtttccttgaaaagtcatattcatatttaatagtcaagctacaacagtctactggacccaggcctcgggtgccctgcgcgcgcgcctcccatcagccctgtgctcgtccgttctggccaatcccgagctcagccctggcctgagagcaagcctagggcgaagtcggctaactgctccttcttagtcttgggggcaacagaccctggaggcggtcgcccattggctgggccgcgggccaatgacctgggcgtgggcgtgggcggggcgccggcggccggtgcctagtcgcgaggc

SEQ ID NO: 46075 - DNA, 392 bp, Mus musculus
  source 1..392: mol_type = other DNA
agagacatggcccggtgtcatggaccggtgtcatgccccacctcagttaggtattggggtattaagacctcactgagaggccaaaatcccaggccctcactgggtccaagaagcccaggaactggtcacgtcttatataaacgacccaggtagtttgtctctttgttcaacaggacctctgccctccctgacacagaggcctcagggctgggggtactgggccatcagccacgccccacatccaatttcccagatgggacatcagcaactcctccaagggagtgccctgaagagggggtcttcagccggtgccccagtggtggcctgggccccggctagggggtggggggcgggcccaaagctcacgtgctttgccgctcgcctcttaaccc

SEQ ID NO: 46076 - DNA, 258 bp, Mus musculus
  source 1..258: mol_type = other DNA
tcttaggagaacgacctcctataagaggtgccacccctgggcaggtgttcttccaaggctcctgcttccctatgtgtctctgtacagaaatgagtcagagaacgttttctgaaatggtattccggaacgagcagaactgctggaatccccatgcgaccacgctcaggatcacagcccggcgcgcaggggtggaggatccctctccgggcatgcgcgctggcccagtggcgcggcccgacaggcactgcggtaggcacc

SEQ ID NO: 46077 - DNA, 490 bp, Mus musculus
  source 1..490: mol_type = other DNA
tgggggtggtgtctgccttagaccccgcctcctgagacatagctctcagccacaggtcgagtctgagatcagcctgtgctataatgggacttcgtttcataaaaaatcaaacaactcaaagtgagcacattctttgatttttagagagaagccaaaaaaaaaaaaaaaaaagagggtgtgggtaggcaatggaccatcccttttcatcccaacctgtctagcttcgggagaaatttgatccacataatttcatccctgtccaggggcaaaacttttaaaaagcctatccatttgtaattcttttttaataaagatttattttttattatttttaattatgtgggtctatgtgtaggtatgtgcacatcgatataggtgccccgagagagtcggatcctccagaggctggagttggttgtaaactgcatagccgctgagccgtctctccttgtaattgggatcccgaaatggcctattagggtcttactaa

SEQ ID NO: 46078 - DNA, 625 bp, Mus musculus
  source 1..625: mol_type = other DNA
ttcttttttaataaagatttattttttattatttttaattatgtgggtctatgtgtaggtatgtgcacatcgatataggtgccccgagagagtcggatcctccagaggctggagttggttgtaaactgcatagccgctgagccgtctctccttgtaattgggatcccgaaatggcctattagggtcttactaatggttggccgagaagccccggaggtttttcgagcaactgcagagcggccatgatcccgagatccgctggaccaaggccctgacctagcgcacgagataacgctctgcggtccggctcctccggggaatcacgccacagagcccgcggcgctcgaagtcagccgcccaccggggctccccgcgcaggggtcctcccgccaccgcgcgccccgccgcgtacgggaccgcccgggaacgcgcgcggccggtcacggaaagttggcgccggcgcggggccgcgcgctccgggcgccccctcccactcgaggcgcacgtgcagccgcgcccccgctcccaggccgagacgggacgcccccacccccaccgcggcacgcagtgcgcaggcgcctccccgcgggtcccggcggcgggagcgggagagagggaggcggcg

SEQ ID NO: 46079 - DNA, 286 bp, Mus musculus
  source 1..286: mol_type = other DNA
cagcacagagcggccagaatcctggtgagctggagccatagttgatcagcctagggcaagtctcataccctaagcaatattttggggggtgaggagatcatattaggctcagctctaagcatagagacgatagactctttatagaattgcccacgtgaccggcccgaaggccctcctttcaggctgtcctaaggcgcctgatcaccagagctgtcctccgaggcgaggcggtccggcgacgcgctcggggtccttcctagcgccgggcgccggcgttgtcgcggcg

SEQ ID NO: 46080 - DNA, 403 bp, Mus musculus
  source 1..403: mol_type = other DNA
tgatatgcttagtttaagtaaagctactctaaataacaatctcaaaggaatgctggaatcttttctggttctccagagcgcataggcactcgggcctgggtctttacagcgccacctcgcggaaaccccggaatcgacggtgtgtgcattcaatttacgcgttcgttaagcgaaagggataagtactataaacccggccagctcacccgccgaatgctcagccgagtgccccggtccgccgcctgagcccgcgcttccgccgcacgccgcgacaacgccggcgcccggcgctaggaaggaccccgagcgcgtcgccggaccgcctcgcctcggaggacagctctggtgatcaggcgccttaggacagcctgaaaggagggccttcgggccggtcacgtgggca

SEQ ID NO: 46081 - DNA, 421 bp, Mus musculus
  source 1..421: mol_type = other DNA
gagggcctcactgtggaggtcagaaggcattttaaaaagacactttatgtgtatgagtgtttttcctacatgtatgtatgtatgtccaccagaactaggtgttagagcctctgaaagtgtaattacaaatggttatcaaacccaggtcccctggaagagaagccagtgttctgagctatctctccaggccccttggaaggaattgtgagaaattcacagcgctttttccaggatagccagtggctcagctggctgagagttgcctgccgtcagataagctctgatcataactcctaaccagacaccacaggttgagcctgggaaatccccaaacctttggctcaggtctggctagcatcccagatgaccagctgtgcgcagggcagagggcgcttccagcccattctactagtgttctaga

SEQ ID NO: 46082 - DNA, 421 bp, Mus musculus
  source 1..421: mol_type = other DNA
gctcaggaatgaagcctgctgtcttaccccagaggctcaagttgaccctggagtctagccctccactcctgaactccaggaattcttcaagttcctagcatctcggctctaagtgtgtgcgctcgtgcacacttatcacacaaatgttcatgtgtgtgcacatacatgtgttgagaccagaggtctctctctgggccaattagtgagagccaggaagtctgctgattttcactgcccagcactggagtttacaagtagcttgacaggcaagcaacccatttaccagaaagggggtcttgatcaatggcgaagccaggctggtgttcccaatgactctgcagtgacctcagtggggtgagaggagttctccccctagctgggctggggcccagctccaccccctcagggcagatttagtcca

SEQ ID NO: 46083 - DNA, 366 bp, Mus musculus
  source 1..366: mol_type = other DNA
tatggtgtgaagagtgtactcatatacattaaaaaataaataaacaaaagaaaaggccttgggttttgtggggacgtttagggcgcaaaaaaacttaccaggaagctatcattaaacaactgttccttttggagacgaaggcaagagtattcagtgttgtttttgtcctcactaaactaagtgtggtgaataaataatttgagtcaagttatccagtattaaatgactctagtgaaagaaaccctacagtccactctgaattggagggtgcctatctccgtccggtttgatttggccaaagaaacccaaggcgcgcaagagaactagtgcgcaagcgcacccccgggtctttgttacttaggaaac

SEQ ID NO: 46084 - DNA, 308 bp, Mus musculus
  source 1..308: mol_type = other DNA
agtggttatacaccctcagctgtgcccagcacgcaaacattctcttaggcttcctgagcacagactgtggggagcagtaaccccagcagctcacctccggcccggggtctctcatccacagagggcccaaggggctgttggatgtgccctccacgacgtgctactgtagttagcaccagctaccccagaggtggccattgggactctttaaaaggtggccgtgtctggacctggcgttattttctgcagcattcagctctgaatggcattgggactagctggcactcagggtctgtctgtccttggga

SEQ ID NO: 46085 - DNA, 435 bp, Mus musculus
  source 1..435: mol_type = other DNA
tttcaggccctcctaagaagggcatatacacaatgtatttaaaaatgtaattaaagaaaaaaaagatttgacctttatttaatacttggcccccacgcctagggctaggccttgcccagccttgtgtctgctgaccaggcctgcataacaggatttcccagcctggtggagcagccgactggcgagtgtgccctgggaagatgttcctggtggggctgacgggaggcatcgcctcaggcaagagctccgtcatccaggtattccaacagctgggctgtgctcgacgtggacgtcattgcgcggcacggtgagtgcacagcagcgtccctcgtttattttggctccaaccaaagaaagagccttggagtcccccgtcagtcactggggtggggagtgggggacttctgaatcactagaggctctggaatgacccaa

SEQ ID NO: 46086 - DNA, 232 bp, Mus musculus
  source 1..232: mol_type = other DNA
aaactcgctacttcgtcatcaacaccttggcagagtgttgtgcagatcccttggaactctaaacttagtctaggcatccactttgaggactggcgccccttgtctggctccctaagggacccggctaaggtaaatgtgtctgcgccggaggacaaacctatccctccgggaaatattccaccagggcgcgcagctccaggcctggggtcccgcaggcgcctcgcaccgccta

SEQ ID NO: 46087 - DNA, 312 bp, Mus musculus
  source 1..312: mol_type = other DNA
gaattcaggatacctaatttcctgagcctggtataacaccaggtgagttccagtaattcattttcacccccacaggaggtgactgcggtgaacgcaagccaactgtctttactgtaactttaggtagtgtagtcctattattaaaacatcacatgtaaaaatatttcaccagatcatgatgactggtagttttgataaacccttaaaagttttaaaatgtaaatgagctaagctatacagagaaattggaccacgcggccggcacgccttccggtcccgccccttccgctggctggacgcccggtcggcgtg

SEQ ID NO: 46088 - DNA, 289 bp, Mus musculus
  source 1..289: mol_type = other DNA
cattatgcttactgaacgggctatatttatatatttaggaaaacacattatcataatcttaaaaaaatcccctgcaagcaatcaagtctttggctcgggggcagtgttccacacacctcaggaatggtaacggtccttaacgttagccgataacggcttggactttgcaagccctataaggcgtacagcgcccttcgtctcagagggcggccgaacctaggggcttccggaattgctgccagttttttgaaaacaagccacccttagtggcagatttcttctccatgta

SEQ ID NO: 46089 - DNA, 299 bp, Mus musculus
  source 1..299: mol_type = other DNA
gccagtcctcaaagtggatgcctagactaagtttagagttccaagggatctgcacaacactctgccaaggtgttgatgacgaagtagcgagtttcgaggtgcctcggacaggcggagcccgcaacccactcccgtgggtttccaccagggggcgcgaggactctgcgaccatcagtgtgtccaccgggaggcgctgcagcccgcctcgggctgtcgcgcggtgcggagtgccaaattagccccgcctggctgggcgaggcaggattccttaaaagaccaatacgaaacggtgcctctgg

SEQ ID NO: 46090 - DNA, 377 bp, Mus musculus
  source 1..377: mol_type = other DNA
gccgagtgctgggattaaaggcgcgcgtttgaaacagagtctcattaagagctctagaggccccgcgagcgcctcccggtgagaatgcaccgggggcatccaagccttctaaaacagcctggaagtgaaccccaactggaacagtgctggtgctcctggtcagaaaaccaggtggcccgtaccccgctccgtccaggttgtccctagagacagtgcgcctgtccgacgacgcgggcgagggcgggaacgcgaggggcgctgcgacctgggcggacacccgggattcctccggctcgaagggcccagggccaggcccgggatctgtgcgtgagaaccgggccgggaacacagcccgcggcgcggtccggtaggcggtg

SEQ ID NO: 46091 - DNA, 250 bp, Mus musculus
  source 1..250: mol_type = other DNA
ccaaggtgcagcccaggctaccatggggccctgcctggtcccccggcctgggttctgggaccccattggacgttacaagtggtgagctcccctcctctgcctcctagggatgcctggaatgagcagggaggaagccatgtctgcctacatctctgagatggacacagtgcccctgggcgaggtgtcttgagaagggcccaggtcagatctccactatgcatgactaatggggacaaggactggaagatgc

SEQ ID NO: 46092 - DNA, 548 bp, Mus musculus
  source 1..548: mol_type = other DNA
accccgggaggccattttcttcggcagaagccgaggttcggggcgagtccttcctcctcaccacgcgcttcccatccgggctcaggcggagagctcggccgcggaggaccacgggctctcacctaagggcctccaggatagcctgaggaccgacgtcactcaggactcgaacccgctctcagttcctgaggcctagtctgaagctttttaataaaagacattattgtaattttaagaatccaatgtcagtaatcacgactaacagctctctttatagaatttaatcaccatttttgcataagttgaaaacggtttatggccatcagaacctttccgctgagaacagaatatgacagtagattttcaaacgcaccttttaataaaaatattctgtataagctctggtatggtccaggtcttccttcctcggagagacgaataactcttgaaggcggcctgggagacgccccctacgcattctatgattggctacgttgcacggcgcgcgagccgttacgcatgcgcatgggcggggcttacaagcttct

SEQ ID NO: 46093 - DNA, 499 bp, Mus musculus
  source 1..499: mol_type = other DNA
gcatgcggccagagttgcaacctcggcccgtccctgcgagccagggtctccatggcgtcgcgcccacctcgtccttcagatgggggtccggctacgccgggcctggccgccatacccgggatgaatgggggtgacgagaggccttgggcagacctcggcctcaggatcgcacagcagaggggaagccgtcttactggcctctcctctgctgggatcccgggaaatacgcggtaattacccgaggactgggctcggccggggagacgccaaccttcacccttcccagccgcgccccgcgcccggaccaccccccatggggtgctctcactgcgcagcgagtccctccgctgcctcctcccagcccaaaatggcggcggcggcggcggcccccgagctgctcgtcgccttcctcaaggctagggaatccctccgcgcgcaagcccccatcaatgaactctttaattgagctctgacagggcgttccgcacagagctttcct

SEQ ID NO: 46094 - DNA, 635 bp, Mus musculus
  source 1..635: mol_type = other DNA
ttgttaccgttacagaaacaagtttgctggtcactatcacagaaatctttctgtaactatcagatagccaaggtcaggtctcaattgacctatgtcattgtcctccaacctctctggtcctcagatcatctctgggcccaacggaggagagagaagggggttcccatcttcttagttggggaccccaaagggggacccccagcagcgccaccttaggtttctaaggcgcgcgcggattggtgacgcccgggggtctgcctcctccaggctcgggcctagggacccccctactgccgggcttagggtggagagctgcggttctaggacccggaggcgccgggcgagcgcgccgctgtgttctcggcctcgcctgggtcggctccggctcgggcaggtgcatcggcggccgccccctccgccgcaggtgcactgctcggcagcccccagccggcgcgccatggctgcggaggacccccggccgtcgcccgcgcccgccccctccctgcagcccgcccccctggggccgggtgcgcggcggagaactgcggtttgcgcgcaccgggagcggcagcgttcgaaaatcgccgaggggggagcccgcgccgcagcttcctgcccccggcccagccctctgg

SEQ ID NO: 46095 - DNA, 208 bp, Mus musculus
  source 1..208: mol_type = other DNA
tggacccagagctaggtccagtaccacattggcctagccgatctgatcaacttcgcatcgtctctggcgaacatctgagaagtcccagaatacccagcctgtccaggccatcaagtttgcccaggctacccagatcacccagttacctggatattaaccaggttgtccagtcgcatcccctcagcttcaggaagccaaagaggagtcc

SEQ ID NO: 46096 - DNA, 396 bp, Mus musculus
  source 1..396: mol_type = other DNA
cctttaaaaataagaaatgttgccaggtggtggtggtaaacatctttaatctcactggtctacagagtaagtttcagtacactcagaggtgcatagtgagaccttgactggaaacacgtgtgtgtgcccatgtgcacacacacacacacacacacacacaggtacagaaagaagtaaccttaaaatagtgaattgtgtggttcatgaattataccagtcaagataaaaagtggtggtggttggatagacctccccgccaccacctcggggacagaggctccggctcactgagagtgacaagctgcaggtgcagatccacctgcctatcacacagtaggcccacaggaaggctgctctagggtgggctcctccggcagtctgcctgagttcgccctc

SEQ ID NO: 46097 - DNA, 289 bp, Mus musculus
  source 1..289: mol_type = other DNA
cacacctgtaatccagccttgggctacaagaagttgaagccagcctaggctagatctggactgttcccgtcaccacacactggatgtggtgtgaaagttttcacacacaataaatgtaattgtaaactatgcacaggtgtgtgtactgcacacatgcaccatccttagaggaatcctagactccccgcaaaaatggagcagtggccagctgccccaagtcttggtccggggggggggggtggcgggggaagctgtctgctcaacctaccttcaagtttcctacatgcca

SEQ ID NO: 46098 - DNA, 471 bp, Mus musculus
  source 1..471: mol_type = other DNA
tttcccctgtctagagggggatgggcaaactggaattgagactcatgggtactcccatgtctatacaggctagcttgtgggaaagagctcaccccttgacttgttagtggacaaaactagttgtccagctgaacccttagccctcacatcggcctagtgggggtggggggctcccttctctctcagtggaagccagagaaaataaaaactgggtcttgcctttgtcagaagtgttcacaggcacacctcactgcacttcggccgcctgcagagtggccggtgagggagtctaatctggtcagaacgcctcctccccggagacagtcaggtgtggcccaggatcctggggaagggggagggtggcgtctctgctcctagagcgctggcccggcccagaggggacaggaaaccggggattgtctcttgcaagcacagcccagtcccggcttgggaggaagttctgccgagcgc

SEQ ID NO: 46099 - DNA, 334 bp, Mus musculus
  source 1..334: mol_type = other DNA
tttattctggaaacatttttttaaaaaacacatatttgtaatttcttattaccagtaaacagaattcccggccccataaaaagggcactgtagagagcacgttttcaaagaccaagtcttccactctgctcagcacaccactccggctccccacacttctcgagggtaggcagagcaacctcgggacccacgcatgcgtaagccttcggcgctggataccctggccggaaacagtgcgaggcctcgctagccaatcgctgctgaggagtggccggcaggccgaccagccacggggggaggcgtggcccggggcgggggcaggggcccggagcga

SEQ ID NO: 46100 - DNA, 250 bp, Mus musculus
  source 1..250: mol_type = other DNA
agacagctttcaaagtgctttctgtgcaactgcccttccctattagccaactgagctggcctgtggcaaactgaagagagagactgtccctggattagacaggagacctccagtctccagtcaggaaggatgccgtgagggggatcccttcctttctcaatttagaaaccggaagagcggcacggagcctgacagacagccggtattgaagactgtcccctcccactcctgagcagagggcaggagagag

SEQ ID NO: 46101 - DNA, 311 bp, Mus musculus
  source 1..311: mol_type = other DNA
tggtctgcaagctgcagccatgtgtgagctccccacacccccagcctgggtggcaggctaaggcagctgctgctgaggctgcagaggctctttcactgtgctctcaggggaacatggcaggcccccactctggagacctgcatgcagccattccagttgtaacctctgcctcatgtctgtccttctaaggacagacccagaaggccgccccttcagaggctcagcctttcccgagttctacctgtgcccgcagggcccggctctgcctcggccctgtctgagttgctgggatgcagcctgggaaactgcgc

SEQ ID NO: 46102 - DNA, 203 bp, Mus musculus
  source 1..203: mol_type = other DNA
aagggcagagggccacagcgcctcagccctcctgcgttcagctatagctactcacccagggcacgctgggtctgctgtgtgtctgtcctacctcctttcccttgtgccttgggtctagacgtctgagcctcagtacatagcccggggttgaagccccatgacttacacgtgaacgatttggtagagactggagcactgagcac

SEQ ID NO: 46103 - DNA, 343 bp, Mus musculus
  source 1..343: mol_type = other DNA
cttgagcgccctcagccagtgggtgggtctcagtggcaggcccgggggaggcgcctggcacttgcgctgctgctgttcccctttcccctgtctagagggggatgggcaaactggagattgagactcatgggtactcccatgtctatacaggctagcttgtgggaaagagctcaccccttgacttgttagtggacaaaactagttgtccagctgaacccttagccctcacatcggcctagtgggggtggggggctcccttctctctcagtggaagccagagaaaataaaaactgggtcttgcctttgtcagaagtgttcacaggcacacctcactgcacttcgg

SEQ ID NO: 46104 - DNA, 423 bp, Mus musculus
  source 1..423: mol_type = other DNA
tgtggtggtccacaccgctgtgtggtggtccaccaacctggtctacatagaattccaggacagcccattgatgatgtataatataaatacacgtgctgcatgttcagaaccagtgtagccatgtaagtcatgtgaggccacacaggtgagctctgcgatccattagaattgattttgaattcatttttagttgttgtgcattcagaaacctttttctgttgataaattttttgcaatcaccacattattttgtggcacctgataggggcttcaacccccactgttgagaaagttttacaaatccctatcccataggccctggctttctgcacagattctggtatgaagagctctcccttctcctcggagcacagggtttgcccaggagtggcagggcctgacctcctgctgcctgctgggagg

SEQ ID NO: 46105 - DNA, 299 bp, Mus musculus
  source 1..299: mol_type = other DNA
taaaatgactcctaatgacatttgggtactcatagatcaatgccttaggagcaaagttcatataaactcacagagagtcttttgtcattttctgtaatttcattctaactgtttcctggctccggaaaggtcccacttggacccaggatcagagctgcgggacgcagaagtcccgaagctccaagggtccagcctctctgcgctacccagagccagagtagcgagagcggcaggatcgctcacctgagccaagagccggcaagggaagagctgacggccccgcccctcggctcctcgat

SEQ ID NO: 46106 - DNA, 440 bp, Mus musculus
  source 1..440: mol_type = other DNA
ctaccttttgcagcagacagctggactacagctgtgcgcagattaaaccttctctaagattcacagactgtctgagctatgtacttgtacctaggtaaggtgatctacaatgattatttctataaaataaataaaatagaaactccgccaaatgacttaattttaataaatatgttaaaaagagaaagagctcttagctgtgacagccttcagccagggccgttggagtgggcaatgccgtgggccaaagctacccacccgcacctttggggcagctttcggcccaaaacagacagcctgagggcaggagctgcctgaacactctgaccctgtccagcgggctttgcgcagacagcacgctgggaggggttcgtgtccccgcagcttgggcgcggagctcggcggttgccaggggcggggcagcacggcagtctcggagc

SEQ ID NO: 46107 - DNA, 247 bp, Mus musculus
  source 1..247: mol_type = other DNA
tggctgctggctagcacagcaagtaccagcttcaggtacctttcctcgaaatgtatcttgtttaatgatagtaatttctaaatattttttcggcaccattctaaagtattgccatgctatagtcatgtaacagaaacacaactcaaatttgtttactggattctggactccacagactttctcacagctctgcagagcaaaccctgcagcccaggggcaggatgtgtaggtcagtttgcacagttca

SEQ ID NO: 46108 - DNA, 267 bp, Mus musculus
  source 1..267: mol_type = other DNA
aagaggaacaactcctcccttgggaaagacaagtgtttgaacctttccaagtaaatgtttatttgtatacagatcgcactcactcactgtgggtttactcgtcgtgaggaagtgagattcgtagagagtcgccggcgacttctcgggggaggctctgacgtcagtgcctcgcgaccgtcctctccgctacctgattcaatcccggagctggactttacgcgagctccggcccggatcgcgggcgccctactcagcagggcgggccct

SEQ ID NO: 46109 - DNA, 447 bp, Mus musculus
  source 1..447: mol_type = other DNA
gatttgacattcattaaagccagattgtggcttgatgcccaaaggcgtttgaaagctcgagtcaaacttttttttttcttaaagcaacaggcaggatggagatctgtgcctcctagccaataggacctctctctcagcagcaaagatctctcccgggagaggcggcatctctgaggcagcacctcctagtttgctggagtgggcgcggctccaggtgagcactcacctgagaaggggaggggcctgctgctgacccctcccacaacagggcgggcagagttcggcggagcctatggggcgaggggctcgccggctgcgaggctccctccccgggccgctcgcgctccgccctaccgggtttaaagccccgcgggcggctggtggcggcgctacgagcgcctagtggcgcgaggagatgcgagagtgcaccggccgcctgcaccatgc

SEQ ID NO: 46110 - DNA, 499 bp, Mus musculus
  source 1..499: mol_type = other DNA
agatctgatcttctgaggtgtctgaagacagctacagtgtacttacatataataaaaaaaaggtaaaaagagaataaccaccatcttatttccattctttttgtcatttttcaggcccaaggaataagatttttcagtgcttgtctagctgcataatagttatgaaaagctaatctaagactcaatttcaatttccttaaggctaacttgtaatcagatatgactcacaaaaatagtcactagttacctgcccgtctttgtgtcacaaaaataagttctttaaatgtccaatcaagtacacaaaatacttgccaataggcagtcacggcttgcggccaagagctaccgggcccaagccttcgcgccccggctcgatccccttcggctaagagcatcgcaccagggccccagagccccgagccctaggggccgcagcccgggcggagcccagcccgctccccgacgcatgacgccggcctagccggcctgcggcttcctc

SEQ ID NO: 46111 - DNA, 442 bp, Mus musculus
  source 1..442: mol_type = other DNA
gatgttcctgaagagcgtccggccagcacgcctgcaggaggagatgaccgaatcctcccgcaggaaatgcaaacggcggctggtgtcagttgcaggaattgactcttgacaaaagaccccggcgccgccggctggcagaccttcagagcctcagcggactctcccgcgcgcccctcggacaccctggaagcgacctgcggccgggtggcaggggccgccagctcgcgagcccgaaaaggctggagactggagtcgcgcgatctgtcacgtgaacgccgggttccctggctcgcgtggactgggaagggggtgtcccaggccagcagagaatccagcgtgccgggtcctcccgaggcctccgtgcgcccggggcgcaggctttgcccaagtttacccggctgctcggcgctgggctccggaggggggcggctgcgggtggagg

SEQ ID NO: 46112 - DNA, 447 bp, Mus musculus
  source 1..447: mol_type = other DNA
cccggaggtctggcgggacagcccgctccagccccgagagcttggccaagagggggcgctgtggccccctccacgcccttcgggctgagctgcgtccacagcgttgcggcgcaatgcgcgccctgttggggcctggaccaaaaagacagacgttcagtgcgcggatcgggagggggattcgggcccggcctcccctccccactaaattgggggcggaggtgaacctcctgagggcgggaaccacacaagtaccccgggatcccccggactcttttggtccggacatccagcctcacaggaggctagagaagaaaggctgcctgctctccagcagccgcctagctgcggtggcagccgccgccgcctgtgcgccccgcgcactgccgcaagccggggtgcggggagagggggttcagcacggccagggtgcggggatccgggccgggg

SEQ ID NO: 46113 - DNA, 216 bp, Mus musculus
  source 1..216: mol_type = other DNA
caaaattgacaggttttggtaaccattttttttttaaagatttatttatttattatatgaaagtacactgtcattttaactaaacaagttggcattatttccaaataggaaatcttctttatgcctaatttcgatgttggaaagggcaaatagaaaacccttttgcttttctgctctcccgaatgctaggtcgcgggggggcggacctactcccgt

SEQ ID NO: 46114 - DNA, 542 bp, Mus musculus
  source 1..542: mol_type = other DNA
attgaatatctcatgtattctcatagatatcatgtcttatttttacatgttgcatacattttaaatgacattatatatttgtaaggggacccaagagtactttagaaaacattcctccttacatgctaaaagtctcactttcagccttggcaggacagggtacacctgtctttttttttcctgaggactcaaaatagagttttgaagttgtgcttataaatgaatatcgaactatataattatgctcggattcgaatagaatccgaattcagaaccagtcccctttgggggaaaggccagcaaccacgcggggtttgttttaagaggtctggaagcagaaagctaaaagtccattacacgtggccagctttgtgaaaaccgggtagcagtgaggcggccagcttgtcttcagccaaaatggcggtgctcggactgcgcgctcgcacgggatggggaagggcgtcggggacgcggccgggcgcgggcgcggcctcccggcggctgcgcgcctgcgcgagggccggctgccggcgagcacgcgc

SEQ ID NO: 46115 - DNA, 289 bp, Mus musculus
  source 1..289: mol_type = other DNA
tggagggcccaatccacgattgatgacttgtccaggcctgcagctgtggtgggggcggggcatggaggcccagccttcatgccaggctttgcagctggttctgggtccctggggtccctgggggctaggagctcccgtgacccacgtcgactcactgggtgaccttgaggtttagagggctgaggacctcttccccccatccctccatcatttactagatggctgaagggggttgtggcacatagtcggctagtttcaactagggcattcaaaacccaggcttctaagg

SEQ ID NO: 46116 - DNA, 320 bp, Mus musculus
  source 1..320: mol_type = other DNA
tctgagagtccaaggctagcctggtctacagagtgagctccaggacagccagggctgcagagtgagaccctgggttggctgctcatgccaaatgctgtaaactttttatacttagtaaactttgtaaagacctgaggagctccggcagccactgtaatgtcacattatgctaattttaggtaaaaaaaaaatcgagggctagctgtactgaggcctgggcagagatgagagctcaaatgagctccctccctactggagccaggtagaggggccaggggcctgtgtcccactgagtgctctacccttcccctgggagggta

SEQ ID NO: 46117 - DNA, 500 bp, Mus musculus
  source 1..500: mol_type = other DNA
accggaagcttgacatccagcaggtggccatctccacattagaacttacctatttaaagatttttcttcgcttttgaatgctccttgatttaaaaacaattgtttttccacgaaaacgctaaagtgtattattgtcaaggaaatcattaaagtgcgctctatctgcctgtagcacttggggttcacggtgtaccgcctggagagcaccgctctgcctggaccccgcggggaccgagggaggggacccctgggacaaaggctgcagccccgggaggccgggtgcgcgtgcgccacggaatgcgcgtgcgcgcggcggtcagcaccgcggcccgaggcgtggcgggacccggggagggaagcgctgaggggcgctcgcgtgcgccccctagcggtcggaaggggaggtgcccgcccaggcctcgctgcccgcccctcccctagggaggttcgcgctcccgtggctcgcgcctgcgctgcccgccggcctccagaacgcgctt

SEQ ID NO: 46118 - DNA, 536 bp, Mus musculus
  source 1..536: mol_type = other DNA
gaggggcgctcgcgtgcgccccctagcggtcggaaggggaggtgcccgcccaggcctcgctgcccgcccctcccctagggaggttcgcgctcccgtggctcgcgcctgcgctgcccgccggcctccagaacgcgctttctcggccgcgcgcgctccaccagcagcagcgccgccgccaccgcccaccttctgccgccgagccccctcgccccagagatggatttagggagctggcgcaacggcgggggcctctctgcgccctaggcgctggggagctgggaaggaacgcgtgcaagagatgcacgcacgcgagcgaatgcgtgtatcccccactatcggctccgcgcaaatgaggggggctgtatgggggtccaacgacgacccccgaactcctgattgccatcaggatttaaggcggtggcccgccccctccccttttcctccttcagaagccggcaggggacatttgggggtccaggcgctgtcacgttagtcgcccttccccctgcgcgcgcttggtacagtgacaggggcag

SEQ ID NO: 46119 - DNA, 595 bp, Mus musculus
  source 1..595: mol_type = other DNA
tagagtcaagagtaattaggtgccactacttttaagtcaataatttggtagtagcaggaaacaaaaaaattactgtgtaatgaatgcgtttttgcctattttggatctgaccccagcgggcccggcgctggtgggccatcatttcagctcccagctgcccctgcccgggctagccccgagtcggtcctagctcgcgcctgcgcagagcgtggcgctagggctagcagccagccgtgtgctgcagtgtacagagcatggcagggaccgcgtcactggtcagggagcttcctgcccgtctcgtggccgcagcagcttcttcgcctcaggttagcctcacctcgatcgaagcgagggccccgcgtcgcttgccgcagtgccgcgtgtcgctgccgcacgtatcaggcaccaggcaccggtttccgcaaacagaggcgcagaagcagcggccgcggctaggagccatgactgaggcggcggcggccgcgcctcctggcagcccgcgggggcggcgaggcgggcgccccctggcggcgcgccggggcggagcggcccgccgcagccgcagccggcggaggcgctgctgtccctcctcccg

SEQ ID NO: 46120 - DNA, 481 bp, Mus musculus
  source 1..481: mol_type = other DNA
tctcctgtatttcagaattcctcagaagttgtccttttctgattttgcgacttgattaaaaagatcttaaaaattaaaaaaaaaaagtctctttgtagtcggctcttgaacttaataattttctacattagtctcttgtgctagaatcacaagcgtatgacatgctaattaatattattctagttgtaatgtttatgggtggcacaaaaatgcctgagttactaagtccaggaggcgaccaacctctgagagggattttgactcccaggccctcaggacctcgggtctggttgactttaaaaataaccatttatatatgtgtatattttatgtacatatacaaaatctctccctacggctcatcacatcgcttcctggatgaagaaactgtagggattcccctttcctagggccgaggagacagagacgccgaggcaccagcatctttgccctcggcggcccaatgggagacagaggaggg

SEQ ID NO: 46121 - DNA, 482 bp, Mus musculus
  source 1..482: mol_type = other DNA
tttcaaaagtttcccttgtctgaggaaacacaatagtttttaatagtcccatggtttattttgaggatgtgacaggaaagcataaagttaaaccgcagttttacatcacctataacaggcatgtaatatataagctaggttatagcaacccagggaccagccaaggctggcatgtaatgtcaacacatgccaggtctaggtggtactggcgatccaccttgcagaatcatgaatcctaaacaagcactctgcctagtcgtttcttttgtttgtttgtttgtttgaaaacaaaccataaagtctttgactacaggaatcctgtgtatttggggaatggccctgttccaaatgttcctagaatatcctagaggcctgtaggagagtagataatgatctaaactcagaagacttcattggacctaggttccgccatgtaacgcggttctggctttgggcgtggcccgatccaacccaacagtttc

SEQ ID NO: 46122 - DNA, 460 bp, Mus musculus
  source 1..460: mol_type = other DNA
cttgggtgtgggagttcccttctcagatcgtcattgtccggtgggaaattcactggattataaggatttaagcgcttctgtgccggtccccgggactccatctgagcccctggtctcccaccgcaggcagggcccgcgactaccagggggaggagcgcgggaacccggctaacctcggctgaggccgcgggtgaggcatcgggactgccgagagaccggcagggctcgccgcgggagaagccgggcctaggccgcagcaggccgcgaactcgctgttcgctttgcgacccaggcttggcgccaggcctcggagcaggggctagcattactggacaggttcctgcagcaccggaggctcagacccactttctgcagtgcctcaggccccccccgtagcggctccagcccggccagccccggctctcaccagcgaccgttaccgggggatgggaaactgttg

SEQ ID NO: 46123 - DNA, 192 bp, Mus musculus
  source 1..192: mol_type = other DNA
tgcaaaattagtaattaatgaattactttggagactgatttagactgaggctcagtccccttccaagctggagaaactcaaagacctctctgtgccttagagtcttcttagcccaagggcactttaggcttagtcaactcttgagcgctgagctatagcccccacttcctgcgagctgggataggcatgcac

SEQ ID NO: 46124 - DNA, 306 bp, Mus musculus
  source 1..306: mol_type = other DNA
tggtcttcctgcttaggctggaattgtaggcatcacatccttttatttatttatttatttatttatttatttatttatttatttatttatttatttattttacaacgattcttagacagacacctgggacccagatgcacacaggaccccggggggcgcggtctcctctagtgaacgcggggctggggaagattgcaaagtttacccatcacactcagcctcaggcagggtccaggcgtgagccggagggagggagcgcgagcactccgcccgccccgctgtgtctcccctccgcaggaaaagcag

SEQ ID NO: 46125 - DNA, 396 bp, Mus musculus
  source 1..396: mol_type = other DNA
agtataaattactcatgattaatcatttaagtgaccttggccaagttatctagtagtatctggcacatagtaagcaacagacagatcttgaggatttccaccctcggcacaaatgtgcaatacttgttacctggacaacacagggctttgccctgcggttgggagagtgggaatagcagagccagctccaccagctgttgcttcagggctccatgcctgaactgttgagcatcagggcagggcggagaggggctgggtttccaccaattggcaggaaaggaccaatgagatgtcagctgcacccggctggtgtctcttccttttatagtcagcagcagttgctgctgccctccccagcccctctgtgggggctcctacccagaataaaagcagggg

SEQ ID NO: 46126 - DNA, 492 bp, Mus musculus
  source 1..492: mol_type = other DNA
gacaatttaattttaatcttccagaggacctgacagcagatggttctcaataccctgtgactccagctgtgggggaccccatgcctctggcctcttgcatagacacacacatatacacataagtttaaatatattttttaatttaaaaaatgatataaacaaatgagatttggggtaggtttttttttttttaaaaccctaatgaaatggtttttaagtactcttcaatcaagggaaaaagtcttctaaagtcttaacaggctcaagttgataggattctgttcgtgttcttctggggtaccgagggaaccccagtgagtgtcatctccccgagcccaggtctgagcagggaatgaagtacaaaccactgggttcttgatctgaaggtttttgaaacaaaaaaaaaattgttaactatgtaagagcttgaaggtatttataagtaatgataacagtgccgggaggaattctaaccgaacgttctaaaccttc

SEQ ID NO: 46127 - DNA, 847 bp, Mus musculus
  source 1..847: mol_type = other DNA
ggacagctctcgggggcgccccgtaggctgccgaggcctccagctccccggagtcgcctctcccggcaggccgaccgccacactcccaggcctgggcctggtccatcttcggcccggcccctcggcgaccccgcagccctcggggagcacctcccgcctcggcgcccaggagctgcggcacgacgccggcccgggtcgcagcctcctcgggccctggagtggggcccccgggacggttaataccccaggccccggcgcccttccacgtccaggggctgagcttctcacctgccgccgctgccgctccactctcctctcgggaggggccccgacccgacccggctgctgaccgctccgctctccccctgggcaggcccggggcggagccggggcctctcctgagcgccgcaaccccccgcccgggcagccgccggcggcgccgggctccacgacagggcgggcgggggaggggggccacggaggccgcagatccccgagctcgcgtacggagccaggcggctgacgcgggcccgggcccgggcggccgccggggggcgcggggccggcctcctggcgccggacaaaggccaaggtcgggccgagaagtgggggcccgctcggctgggggccactcgggtgcggcgcggaggggggggggtcggaaccgctagtgcccaggacccgcctccggcccctatccggatcggttcggtccggattagtagtgatgaaacacactagtgaaaccgcgtgtttcctcgcgagtgttggggggagggtcgctgctgcccccggagctccgcctcctccaatcagcggccgcgctggcgggcaggggttaaccagg

SEQ ID NO: 46128 - DNA, 730 bp, Mus musculus
  source 1..730: mol_type = other DNA
tttttccccctttggcgctggggtcagaggtggaaccctttcccatgcaggaactctgaagagcaggcccaggagggccatcttgtcaccggaggttaagatggaacctccccctaggtgctttgagagagttccccggggggcgggtagcgacctccgctctggaggctgtgatcccaggacacctttgtccctggagacgccaggcccaggtacgtggaaggcgagagccgccggccggctttccgtgcctgtggatggccggctggcggacatcgggtgggcaccgcgaactcagtgacaccccttgccccgctcccgggctctctcccatcgctgggcagagcaacctctttcctcaccccaaaaaatgtgtgtagatgagaggcagggcgagcgcggcagtcccgccgggtcgccgctccgacgctgctccgcggcctgaggcgcagcccaaccgtcggcctccgactctccacaaaggcgggctcccgaggctccggccccggccgcttacccggcgcccccgagccgcctcacgtcgcaggcggggccgcaagcgccgccagccgcccgccctcagcagccctgtcaggcgcggcctgttccgccggtgcggggtcccctggttaacccctgcccgccagcgcggccgctgattggaggaggcggagctccgggggcagcagcgaccctccccccaacactcgcgaggaaacacgcggtttca

SEQ ID NO: 46129 - DNA, 435 bp, Mus musculus
  source 1..435: mol_type = other DNA
tctgcatagagagctggaggccgcctggagagccctataattaagggtttgatccctggtacccatatgttggttcacaagcatctgtaactccagttcgaggagatcttccatgagcattgcatgcacgtggtgcacaaccatgcgaaatttatttaaatagaaaatataaggctaaaaatgtgcaattataaattatataccagtgacctactattagttttaaaatatttatacatatatgtatagtatataagtgtacaatgtatacatttaaataaattgaatacatattacaagctctatgcatgaacgaattacaatttttattgtgccaatttgtggtctggtggtgcatctccagggagaaatgactcctttcggacgctacttccggaaggggcgtggcccacaggaagtcctcgccttcgggaa

SEQ ID NO: 46130 - DNA, 755 bp, Mus musculus
  source 1..755: mol_type = other DNA
cggaggttaagatggaacctccccctaggtgctttgagagagttccccggggggcgggtagcgacctccgctctggaggctgtgatcccaggacacctttgtccctggagacgccaggcccaggtacgtggaaggcgagagccgccggccggctttccgtgcctgtggatggccggctggcggacatcgggtgggcaccgcgaactcagtgacaccccttgccccgctcccgggctctctcccatcgctgggcagagcaacctctttcctcaccccaaaaaatgtgtgtagatgagaggcagggcgagcgcggcagtcccgccgggtcgccgctccgacgctgctccgcggcctgaggcgcagcccaaccgtcggcctccgactctccacaaaggcgggctcccgaggctccggccccggccgcttacccggcgcccccgagccgcctcacgtcgcaggcggggccgcaagcgccgccagccgcccgccctcagcagccctgtcaggcgcggcctgttccgccggtgcggggtcccctggttaacccctgcccgccagcgcggccgctgattggaggaggcggagctccgggggcagcagcgaccctccccccaacactcgcgaggaaacacgcggtttcactagtgtgtttcatcactactaatccggaccgaaccgatccggataggggccggaggcgggtcctgggcactagcggttccgacccccccccctccgcgccgcacccgagtggc

SEQ ID NO: 46131 - DNA, 470 bp, Mus musculus
  source 1..470: mol_type = other DNA
gaaatcagaggttagaatgctaagtaactggattgtcttcatgattgctaccggccagcagcccagctggtgggaatgatccagtggaccgcttttgtcccaggtctctggatacagcggcccctatgtgttacattctttgtgccagggacactgacacaggagtcagaattgtttgcgctgctccccaacctccgcacgggtggcgcggagttctgagctcctcctcttccccatcagaaataggggagggggtcagcgcctgctgggggcccaagactggccacctgagtcagtcgcgcatcccatccttcggctggccaggcctcgcagcagcccaggcttcgccacgcggtttgcagttgcttcgcctctcgcgccagcaggagaagctgtgacgcagcgtctggggctccaggcccgggcacactgggatccttgtggaccttgcggccgggtccccagccctg

SEQ ID NO: 46132 - DNA, 603 bp, Mus musculus
  source 1..603: mol_type = other DNA
tattattaatggtagaacccaatcgcttgtatagtctgtgtgtgttagctaggtctctcatacaccccttttacactaagtcactaaacttatattcagcacaagtttaaaaaatgatattaaaaaaaactaagatttttttccaaactaaaattgaaacaaatcctgtaatccttgacattacaaatgaattcattgtggaaaagattaaagtcttctgaaactcttcttctaagcagccaatcaatttatagacctgattgtcagtcaaatgaagcttcagtatagagaggttaaatttacattttgcttatttgccaaaatcaagacagtatagttttaatgatatttcacgcattgcaagaaaacggtaagacagcttattttaaaagcacttctttcaggttttgttttttttttttttttgacaaatgtagtcacagaaaaaggagacagcatgtacacaggcatgcacatgtgcatgtatgcacacatgtgtgatactaaaggaatcagtctgaattccctggaaatttatgctagagaggaattcaaatgtcacagagttcttagaatattcctcattgaaatttcacagatgcg

SEQ ID NO: 46133 - DNA, 276 bp, Mus musculus
  source 1..276: mol_type = other DNA
gtacgactgacaggggcttacaaagccaccacctgaatgtgggcttacaggggctgcatagaagtctcctggaccccagacatgtggagactctgggacactggtgaaagttccaacaatttctcttaggtgacatcagtcagcaatttcaaattataagaactgagtctgggcgcccacgtgtggactcaggacccccggggccgtagccctgccccatcgcgactagcggcacaggctccgcgcgaggagggaggcacggttgccaaggaaacg

SEQ ID NO: 46134 - DNA, 514 bp, Mus musculus
  source 1..514: mol_type = other DNA
catccctgttcgaaaggcaacggtggcatcttgacacttgttggcgtcgtgactttgagtgacacgtgtgccagccacctcgagagcgccagggccccctctgtcagcgcggagccggggttcaccaccaccagctctcgcaacgcctccccgcccccaggccgtggaggggcggggggcgggggcgcgcgcgctccaccacgcacgcgcccccacgcacgcgctctccctccgcgctcgcgctcctccccaacccggcccggagggggcggggctgcgggcggcctccgagggtgcgacgcccccggcgcggcggcggcgctagagagcggcctgccgggcgcgggttgctgggcgcgcgctgctccggcggggcccgctggccacagccgcctcgcgccagccgcccgcccgcccagcgcggccagctgcgagcgccgctagcgcggggccccaggcggcaggcgccgcgctccctccgccgccccgcgcgcctcctcgggcggccccgccc

SEQ ID NO: 46135 - DNA, 393 bp, Mus musculus
  source 1..393: mol_type = other DNA
tttataaagtttgtaactataccattacagatttaactaattgagaaattttaagaattctcttaccagtgggtgcccctatagttaggtattttttaatatttttcatataatttctttatatttcaagttttaataagtgactggtttaacactggtgtggtagtggtgcacacctttagaccctcaggtagatctctgagttcaagaccagcctggtctacagagtcaggacagccagggcttctactcaggagcccatcccactgcaagggatgctccagtgaagcactcagaaaggaagtatagacaagagattgtgtcattggcttaaataagaagaatatgtcatttttaaatcacatgatatatggagtatgttaaataaaaaca

SEQ ID NO: 46136 - DNA, 209 bp, Mus musculus
  source 1..209: mol_type = other DNA
tgccacctggagactgaaggctgttgtaacatcagctactaagagtagcagctatttgctgatttatgcccacagtattgttgatctccaccctgctggtgcatacgagcccgtctcactcactctgggattccagaaggaattttcagtgggataagagactttctctagggttaggccgtggctggtcaagtgcctgaatcagattc

SEQ ID NO: 46137 - DNA, 514 bp, Mus musculus
  source 1..514: mol_type = other DNA
accagtgggcagctcccagcatgctgaggtgttccagggactcaacaggaaagaaccttttgttcccaggattggcaacagtcttaagtacagaccttggcatacaccaggtctaggacttaaaggacacaatttaccctctctctctctctctctgtgtgtgtgtgtgtgtatcaacaacagtgtctatgtggtcaatgtttattccgagggcgaagaggtgaccctgggttcccggagctgagcttgggcccaggccaggcctgacacctagcggcctcctagagaccgggaacccgggcgccgaacccgcgccgctaaccggtcccgagccagtccggagccagtcccgaagctgctggagttcgggtcctgagaggtgccctaccgagtgccggcgcctggcgggacttccggcgcaggtgaccgtcgcctcctcgcgcgcgctaccgcttccccgccgccgccccgtctccatggcgacgccgtcgcgccgaggctcgtggaacctgcc

SEQ ID NO: 46138 - DNA, 373 bp, Mus musculus
  source 1..373: mol_type = other DNA
tccgcccacctctttgggcttcccccaggcctgtcactttgagggacgggtggaggatttttaaaaagcaggggatctctaaggcacatttttttggcaggcatgccagtgctgatggcctagtctatggctccccctcatagagcagaatagactctatttggttgctgacatctgcagcacctagccaaggcgcctgtcaggaagagcccggaaaggcttggagggttatgccaagcctgctgggctctgtggcctgagactacgtggtggcggccagagggcacggttgggccgcagcagagagatgctccctggccccacagggctctccttgcccagggcgggcggggaatcagccgggttcgcgctg

SEQ ID NO: 46139 - DNA, 492 bp, Mus musculus
  source 1..492: mol_type = other DNA
agatgacaggatattttatatataactcaatatgtattgttggagcaaaggccccgcaagttgtcatggggcccaagtcagtatccagccatgtgccaactgccccgtcagtgggggatgtggtggcatataaatttaaggcctgcctgaactacatagtttgctccaggccagcctgggctacagaataaacttgtttgatgcgaacgttcgtgttatccaaggaacatttagtagcgggtgagcggacccaggcaccgtgtgccctgaaccagctccagctcccttcagtcttacctgacgtatggcacgttcgcaggaacgtggaacttggaccctgggtcaaagtcaccttgggatcttggcactttcacttgaagaacagtccctgcatcagaatatcctcttcccctgcatgctacaaccacccgggggaccccccatcactggtgtgtacgcacacatacttctagaacctgaggctccaccact

SEQ ID NO: 46140 - DNA, 322 bp, Mus musculus
  source 1..322: mol_type = other DNA
agcagctagcccctgtctgcaagatttttatacagaagaagactgtctcagggggattccctaatccaagtaatcactctgcagactatctgcgagaagtaaatttgaatattactgaatagataaccttcttactgaattcctactgaattccaagtttgttggagtcaactatgtcagaattcaatttttaaaggcacttataataaaataatactaaattccaggaggttgagtttccttgaaactcccttccaaggcctcttggcctgccaagcagacttcactggagtgtgcgtagcaggctatctgactcatgatt

SEQ ID NO: 46141 - DNA, 380 bp, Mus musculus
  source 1..380: mol_type = other DNA
gttataagacttttccgaaggtttggtcttgggaccctctgcaaagttccaagtccaccaaggtgcttaatgaactgtctaagtgtgttcatttttaatcagtacacagacacttttaccagtggtcacttgctaataggtggcggccatttgtgggcaaggggcctaagtgccccattgccacagtcagcagaaagagatgctgaggtctctgtctatttggacatgagcagaagttcttcagagtatcccaggttcaggacccctgccccttatggatcagaacgacgcggacagctcccgggcgcaagcctcgtggatggaggacgggcggggcccgatagccctccccgggggcggcgcccaccccagcccgacgc

SEQ ID NO: 46142 - DNA, 350 bp, Mus musculus
  source 1..350: mol_type = other DNA
atctgtaactaactccagtagtacacttacttatactcgggcacatacaaatacacgtaaaattaacgtgttttaaagtactgcctaacaattcaatacaacccctttcaatatcgttgaaagaatttacatttatattggtgtacctagatccaggtttttcatggcatataagcatttaaagttggattaccatttggcttctgaacatcccagaggaaggtaagtgactaaaggaggaaagccttaaagccaatgatctttgggacttcaaaagagcccgcctccaggagctgggcgggggcagccaacgctcgtcgccgctgcggggtcgcgtggcttccgttccg

SEQ ID NO: 46143 - DNA, 372 bp, Mus musculus
  source 1..372: mol_type = other DNA
ggaaatcgggcaagccggccgcgctgccactatgaagtaccttctaactatacccttagatcttaggcacctaaagagcttcagtgaccagaggttctcacctcgcgctgacatgcagcgtcctgtgtggcgctgcaccacagccggggtttgcatgctgggaggcgccccaaggacccacctcaggctggcggcagcccaagacagcaaagatgagcagctaaaatcagcccgtctagtccggccccggaacaacccggtctggacgttcagactgagtgaccgcgaaggagccgggcgcggggaccctaaatggtgtacacttcctttgcccggtccgccgcaaaaagacgttcccgaagcccctgccag

SEQ ID NO: 46144 - DNA, 396 bp, Mus musculus
  source 1..396: mol_type = other DNA
tcttgttttctctgccaagagaaccgatggacccatttctttatctgtaaaataaatatctgagaacacatatattaaaaatacttaaactaattttaaaagcccgatcttttgtccagtatgggttggcaaaacaggcaatgccatccttgtttacagaaatgaaatctaaatcagaaagtatggcctgccttttttaaacaggcaaccttggcggcggtttctttatctgtaaaatgaaccgactgaactacatatttctttttcaaccaaacaattcttattctggacttgctcagttaggaaggaaagccggcgtcactcctggcaggggcttcgggaacgtctttttgcggcggaccgggcaaaggaagtgtacaccatttagggtccccg

SEQ ID NO: 46145 - DNA, 661 bp, Mus musculus
  source 1..661: mol_type = other DNA
gccgaaggttttctttttctgagggcctctacagaagacgactttgcaaggcgccaggccggggtagccgccgaggggaacggcgccagcccgcgcgcccgccgagggttccgcaactgggttgtgggcggagcctcaagcgagcgccagctagcgacactccgcggcgggtactcagcgctctctccattggcaggctctagccaggaggcgggagtatctgacttcctcctggttgcccagcggctgcatgcgattggcagatgctggcatgagacaggctgcaaggcttgctgcgcgcccagccggtcggagcgtcttctggacttcaggactcgcaggcggcccggtcgagtggcgccgccgaggccgggttgggccgagcctgggagcgccggggatgtagcgccaacctgctcatgccacagcgcccggccgcggccggagccggagcctggggaggcggcgggggccccgagcgcagcccacggcccccgcgcggagccaggcccgctgccgtccccgccgcccgctcccccggcatgcagccccggctgcggaggtgacacttctgggctgtagtcgccaccgccgcctccgccatcgccaccatgggtgagtaccgccaccgccccggcctgtgcccgcgctgcttcgcgac

SEQ ID NO: 46146 - DNA, 578 bp, Mus musculus
  source 1..578: mol_type = other DNA
cccttctccacgagcggcagaggaggggggggtcggcggcggcttctcccggaggcggccccgggcgcgcggagccaatgggcgggcgcggggcgggggccggcgggggcggcgccgcggtgaggcggcggctgccgctcggggaccactggcagcggcggcagctcgcgcccgcgccacttgcacccgaggcggtcccgcagcgaccgacccccgccccgcggcgcaggccgggcccggtgagacccacggcggccggggggaggggcgcggagcgttgcggggccgacgccgcctggcggttcgcgcgttgcgctcgcggggatcccgaggctcgcgtcggtcccgtagggccggctcccgaagagcgggcgcgggaggcagcgcagcctggccaggcaggaggtcgggcccagcactgtctaggggctggacgtctaagcccggtgagggggcgcgcgggtctggcggtaccctgcccagacctctgcccaggcggggtctctgcctgtgcttcccacaggcaaagaccgtggagagcctgcagagtgggggagggctcatggggccccactgac

SEQ ID NO: 46147 - DNA, 532 bp, Mus musculus
  source 1..532: mol_type = other DNA
tgtgtgaagacagtctccagctgggcttcaggcaaagccctcagcagaagtctgtgccctagatgctgctgcctagagtcccccctcaacctgctgtgcagtgggctggggcggagcggcaaaagcagctcttgttgcactgtgcttgatgcaaaggggcttgacctgggccatggcaaggcccgaggttaaccattgatttcggaaaccacaaggctgcagttctcgcggatctgtcacaccccttcagtagtgacatgggcccaccgccggctcccttatacggagggactacgagccgcctcctcttccggctgcctcccgagtccccacagtggggtgcctcaaactactaaggcccaggccatttctgaaggtccgcgccggaagagccttgcgttcgatcccttctccacgagcggcagaggaggggggggtcggcggcggcttctcccggaggcggccccgggcgcgcggagccaatgggcgggcgcggggcgggggccggcgggggcggcgccgcggtgaggcg

SEQ ID NO: 46148 - DNA, 339 bp, Mus musculus
  source 1..339: mol_type = other DNA
aaaaaacaaaccatagctctcgtttagttgagctattttctgtgctttaaggagaaggaactttgggcacaaagggtaagtttcctctttgtattgcctgagactgacccaagaaagacttgtttttcaattggagtcctaccaggtgaaagagactcgagggagactctagggtcctttgccactaagcggagcttcctccgggcaaggcaggacttcctctgctggaggcaagaggcggagctcccttcttgggtggggcaaagcagggcttctccgtaggggaggggcgggacttcctcggggaggggcgaggctcggccagtctccctgggtccc

SEQ ID NO: 46149 - DNA, 577 bp, Mus musculus
  source 1..577: mol_type = other DNA
agctccagagggccacctcggggctccagagcccggacccccgcagccacccgggtccccaggctctgaacgaggccgaggttcctccgccctcgccaggccccagttacccgtgtcccccgggctagcggcactgcgtctggcgagcccttcacccaaacccgctgccgcggctgcagacgcagttgctactccagtcggcgcgagaacccccgcggccctgcgtacgcgcggtgcgggaccgcgtccagccgcgctcttcctccgcccccttcgccgccgcctcacggcccgttgctgactgggggtagggtcgcgctaagtagagcgcgagccgaagggtggggctggggctacggctgccgaaaggcgccaattaatgccgctcttccgattccggacaccccggacgggaatctggtcctgggtattggaaacttcatttacattgccaaatggccccatagactatggccaccgccaggggacgctgggggttacgtaattttcccagcagccctagctcgccttgcgcggatgtcctgaaggccgcgccccgcccccaccccgcgcgcag

SEQ ID NO: 46150 - DNA, 392 bp, Mus musculus
  source 1..392: mol_type = other DNA
ttttcttttaattctggaaagataagttggctctgcggccatgcaacttagtcagctcggcctggcactacctgcacccgaggctgcaaccgggcccggggctcctgaggccagataatctgcgggccgcctgcgcgcggggtgggggcggggcgcggccttcaggacatccgcgcaaggcgagctagggctgctgggaaaattacgtaacccccagcgtcccctggcggtggccatagtctatggggccatttggcaatgtaaatgaagtttccaatacccaggaccagattcccgtccggggtgtccggaatcggaagagcggcattaattggcgcctttcggcagccgtagccccagccccacccttcggctcgcgctctacttagcgc

SEQ ID NO: 46151 - DNA, 502 bp, Mus musculus
  source 1..502: mol_type = other DNA
ttgactaaaagcaatttattctagagctagaagttacaggaataataaagttgtgatattctttcaactgtataccaaacccaggagggttttcttttcaatatgtaatacacaactatgttatgtttgttgtatatattgacaaagcttagtaccaagaaaggttttagtctgtctgtctgtctgtctgtctgtctaagacacttgctatttaattcctctgaggaattaaaggaatgggcctcatatcagttggtaattgatgttaagggtaccatatcatctcattgcaaaaagagggaatctttagctcttaagccacacatatattatgggtggatcgtgtacagtatacgttagtgttgagagttctatactgtatggaattcaacactaagctggatttttgatcaactgacatttttttttaaaaaaagaaccttattcaggttttttttttaatccaaattttaagtttactgtgataagccagtaatatgag

SEQ ID NO: 46152 - DNA, 314 bp, Mus musculus
  source 1..314: mol_type = other DNA
agtattttcgaggcactctaccatatagcttaagaaacaaggtcaggaaaataccattcccttttcctcagaaactggtatcgaattcggaggcttagttcttcctgtggctcagggcggcgctgacacagcattggatgccgcccagccgccgcggcagtcgcgcaggcgcggaggcgaaagcatgcgccctgggtcaccaccgagaacagttccggggtgtgtggcgatacaaacacagtggctgtattagtagaggctctattgtaaggcctgctgacaaaaaaattttggccacactcaaaatggcggaa

SEQ ID NO: 46153 - DNA, 277 bp, Mus musculus
  source 1..277: mol_type = other DNA
tcccttccaaaatttgagagagacacatactatggaatatttaatctgaattgtgtaatacaaggcccgggctttctgcaggaatacggaggcctttcccaggaggaagacatgtaggcagtaatcgtacttccgctttccgccattttgagtgtggccaaaatttttttgtcagcaggccttacaatagagcctctactaatacagccactgtgtttgtatcgccacacaccccggaactgttctcggtggtgacccagggcgcatgctttcgcct

SEQ ID NO: 46154 - DNA, 405 bp, Mus musculus
  source 1..405: mol_type = other DNA
acctgggccccggggccagccctgtgaagctgccagggactgtgtgtgcaaggcagagctgccaaacaggcctttcaggcagcagcgggccttggatgggaagtcaaggctgcttgtgccacccagacactggggtggcacggggttgaaccagcagcggcctggctgccaggtgaaccataatttctttttttgaaagtcttttgacatagagagccatagggaccatatggtgaccagatggtgtctgtactctcttgaggccatccccacaagtggggtgggcagcagacttcacgagcctcctggatgggctatctaaggactctataagattagtactaaaaagtccctcaggcccttcccatggactctggctgcctcatttgttggcaaggctgccag

SEQ ID NO: 46155 - DNA, 273 bp, Mus musculus
  source 1..273: mol_type = other DNA
ggtctataacatagccgaagccatgaccaggcttctatacaaactggataaaacttatttcagggcagttagtactgagttgggccaagccaagctttcactcagctgggtcacgtctggggccgcccatgtccttgggcgcggagcaaccaatacaggcttcggtgggtgtgggtgccttatgccaccggccccgggcggcgttttaagccatatcggggatctcgccgcgctcctccgggaaaaggccgcctcccccaagggcggggctct

SEQ ID NO: 46156 - DNA, 119 bp, Mus musculus
  source 1..119: mol_type = other DNA
tggttttgggaaccaaactcacctgagttcaatccctgggacccacatgatggaaagatggaatcgatatgcaccttggctcagaggacacaccgggtgggctctgtcgctgggatctt

SEQ ID NO: 46157 - DNA, 235 bp, Mus musculus
  source 1..235: mol_type = other DNA
caaacaaaacccatttaattggccttatggtttcggtgacaacagctttcttttccccgagaaagcaaatcagagctctctgggcttctcagaactctcagggactctgagctgagtctgagataggagaggcgcttccatatcacgcgatcgcaggctaaagagcaaggcatgaccttgctaagcaagggttatttcgaagcaggagatggcttcagcacaggcgcacagcgcc

SEQ ID NO: 46158 - DNA, 285 bp, Mus musculus
  source 1..285: mol_type = other DNA
gatccctgtgtagccctgcctatccttctcaacctcaccattagagactatttccaatggtcttaggaactgagacacctctcagtagcaaaattacagttttgaagtagcaacaaaaattaatttatggttgggggttcctaaggttgccacccacaggttgaaaactgctgattgagagtgggatgacccggctgtgctacccaggcaggaccaccctagctgccctcccatagggtccctggagggatggtgcctcccctgggtctcaatttgcatggcagg

SEQ ID NO: 46159 - DNA, 304 bp, Mus musculus
  source 1..304: mol_type = other DNA
agtgccaagaccctgaggatgccctggggggtggggagtggccacagtcactgactcttcctggctctccactccaggactatggaaagatgtcacagctgtggaaatagatctcatgcatgccttctctctgcaaatctgcagaggagtgaagagccagggtctgcctagaatgccttccttactgactcagacgaccaggtgggtcacccagggttagctgggaaaccccatacaggggcctcccacgatggatctggcctgtttcctaggccccagggggaggagccctccctggcgtccc

SEQ ID NO: 46160 - DNA, 250 bp, Mus musculus
  source 1..250: mol_type = other DNA
ctggaattagagaccactacaggtcccctgacctacatagagccttgcctagtgacagccgggatgtgtcctctgctggcatctcacagattcctctgtcccttcctgaagaaactacagcctgggccccagtcacatttgtaacggatgaggactcttgctcagggaaagccttagacccatgctggggttgaggccagggtcaccttttggggtgacccacccctgggggaaccaggctgggctggca

SEQ ID NO: 46161 - DNA, 276 bp, Mus musculus
  source 1..276: mol_type = other DNA
atgcaagtgctgtacctttttctactagaataataagctactttttcggacccagtgaccaaacaacttattgggctcattagttctgattaataatccacacccttaaacatgtaaacacatgtgacacgactttcggggaatcagctggaggaccctcgtcagtgaactctaaggctgcgtctcagggtcgaatttcaacaagcttcttcattgaccaagagttggtcttcggcttctataggaggcagctagaagctagcaccgcgttggcct

SEQ ID NO: 46162 - DNA, 341 bp, Mus musculus
  source 1..341: mol_type = other DNA
atctggaggacaaaacccctttctgggattctaccgagaaagcaaggaggcctgcttttgccacagtgcctcaggccgtgttcctgacctcctgggccccaggagacgactgtgggctcaatctctgagccctgtgttggcttctaactttggatatcatctttccagagatgacgccaacaattcagagttcccctgatctgaatcttatgtacagttaaaggtaagtgcatgcaagcttgcacacattcatgcatgcacacacacttcctgcatgtgaattcttgaggccctaaattgtttcctgatctcagataattagaggaaatgagctcactggc

SEQ ID NO: 46163 - DNA, 305 bp, Mus musculus
  source 1..305: mol_type = other DNA
ttttctccaaggtccagagaaaggagaaggttcatttctcattgacttttgtctctagagagcccagtgggactctgcctctctcacaggcagcaggggccagctatggtacccatctgtgtccaggtgggcatgaggaaggctgcagggtgccagggaggcctgatgcctgccctccctctgcccacccgtgagcggataagacaaagtctggaaggcctccgaacagtttggtcatctgaactgcaatacagtgaaaaagtagaactccttagagccttctagaaagttccttgaggacaatg

SEQ ID NO: 46164 - DNA, 367 bp, Mus musculus
  source 1..367: mol_type = other DNA
attaaacctatcaaaggattactgtattttgtcaaatagcatttggttgtatagacaacaaaatttatattttctcataagagcctttgcatatgaataatatgctatttacaattatgcatgagattttaggtattaacaggtcacctggcaagtggatgtttacaagaagttagttgtttaactcctttttcaaaaatggtttgctcattctattcccaaacatactgggagcaaagctctgatgcggatcctttgaacccaagaggcacttcggttctttttcccaacatcaacctaggtgtagggagctggaaactcgcagtttcgtcccacaagaaagctggcttcctactggtcaatactg

SEQ ID NO: 46165 - DNA, 417 bp, Mus musculus
  source 1..417: mol_type = other DNA
agggacctgcgggacggaactgatgggtgtattttaagcgagaactcatttttaaaagtcaccttcacacgatccctctaaggtaaacttatgttatcctgcctatagtcatagctaaaacccaagatcataatatatgatatatttacgtcttctggaactagcagggtgatagtccgacgtcctcctaagacctctgttcctaagaatctgcctagccagacagtttccccagtttcaattgggagagtgcaacgctcgctcctcccactgggtcgctggccgatcctccaggcccgtcgcgggcgcgcggcactggctggattggtgcgcggctggccccgccccctccgccctgtggttgggcggtgggggccgcggccgcggggcgggtccgccggcggggcgggacggccg

SEQ ID NO: 46166 - DNA, 308 bp, Mus musculus
  source 1..308: mol_type = other DNA
ggactggatttccattctctcatgaacatgcatgaaagcgagtctgatgatctaagtttgatcctgggactcacataatccacatacacaaataaataaatgtttaataagaagaaagtagtgtgtactacacacacataccaaaggggctcctttggtgactaagccggtgatcagggaccactgcagcggcttggatacagcccccattgctaggtatcccacaaaagcacttttgagtggaaataaaacctccttgtcctgtcccctccggaaggccagtcatttcctgaggagatatcaggcca

SEQ ID NO: 46167 - DNA, 404 bp, Mus musculus
  source 1..404: mol_type = other DNA
aaaaattacctttgaagttttaaaagacagtccaccagctatcctggaatttgatacataggccaagctggccccttatgcatatgttaacatagtcctagtcaggtattaactgatttctacgagaaggtaagagcactgctcttcaccacctgtagtgatggcctcttctggttctttaaaaaaaaaaaaaaaaattctttttaaggaggtggttaataaattcccgaagccctttttaaccaccctgtctgtccagccacacccgggagagatttgccagcattagtataaactataacctatagtaagacgctggcgtcagccgcggaggccgggatacgcccaaggcggctgctgctcagcagcgggtgacgctcttccggtgtgcctgcaccccaggc

SEQ ID NO: 46168 - DNA, 94 bp, Mus musculus
  source 1..94: mol_type = other DNA
cattgggtgaaagtaagaacactatcacagtttttgagccaaatgtgctctggagagtgttaagagcactgactcgagtcataggtcctgttga

SEQ ID NO: 46169 - DNA, 517 bp, Mus musculus
  source 1..517: mol_type = other DNA
taacctatagtaagacgctggcgtcagccgcggaggccgggatacgcccaaggcggctgctgctcagcagcgggtgacgctcttccggtgtgcctgcaccccaggccctggtgctggtgtagcacggtgttccgactcctgaagcgatgcgctgcggtggcggcgccagggcctgccgcagggcctgcaggtgctggctgtccgggtacgcgggtcccgcagatgggacgcagcagcctgacgcccccgagcatgcggtggcccgcgaggcgctggtagacctctgccggaggattcagcgggacgccgcagcagctcagcacggctgctctgctgagcgggtgccacgcgcgctttggacctagcctcacagtgtgttcagggagcaggtcttcgcggtggactccctccaccaggagccgggctcttcgcagccgagggacattagtctctccagaaagtatacgcggcatttcttgagaacttattaaaaacttcagaagtgaccaggttcctt

SEQ ID NO: 46170 - DNA, 159 bp, Mus musculus
  source 1..159: mol_type = other DNA
aaatatcgaatcaggcttacgtgtgatagaaattgtatcttattcccttgaatgaaacggcagagaggcacattggcgagtcaccatcgcccatggttaattgagttgtcaacaggacctatgactcgagtcagtgctcttaacactctccagagcaca

SEQ ID NO: 46171 - DNA, 445 bp, Mus musculus
  source 1..445: mol_type = other DNA
acagtcccgagcctccgcagcggcgcagacgcggttcagattcagcccaggtccggagctggccatactgccaggagaggtcgcggccggactccaagacgagagcgcgggcgacggtgtcccagaagggtcgaactcggtcgagcagcacgcgctgaggcggctgcttccccgcggtcaagatcccgcttacgggttctcagatcggcgggcagggcagccaggtcacccagcagcccggccgatctccccgggggcgttggagccgcgccagccttgccctgggtccgatcacgtgatgaggccaagctccgccggcggtgtcgccaaaagggcgtcggggcgaggcattcgggcgccggggagggagcgcccgcccgcggagggggagccggaacccgggcgggcgggcgttgagggcctccgagccaggggggtaaaagcg

SEQ ID NO: 46172 - DNA, 405 bp, Mus musculus
  source 1..405: mol_type = other DNA
gccgcgagtcgcggagagaaggcctcggcgacggcgaagcctctgcgggggcgtcaccagcggaggggccggtggtgtcgaaggtgccggctgcgtcccggcagccgcttttacccccctggctcggaggccctcaacgcccgcccgcccgggttccggctccccctccgcgggcgggcgctccctccccggcgcccgaatgcctcgccccgacgcccttttggcgacaccgccggcggagcttggcctcatcacgtgatcggacccagggcaaggctggcgcggctccaacgcccccggggagatcggccgggctgctgggtgacctggctgccctgcccgccgatctgagaacccgtaagcgggatcttgaccgcggggaagcagccgcctcagcgcgtgctg

SEQ ID NO: 46173 - DNA, 555 bp, Mus musculus
  source 1..555: mol_type = other DNA
taaaaaccccttctaagctgttgtttactactaagtggtgtccaagaagcgcctgatgacagtgtgttctctctctctctctctctgtgtgtgtgtgtgtgtgtgcgcgcgcgcgcgtaggttgaaaagctatagttaaagtttcttaacaatataatgtcctcttagtactaatgtgtagtctaggcttcctcgcagccagcctcctgccgaagcctggtgctacaggcaatcgtgtagagctacagcaggtgctcccgccgccgcaccgaaagcccgactcccgggagactccagggccacgcgcgcagccgctgcccgagttctcgcgccgcccgcgtgccgcctacgcaggaccgcgcgcctggcccgacccccggcgccggaagaccgcgccgcccgccgacaaccgcgccggcttccgggatgcagtgcacgcgcccgcggcgcttccgggcccgcgcctcgcgcaggcggagaaccgcgcgtccccgcccgaggactctccgcggcgcgcgctctctcgggccgtgcgacctccgggcgcgcgcgccg

SEQ ID NO: 46174 - DNA, 311 bp, Mus musculus
  source 1..311: mol_type = other DNA
aactcagaaatccgcctgcctctgcttcctgaatgctgggacaagtaatctaaaagtttacggctagccttaatcaacaaatactataaacaatatagtgatacaactaatatgtaaaatttttttaaagtaaatatatttctcttttcttttattgagacagggtctcactatttagccctggttggcctggctgtataaaccaggtttgccttgaactcctagtgctgggattaaaagcctgcgccaaaagctaagcctttttttacaagtgtaataataatttcgttgtgtgctgagatatttaaatc

SEQ ID NO: 46175 - DNA, 544 bp, Mus musculus
  source 1..544: mol_type = other DNA
cgccatccttcctatctgggggtgtggctcccatggctttgcgtagtgactgcccccagtctgtaagtcgtgcctctagtttcccaaaaggaccggcgacttgggaggaaaattccctgttttccggccccggtttgggagacacgcattgaggtctccctaagacctcagctgagggggaggtggtctcccaggaggagaccccagcctggggggacaccccacgtcgctcctgcgccgccgccgtgcagccgcgcaggggcgctccggggcctccccgcccccgccgcgccgctcccgcgctccccctagcggccgccgcgccgcctcgctctgtcccaggctcgtcgggcggcgcagctcacgtgaccgcgctccgggcctgcggccgctgtcggttcccccagtcaccgagcgagagcggagcggggccccggcaatccaccccgccgctgccgggccgcgcccctcccgcccggaccccggcgccctcccggccccggcgcccccacccccccgcaagccgcggctccgacatgagggg

SEQ ID NO: 46176 - DNA, 455 bp, Mus musculus
  source 1..455: mol_type = other DNA
cagccagggcttgactcagtgctaagagcactgactgctctaaaccacatggtggttcacaaccatcgtagcacatctgaagacaattacagtgtacttatgtataataataaataaaaacttaaaaaaaaaaagatagtcagtctttctgtgtagctaaggctggcctagaattctatgtagaccaaattgatctcgaattagtgctgggatcaaaggcatgtgtttttttaatcaaaagagttgtacattctgataatctggaaaagatttctaacctgcaggtagttcactagcatatttttaaaatatgtttttttttatatcaggccgtttttaaacttatctctcaccttccaagaggtgaaacaagagggccgcctcgagggtgcacgtggtctagactccacccactcctccttggtgtcggtcgctctcgcgagaggaagcacaaa

SEQ ID NO: 46177 - DNA, 432 bp, Mus musculus
  source 1..432: mol_type = other DNA
attacatataaagtctgacatgttacatggctaccacaattgccatttagatggctgcataaaaatgtgttgcagttgatgtaatacaatttatttatttgtccagaataagttcttattcttttttcctcctgggacagcaaaatacagttgtcctgggcagcagcctctcagagcgcgcagtgggagtattactcgggcattctgccctggcccctctggtgccatcgagccggcgccgccgggcggtgtagttcggggcccagtctgggccgtggcgcacgcgctgcccgcagctcgcgcggagccaggccttcctctggcgccccaggcgcaggagacctcgccccgcccgccggccccgcccccgtctcctccccgcccccaggagccgacgagtggcggcggcggcggcggcggcagcggctgcgg

SEQ ID NO: 46178 - DNA, 133 bp, Mus musculus
  source 1..133: mol_type = other DNA
actagcagccactgctgcctaaagtgtatttcagtcattccttaatacttactaagagtcctttgaaaactcttgggttaatatccaaaaaaagaaatgttcttttccgggatgtgtcatttcaaagacatgt

SEQ ID NO: 46179 - DNA, 293 bp, Mus musculus
  source 1..293: mol_type = other DNA
agaggccttcacgtgagcaaacaatggttcttgtctcacctggcatcctggtacctgggggttcttggaggcagaagaatgccatgcttgacttcatgatgaatttgaggccagcttgagctttgtaagacctgtctcaaccacctgtgagacgggatgtccagaatggaagtcaaggcagactctagttcttagcttgtgcacggtccttaaagaccgctagaactccagggagctcaaggacagtcaccttagaccccagtgactgctgacttttctcagcagaaggcacc

SEQ ID NO: 46180 - DNA, 324 bp, Mus musculus
  source 1..324: mol_type = other DNA
ccaccttagccaccacaaattgctctggtcactttgtggctgtccggacttatgccatcaaagataagcttcatttttttcttgatgatcctggttttgaagcaataacatgggcgccgcagctgggtgagggtcctcaaagggctcgttctgcacgtatacagctgtccgattttgtactgcagaacggtgccttctgctgagaaaagtcagcagtcactggggtctaaggtgactgtccttgagctccctggagttctagcggtctttaaggaccgtgcacaagctaagaactagagtctgccttgacttccattctggaca

SEQ ID NO: 46181 - DNA, 329 bp, Mus musculus
  source 1..329: mol_type = other DNA
gaattgctattttctcagagggaaacacaaaaacactgattgttatattactgagcgcccggggcctagcaaacacagaggccctttggacttgcaaattttatatgccccagtaaaaatacctaattaaaaaaaaatatgtatatattactgagctgcgctcttagaacttttttgtcttaagggtcagttttagcctcctcatttaaaaatgctgctgtgtcacattttgggcgaggagactggagtcccgccccgcctccagggctgtctgcagcactgcctgactggcgagggcctcacggggtccttcccgcgggcttccgacg

SEQ ID NO: 46182 - DNA, 462 bp, Mus musculus
  source 1..462: mol_type = other DNA
atgcacttttttcctccatttttaggaaaacaagctaaaaaaaaaaaaaagcagttacatgctgcttcctgagtaactaaagaatgtgcttcttgtcaacaccccgggcatttttattgacatttcactggctctgggcagagagccagggagaaagaggtagcaggcaatgcttctctctctctctctctctctctctctctctctctgtgtgtgtgtgtgtgtgtgtgtgtggttgcgagcgcgcacgcatttttactagaaaaacccattctaattactccatcagagagaaaaaaatgttcgctgtgagcatttgtacaaaaggggcactagtgcactttggaaacggtttccaaagcgacttgggacagccctggcgtctggcagcagacggccggatggggctaccctccccgccgcggccgctgctgatgtcagcctcctgccccaggcacactg

SEQ ID NO: 46183 - DNA, 270 bp, Mus musculus
  source 1..270: mol_type = other DNA
tatgaaggctttatttgaactctcaagagtttctaacactgcaaatagcaatgaagcttttttcttttacatcaaataaagctggccttgctagaactcttagagatgtccagccccgggatcaggacctccgtgggcagcaccagtgcctggttttggctcctggactgtagagtagagagagcctccgcccctgtcccttcagtgatgggctggatggattgttgggagtatttttgtcatagcaacagcaatgaaacttctttctct

SEQ ID NO: 46184 - DNA, 385 bp, Mus musculus
  source 1..385: mol_type = other DNA
cccagagccagcgtggcgcccgccctctaccttgtcccgccgcctggggtcgccgccttgtgggacccgggggaccccctcccggcccaggcgcgcatctaggggagggggtcctccgacctagagggtcgcgagttcctgggatcctagggccccagagtggctccccgcgcgcgagtgcgacatgcctggcggatgccccggggcgggaagcgcgaggggaaccgctcgcaggcgtgcgcattcatgcgctcatgcatccctgcatacatctatgcatccgctacgggacacgccgcgctgaagggggccgggcgggcctctggggccaactttccggagggaggtgcagccggagggggcggcgccggcggcgggaggcggg

SEQ ID NO: 46185 - DNA, 397 bp, Mus musculus
  source 1..397: mol_type = other DNA
ctctttcttgcctgtctctgaacacagtgcaaagcaacagctcggctgctctgggtgctgcagagagctcttcacaaacatctgaaaagcacaagggctcgtgaacctcaggggcagagctgctcttctgggcccaatgacaatagtaaaacatgtgacctgtgtcaagctaggctcaggcctgttcctgggacccagggcctgaggtcctcacaaacactgctggtgttggtagcttgccgtcaagaactcttggggttccccttttggttctgaacactctctctccccctcctccgggacagggtggggggtatttctagccctcagatggggacacgcctgagcagctgctccgactgcccagtgtctcaggccagcccactctggctcagcc

SEQ ID NO: 46186 - DNA, 336 bp, Mus musculus
  source 1..336: mol_type = other DNA
tcactaagtcaaacctcacaatgcctctatgattcagcgtccaggaagggcggagaggagggaagatttcctcaatttcgctaagaagcctaatgcatcgagaggggggtcacagagcccaggggcagtgacccagggctgctgcctcagttacgggagacgcggcgcggttcccctctcaagagaaggccggccggctggagctacctggctcccccagaaccgcttggggcccaacctgcagttgggggcttggagtgagcgcctagctgccccggggctccccgcccccggccggccccgccccaggatggccagtagacaccggttgccaag

SEQ ID NO: 46187 - DNA, 357 bp, Mus musculus
  source 1..357: mol_type = other DNA
gtcacaaagaggtgatcttcatctatctccatcccacagaatgggatacagaatcctggggactaaggagatcctggctgtccagcttccccggggtccttccagggaaccttccagaggcggaggggcggcgccgagagagcgcgccgggcggcgggcggtgggtggggagggcgggccgagagggaggagcccccggccgccaccgccgccgctgccgccgccgccagcccgcccggcggcccgcgtagcccgcgcagccctcactcgccgccgcgcctcggagtttgagccccgcgcagccggagcgcaggcacgcccggggcgcggggtcggagcgcgcagcgcggcgccgcc

SEQ ID NO: 46188 - DNA, 465 bp, Mus musculus
  source 1..465: mol_type = other DNA
aggtccttacccagccctgggggaattttgctgcgcagtctatggcaccagctcagagcttagagctccacttacagtaggcagactgacagcagccgcttgcagctgggtgctatccacagaataataataagattcatgcatatgcatgacttgtttgaagacaaaggccatgttttttaaacatctgtaaatgcgcgagaaacatggtatgattatgtaacatgagcaaagagctctgagccttcagcggctgcctcctcagatgctacctccaaacccagaggcagcctcagcgcctgtatatcataaacataccagcttttgaatcaaaacaatgcaaaaactgctgctaaggtttcttagttttttttttttttttaaaactacactgcactaatcaagaaaatgtccatggctccctgtgacaagcagggaagactgtcaggtatgtcacacacatgg

SEQ ID NO: 46189 - DNA, 470 bp, Mus musculus
  source 1..470: mol_type = other DNA
ccaactgcatgcatgcacgcacatgtgtgcacactgggcatgtgtgtcacacacacacacaccacaccaagttgctggaggacgcccgcggccagactgcccagggcatgcttccagcttgcagcaaatgctactgtgtgcaaagtttacacatgtgtggacaaagtttgagccatatgtcttcccagccagtctggctggatagcacctgtgaaattaagtttgacggtacagatgtggttctgtggtgtgtcttcaggaacacccccttggcatccatgaaatgggaaggtaggtcaaatgaccagagacctgaaaagtgttttgactagtgtctggcccctggggctggaataatctctccaccaccgactgcagcggccgccacgaggacgcttccccaccccaagggttctcctctgggtggaaggcagcatccttctgtcgaagtcagtgttccagcggcggcc

SEQ ID NO: 46190 - DNA, 504 bp, Mus musculus
  source 1..504: mol_type = other DNA
gcaattagcttaggatgcaaaatgatttctaagttaaggttctggaccgatcatttattacgactgtcatacaaatctatataataagcaggtgaaccgctcccttttaccgactcggaacttagtggcataaacgactagaatgacaccaaatgcctgtgggtccaggtagctagacaaggagctacctctgtacctgctaaggtggcgggcggcggaggagaaggacccgcccctcccggcttcttcctgggctgcagggcctctccccgaccgccgccctcggcagttggcggggctcacaggggccccccagtctgcgtgtccagctctgtgcagcggagcgcagaggcccaaggctcgcccggcgcgcgtccccgtcccgcgcgctcctactccaggccgcgcgcgcgcgtgcacacatacacacgctagctctccgggcatgcgcagtgggcggcgccgctccgggccgcctcttgccgccgcgagtaggaagcgcga

SEQ ID NO: 46191 - DNA, 425 bp, Mus musculus
  source 1..425: mol_type = other DNA
taatgtgaattcatatcagatgcagtaagaatgaatgaatgcttctttgatgtcacagtttgagcttctgagaagatcttgttatgaagagcagctaaaaggccaattttgaaaaaaaaaaagtagctgttttgcaacaaatgctggacactattttacatattttaatttttatttatgtgccacatgtgtgtcctagtgagccagcataatgagtgcacttaatagtggagccactccccgtggcccttgccatgacttcacatgtcaaggacactaaatgaaatgattctttcagaggcaattatgacctatttgtgctaccaagaaaagtgtggtcaatgattgaagaacagagttctctctgtcctttccaaagcgcagcgctttagcttctgtttacagaaatgaaagtaatttaatat

SEQ ID NO: 46192 - DNA, 347 bp, Mus musculus
  source 1..347: mol_type = other DNA
agtagtgagcaacattagaatatttttagctctaaaaccagtaagtgagctttcgtacattcaaagtgtctctgatggtgaatattcattatcaatatcctacagcagaggctgatgaagagtactgtgggtgtgtccgaaagccaggaatcaatgggcctttcctttcttgggttgtttctgtcagatatttgtcacagagactagaaaagtaactgatatgtgatcacaaatatgtgaacctttcaatatcaatagctttgaaatatcaagctttcaactgcctagaccttcaagtctctggcatgacatggttacagaattctgtgacggaattctgtgagaga

SEQ ID NO: 46193 - DNA, 395 bp, Mus musculus
  source 1..395: mol_type = other DNA
aacttgaaaagatgcttcaagctgtgcttcaattgaggtttggcaccacactgagtgcatcgcaaagactctgcaggaaaagcagcggcacactgcatttcattgaagggagttacaatttaaaattttaaattaaaatctgtacagagtgttaaacagaaagcttttaaatttcagttcaggatcttttcagacttatgatggttctaaataacaaatgtaaatatcctgtgttttgaataattcactggagtgtgaactaacaagggtaaattttcatgcttgtcaagtaagatgcagcatccactgtatagtccagggatcacaggcgcctgcgcaggtctccgcccttagcatgcgaactgcccgaagggcggaaattcccgccccctcgg

SEQ ID NO: 46194 - DNA, 386 bp, Mus musculus
  source 1..386: mol_type = other DNA
gatacctatgatgtatacagccttggttaattagggcaaagcagatatcatgtcagttgagcctaacaggaactcttgactgttttatatttatataggtgacttagataattttaagttgtctaatgtaatgataaagaagattaaaaaattgttatcagtttctggataaaatgagaatgtttctccttgaagggaaaacctagaatataggaagctagctaagaagctattttgtaggtgtattttgaaaatcgtcatcgtgatacacactgcaggtaagctgaacaggactatttaggagtcactatctgtgtttctggtctttccactcaaaatcagagagaaaagaaattgtgatgtcactgtcaggcctcacccctccc

SEQ ID NO: 46195 - DNA, 324 bp, Mus musculus
  source 1..324: mol_type = other DNA
atgaatgaataagtgttctgaacttatggcatatttttttaaggcccgtgccttataaatatggggtgaatttttaatactttaacgtgcgcaccttgattccactgtgtttctatattagtgcaaatagatagccttctgagtcagtccaaattcccagggaaatttgaaaagttcttgcaatggccagagagaaactggcattctagagctggagagcgccgagaacaccccggggccgccagcagccggcggggggcagacgagggccacgggggccgggccggggcggggcagagcgggcgcgcgctgtccctttaaggc

SEQ ID NO: 46196 - DNA, 697 bp, Mus musculus
  source 1..697: mol_type = other DNA
tgcacggccccccaaaaggggcgctggagcgcgctgggctggcccgggtgcggctcgcatacctcccttccaggaccgtgcgctcggctcgcgcctttgaagtgcacagttaaatccacagcgcaccaagccggccgggcgggggccgggggcggccgcggtgggggcggaggcccactcggatttttgcataaaaggggcagcggggcgcacgatccccccccccaaaaaaaacccggcgcagacctcgggatcgttgtcctcatgttccccacgcccgggcgggcccgggggggccccggggcagcctctgcgagtccagcgggggacccgggcaggggctctgcccgcggcgcctgcgaggtctccgcaagagtgccgaggccgcggcggtccggcggccggcgcgctttgatgtgcggggcggcgctttgaagttggcaggccggctatttcggggcgcgctccgggcccgcgcggaggggaagcggcgggctcggcgcccagcgctccggggggtttggccgggcggccctgcgcgcggtgagctggagtcccctcccctgcgcggggtccggggtggcggggggccgggagacgggcagctcgccctcgggggtcgagtcgcgtgggatgaaagggtggcggcgccccccgcttgccctccccgcccatccgcgggtccgcgcttaggtgc

SEQ ID NO: 46197 - DNA, 243 bp, Mus musculus
  source 1..243: mol_type = other DNA
cactccagcaattagttagatttataaccagctgacagattgtatctcctaaatacagaggccaaacagagagcctgtgtatcgacttttagagtgcatatgtatacagctgctccagctgtttttggcctcatctggcagctggaccatcaatattcaacatgtttatcaatgacttagattaaactctagaaaatatgagggtcaaattgcaactctggattctcaatcacttcaagagac

SEQ ID NO: 46198 - DNA, 496 bp, Mus musculus
  source 1..496: mol_type = other DNA
aaaggtataccagttgaaccactaaggcgaatccctttgttctttttcaacttaaacatgcggatatatgccaatataggctcatcaattggtgacacataccaatctccccagacaggttgaccctggaggggggtatttttaggtcagtttaaaagttcctttaagagtctattaaagacaaacaaagtaaaatataatttgcctaaactagttagtctatttgttaggccaattaataaaagtctacatctggtatttttttttatcttaaatatctatctaggaatattagaagcttcatggacacttctattggataccatgaaactgtttaaaattttctcttctcttataaagaaattcttatgtatataaagagggcagatgctctagcttcagcatccctgaggtttggtccaggtggagccggacgccgccccctggtggcaggtgggagcccgcgcagtgcatgctaatgagcgcgcggcgctgc

SEQ ID NO: 46199 - DNA, 128 bp, Mus musculus
  source 1..128: mol_type = other DNA
aagacagccagagcattgagtctcttcactttctgaaggttctacacctgctgaggaccaagtgctcaaacacaggagccatcctgtgtgagtcctagggaacactaggattgttcttagctaggact

SEQ ID NO: 46200 - DNA, 379 bp, Mus musculus
  source 1..379: mol_type = other DNA
aaaccagggcaggttatcaatagtgccctgagctgctagggtgaggtgttgatcaataacgacatctgacatctacttatccttccagattcgggataaagctcttgcctgccggtaatacccttactcgcctcggggctccgggaagcggtggctctggatccgcaggcgcgcgcgcccagcctggcccacgtgacccgggctccgccgctctccgagcgcgctcccggctgcacaggagcgcgtgactcccgccgctgccgctccctcctccgctcggcgtgcctgcgtgcgcgtacccgaaaggcagcgggcacgcgcacgcccagagggccgccgcccctccccgggcccgccctcccaccctcccccggccggc

SEQ ID NO: 46201 - DNA, 535 bp, Mus musculus
  source 1..535: mol_type = other DNA
ccacagtttacagtcttccaggagactaatttgagcattaaggcagactgaacacagccatccttttcagctttactgcaaagggcaagacatggactgtgagctcctggcctcgcccttgcttatgttcttcttgaacaacaaaaaatatgcttacaaaattaaagtttgcttccaagcctcactgattaaaaaaaacaagatgattcttttaaatgataaaaataaaagccacctctgcaacttatttgaacactaaggaataaaaatattgggtggttttcacttaaggaacagtatttaaaatactgttcaacaggatttgtgcagcacatgtatttaaacataaattcatgaaagcattagaaatgatatgaaatgatactgtttttttctcctgtctcgagttattaagaaaaaaaaaagtgtgcaacaaattttttttaatagactttcctgatgccagttcagtaaacgctcttgccccaaaaggctctagaggctgtcactctatgcccttgacaagagtctcagg

SEQ ID NO: 46202 - DNA, 310 bp, Mus musculus
  source 1..310: mol_type = other DNA
atatatgagccttgttataataactgggcaaggataagatgagaggatgttgataaaatagtggcatcatccccttgtttgaccttcctggggccagaagcgcccagactcctgggggtccgagctctaagctcttagttcccccctaggatgcagccctgcttcctgacagcggtgaggccgcgacatggtatggttccgtgaccctgcaccgcccgcgaggagcgggtcgcggcgcccccgtgagggccgacgcgaaacagcgacgactggggactgtcaaccacacacagcgtgagtgttgtgaaat

SEQ ID NO: 46203 - DNA, 421 bp, Mus musculus
  source 1..421: mol_type = other DNA
aaccttgtagttccatgtggagcatcctgggtctgggatccagtggactaagacttgggcaggctccactccgagtctgcagatgtcccacagtcctggagtctccaacattatgggtgtctgaggcatcgcctccttggaggaaatcccacactgccatgcattgcaatgcttcaggggctttccagaactttccagaacctggtacaagttccatgagcaaaatcagtaccatgtgggcagcatgcacctctcgtgagcagggatgcctctagctcaggagatagcctgccacagccgcagtgatctctgagtatgcttctataggagatatatatattttaagagcaggaaagtctttaaacccattttcctttcaaatgaatttggatgccctgtgaagacgtgtcctcatgtctct

SEQ ID NO: 46204 - DNA, 316 bp, Mus musculus
  source 1..316: mol_type = other DNA
gatgagaggatgttgataaaatagtggcatcatccccttgtttgaccttcctggggccagaagcgcccagactcctgggggtccgagctctaagctcttagttcccccctaggatgcagccctgcttcctgacagcggtgaggccgcgacatggtatggttccgtgaccctgcaccgcccgcgaggagcgggtcgcggcgcccccgtgagggccgacgcgaaacagcgacgactggggactgtcaaccacacacagcgtgagtgttgtgaaatgtgcgtccgcgcgaggcgcatgcgtgctaggaccaccgtccta

SEQ ID NO: 46205 - DNA, 328 bp, Mus musculus
  source 1..328: mol_type = other DNA
aaaccatagaatttagggacttgtgactcccacggtgttcttagtgcatgctgcggtatgagctctcagtgggaaagagtcgtttccccagcaagcaggagagcctcagctcaactctcagcagtgggtctgcttcacactggccaggaatccaagcaggttttgctctctgcacatgatttcccaaagcctaaatactgtctcagaaataagtgagattgacatactaaggatcaaatattgacatctcactctacggatcacaagcgcttgcttttggaaagcgccgcgggactgctattgccggcgaacgggcccttcccaggca

SEQ ID NO: 46206 - DNA, 730 bp, Mus musculus
  source 1..730: mol_type = other DNA
cagtgcaccggcagcaacccagccgcgggctccttagggcccattgcggcacttccccccgcatgcccggaaggggaactggcggggcgcggaactcgggatcccgcgcgtgctccgaaggaacctgttcagtccgggaccagggacgcgcgggaccagcccaaacgcgcgcctcccctctccccaaatcctcagggcgcgggcggacccgggagctgcgctcggagagggggtgcaggggcgcactcggtcgccccgggctcgatcgcgctcccgctcgcactgcagctaagtgccggggtccgatcgggccgggatcacacgggcacgcgcggatgagggcgtcgggccaaggaccccagaggcgtcggcggggatgggcgacccgcgatgacagcgcggttaccttccgtgacccccagccccggcagccggcaggcggggcgcgtgccttgcgcggccccgatccacgtgggcccgcgcgcgcgcaccaggccggccccctccttgcaggcgctcggcgctcccagcacatggtcggcggcgcgcccccgaggccggcggagaccggctgcagccggtgcggggccggggcgcgggcggcggcacgcacggcccgggagggcgtgggttgggggccagggtactccaggctccccgcccggagccactggcccacgccctaaggggttaaacctttttctcatgttacggagcggtttataagaag

SEQ ID NO: 46207 - DNA, 480 bp, Mus musculus
  source 1..480: mol_type = other DNA
gtctctctccgggaccgccctggggaggggggtaacagggatgccctcgtgctgcctcagtggccgccttgggtgcgcgcgcgagcccggggaaggaaggtgggtctgagacggtcgccggactcgcctcacagcctggaatatttttcggattaacctctttaaaatgttaaaagctttttttaagcgtgaataaggcggaggctgggcctccggagccttcttataaaccgctccgtaacatgagaaaaaggtttaaccccttagggcgtgggccagtggctccgggcggggagcctggagtaccctggcccccaacccacgccctcccgggccgtgcgtgccgccgcccgcgccccggccccgcaccggctgcagccggtctccgccggcctcgggggcgcgccgccgaccatgtgctgggagcgccgagcgcctgcaaggagggggccggcctggtgcgcgcgcgcgggcccacgt

SEQ ID NO: 46208 - DNA, 493 bp, Mus musculus
  source 1..493: mol_type = other DNA
aggtttttattaaaattttgaaccggtgctcctcccggtgggtggcgacccttcaggcacactctgcgacgtgggtcctcaggaataactcgggcttctccggaagcatccttggaggtttgggggtctcgatccccccagaagcctcctggggggggggggggttaaggctgccgtgcacctgtgctcacgccgcctcccgcctaggcgggtgcgcgcgcacggagaagcggagatgctgactcagccaggcttctcccatctctttcgcgcagcgcggatgctggcggctggtggctgctgcggctgcaaaccagtgcaccggcagcaacccagccgcgggctccttagggcccattgcggcacttccccccgcatgcccggaaggggaactggcggggcgcggaactcgggatcccgcgcgtgctccgaaggaacctgttcagtccgggaccagggacgcgcgggaccagcccaaacgcgcgcctcccct

SEQ ID NO: 46209 - DNA, 320 bp, Mus musculus
  source 1..320: mol_type = other DNA
ttgtttttataacttaacataagctagggtcatgtcagaagagggaacctcagctgagaaaatgcctccaattggcctgtaggcaagtacggcctggccagcagataatgctgtccctaggcaggcagtcctggatgcaagacccttgtctcccaagactcttggaccattcccctagaacaaaccaaagtggtgcatgggagcgctagcacacatggggtgcgagaaccacctttgacctcatgtggacagctggtgcccaaggcccctccagtgactcctggccccttgccagcgaataggccatgccctgggttggc

SEQ ID NO: 46210 - DNA, 278 bp, Mus musculus
  source 1..278: mol_type = other DNA
aatgggaggggaggccctttgtcccataaaagcatttgaaatgtaaacatgtaaaataaaataaaataaaaatgaatattaagtaaaaatgtttgctttgcaagcacgtgttaagcccagccttgcttcctaacaaccaagaagagctgaccagggtcttcagatctgatgagctctctcccaccatagatccggatctgaatgtgggaattagatagccagctccagggcaccaaggcccctgggcagctgaccggtcacagatcgcctgccagtgt

SEQ ID NO: 46211 - DNA, 192 bp, Mus musculus
  source 1..192: mol_type = other DNA
cgagaagcttcgggcgggcaaggaagcaggcgtccgcccgcctccttggcgttgtctccgacgctaaggcaggcttgaagcctgaagctccactccaccttcggccaatggcaaacggcgggtcgtcaacagctgtcccgcccactagccctattgttggtggcctggctaggacccagccggaggcgagcc

SEQ ID NO: 46212 - DNA, 338 bp, Mus musculus
  source 1..338: mol_type = other DNA
taacagtcctgacaactgttactcagagtggccaagtggcactgtgagcacatgtgcaccctttggaaagcccggaggctgttggattttcacaacagctgtcttgacaaaccccagccagaaggactgatgcctgcatgcagctgaatgggggacacacagccaggtcttagcagggaagcagctggaagactcatttaatgtttcctacatcgtgtggtcactgcctgggtttgacccacactctttccaaaacgataacatcatggaatgattatctatgaagctccaggagatgaaaacaaacagatttatctgcagtgggtggttttgcgacc

SEQ ID NO: 46213 - DNA, 461 bp, Mus musculus
  source 1..461: mol_type = other DNA
actactagggggggtaatcataactaatgttcagagcccttatcatagtctgggtattccaagacaaagtcaggcttaaaaaggtgaaatttccacttaacccaaatatcttaactggggatcactgtgaaaattatgttggtactaagtgttattatttatgtatttatttaggcccactttatttatttaattcatatgcctaaaattcattttcacatacttaaggggaaagttgactgaaggaataatgaagtcgccttttctccgcagtctggcataataggaggctagtaggcacggtagggcctccattgatgacagctcacttgtggagacgcccgagtccggaaccccgggtattgcgggggtctacacaggatgcgcgctctcagctgtggtagatcgcacccagggcggagtcgcccacctgtcaccgaatcgtcccacgtgggtctgcg

SEQ ID NO: 46214 - DNA, 294 bp, Mus musculus
  source 1..294: mol_type = other DNA
ataatgaagtcgccccgcagtctggcataataggaggctagtaggcacggtagggcctccattgatgacagctcacttgtggagacgcccgagtccggaaccccgggtattgcgggggtctacacaggatgcgcgctctcagctgtggtagatcgcacccagggcggagtcgcccacctgtcaccgaatcgtcccacgtgggtctgcgaggcgtctgcgcctttaaggttgccaaggcaaccgccctggccagagcgaggcgcattgacgtcagcagccgaacgctgattggcc

SEQ ID NO: 46215 - DNA, 258 bp, Mus musculus
  source 1..258: mol_type = other DNA
tttccaggcaggcaacagctggggggaaacagtcttttcctgaacatctccagggtgggagggctgccctcccctgatcctcagaatactggaagatttggagtcaaactccatagtgcctactatgtgctggttgctatgaatccagtttatgccctgcagcagaagaaaggcttttaagggtttgcattgtccccccgcgccaggccaatccaggcagcggggaggctccgcgttacctctgcctctaggagtcta

SEQ ID NO: 46216 - DNA, 371 bp, Mus musculus
  source 1..371: mol_type = other DNA
gtataaaactgtgaatgttttaaaatatgatgttaatatcaaactattgaaaattgattaagtcatcaagaaatgaataatattctttccaattgtccaggaaatagtttcaaagactgaacacagtccaggctacaaagctccagtgaatttatttaaagccacatagattataatctctgatcataatatgtagcaagatagtgaacacagcacatttgatgtgattcatgggacctccccccctctcagaggtggacagaaaagaaaagtgatctttaaaacttcagatgcttctggatcagaagaacaaaagcagggttgtgtgtttgtgccacacccattcagggatgatagcatcacaatgttaa

SEQ ID NO: 46217 - DNA, 254 bp, Mus musculus
  source 1..254: mol_type = other DNA
acttcattgagaaccttgtacaaaaagcaatgcatttaagtaaattaaaatcagaagtcatttactataaatgggctaaatactcaagtgtctgaggacagtgtactcacactataatattaaaagagactcatatttaagccctaagtatgaatgtgtaagaaactggatcagctggtgtccatcatgatgaagtggaacacagcagtgacattccgttgttgtggtcacatcagcagagcagaatccagtag

SEQ ID NO: 46218 - DNA, 420 bp, Mus musculus
  source 1..420: mol_type = other DNA
cctcagttagatgcaaaaggaagcttcttgaagaagcatagaactacattcaactgtaggcataagaagtatttaaaatgcagttagaaattatattgcttaagaaaaatagaatatcaaacacaatttccttctgattgagaaggcatagcatggtacacagtaatatataattaaaataatatataataaaatagcatattcataatccatgattagtgtttattaagcaaatggcgatgtctatctctttcctccaggagcagaagggacatacaagataattgtctccagtatctagaatgaagagtgggtggagagaaagctttcctccgataacacagctctcttaaaagcaacgcattaaatgccacatggccaggtgaccaggcaccgccctgcgggggctggctgcacagg

SEQ ID NO: 46219 - DNA, 321 bp, Mus musculus
  source 1..321: mol_type = other DNA
taaactctattctatactatactataactgggatgcctcagcatgggcccccagagtcttcttcttcttttttataaaacacaacacataatgttgagcacattttaaagatggagtctattgactgattctggccagagcaaaaatcaagatattgctttctaggctgtttgaaacataattagaatatctttttaagggacaatattttattttattttattttattttattttattttaatttcttttgggggagggcccagaaaagttacaaatttggactccctcagatttttctgacactataattagtcaaatg

SEQ ID NO: 46220 - DNA, 160 bp, Mus musculus
  source 1..160: mol_type = other DNA
gctaacattaatataaggcccttggctacagtctccccaggtgagatattatgctttctatcataagaaccacggtgcaggcagcacttcgttgccacgttcagcttttaaaaaagatccaggagaggttttaaagtactctccgttgctaacgtttcaa

SEQ ID NO: 46221 - DNA, 522 bp, Mus musculus
  source 1..522: mol_type = other DNA
ttaacatgtttgttttgacagttttcaagataaaaggcacgctatttcacttgtgtctacttttaaaagtagaattaactgccaagtatattatcatggctggaactgttactataaaagagtcctgacaaatatttgagatttctcaactccaacactgtgtattagtgcataaaaattggaaatcttttatgtattttagtcacaagataaatctattttattaatgtacttaaccctaggagaaacatgttttaaaatagtatttcatttgtctaccgtcagactatctccaaggcagagatagggattgctttacctttaaaggaaaaaatagtcagcaacttttcccagttagtgtgagtttgccaaattgaaaactgacgtctatgtttagctatgcagagtgagaaatcatgaaaacttgtatttctcatacaagtccttagataacatttttatatcatatctgaagggcttgagcaagaatgaacagacacagggtttgttttattctcaacc

SEQ ID NO: 46222 - DNA, 494 bp, Mus musculus
  source 1..494: mol_type = other DNA
ccctttcagggaaggtttgcatctccaactgcccagtgaagcgggaggcttcatctcttgatggtattgaaaaacattcaagatagtagactttattcacgtaaggttacttttccttcatccccgcctgcctcaggcaagaaaaaaaaaaaatcaaataccttaattttgattaaaattggcctttgatatatatgaaacaaattttcctgtctaactgtgtaagaaatgagaaacttcgtaaatctctcttccttaatcagcattgaaattctgctttcttgaaaagaactgacctggatcgcttcttattaaaaaaaaaaaaaaaaaaaaaaaaactttgtatcttgtctgaagcaaaaatctccattcaagaaaaatgtttgttgtgaaatgagatgtctaggggtttcgccggggtttttctagaacagaaaaagccatgtttatctgagatctctgtcgcgcttagtcagtcatctagctcagggcct

SEQ ID NO: 46223 - DNA, 427 bp, Mus musculus
  source 1..427: mol_type = other DNA
tatgatagtgtataataaagcagaacacattctatagacttagttttcaatttgagaactacacacacatacacaaaatatgtatgaatgttcacattcacagagctgaagatgttttcgaaagtaactgtaaaggatcagtcttcctggtattgtgaactttacaaacatcagtttgcattttaagtaaaaattaagcgtggttccttcttgaggcgacagaagtctcctcaaacccatcgagcctcggtggagggtgcggcgagctccccaggaggttctgagcacctgagctggcccggcgccggagccagcgcgctcccgtctcgagctccaggagcacgcgcattacgcacgccccgccctcaggtgcattcaggggcgggcagggggcgtgtctccggcggcgcgcgcggctctctcggcg

SEQ ID NO: 46224 - DNA, 146 bp, Mus musculus
  source 1..146: mol_type = other DNA
catagatctctacctgtgtaccctgtatagtgctctgtggatacagagacagagtcctgtgtctgccctctagtcacaggcgttttttttttttttttaaataaggaaactagtcatagggtgacatcatctcaagtaatgacatg

SEQ ID NO: 46225 - DNA, 341 bp, Mus musculus
  source 1..341: mol_type = other DNA
taaaaatgctgggagggtactgttctccgagacactcccccccccccgcacacgtacatacgcataaacacacatttgcgtgcgcatgctgatgaaacactgtgctccccttttccagtctgtaccaaggaaaggctgactttaaacaagttctggcttggattatcaaaggaaaggtcgattaacgttcttggacacttaagcccacctattgtttttctttctgttaggaaatgaaagagctatttatcaaaagcactgggctcccatttataactgctgggctggttaatgatcaatgccacccctggacaagagcaggaggcggagcctgctttttt

SEQ ID NO: 46226 - DNA, 231 bp, Mus musculus
  source 1..231: mol_type = other DNA
aacagctctcctggagcagggagaggtacctgactatcagaaagtggtagaagagtttcattgtatggcacagttcaaagccataagacagacgtttctcaataagcctgtttgtaaacatcagtcatttttcctcgtctgtatccctgaaaaaaaaaaaaaagaaaaccagtgaggtcattgctgtctcctgcttcagaagatgccaggggctgctgatgtaccctttcc

SEQ ID NO: 46227 - DNA, 417 bp, Mus musculus
  source 1..417: mol_type = other DNA
ttccaaatcattggaagagtgtatacctattcctatacctatacctatacttatatatctataatgctaggtaaaaatctactattgagtgtcacttgggtctcagtgaattcaccagaatttacttaaaaaaaattcaacatcgactaattattgaaaatgatgctaagccttcatttaaagaaaatgaacactggacagtgagtaagtgactcattccttctcttatccccaaagaaaagaaaagaacatccaatgtccttgaactaataccaaggttgttgataatttcaagaggctgtttgcctgtttccacagaaatctctactgtgacagccactaacaggctcctagagctgtgatcaaagaccgagaaaaaggcaaaacagaacgagattctgctgtggggtttctcat

SEQ ID NO: 46228 - DNA, 270 bp, Mus musculus
  source 1..270: mol_type = other DNA
ggctagatccagcaactgatgggggtagatgcgtcttagtgtaacatgttatgttaatgtcccatgtcagattgattttccaggaggcctgctccttttaatgtactacagaaaatatgcatatgcacatgtcatacacacatatacacatacatgcatatacacaacacgcatgcacatgcatacacatgtccatatacacatgatacgatatacacatacacatatatacatacacacacatacacatgtacatatatacatacagcc

SEQ ID NO: 46229 - DNA, 315 bp, Mus musculus
  source 1..315: mol_type = other DNA
ccagagaattcattctctaaggaaccagcggctccctcccttagcaatcgctagcacatctaaattttgcagggtattgagtgcgggtcccgggaccctttccaggtttttcagtctagccaaggccaggctgcaattaggcagccgcatggaggctgagcttcccctcagcccagagctggactctcagaccaggctagggcaggttccgaggctggcagagccagggtccgcgggtcctcctcctcctgatggcggttcccggggcgggggaagcgcagccacgtgcgctccgattggccaacagtgggcaga

SEQ ID NO: 46230 - DNA, 472 bp, Mus musculus
  source 1..472: mol_type = other DNA
ctatactatgagttagctgtttctcagaacattttgggggataatattgcatggaaatctttttcataaaagattttccacgatgtctacacagttaacctgccagactgtagcaggttctagacttttgcaattgaaagcagttccataaaagtgcaatgacatatgacatgtgtgtgcacatatgcacacagtactctggggattttccatttcgggggaagaaaaaagaaaaaaaaaccagttttttccctttccaggaagcttttaagacctgaaaatgccattgaaaggttccaagtgggggaagctattcatagcaaacagctattgtgtgatttgtggaattcaaatgatagtttacagtaaaatattttaaagtcaatcgtagctcagaaaagacaagcacacctgcgtttgctgctgtctccgtgttcatgaaacatttggcaacattacgtaagccaaatca

SEQ ID NO: 46231 - DNA, 292 bp, Mus musculus
  source 1..292: mol_type = other DNA
ccctcattttgtaggcttccctccacagagaagggagcatccagatgtggatacacatggtgtgcatgggcttgcctacatggggacccatgcatacaaattagcagtaggctctgtcatcttgggggaagggttatccccagcctgagctctttctaaagagcctttgtctctgtgcccaggttgttaatttctctggagatattcggaggaaaggtgacatttgagagaacaaaagtgaggttgtttagcttcatttgctgctatgaatcaagaacttatgaaataaggg

SEQ ID NO: 46232 - DNA, 312 bp, Mus musculus
  source 1..312: mol_type = other DNA
caaccccggagtagttttgcaaactccagtaataatcctgacggcgtggcccacgggaccggccgcaagagccggggactgcgcggtccctgccgccagcctttgattccccactgcgggagcgcagcatctatttatatggattgcttccaaaagaccatttctaagcactttttttggaagcccctccaggcgcagaagcccagctccgctttgacgagcagctgttgcaatttccattgctgtaagctcctagtctagacacgctcgcgtgcacgcgcacacactcggacgtcccgggtcccccgcttg

SEQ ID NO: 46233 - DNA, 373 bp, Mus musculus
  source 1..373: mol_type = other DNA
caccacgccccccttaaagatttatctgtcagcccaggctgaccttgaacgtatctgccgttttggcttatgccaaaaccaaagcatggtgtggaatgctctccccagaaggtggaggataccattttgtcgccggcagcctcttctctccagccatggtccactgtggaacgtgtgctcacatgagcaagagtatgatgttcctcctgggaaagagaggaacagatgggccccctgagcttcttcttggcccagaaaatgcagctgtggcaaagaagcagcggcttttcgggtggatccactcgggcgctcaaaacaggatccttttcgggatgccacgccccccaccaaggtcctcagaaggtctgatggg

SEQ ID NO: 46234 - DNA, 362 bp, Mus musculus
  source 1..362: mol_type = other DNA
ctgtgtcacaggctttccaaagagtgtttcccaaaccttaactgagtcagctcctggcacggggttcctttaaaattcagcatcctagtgttcataggcgagaacctgttcttttcaaacagttacatggtactaatttgtcttgagaagacaggccaggaatccacagggtatctttgcatatcctggactcctgtctgtggatgattttctcattgctctgagaaagttatcttacaaaagcaacttcagaaaggtttctttatatttagattgggatttcccacccgaatttacccagtctagagactccatcatggtcatggtcatggtcatggtcatggtcatgacaacaggctgtt

SEQ ID NO: 46235 - DNA, 286 bp, Mus musculus
  source 1..286: mol_type = other DNA
tgtcatagctgagccatgcacagggctcaggttctgaagctggagcatctgaggtttaacaggaaagacgcaacagaccagaatcttctgcggcaaaactttattgtttgggagccaggagggcaagcgcccatttaggagccagagctccggcgcgcgcgctctattgtttacatctttaggcagcgagcgagcgcagggcgcgcagaagccactccctgattggctgcagcccatggataaaatacccttggcacatgcgcagattatttgggcgaatgtgggg

SEQ ID NO: 46236 - DNA, 291 bp, Mus musculus
  source 1..291: mol_type = other DNA
gaagacagggaacaactgctttttcctggccacgtctcccatatgaagcctggaaggtgtcccccaactgggctactttgcgtccacgcagaccactgtgaccatgtcaacagaaaggtctccatggagtcagtcccaggctgggctagcagccccggctaccgctgtggtagagcccggggttcctcaagcttagcttcctagactgagcccattcctgttggattctgtgaaagtcccaaagcccagaggaatgctgaggcggcaggtttccatccaagaatccttcct

SEQ ID NO: 46237 - DNA, 337 bp, Mus musculus
  source 1..337: mol_type = other DNA
gttcctgcaactcagctgttgtcacctctgctgaggtgggattatagctctattcctggcatgctcatggctggactcttaaatgacacaatcatcatttctatttaaatccactgttggatgatatatggctacttaagagcttccatgcctgctgaaatcattggatgcatcttatccttagcttccaggaaaggaaaataagtggcagcttcctgtccaggatcctgccagccagatgggaggatggtctttgatatccccctccagacagattatcatgaagatctggtgtgctgggcatggagcccaaggctgggcaggaagtatatcaaca

SEQ ID NO: 46238 - DNA, 187 bp, Mus musculus
  source 1..187: mol_type = other DNA
cttctctgggtatatacccaggagtaaaatttcaaatagatagtaatgatttatttacaaggtgaaaatatgcaatccaatgtatgactttgtctccttttagtgtcagttgcttttgacagtattttatcacagaattccagaacagaatggaatctcttcgttaccctttgccaatattctccat

SEQ ID NO: 46239 - DNA, 292 bp, Mus musculus
  source 1..292: mol_type = other DNA
ttaggtacggattttcccaggaaaaacatggtgtaatcactgctaagtgatgaattatcaaggacagttgtcttagttcaggtttcattgctgtgaagaccatttaattgtatcatcatggtgtataagccagaaggagattgaatccacatttaaaaggtatttactcaggtcttggaaatatccatgacaatgtttagatatctgtcctcttaaatggcacagagatgtttcaactgataagtggtgaaacatctcagctatttccaaaaagttcagggaacacgtttta

SEQ ID NO: 46240 - DNA, 433 bp, Mus musculus
  source 1..433: mol_type = other DNA
ctctctgggggagctcccgcagagcgccacagcgcgcgtaggcggaacggttgggctggggctggccggggcctccagttggagagcggtggagcccgcggagcctgctggctgcaggaactgaagccaggtgccccgcgcttgcacacctgcaggcgcctgcacgggagacacgcttgctggtgccctgttcccgggactggaccgtggtaggcacggctttgcaaacttgagaacacgtcttaaaggtcccggacagctgcctggaatttgttgaggacccggcaggcggagccaagctgccgtgacgtcacgggcgggggcgtggggaagtgtgcccaggggctgccacccgcccgggccactgctagcggcgcagccaccggcgcgctcgcgaggccaccggcgcctggagcaccagtccgcggctggg

SEQ ID NO: 46241 - DNA, 362 bp, Mus musculus
  source 1..362: mol_type = other DNA
caccctaagagagtgcgaatacagagtggtcctcactaggaaggcacaccgctctctaagagggtaatagatgcctgctcttttacatttcaaaaaacagtcatgacatttgcttataataagaaactatttgttgttgaaccagatatctggccttcattttattgcagctaaatctagtcaatattgacattgacaggctgtagtcatgcagctgggcatccttctaatggaaggtattgaccttgagaatagacctatgttgtcatgtttaggacatatgacaaaagatgtagacaacaactgccgggggaaggggagagtgctgcttttgcccgcccgcctcggggcggggcccggcg

SEQ ID NO: 46242 - DNA, 334 bp, Mus musculus
  source 1..334: mol_type = other DNA
tgaacacacaatactgttttctctgtgttaacataggaaagaattcttcagcaaacttttccaagccagaacgtccaggttttcttactgatgtcacaggaggcctgtaacagggaaacattttgtggccactaaacaatatttaaatagcgtgcatgcatgtaagaagctcttccctccccaggaaagggtttgggtgcgacgcattctattcatggcagcgtactccacctacatagggtgccaccgaggctcagtccctgggaccaccgaggctcccgacctggcggaagcacttccgcccccatccatgatggcgggagggcggggcggg

SEQ ID NO: 46243 - DNA, 330 bp, Mus musculus
  source 1..330: mol_type = other DNA
aattaaatggacatgtggcgattataaactattttctactgccattctaaattattcatattttaaaaattcaatttcccaagaatttctttctttaattagaatgtaaacttcaagaacatcttggggcattcccccagccatgaaaatcaatccatttctaagactgggcttacatagttgaagctagccagctaagtctgcctaagtagcgcaagaaagctggctccacatgtgataccctgagttttttaataaaagggggagggtctgacggctgaggctaccctcccccaattctccaggctcggtcgggctcagtggcgtttt

SEQ ID NO: 46244 - DNA, 352 bp, Mus musculus
  source 1..352: mol_type = other DNA
agacttccccaagtcttagagtacacgtattctggtgcccaggctggcttcgaatggggatgacagggcgattcgccactgatcaagctcacctcgccagccgcgaggcagctccgtccacaccgccgcgccggcctcttccagcaggtgggcgtgacctgcaacaaaggtcgcggaaaaatagcccagcccttgggctccagaggacccctgagcctgtggaaaaaagtatcaatgatcgtcaaataatgtaatttatctaaaatgctgccccggacacctaaacgggggtcctggaagttcccggtcaccgcctgcgcggtgatgggaaagcgcggccggcgtcccgcct

SEQ ID NO: 46245 - DNA, 637 bp, Mus musculus
  source 1..637: mol_type = other DNA
cccctctccgaggcgcctcgctcgaagggagccatctcttcctccgtctcgtcgggccgaggcagccctggattccagagcgtcgcctccctggctgcccacggggtccaagtgtcagaggcggcgccaccttctcccctccgcctcccgcagagcagcgcagccctccgcccctcggctccagagcgcacatcctcggccgaggggccgcggagaaagcgggttccccccttccctcacctggggcggaggcgctcgctcatggcagctggtgaaggcgagcgacgcggcgccgccccgcgccgacagcgaacagtcggagctgtgtcccggcgcccgccacgcccacccgcacgggtctgagctctgaccgccgccgcgcgggtggttgctgcgggcgctgagtccccctcgggccgacccggaccacagccacgcctccgcgcctccccatgtcgcaggcgccgtggtactgtcctcctgcggctgcgcggaggcgggacgccggccgcgctttcccatcaccgcgcaggcggtgaccgggaacttccaggacccccgtttaggtgtccggggcagcattttagataaattacattatttgacgatcattgatacttttttccacaggctcagg

SEQ ID NO: 46246 - DNA, 222 bp, Mus musculus
  source 1..222: mol_type = other DNA
gtcatacttccttgttccagcctggaggaatgcccacctggtggaggacaaatggtgcctattacaaggtatggctggcttaaaggggttttgtttaattttgttttttaacaattttattgaactcatgtagcctccacttgacataaataacaaagtcaagttctggctgacatttttaatgtcttttcctctaagcattaacttactagatgttaagtc

SEQ ID NO: 46247 - DNA, 405 bp, Mus musculus
  source 1..405: mol_type = other DNA
tcaatgggtagttatatccccacacatacaagataagcaggtgtgagtctttgccaatcccttccccagctgaggatggaggcctgcaccgctgaggcagccgaggagcctctgggggtacactcagtcacctggccccttgaaggaagagggggcctggccccctttctgcttttccggcgggagacggaagatggatcgcccagaagggcactgggctactgcctttccagggcatggacagtgagtggcctggaggtgctgtgcgtctctcccacacagcttctggggatagaaaggcagacttccgagctgccagagctccctgggtgcccccgaaaccttccacctcctgcctcagaggtgggctgagcggaagagggtaccccgttgactcagcctcca

SEQ ID NO: 46248 - DNA, 450 bp, Mus musculus
  source 1..450: mol_type = other DNA
cccacccatggcagtgacctccaggacgtggctctgcaagacccatgggactctcaaataatctgcaagagcctcttccccagggacccttgatctgctgtcttttcagatctggagttcaaaagaacagctggcaggctggatcctgtcggctcagccacaggcctgcagcgccaagcttacctctccccgctgggtcccggggaggagactagttcctagggcctaaaaacaatgtcctggtaacagtggctcctggagaggccaggccacttcaggacccaggaggtttaattagagctttaaaaatgctcctaagaaagccgattctgaggtcctcagcccttcagggcagggttggcctaataataataaaacaacatttgcatggatatttcatttacaaagcagtggattcctcgctgggaggtcacccccagccttgggtcg

SEQ ID NO: 46249 - DNA, 402 bp, Mus musculus
  source 1..402: mol_type = other DNA
tagttcctagggcctaaaaacaatgtcctggtaacagtggctcctggagaggccaggccacttcaggacccaggaggtttaattagagctttaaaaatgctcctaagaaagccgattctgaggtcctcagcccttcagggcagggttggcctaataataataaaacaacatttgcatggatatttcatttacaaagcagtggattcctcgctgggaggtcacccccagccttgggtcgtcaatgggtagttatatccccacacatacaagataagcaggtgtgagtctttgccaatcccttccccagctgaggatggaggcctgcaccgctgaggcagccgaggagcctctgggggtacactcagtcacctggccccttgaaggaagagggggcctggcccc

SEQ ID NO: 46250 - DNA, 594 bp, Mus musculus
  source 1..594: mol_type = other DNA
cctccagatggagacctgctcgtggcaaaactggaagacaagagagagcttccccttggttcctggggcggaccgcacgtcggttccgcggcagagcactgggggctgtggggcgcgactcctctactaggagcgtctcaggcttttagatttgaacctgggaggccaagcagccgagttgagttccgtggcagtcattggctgctgcgacggagtgacatcagcggtcctagcttctagcacactcggagccccgggagccagaggagccggcgctgccatgggtcgccagccttgccgaggcgccaagcacaccgaggggagcgtacagccgcacctggtccgcgctcggggagctggggaccgaggtaggcgcgcgcgcaccacccctctgtgcccagcgtgggtaggcatgcctgggaccagacagcgtcgccagtacgccccgatctggccacggggactgttcggggtggggtgagtgggcaggttttaaaggtccaccccctcgcgcaggaatggggtgtgtgttgccgtgggcaggcacacaacaatcggcggcggtcgccccgaggggggcgtgtgcgcacagac

SEQ ID NO: 46251 - DNA, 439 bp, Mus musculus
  source 1..439: mol_type = other DNA
ggctggcctcgaactcagaaatctgcctgcctctgcctcctgagtgggctgaggcctaccccacccccacttcctttaagtagttagggaagcacgcgggatttaattccgggaggttccctggagctatcaaagccaggtcaccttgctgtgctcagaccgggtctggactcgggcggacctgcttctcccgccctccagatggagagggcctgctcgtggcaaaactggaagacaagagagagcttccccttggttcctggggcggaccgcacgtcggttccgcggcagagcactgggggctgtggggcgcgactcctctactaggagcgtctcaggcttttagatttgaacctgggaggccaagcagccgagttgagttccgtggcagtcattggctgctgcgacggagtgacatcagcggtcctagcttctagca

SEQ ID NO: 46252 - DNA, 293 bp, Mus musculus
  source 1..293: mol_type = other DNA
ctactttttaaaatgaaaagaaaggctccctctgaaagccagagctgtctaattgtcagcagaaagcccagcttctgccagaacaacaacaaaaaaatgacagtccttctattgctctttagctcctcattaattcttgaaatcacaagaaaaatgtgcacgtgtgttttaaagccactctccatagatcatgcgtgaagttttgatcctggttctgtaggatcctcaagaattgggatgctgagtgacaggtgggggataagttggccctgataggtcccccttctcaagac

SEQ ID NO: 46253 - DNA, 241 bp, Mus musculus
  source 1..241: mol_type = other DNA
aggctgtgccaaccaagcctggccctgacttggcctacctcctgcttaagacccttgtgcaagccgggcggtggtggtgagttcgaggccagcctggtctacaaactgggaataattaataataataatagtaatagtagaatgaattagggcagcctcctaggtaatgattactaattatccactggcttttcaaaattttttaagatcagggtcctcgcctaggaggcgaggcggggcc

SEQ ID NO: 46254 - DNA, 466 bp, Mus musculus
  source 1..466: mol_type = other DNA
gcatgcatgtgaacctccacccctgtacatacatacatacatgcatacatacatacatgcaggcaaggtgaggtgacacagtggttaagaacactggctgctctcccaacccatctagaaaggggtctgttctggcatgcaggtgtatatgtacatacagagtacgacatgaaaacatacatccatgaaaaattatttttaaaaaattgactttagtttttcatatagctttaggctttcagcaaagttgagtagagagagctgagagttctcagatccctcccttcaggccagtgtgatatttcacacacctatggtcctagaactgttaggctgactcaatctcagcacttgagaagctgatacataagtagtctgagcttctaagaccctgtctttaaaaaggaaagacagacagacgaggccatggtttccactagagggcacccttgggcctcataatctg

SEQ ID NO: 46255 - DNA, 268 bp, Mus musculus
  source 1..268: mol_type = other DNA
ggacagccagggctatacagagaaacggcctgagctgtctggccagggggacctggataatgggtctcaagatgcaataaaggagcctggagctatcgctcagtcctaagagcactggctgctcccccagaacaccggggttatgagcattgcattcatttaatgcacagatatacaagcaaattaaatgaggccagcctggtctacaaagtgagttccaggacagccagggctatacagagtgctggcagcctaacgggttaaccgt

SEQ ID NO: 46256 - DNA, 371 bp, Mus musculus
  source 1..371: mol_type = other DNA
cggtactaaataaataaataaatctttttttaaaaatcatattgtgtatgtagagaattcagttctccctaggtcatagaagtggtagcaagccctttaattctttttaaattattgatgatgatgtggaatccattttttcccccactcatgagaaacacatctctctttgtgtcattcatgtgtccatcagctagctcattcattcatgcaagccatgcttgcatgcattgagcctccctcaaggttggcaaagctttggttaactttcctccacctcttccgcagacctcctccagagaaggaaggagaagcacgtgctccagatcgctccgaactgccggcgtctcggcccggccagggttgctagg

SEQ ID NO: 46257 - DNA, 497 bp, Mus musculus
  source 1..497: mol_type = other DNA
tcatactttaaaaaatttacatttatatattatgcacatgtactaggccatgtggtgatcagaggacaactcaggtagtgagcttgcaagctccctgacagggcaagccatctggcggaccctcggattattaagtaagcttatgattttgtgtcgagccgggacaggtggtctggcaggcaggccaaatccattcattctgtctatacactttacttagccaggtgccaaaagggtgcaggccagcttttcaccggtgcagctacccatggaaacttgaggctgctaggcgcgccctggagacgcccacttctgcccagctagtcgcgtgccaggccggtgtcgggagcgacacagccaggagcctcgagcctgggcacgggtgtgtgcggaggggccaccaaacggacgccgctaggcgtcctgcgggcagcacagggggcggggcggagccggccaggccctcctggccccgcctcctggtcagcgctcgggcg

SEQ ID NO: 46258 - DNA, 428 bp, Mus musculus
  source 1..428: mol_type = other DNA
tactatctagctgagactgcaatctagaaggcaccttccagggaccatgcataggctctaaagacttgggctgtcttggtagagaaacaggctgtgttcctagagcaagggccatagtacagtcccaccctaaaatgggggtgggggaggaatagagccctgagccagctcttccctgccaggacactgccaagtatgctctgtgccaggggggccctaagggttggtgactgccaggggtcctgaagccctttgcttgcccttcagagagcttaaaacttcccgggagaggaacagctagccggatctgttccccttgggggcccaggccaacacaatagcctggggctgccacactctggcttaagtagttgcctaggcaacagcagggaccagcttcaaccaatccatggcagagactggtccct

SEQ ID NO: 46259 - DNA, 252 bp, Mus musculus
  source 1..252: mol_type = other DNA
ctgcagcctgcccagccaccggctggctccgaccgcgctcctggcgatcccccaggcaactcggcgtcgcgcgcgggatcccaggtccccgagaaagtggccggaaagaaaaaaatctcttgtttactgggccaaagactccggccaacagcccgcaggggttctggactcagtccacagatttgcgctgtgtccacgtgtgcacctagtgtgttcctcgctccagcccggagcagcgaactgtgccaggca

SEQ ID NO: 46260 - DNA, 320 bp, Mus musculus
  source 1..320: mol_type = other DNA
cgcgggatcccaggtccccgagaaagtggccggaaagaaaaaaatctcttgtttactgggccaaagactccggccaacagcccgcaggggttctggactcagtccacagatttgcgctgtgtccacgtgtgcacctagtgtgttcctcgctccagcccggagcagcgaactgtgccaggcagtcacgggtagacgcgccaaggtggccaccgtgagtctgtgggtgcgtgcctaggggtgtactgagctgcaccccgaacctctttcgaagtgagtacgcgcaagtgcgcgcgcgcccgcgtgcgggggcgtggcagtaa

SEQ ID NO: 46261 - DNA, 372 bp, Mus musculus
  source 1..372: mol_type = other DNA
tatgatgctattactatcaaagaccagaagcaatgctcctgactaaatggagggcgctctcgggacctcttaataactactattattatatgattaatatagtataatagctagctattgggtgacctgttttacgggttcacaggacccctgtgtacatgttggaccagagaaaggaccagaaacccttcaggaatttttgggggtccaggcctagagctcccaggaaggcttcatagtgggaggctgccattcttcccacaaggaaaggaggagtgactgggtgccagtcagaatgacctgctgctcatcaggctgtcatggcagcctggcagtcatgagatcagagccttctcccgtagctccaggaac

SEQ ID NO: 46262 - DNA, 361 bp, Mus musculus
  source 1..361: mol_type = other DNA
aaagactccggccaacagcccgcaggggttctggactcagtccacagatttgcgctgtgtccacgtgtgcacctagtgtgttcctcgctccagcccggagcagcgaactgtgccaggcagtcacgggtagacgcgccaaggtggccaccgtgagtctgtgggtgcgtgcctaggggtgtactgagctgcaccccgaacctctttcgaagtgagtacgcgcaagtgcgcgcgcgcccgcgtgcgggggcgtggcagtaaccctcgtacctggagcgctgctggccccggaggagcgccgggaatggaggtgatgtcacggtgatgcagcccggcccaccctggccgagagaggggagcactg

SEQ ID NO: 46263 - DNA, 222 bp, Mus musculus
  source 1..222: mol_type = other DNA
aattgatgcctcagtcctcttccttcattttgcaggaaaggtcacaagagtttaagcttgatcagggtttatgatgtgaaattcccaaatcatcaataaaaatattttggaatttctgcaggaggctttgaaaccggattaaatccaatgccaggtgtgctggagctgagactctcagctgctgggcccatcattatgtctcttgtgctgagtaactgacgg

SEQ ID NO: 46264 - DNA, 308 bp, Mus musculus
  source 1..308: mol_type = other DNA
ctgtgtgtgcattagtgtgtacattcatgtgtgtgtagattcaattcctcccataataatttgataccagggatacatgtacctatatctacatatctacacttgaaattggtcctctggatttaaaccaactgcagattcccattttgtggcagatgcccctggccacagaaatccgtcaggctgagccttcagaacctctgccacccagggcttagcctaggctactgccacgggcttagcctggctcagttaaagattgacatcatcttcttcctgtatgcaaaattgagaaattttgtcaagga

SEQ ID NO: 46265 - DNA, 364 bp, Mus musculus
  source 1..364: mol_type = other DNA
cagagctgccatgcatgggggctcccatcaaggcctggcactcacaaggttagcttcagctaaatactgcattcagtgtgagccctgggttcaatcctgagcacagcatggatgggctgtggtgacaaacaccttaaactgctggactcaggagctggaggtaggaggatcagttcaaggtcctcctgaaagctgtgacctacaggtctgtactctttgtggggacacagcaggtcacagcatgaccttgaccgattgctctgtgatcacacagttagaccaggcctctggcaggagggtggaagccccccagccgtcacttgttgggtgtggtaggaaccaaagcctctgaggcctggaacat

SEQ ID NO: 46266 - DNA, 302 bp, Mus musculus
  source 1..302: mol_type = other DNA
cccatgtctaggtatggggcagagctgccatgcatgatggctcccatctaggcctggcactcgggagatttctctgagttcaaggttagcttcagctaaatactgcattcaagcccaggttgggctgcagtgtgagataaggtcctccttgaaagctgtgacctacagctctgtactcttttggaggatacagcactctaagggaggtcacagcatgcccctccagggctctggcagagtggttgtccccacttatgtgtgaaagcctctaaggcctggagtattaaaagagaacattctac

SEQ ID NO: 46267 - DNA, 199 bp, Mus musculus
  source 1..199: mol_type = other DNA
tataaatttcttcccatgaaattttgataccaaagataccttatgttctacagcaaaactctgtcttatagaaacagagccaatgcctgaggccctgccccaggctgagccttcagcaatgccctctgccaaccagggcttagcctaggctactgccatgggcttagcctgcctgcagctcagttacctcccaggtaag

SEQ ID NO: 46268 - DNA, 199 bp, Mus musculus; identical to SEQ ID NO: 46267
  source 1..199: mol_type = other DNA

SEQ ID NO: 46269 - DNA, 269 bp, Mus musculus
  source 1..269: mol_type = other DNA
gcgggaatggaatattaatgtattcttgcgtgcacccagaacaacgctgccacaggatccttctgccagtatcctggtacacctgcgcagcctggcgcctttgggactgccgccacacctccaggaggagagcttccttgaaactctcctgcctgacaggctgactccaccggagtgccgtggcaaagaggaccccctcatctctgctctttgaatagcaactggctttcctgaagcgtcatgcattttttttttgttaaagtaggaag

SEQ ID NO: 46270 - DNA, 255 bp, Mus musculus
  source 1..255: mol_type = other DNA
gtgtgtgcacgtgtgcacttatgtatgcatgtgtgtgtatgtgtgtgtgtgcatttataaatttcttcccatgaaattttgataccaaagataccttatgttctacagcaaaactctgtcttatagaaacagagccaatgcctgaggccctagccccaggctgagccttcagcaatgccctctgccaaccagggcttagcctaggctactgccatgggcttagcctgcctgcagctcagttacctcccaggtaag

SEQ ID NO: 46271 - DNA, 363 bp, Mus musculus
  source 1..363: mol_type = other DNA
gatattcactaaatttctggggaatacaggttaagtctatatctattacctattagtctggggcagatcaataaagcctggtctacagtgtgagctccaggacagccagggctacacagagaagtgggagtgctgaggctcagactcaagaccttgcatatgttaggcaagagctggtgtggctatgtagcccaggctagccttgaccttaccacatagctcagtttcaagtcaaacttagagattctgggctccagcaactcttgctctagctgatggaatccagaagcaacattcaaagcaggagcccctgttctctttcgagctgaggacatgatgtttctcaaagtccttttcacaagt

SEQ ID NO: 46272 - DNA, 275 bp, Mus musculus
  source 1..275: mol_type = other DNA
gcaaccccagattctccatatcccccgtcgaactgcacccactcggtggctaggcctaggccttgagctgtccccagcttcttgcctgcaggtaagtaccggactgtcaactggctggagctcgggcgcgccctgctggccactgcattgccgctagctgggtctcccgggtagccctggtcctgtagcaggactcattccgtgctgtaagagcactaaactgactgccactccctaggcggagcctagggcagggcggttcctcgctctccctc

SEQ ID NO: 46273 - DNA, 429 bp, Mus musculus
  source 1..429: mol_type = other DNA
ctctgtggccacatctgcgctggcaagagggaacctctgaagtgaatcctgacagacagcctgtcttccaggtgggctgcaaggactactctgtctatatgcatgtccagggatagaggggcaagaaactttgttatttaaacaactctactccggagttattctgttacagttaccctgttacagtgttactgtgttacagaaaactgtcgctcccctctctcgggccaagctatgcaacaggctttggctcaaggcggttaaagcgttgagaatccagagcggagcccgtggggcctctgggctcagtacctggaaccccgccccagccccggcctcggccccgcgctgcggggtgccgcgccgagtgcaggccacgccccactcagaacacccaccgcgcggccccgccctcgggtttaggagctg

SEQ ID NO: 46274 - DNA, 325 bp, Mus musculus
  source 1..325: mol_type = other DNA
aggagaatagagctctccggtctctgtgatctcgcttctatgcagtggcagcagcagccgcagctcctaagacaaaagagtagactttagttctgctatgcaaggcacgctgaaggggctttccgggcctctaagcctcacacagctgtctccagacctgcagcacagctagtggccaccgcctccagctctgcagctgccacccggcaccagcggccccgcaccagcgcccgctacgcgcacgcgcacgcttcccagtcccccgtccaagcgagcgcgtggggaggggcgcagttgcggctgccgtctgcctggcggaagcgga

SEQ ID NO: 46275 - DNA, 393 bp, Mus musculus
  source 1..393: mol_type = other DNA
cacggaagagatggacctgcctctgtctcccaagtgttgggccagaataggtgtacagcaccacacaagtgacgtttgttaaacaagacaggctcctagcactagcatggtgttctgattcagcttcattgtagctgcctactagtggggagagttaaagacttccatagtgttgacagaagagcgtcctgccttcccctcactgggctctcctcagccgcgctgtagtttgcaaactgcaaaggggcgtccccaacgacaggcgtcagcgtctgtcccggagaaacaggctttccgcatgcgcgtagaggggcttgctgtccgcttccgccaggcagacggcagccgcaactgcgcccctccccacgcgctcgcttggacgggggactggga

SEQ ID NO: 46276 - DNA, 403 bp, Mus musculus
  source 1..403: mol_type = other DNA
aagctgctcccatgatggaccttggagggcctctagatgtgcctaagacccatggctgatagctaccatttgtttgcctgtggctgccagagggaactcaagagtgtcctggggggcagggcatacacctatcctcctgcctggtgaaagaaggtcccccagtgtgcccctgtctctcctgggtgctggcaggcttggcttgttttcaaaaacgacttcagcctacggcagtttaaggcttcttatagcagcaagatgctgccttactttaaaaactagggaaccgagggctcaaacccagggctcctggcagcgtcgagtctgggcacagggtccctgctggacgggccagaggggcaccggtggccggctggggcgggccggggcggggcggaggcgaccg

SEQ ID NO: 46277 - DNA, 468 bp, Mus musculus
  source 1..468: mol_type = other DNA
ataaataatgtaataaaatatataaatgttagaaaaaacttttaaaagatattgattttaggctttgcatcaattttcttttaaaacatggaatatgaatgatttacttttgggtgccccctaaggtacggtctcaccctgatccctgtactgtcggaccagggtcgaaggtcgggctctggtctcagtgccagaggttcttctgtttcctcccccatcgtgggaagagggtgactagaaataagctcttgagagtttaacacttgtccttctctgacacgcacaagtagctgtttgaggcgtcaagaacgagacttctgattggctgatactaaagtaagctcctttccaattggctcccttcttcaagagcgattcgcgtttcttcaaatctagacttccggcatctggagaatcttggtgaagtctccaagttgccagaggagcgtcctcggcgggctgctggac

SEQ ID NO: 46278 - DNA, 308 bp, Mus musculus
  source 1..308: mol_type = other DNA
cttcacacatgaaccaagggctgggaaaacacacacaggactcagtcgggtttttttttttttttaaagggctttgaaaggtgacagttgcgtcagcacagggaagaggcccagtggagctggagagacattctagcagtatgtctgctaccatacaaattaataatttaatgagatagaaaccccaagctgccctggtatcaagggctggcgggagaggctgcttctaggccccgcctaggtctgtgcgtggcagaaggtaccccgcgcctcccacggtgacctcaggctagtggtgtcccagccag

SEQ ID NO: 46279 - DNA, 310 bp, Mus musculus
  source 1..310: mol_type = other DNA
ggctcactcctgaggctgaggaccactgctgcaccacacagagcaagccctgcctgctgggggagaccctgcttcccgagccctaggtacacggcagatctgtgttcgaggccagcctggcctaccaagcaagttctaggacagccagggctaatggggtggaggtgcctgccaggcagggacggtggggcaggcgaagcaggatgccctcctggggcctctggggttccccctcggtgagccagagtcccgccctggcccagagcccaaagggggctactgaggcggctggcattattcaccagggtgg

SEQ ID NO: 46280 - DNA, 256 bp, Mus musculus
  source 1..256: mol_type = other DNA
gacacgggtctgctcaggacctcttgatcctgcttcacacatgaaccaagggctgggaaaacacacacaggactcagtcgggtttttttttttttttaaagggctttgaaaggtgacagttgcgtcagcacagggaagaggcccagtggagctggagagacattctagcagtatgtctgctaccatacaaattaataatttaatgagatagaaaccccaagctgccctggtatcaagggctggcgggagaggctgc

SEQ ID NO: 46281 - DNA, 285 bp, Mus musculus
  source 1..285: mol_type = other DNA
acccaagtaccgttttgtttatttaaaatttttaaattatattttaatgtcccttcaccttatgggtcccagggatggaacccaggtcatcaggagaccagagaaggtcctgaggactacctcctcccggttctgagaagccgctttggtgctcaatcagctagacagggtacagctcagcggcaagtatggactgaagctcgcccacttggggggctgcccccacccagaccctgcagccggcgtccgccatggagcccgagcggcgactgcgcagtctcgcgg

SEQ ID NO: 46282 - DNA, 316 bp, Mus musculus
  source 1..316: mol_type = other DNA
tcccgacagacgtgtgtgtgtctggcccaccccagggctggccccaggcttgggcccatgtacaggacagtgcacttccagacagaacacagaggtctctgggggtcttccctctgcccagtctagggagttgaaggaggagctagaggctctctgctctccaagcaagctgtggagacatccatatgactctgcatatgtgtggctcctaagacttagccacacccaaggaggaggacctcggggaattttcccttttacatgatccatggagaatcaagagtagctggggccccttcagatcctgagggggagc

SEQ ID NO: 46283 - DNA, 177 bp, Mus musculus
  source 1..177: mol_type = other DNA
ggatctgtgatgtttatgtcatgtcctctacacttcaaagagttctcaggacactgagtcagagctaaaccttttaagggttagaataacttcaagacggagaactccggacttctttcgtgggggcggatctaaaggcggagccacaggggcggggccgacgcctgcggcaggcgg

SEQ ID NO: 46284 - DNA, 388 bp, Mus musculus
  source 1..388: mol_type = other DNA
tactgaacaaggagctgtgcaccttgctttttggccaattaggctctggctccccagctcccagagctgggatttcaagaacaagccacgcactctgctttttttttttttttaaacaaaaccaaacctggtaagcacttttaatgtgctaaaggaacaagctgtgttaaagtaattacaagcaggctggggttcctggtactcttgacctcgagtaaggttcttaaagatgtttctaatttaataccattttttaaaaagttcttcggatatatcagttctccgcaggtgaggaccactgtggacatcttgatccagcaattcccggaccaggacaccaggaaggtccttgccttcgggtcccaccccgcaaagctggcggcctggg

SEQ ID NO: 46285 - DNA, 417 bp, Mus musculus
  source 1..417: mol_type = other DNA
atagtgagctccagcccaaagattggttgactgtctatccactcatctatctatagcaggtaaggtcgtccttgctgtttgtttatgtatttatgcatttatatatttgtttacatacacacacatttaaaatgatttttccaagacagagtttctctgtatagaagcctcggctgtcctggactcactttgtagaccaggctagcctaggtctaaggcctggccatatagcccttgctgtcctggaacgcactctgtaaaccaggctggcctcgaactcagagatgattaagtgccaccacgcctggccatgcagtgctgggactgccccatacaggaatctttttaagaaaaatctcccgtaggtggtcggtcaacctctaccagatgtcagctggctcagccaaggctggcgga

SEQ ID NO: 46286 - DNA, 574 bp, Mus musculus
  source 1..574: mol_type = other DNA
cccccagttctgaatgcatttggcaccagcagcagggggccgggggctcccgtgggtgcagcctgccagcctggaatgggtcccaacacccgggggcgcgcccgagggcggggcgcaccttgtcggagtccagctccgggtcctcctggcagcacaggcggcagaggaaggacttgggctcccggctcacgaagtaggtaccgcccacgttgagccggacccagcgggcggccccgccgcctcccgtccgctccggaggtccgggcccgggctccagcggctgcgcggcggcggcgggctggcggccgtgtccgcggggtgtcgggcccgcagggcgagggctggggggtccgcggcccgagccgccgccgtcgcccatcgcactgccccgccactgccgggtccagctgcagctccgccatcttgggccgccgctgcccgcgcgccgccgggccggccgactcctcggcggggagagccgggccggcccatcggcgggcgtggggcagggggaaaagggaccccgacggcgcaggcgccgcgcccgccttccaggacgggactcccaaggaga

SEQ ID NO: 46287 - DNA, 363 bp, Mus musculus
  source 1..363: mol_type = other DNA
cgtctctaagagacagagacaagagaatgaccaatagttaattagatcaatcggtaaacctcatgagcctgacgtagagttgaagtctgctacacacagtgtgagacaaatgtgcggtgattggctaagtcactgccaggccccaggctcgccccgcgggaaagcgagcagggcaaagcagtgacctcgggcgctctgctagcggggcagctcgaaggcccgatgtcctccggaagagagtgatctctccttgggagtcccgtcctggaaggcgggcgcggcgcctgcgccgtcggggtcccttttccccctgccccacgcccgccgatgggccggcccggctctccccgccgaggagtcggc

SEQ ID NO: 46288 - DNA, 326 bp, Mus musculus
  source 1..326: mol_type = other DNA
ttctctttctaagggttagaaacaaagtaactcagcggtagtgccgcacgcctctaagctcagcacagcccgcaggacagccagggctacacagagaaaccctacaaaaaaaagcatttgatgcttttgcaaaggacctaggttccagctccaggggatctgatgccatcttctggcctccgaactgcatgcacgtggtgcagaatgatgtatgatgcttgggtcactagcagcttctcagccgcgagagagcactgtagtctgccccatgggacacctgtgtcctgatgacatcacaggcaggatgcagcttgccttatcctcaa

SEQ ID NO: 46289 - DNA, 207 bp, Mus musculus
  source 1..207: mol_type = other DNA
agtctattgctttaaaccaagacaaagtctcttgtgtgtgtgtgtgtgtatactcagaaaaagcccctacagctgtggagccccactcttgatcttccacaccttgttgctgagctggcatctgtgcctgccaggatgacgtaatcccgccacctccagccaggctgtccctggaaattgcccagggggcggtgcccctccttgata

SEQ ID NO: 46290 - DNA, 295 bp, Mus musculus
  source 1..295: mol_type = other DNA
cgtcataggcttcctgagatctgcttgatctgagcagggcctggctcacctgccaaagatggagcagaggcattcaatgacactctgagtgacagctggtactgggaccatcagacccaggctgggccatgacctcgtgggtcctggaactaggtgttgctcaagtgcctccggggaccggggagcaaggtcaccttcctgaggcgtgtgtgtagctgccgtcacacccaaccaaagagcaggccgctcagcagcagagtcggcaagactgcgtgtaccaagacagttatactct

SEQ ID NO: 46291 - DNA, 271 bp, Mus musculus
  source 1..271: mol_type = other DNA
tgggaccacctggccagactgtggcaaggtggcgaggtgtgctggccagcctgggcatggtagtcagcctctctccggttaggagcactgactgctcttccacatggtggctcacaaccaatgggatccgatgccctcttctgctgtgtctgaagacagcgacagtgtgctcacatacataaaataaataagtcttctgggttttttttttttttttttgaccaggctggcctcgaactcagaaatccgcctgcctcccaagtgctgggat

SEQ ID NO: 46292 - DNA, 375 bp, Mus musculus
  source 1..375: mol_type = other DNA
gaccatccctggaaaattttgaggggagtctgcaaagtattggaatctcaaaggctccaggtccccaggtctttgatgttctggtaagaagtctgcctagcctgcttcttatgcacagagttctcacggagcaaccttggttctcaagcatccaaactaagactaaaactcttgctctttgattcaggtccctggtaccaaacatagtggcaaagctgggcccctccctgacgctccttgatggcctgaagatccgtctgcccggctgtcaatccttcgacgcatccccgctgcggcggctgcgcagtggagggttaaagcctccagctctagaaatcgtttcctggggcggggctagagagcttccgccctgaa

SEQ ID NO: 46293 - DNA, 219 bp, Mus musculus
  source 1..219: mol_type = other DNA
tctctgcagcccaaatttgtttaagatacttctgccatgggttagaagtcatgtcttatcttctaccggagacctcgggtccacaggatagagtcacgatcctgtcagcttccagcctggacatgatgctgcacatgagcggcagccccgtaagggacgcaatgccatcctgggcacctggttggccactctgtgcaaatgagtcccggaagcttgttt

SEQ ID NO: 46294 - DNA, 280 bp, Mus musculus
  source 1..280: mol_type = other DNA
agagaccagacacatcctgctgaggtagctttctatttaggtagctaggtagccgaattagaactggttctttgaatgaagacataataacgaagtatatcttaaaataattattctgcttgttgagtattaacagttgaaaatattaaaatcatgttctacaaaatgggtggcaagggcttttccttcaagtaactttttaaagtgaccgtgaagcggcctttctctgtacaggaagggggcggggcttaggccgagccgtctcccgcgcagcccgtca

SEQ ID NO: 46295 - DNA, 266 bp, Mus musculus
  source 1..266: mol_type = other DNA
cactatgtcgtggtatttcccccctctgtgggaacacagtagtagttcccaacaggttggaagtacgtggagttggcctccccgcccagagccaggcgcgcccccgcggcgggactggtgcgcgtgtccgcgcctcttcccgccgacctggcgggcgcctggcccaggcggcggaggcgcgggccgtggggcgcgctcccgcgaagcggcagccaatgagaagccccggatgctcgtgctcgcgcacgcagggcggggggagggaa

SEQ ID NO: 46296 - DNA, 210 bp, Mus musculus
  source 1..210: mol_type = other DNA
acttgggagacagctccattgacctcagcacggcagtgcctactcatcacagggatttggcccttgttgtgtgaaggacaggcgaccattgcctgagcacatgctctgtccgttttcaaggtaaagtgcagcttggacctggatctttaggtgcaagcatgaagtggggtcttgctagcttttagccaggctgctgaagacatcgagtgg

SEQ ID NO: 46297 - DNA, 264 bp, Mus musculus
  source 1..264: mol_type = other DNA
gggaagaacagcgtatgctctttttggataaaaatttgacagaaaggttttcctttatttcctagctctacttccaagtcatgtatgaccaccaatttaatagtttccaaaataagcgcattatactggtcggagttcggagaatatttgcgccagcacgcttctgcgcatgcgcatactgggaacattccttgaggacccgtgggccctagagcaggcgctgcgcaagccgccctggagggggtcctctttggcagctgtctg

SEQ ID NO: 46298 - DNA, 468 bp, Mus musculus
  source 1..468: mol_type = other DNA
cccggaattcgggggctccccctcacctgtgtgagcctgaaccgatctaggtcatcccggcctgtcaggcataggacagggtactaagcccccaaaccggcccgtttaatggctggagtcagccatctcggcgccccgagttagtaggtcctcccgtgaaggtccgagcggcggtcccggctcgcgcacctcactcccagggccagcccggaccagcgaagcggagcgcgcagcgcgggggcagccatcttggccgctgtcaggacctcggagggctgcccacagcgcgcctgcatgagagcctgcgctcctttcccttcagaggttccctctgaggaagaagcgaagacacatcctcgccctcgcggcctccgacgcggtccggcgcgcccgtggaccgcagccctcggcgcgctcaggcccccatgcgggccccgcccccgccctgctcgcgcagaacctcgcgag

SEQ ID NO: 46299 - DNA, 421 bp, Mus musculus
  source 1..421: mol_type = other DNA
gtagtagggaggggcttccaggagcctggaagatcgtgcgcagcagtcctaggaaagacccagggcccttttaaaacttattttgggagttgccagagtgtgccccagcccttgcgctcctcccacgctgcccggccggggagagtctgacctagttcacctgagcggggcaagggatatggtgaccccggcgcggggtcagggagggtccggcccagcgctcggaggctggccggtgagctttcagcgcgcgacggtggcggtgtcgcagttgtcgggtgccgatccgtctccgcgccaagcgagggagcggcccggggcggcggcggggtgcggaggcagtcgtggccggtaggcggcgctagcgagtcgccctggcgccgccgccgccgccgccgccgccgcgcggtaccacgccggg

SEQ ID NO: 46300 - DNA, 601 bp, Mus musculus
  source 1..601: mol_type = other DNA
taacgttaaaccttattcctttggagcaatgtacaaattagtaaaggcatatatgtgcgcgcacatcctcaggatggtcccactctggaagctgccaggtgtgtgcggcgtggcaccgctcaaccctccccgagggacctgtccaatgcccggtcccagagcacaggctgggtgcagccctgtcagcccaaggcgcccgggtgtcgctttccgggcctgcaggatctcgcgctgcaggtgtcacccgcgggagcctgaggacgcgcggcggggaagggccgctgctcgcaaggggtgtgagcgccggatgctcgccgcgaggcgacgccgggtgtggactgccgcgggccgccgcggcggaggggatggcagccaggtgcagccgcccggtccggccctgcgccctcaagcctcgcgaggttctgcgcgagcagggcgggggcggggcccgcatgggggcctgagcgcgccgagggctgcggtccacgggcgcgccggaccgcgtcggaggccgcgagggcgaggatgtgtcttcgcttcttcctcagagggaacctctgaagggaaaggagcgcaggctctcatgcaggcgcgctgtggg

SEQ ID NO: 46301 - DNA, 327 bp, Mus musculus
  source 1..327: mol_type = other DNA
caaagctcagcctagcattgctgaactcatgaaagctgggatcatggagcacagtgcagtctgcaggcagcccaacagattggagagacctccaggcagctcagttggtcccagcctatcttcaggtcaactggagcgtctcaagagtacactgggcagcccagctcaagctgctgtttccacagggtgtgctagtagtagggaggggcttccaggagcctggaagatcgtgcgcagcagtcctaggaaagacccagggcccttttaaaacttattttgggagttgccagagtgtgccccagcccttgcgctcctcccacgctgccc

SEQ ID NO: 46302 - DNA, 329 bp, Mus musculus
  source 1..329: mol_type = other DNA
gattaactcttaaactgtaacaaataaaccactgatttaaaaacatgtaagtaatgatacattaagaagttgcagcaaattacttagatctcagttcagataaactaggtaggttccaaagttatatgacttctaagactacattgatttggaaaatagccaatgagaggccctctagactcttttacggcgtcggaaatgcgcacgcaaggcgctgtggtactacacctcccaggagtctctgcagctgggaccttcgacgtacaacgattcgtccagcggcggccaaaagctgcacggtgattggcctagcagcctgtcagttactg

SEQ ID NO: 46303 - DNA, 352 bp, Mus musculus
  source 1..352: mol_type = other DNA
ttgagacagggttatatatatatatatggttatatatatatatgtatagccctggctgtcctgaaaaggctggccgcgaactcagaaatcctcctgcctctgagattaactcttaaactgtaacaaataaaccactgatttaaaaacatgtaagtaatgatacattaagaagttgcagcaaattacttagatctcagttcagataaactaggtaggttccaaagttatatgacttctaagactacattgatttggaaaatagccaatgagaggccctctagactcttttacggcgtcggaaatgcgcacgcaaggcgctgtggtactacacctcccaggagtctctgcagct

SEQ ID NO: 46304 - DNA, 252 bp, Mus musculus
  source 1..252: mol_type = other DNA
gattccttttcaatataaatgagaactaataaggtataggcaggctgttcctggatgttaaaccctaggcagaccctagatattgggtatcttgtgtctctcatcacttcatgagaacagatcaaggtttagtttcaataaagagaaggagtggccccacctttagggggcctgtcctgactgaaggaggctctcaccggctcctgagtttaccccagcagctgatgctattggctgctggacctgtcaggc

SEQ ID NO: 46305 - DNA, 475 bp, Mus musculus
  source 1..475: mol_type = other DNA
gctgaggaacagagccagcattcccccaaagagctatgtgtaagtgttattgtgtgtgtgtgtgtgtgtgcgcgcgcgcgcgcgcgcgcatgagggtgtgtgcaggtgaatgctagtgctatcaaggccagcggcaacctgagaggtctctccagccaagacatacactgggtatgtggttcactgcgtgaacagactaatcaaacaattcaacgtttctagaagccgttcctctagagcagagctgtgctccggcacgtagagggttacaacggcccaggggcggagccgagtccgtgccacctgctgcgggccgagctgacgcatgcgcgaagcccccctctaggctacctgccgggcggagcggaggaggagcgcttgcgctctgggccttttccgccgggggaagtctcgcgggggcggggcgcggcggggcggggccgcgtggggaagttctcgcgggaccctggcgagg

SEQ ID NO: 46306 - DNA, 446 bp, Mus musculus
  source 1..446: mol_type = other DNA
ttatgtggagagatttggacttctccatctgtagtgataaactacagaactggtttaaacagagttaaatcagtaaaatggcttcgaaaagagggattgtaatcgcatgattaaattcattattataaggaaggggctcttttcagatatgaccctttctgacttcataaacagaaaaaaaaactttttttttttttttctaaaagcaaatgggaaaatggaagtaaatactgacacatttctctaattagtctagaaaaaaaaagttgttttcaagcttgtttttccttttagatttcaaatgaactgagggtgaaataacagtattgctttagattcttccataatattagtactgaaggcgatttttcaagggcctcattaaaaattctatagcgctaaaaacgcgggagccgtgcaattccgccaggctcccggaggggcgg

SEQ ID NO: 46307 - DNA, 330 bp, Mus musculus
  source 1..330: mol_type = other DNA
atgtagcatggataatcaaatatgttactctcatcagctttgcaaactggaggccagggccaaaaaaaaaaaatctcttcttaggggctctgaagcagggacctcctcgaggctggggtccccgccgtgacatcctgagtcgcactgacgctcaccactaggtggcaccgtaggaagtgatccccacccctagtggggggggggggtcctcaggttcacctgcgcgcatgcgctgatccaaccagtggctcggctctggactggctggcggggtgcggccaggacggtccccggctcccgatccggcgggagggaggggggaggggcggc

SEQ ID NO: 46308 - DNA, 432 bp, Mus musculus
  source 1..432: mol_type = other DNA
aacccttggcccaggtccgccgtggctgggccccgggccagcgactgccaaggcccctgggtgtccccggcccaaataagccacagcgcgcgctgtgctcgccgcccggagtggacgggatctctgccgcctgctagacactgcgagggacttccagttcagtgcaagaagcctagcaccacagcctttgcagaccgcgaaacccgttaaaagccttgggggaagagtttgacggtcactttcagagtcagaccattgtacagtgtaggctcatcctgggagtccccggacactctgcagtggaatgtcaccggctgtgcactgcattaacaagctacctctttgataatcagtatcagaaaacacttgacatttctattttaagtggctaggaagtgcccagggaagatcaaccgtttggaaggcttacac

SEQ ID NO: 46309 - DNA, 370 bp, Mus musculus
  source 1..370: mol_type = other DNA
gtccagagccgagccactggttggatcagcgcatgcgcgcaggtgaacctgaggaccccccccccccactaggggtggggatcacttcctacggtgccacctagtggtgagcgtcagtgcgactcaggatgtcacggcggggaccccagcctcgaggaggtccctgcttcagagcccctaagaagagattttttttttttggccctggcctccagtttgcaaagctgatgagagtaacatatttgattatccatgctacatctgcacatcgagctgggtcccgcggcccggggtacacgtgtgccgacaggtggctcgaggtcgaaggcgctaggaccgcgcggaatgccggggtgggcggggcttcgcg

SEQ ID NO: 46310 - DNA, 492 bp, Mus musculus
  source 1..492: mol_type = other DNA
agcacatgggagagcatgcccagggtctgaagagtaccaatgagacaagattccaatcttggtcctgccctgaggaccaacagttggattgtacccaagccactctgagggtctttgtgctaaaaactatagctattggctataggggctgacaacccccttgaacctcaggctccagcggcccctctgcttactagacagccgggggagggaagtgaagccttgcccccacgctgcctgcatggagtcgcgtccatcctggaaagcacccagggactctttcctcttcccagaggcggtgggacagcagtcctgtgaccaggtgcgcacagcccgccccacactactggggccacgattggttggagagcggccccgctctggagactcccaggatgcgctcctgccccgtcggctcggcctaggaggcggggccggggcggggcgagggctcggcaggctcgccctgctccgcctccctccgctcgccgc

SEQ ID NO: 46311 - DNA, 548 bp, Mus musculus
  source 1..548: mol_type = other DNA
gctggcagctgggtaatatatgcactgccactgggccctgtgcatcgcacacccataccactgtgggtgagttctggtctccagacctggtctgaccaccttgctctgcctgcagatcctgcgggacaccttcacagagtcggggctggccctgcccttgaggggaagtgcatgggagcaaggatgtcatggaccctcctgactgggcctcagctcagctttgggccgggagcgtgactgacccactcgccttcccgacagggtgagagtggtctcaccggggactgcggctgctgaaggtgacccaaagcccttccacctggaccagctgaagacactctgttcctacaggtgagctggtgcagagccgggaccggagtgtggccaggatcctggctctgtccacagctatgctgaagtcctgaccgtgcagtgcaggggcagatccaccctggagctgtccttgaagaatgagcagctgcctgggcgagggccatcaaggccatggtgtcacggttcccggtactcccgagttactgggtgggagg

SEQ ID NO: 46312 - DNA, 355 bp, Mus musculus
  source 1..355: mol_type = other DNA
tagcagcgcctgggcgagggccatcaaggccatggtgtcacggttcccggtactcccgagttactgggtgggaggctgcccaggcgggtagtaaatagctcacccacctacccgcaggactccggctatgtcatcgccctgcgtccaccgtggggacctcattaggttactgccagtgaccgctctggaaccaggtatccccagggctggcagttcctggtgcagccagctgctgcccccgacctctccttttccctgggaaagagaaacagctgggtgagactgtaagtcacactagaggatgcttaataaataaccggtactggggtggtaccaaatttcctgtgctcccagc

SEQ ID NO: 46313 - DNA, 302 bp, Mus musculus
  source 1..302: mol_type = other DNA
tcaaagggctccattgactgcagagctgaggtcagtcctccccctgcagcctggactaaaacaagcaggctacttttctttcttctctgtgtagccgtggctgtactggaactgtagaccaggctagccccccagatgcccctgggtctttctggcagagggcagagaggggcacccaagagcgagtggcaacctcagacggagccccccggggttatttccacagggacagcctacagcctacagcctggctcaaaggcaggagggctcaggggaggactccctgggctcctcctagatct

SEQ ID NO: 46314 - DNA, 346 bp, Mus musculus
  source 1..346: mol_type = other DNA
gatggagttgacaggcacagaaaggggctgagagcccccatgactcttatcaggcgctgtggcctgtggagcatccacagaaggttccaaatctgctgcacaagcggcctgggcaccagtgggcctcagtggcagccaagcctgttcttcctggaccactctagttcccccaggtttggggcataaagttttggaaacacaaaattaccagtagctttgcttggcttcacccaaacctagggtgtatccagtcaatggggcccagctccagggctccctctccccctgaccacggctggggagcaagggaatgtgtgttatgttgggtcagagcttaaaataacaa

SEQ ID NO: 46315 - DNA, 362 bp, Mus musculus
  source 1..362: mol_type = other DNA
ttacaaaatgtgccaaagtttagttatgtttctattgtttcggactatggagtgatagcaaagagacaacagctgtcatctgctctaagagctgactatacagctggctccaaactccaactgtaccagctgcttcatctgttgataccatgtcaacgttgttatcatagaaacaagctcagctgctttgccagagtcccgcctgctggctgtgtgcatctggcaggcccaccactccaggttagaccccagaggattggatgacagataccctggcatcccagaaactggtgcacgtgcgtaccagcagaggccatgccagaggcaggttccaggcagttcctgccagaagtgcagttagt

SEQ ID NO: 46316 - DNA, 419 bp, Mus musculus
  source 1..419: mol_type = other DNA
ttgccagagtcccgcctgctggctgtgtgcatctggcaggcccaccactccaggttagaccccagaggattggatgacagataccctggcatcccagaaactggtgcacgtgcgtaccagcagaggccatgccagaggcaggttccaggcagttcctgccagaagtgcagttagtgctcccctacgagctctgagaagagtgctcccagggagatctgagagctctgaatggctctaaggcccagctctcatcagtgaggctgacaggcggcctggggcacagacccactctcaggctgacctctctcagggacttaaaacctcctccaatgccattggcagttgccaggcaaccagtctagcccacccttgtttgctctggtggtggcagcaaaggtgtggtcagagtatttggcaac

SEQ ID NO: 46317 - DNA, 330 bp, Mus musculus
  source 1..330: mol_type = other DNA
tgtttcatcttttgcagaagacccaaagctctggtatatcaggtaatttgcttccttcaagaaagcttgtctagcatattctatgatgcatttttaaaaactctagggcagacttagaaacgattccttaaaagttgagagatcactcgtactgtagtagaggttctaatgctctgtctgacctaggacatccactgcgctttggggttccaagacccgatacctggagggtagcatttggctgaacaaaacatttttcgcgcggtgtggctcaggcctatgactcaaagggctgtgtctgggcatggctccgcccccatgctcagctct

SEQ ID NO: 46318 - DNA, 268 bp, Mus musculus
  source 1..268: mol_type = other DNA
ccagtggttttcatctcttgtaaaggtgttttaaaagaatctccggactcgccgctcccggtcgaagggagtggagaaaggacggctcatctttgcaaaaatatagcctatgtctgctatgttacacttaaatatctttgcttcatacatttctccctttaataaaagtcgaccagagaacttggaatcctttttctagggtccttgttctagaagcgaagccatagagctgagcatgggggcggagccatgcccagacacagccctt

SEQ ID NO: 46319 - DNA, 514 bp, Mus musculus
  source 1..514: mol_type = other DNA
atcttgtaacattagttcaggctgagtttcagactgcatactctggctctgacacttggcgagcttgaagcccccacgggttgaggaggtccagtgagcactcgagagcctgggtcacgtgcttgcctatcggttcctctagtagaggcaggtgctaagtctccctaccagtttggggcacgacctatcctcgcgctgacacggagagggtggtgcacgacccgatgaccgtcgaggcagcgggactgacccagctgagcggacccgcgacccggagcggcccggggacccgatctgggagcctggacgggtggggaagacggagccccggtctgtgctgcagggaagagtggctcctcctccagccccctccgcggcggctcggggctcggggccggcgccggttgagccgcagccctttccggggggcgggcctggcggctgcggcgacaccccagctcctgccccgacaggtgcgcgcagcgcgcaggaatgcagtccgcctgactgcgct

SEQ ID NO: 46320 - DNA, 304 bp, Mus musculus
  source 1..304: mol_type = other DNA
aggaagggaaggccctaagcccgctaggcccttgattgcttcctcaactacgggctagagactctcacccgagcctcagtccagcaggtcctgtggcttctgcccttagtcagaactgggctgggccatgtgtggccaggctctgggtagcacatctgagtgctcacaatgagttccttgaactctcggcaaccctgccagagagtgtcaccctttcgaattccattttccactgagaaaacagagatgcagggaggttaagtccctggcctgagactaccggaccagagcccttccttagaaa

SEQ ID NO: 46321 - DNA, 311 bp, Mus musculus
  source 1..311: mol_type = other DNA
ttagcccagactggtttcagactgccgctccggcctgactatgcctggcttggaaattatttaatttttgaataagatagtacatttattagtccttctgttagaaggtttcacacaagcggccactggatgagatgaacttcagtcctccatcgccaggagccagagaaggagcctgtaaaaggcttcttggttgcaacgtctcttcctccagctgtcagctgccgccgctctgcaggtgggatgggcggggccgtcgtagcgggggcggggtcccgcgacgccacgtggctccgcccccagcatcccgc

SEQ ID NO: 46322 - DNA, 387 bp, Mus musculus
  source 1..387: mol_type = other DNA
gagcttggtttatgtagtcctggagaaaaaacaaacaaacctgcctttgagcttcctaaaagctgagacaactcggaaataatttttttgaattttgattaaacaattgctttatgctttagaatgtgtatgcatttacagtgcacaaaacactatatgctgtaagatgactgactggattacatttctcatactatattaaacgatgaaaattacagaaagtaaattattcagggaataatttcatcctacattaaaataatagtaataattactattattatatttacgcaaaatcttcttaaattccaggagactagtgcaattcatttgcattgactttctattgtagttggagtggcctgaaccagcgtctctataaatatg

SEQ ID NO: 46323 - DNA, 436 bp, Mus musculus
  source 1..436: mol_type = other DNA
ctatatccagcctgtagaaagtcatttcataaaaccatattcctaaatgtgaggcaattgccttgcatttccccggaacagaaaggtttttttccagaaaagggaactagaatggactagaacatttttacaatttaccaaagtgcctaagagactactctagatagagattaggttctctccaaccactgaccaggaacaatatggtgtattgtaatttttaaaaacaaaacaaagcaacaacaattcaaactgtctgctagcctgcatactttcttactatattatgaaaataggcaattactgcactgcatttggaacattctgcggatcctcagcatccgggacaccgtccgcaaagactttagcagcgacactgtgccaacggtaaaatttcctcccagcaacctttgctgccgcggcgcaggcgctgtgg

SEQ ID NO: 46324 - DNA, 275 bp, Mus musculus
  source 1..275: mol_type = other DNA
atctctttgagtaaaaaatacttctcccactggtgtagccaaattgctgagcaaggccaagtggaaagtttctcttctccttcttggtagggatgggcatggtgtgcatacctataattctggttactcagttgatatttccaaaatgtatgtgaaacgtacatttgtaaacagtgttccatcctcatgatagcttaggtacagtgtagataatgcattccccatggaaaggtttctggctacaagcattccagttaggaaaagtaactagtcct

SEQ ID NO: 46325 - DNA, 435 bp, Mus musculus
  source 1..435: mol_type = other DNA
tgttacagaggaagcccctcccctttacagggggctgctctgcaggagggatagagaatgtcaagaattgctcttgttcgttcctggtccagacacaaaatgaggagatggttatttaaagagaattcctatttatttgacacaaaatgtccagttaatatattaatgtgaaataaaccctgtttgcaccttgatttgtttgctacaactgtgaaatagtaaaaacgcacgcccctgcacctgcctgggatggtgtctgtgccacccactgccagcgggggccaggacgaggcctgtgtcccatctgctcctcccgctcccctcctgagcacaggcgtgccaggacggcacagtgtgtgccttcatgccaccttacccaggaaagaagaccccactcacagtgagccagagagctgtgggagatcccagatcaaa

SEQ ID NO: 46326 - DNA, 446 bp, Mus musculus
  source 1..446: mol_type = other DNA
cacgcccctgcacctgcctgggatggtgtctgtgccacccactgccagcgggggccaggacgaggcctgtgtcccatctgctcctcccgctcccctcctgagcacaggcgtgccaggacggcacagtgtgtgccttcatgccaccttacccaggaaagaagaccccactcacagtgagccagagagctgtgggagatcccagatcaaaagatctggggctgagaacaccacaggtctccggtgggcgggttccccggtccaggcatagttgaagcaggcagcggccttagcctggcggctctggactctccccagagcctccgtgggacggtgggtggggcttgcctgcccactgtgcccagagcttggagaaggccccaccaaggcagtgacgcagagtgtagcccgggggcccaccctgcggcttccttgtttccacccggccg

SEQ ID NO: 46327 - DNA, 374 bp, Mus musculus
  source 1..374: mol_type = other DNA
aactcagaggtggagtttagattcactacagcgcagtgggctgcagcgggaaagcagcgccatcgcgaggcggcaggcggcaggtgctgggtggggagcggaccgctcagtccccagaagttcacagtccgactctgggtccgggatctggatctccactgtagaagggactgcatctcgcactgctctgtaagtttgcaatgaatacccattaaatgtaccatacaccagatcatcaaatttaagttacatttcttcgattgagtttgcttaacatttgtaaatataatctctagcctggcctataatataaaaggccgcggttgccggaccactgccggagtaaactctccccacgtgacagtccagatcag

SEQ ID NO: 46328 - DNA, 291 bp, Mus musculus
  source 1..291: mol_type = other DNA
acacagatctcctctgtccgaatgctctggggccgtggggagcatgtgcccagtgtcccgctacctccttccccagggggaaaatagagaatcataggtggccctatactggcttctctgtgcccacaacctgcttccttgccaggcatttggaaatggcaccagcttgggccagctgagatctgatgcagttccggggacgtcctgagcgctgcggaggaccgctgccggcatcgcacagtcccgccgtactgtggccctcatagacgtgctcgtccccactaagcagga

SEQ ID NO: 46329 - DNA, 390 bp, Mus musculus
  source 1..390: mol_type = other DNA
taaaataactactaaaataattttgacaatttgattctacatagtttaaagcttaacattattgcattattacaatgtcagtgcctgtgatcccagcactcaggaggctgaggagagactaataacaagtccttgcagggatttgtcacagacacataccagcagtaagtttttctgtatgtcggctgtgcacgcccaccatggcacctggatagaggatggaggatcgaatgtcctctgctgggtagaagtctcaagagggtcgtgctcccctggagggctggccggcctcgcggcgtctgctgaccggtgggtgcggcggtggcgagccgcgggggccggacccttggccagggtcccaaggggcggtgccgggcgcgaaccgtccca

SEQ ID NO: 46330 - DNA, 443 bp, Mus musculus
  source 1..443: mol_type = other DNA
tctgacagggacagtccctatggaatctactgagagactcagtgcagcagctggaaggtcacacctccggaggacagtcccatgctggcctctcccaggacacccaggggcttgtggattgtgaataaaatacttttttcctgatgccaaggtgcccagcagcccggtagctgggggccgggatcagaacctcctcgaggagaaagtcctgcccctgactccattaggagccatctgctctgctcagctgtagaggagatgacagtaccatgccctgggcctttaatcccagcactcagtcgaggccagcctggtctacaaagtgagttccaggacagccagggctagagaaggaccggagggagccgcgccccagctcccagtgcgtcagaaggcgggcaagcaagggtgacttggatccctgccaaggaacgttctagtgc

SEQ ID NO: 46331 - DNA, 257 bp, Mus musculus
  source 1..257: mol_type = other DNA
aggctgtggtgtcctgacctgtgaactccaacacttgtcagacagcagctgctcactatagacctcactgcatttcactgtgagttcaaggcaatccctgtgtcagggccagaggaaggtgagtgagatccctggggtcaaatggcagtccgggcccgcactcttagactttgcgccaatgggcggggcggggggcggggtctcccacggggcggggctatggaggcggagcctcccgccggacgcgcaggcttctc

SEQ ID NO: 46332 - DNA, 400 bp, Mus musculus
  source 1..400: mol_type = other DNA
catgagatccagctgtaaagcattttctcaattagtgatcaatgggggagggcctagcccaagtggtgccatccctgggcaggcactaagttcttttctataagaacacatgtcagcacatataaaacaattttttaaaattaaatttgtagagagttgggattgcacctaagaaagtgtgttgtgttaattccgagacagccagttttgacctaggaaattgacaatctaggtctagcctaggtttcaaacggagcagctttgaccttatgattgatcaagaagaagatcatggtcaccgggagatgctttccccgcgcttcacgggagtgacgttgagacagctcctagcaactcgcggaagacgccttgcccccgctgcggggcacgctggcgggac

SEQ ID NO: 46333 - DNA, 424 bp, Mus musculus
  source 1..424: mol_type = other DNA
gcatgctcgacatctccagcctactacttagcaatttttaaggaagaattaggaactctttgttataaatcctacgctagaacttcttaggcgtaggtacatcttcgatgacgataatgatatggcaaagtaaagtctagatttcaaaatttctaggaccaatgtagagaaactggacctgttccctctcgctttaaatcggggacactgtggtgagaggaccccccccccagcccctcaaggccctggccaatcggttgcgcgcgtctcagcctcccggaaagatcacgtgaacctggggcgaggagccgctcggggacctcccctggcccgcagcaggggattcgtccgtccggcgggcggtaccagcgtcggacggctcgagggggcggggccgagggctgtctcgctccgctcatagggc

SEQ ID NO: 46334 - DNA, 438 bp, Mus musculus
  source 1..438: mol_type = other DNA
gtcagaggacaatctaagggaggtgactctctttctacaaattgaaattagatgattaggccaggtagccacctcaccatcccttaaagtttgttaaaattaaaaaaaaaaacaattttgggcacaaccgttcattattagcatttttacaatctatcctactaaaagatctagatgcaaaagtaatattatttttcacacataaaattgaatcatgaagtattcaatttaagcctttaaacgcagactgcagctgtagtttggttcagaatctctctggacgcccatcgaagtaggggtccccgcttcgggggtctttcgggcccggcttgaaggtggcggcggcccgctccttgcgcagagtctccgcagctcaggcgccgaccaggccctatgagcggagcgagacagccctcggccccgccccctcgagccgtc

SEQ ID NO: 46335 - DNA, 166 bp, Mus musculus
  source 1..166: mol_type = other DNA
aaattatgtatatgaacattctgtctacacgtatgtctgtgtacatgctggagaactagtactccacactagccaacctcctttagtaacacaaaagggtagagaggcccaagacatccgcggtctgcggcggagtccgtcagtgcccagcctggaaagtgccgct

SEQ ID NO: 46336 - DNA, 467 bp, Mus musculus
  source 1..467: mol_type = other DNA
tggaagagcagtcagtgctcttaaccataagacaatgtgatcatcagacagtctgtctgacttggtagaaccacaaggactagtcagtggcttttctacctggaagggctgatcaattctggtcgtgacttgagaaggtatgcattgggtagcctggcctctcagaagctagtctgagttcaaccagctgggtggcacccattttaaaaaggttcccacctgtaatgagacagaggggtggccccacctctccctccagttggctaaccccagctctaggacccgctgagccaggacctgaacaagtgcttgagtcgtgggagtcgtacgggcgccccgcccctgggctgtgccctctcctcccagactggttgtgcaggagctggctgcgcacgtcggggcgggcgctggggcatgcgcgggccgggcctggcagagacaccgcacctgcagggaggagcctccca

SEQ ID NO: 46337 - DNA, 264 bp, Mus musculus
  source 1..264: mol_type = other DNA
ccaaccccgaggggctgcctgcccagcatgctcagggaacccagcctggagtctaggctggtttccagggaacccagtagcactcactgtcccgcttaaagtgactcagatccagacctgggccctggcagagcctgctggcagaggggctcagaaccttctgaaacagtaggcagagcctcccccaggagggccgtgggacagatcctacggggctgggtgggagtggcagacacccctgatacccctcaggcctcagcaggc

SEQ ID NO: 46338 - DNA, 512 bp, Mus musculus
  source 1..512: mol_type = other DNA
atccagctccagacttaattagggtttagctaactggaaagatggctcagcagttaagagctctttcttactcttccaggaagcctgagttagggttagggttcccagaacccacatgactcactactgtaatgtcagctccagagggatcagataaccttctggtcttccagggcacctggcatgcaagtgaccatgttaaaatccacaaataaatcatgagctggtgaaatagctcagcaggttaaggcattttctgggtcctacacatgggagggagagaactgtgcagtcagcctgcgatctaaaaaaaattcaggtataatgttggtttgcttgatttttggtttggagaccaagtctgactctgtagcctaggctagcctggaatttactaggaaagacccacgtatgcctcaggtgagcggctctatggcgtcgacccgcagcccgctcgcgagctccggcaggaactggcgcccccgaaagcgtccgggggcggggccgaggga

SEQ ID NO: 46339 - DNA, 365 bp, Mus musculus
  source 1..365: mol_type = other DNA
accaggctgggttctttttggtggcatgaaatcaaatgaagaaagagtgcattttacttagcacttaaaggctttttgaaacaaggcattacacaacttgaagttgcagcatgctcgacatctccagcctactacttagcaatttttaaggaagaattaggaactctttgttataaatcctacgctagaacttcttaggcgtaggtacatcttcgatgacgataatgatatggcaaagtaaagtctagatttcaaaatttctaggaccaatgtagagaaactggacctgttccctctcgctttaaatcggggacactgtggtgagaggaccccccccccagcccctcaaggccctggccaatcgg

SEQ ID NO: 46340 - DNA, 303 bp, Mus musculus
  source 1..303: mol_type = other DNA
gggcccagaatactgtctgaaagggcagcacctccgcagatgcccctggaatgccagcttccgggaacgagctgcttaccgggagacgctgggttaccctacccgcctcgcagggcacggttccccgagacttggtctgcagaatccggggctgggtcccctcagcggtcaaacccgacgcgttgggggaggggttcccggggcctcgagcgggagccgagcacccgccgtgagacccagcgcggggccctcgggcgggaatgcacaagggcccgcggtctccttggagacgtactggccatg

SEQ ID NO: 46341 - DNA, 278 bp, Mus musculus
  source 1..278: mol_type = other DNA
tgaaaaaaaaaagttagaaaaagtgtttttcttccctggcgaggggtgtgccagcagttctgcctgccctcccataccgtggacccctcggagtgggccgaattgccaggagtgcctgtgccagccgcagacagcctgtccaccggtggcattagttcaaattaaaactatacctatcccttgtttggtttcttaagaggaaataaaccaccttcgcttctgggcagcacctccccaccctgctctgagggcggagtctgtaatggtgtttagagccc

SEQ ID NO: 46342 - DNA, 481 bp, Mus musculus
  source 1..481: mol_type = other DNA
tgttgttgaaagttgacgtcatgctgaaacacaaatacataaatgtctgtaatttgtctccagagaacagttcacaagggacaggctcagagtgactatcttgagtacatcttagctgaccatcccaacatcccctatgcagtcttggtgacatttgctctggctgccagggcggggcggctcggctcgaggcaggcctccccggtgccacgggggaggcgcacccggagcaataatcccaccgggacaccgctcgggtgcggcggggaccatgcttcttccacccgccgtggccgagcagctccgggagactcagacccttgcccgtcgctgccgccgagccccaggccgcatccgcgccgcaacctccgcgcgaagcacgcgccgcgggcgcccaccgcagctcgtttcctattggctggccggcccgcgggcgctcccgccccgccgtcccattggctgaggccgccgcggtcccccc

SEQ ID NO: 46343 - DNA, 364 bp, Mus musculus
  source 1..364: mol_type = other DNA
atacaatgtaagtttcatgtgaatagatgtatcaatgtcctcttgatcagggaataatgacaaagaaaatgtcttcatgctgaaaacaggtacttttttttttttttttttaaagcataaggtttttaaaccccgaggctggattatgcaaagcatgcctcccccccacccccgtgtgtgtgtgtcagagctatccgaattttttttttaagagagactgtttagaagctatttaaaaatttaaatactcttgagaggagcatgttcagtttcaatgaagaacgcggtcagggttttgctggccaatgccggggtgcccccgcggcaccgactccgccaatgggcgcggccaggcgaggagcgg

SEQ ID NO: 46344 - DNA, 380 bp, Mus musculus
  source 1..380: mol_type = other DNA
cccggctggattatgcaaagcatgctcccccccacccccgtgtgtgtgtgtcagagctatccgaattttttttttaagagagactgtttagaagctatttaaaaatttaaatactcttgagaggagcatgttcagtttcaatgaagaacgcggtcagggttttgctggccaatgccggggtgcccccgcggcaccgactccgccaatgggcgcggccaggcgaggagcggccgggcccgccgcaggattcgaatcgaacgtccgtgtgggagccggcggctggctgggctgcgcgtgggccaatcagcggcgtcggctcacggcccccgaacgttgggcctggcggccccgccccgcgctgttgtttgcggcgtcggcgc

SEQ ID NO: 46345 - DNA, 403 bp, Mus musculus
  source 1..403: mol_type = other DNA
agtctgtcctccggccgtcccttccagggcaaggtcccgaccatcattgagacgcccttgcatgggcttcaacctccgtttttcaaacagtctgatagatcgagaggctcaaatgtctctttggaacgacttcatctatttacacaaaagtaacacgcgccttctgtcctccacgtccagattctggagcagttagtttaagtgcccgcaaaagggaaagggccggctgtcccttttcaaataccagcctgcgcactggcagtaaatttgaaaacatttataagtaccccggagactcaaactcaggcgaacacgcgagtcagcggcgcctgtgtcacacctccctgcccttttccgagatggcggcgggggcggacgctctagctgctcgactcggtgtcgc

SEQ ID NO: 46346 - DNA, 301 bp, Mus musculus
  source 1..301: mol_type = other DNA
gcgagtggcagagagcctggcttccccgcagactcgtgtccccgcagcgcgtgaccacggcactgcggctgcagagctgcaatccttccttgtccgcgctagattccagggagcgtgtcgctgagtcaccttctcggaaccggtcaggctgtcccgcggctgtacagagccaaggcatgtgacgcgtgcggaaccgcaggtccagcctgtgcccctggccctccttcttctggactttaagaagcgcgctaataatcttccaaaggggtggggaggttgggaccacgcccccatgctagcc

SEQ ID NO: 46347 - DNA, 382 bp, Mus musculus
  source 1..382: mol_type = other DNA
ccacagaggagccattgtgtccactggaaccagcgccagactggccctcccactgggtctcttctgagcagaaggggaaccggccctgaataaacactccttcccaaaaggagggtgtttccacagtctgggcagcctcggggagaatagtttcctccctgagtctgctagataccaacgccagatctggaccctaggtctctagcgagtggcagagagcctggcttccccgcagactcgtgtccccgcagcgcgtgaccacggcactgcggctgcagagctgcaatccttccttgtccgcgctagattccagggagcgtgtcgctgagtcaccttctcggaaccggtcaggctgtcccgcggctgtacagagccaaggcat

SEQ ID NO: 46348 - DNA, 441 bp, Mus musculus
  source 1..441: mol_type = other DNA
aaggggtggggaggttgggaccacgcccccatgctagccgttcctccagtcggtgaggatcgtggatcccgatcatccgcggcaggcagcatcttcccaacctgaaaggcgtgcgtctgagtgagccagcggctgcatctggcgggtgacccgaccctggcccagagtcaggacagcactaggacgcgtacccgaagcccgctcggatgctgggcgccggcatgtgggctgcgccctcgctttcgcgctccgcggatgcgctgcttcaggccgggctcagaaccccacctcttggatcctgcccctcatctgcgcgtggccgagcccaggctggcggcgactgaccagagctgcgcgcaactctggttccaccccgaacaaggaacgcggggcgtggccaggccggcccagaggctcagcgccctccccgggccgccgtga

SEQ ID NO: 46349 - DNA, 431 bp, Mus musculus
  source 1..431: mol_type = other DNA
ttagatattttcttcatttacatgacactctgtagaccaggctggcctcgaactcagaaacccgcactgccttgcaagactcactttgtaagtcatggctggccataactaaaccgcatttaaaaaatttttgtttggcttttttgggtttctctgtgtagccctggctgtcctggactcactctgtagaccaggctggcctagaacttaacctggacttgctttgagaccaggctggcctaaaacaaaaggcgtggccaccacgtcagacccgggcataatttttttttaagaaattacagcctagcgaccgggcggcggctcctagcaacagcatcccggcgccctaacgacggcggcacgcaggcctacgtcagcgcgctcggccccgcccccgcgccgccggccccgcctccccgcgccttaggctg

SEQ ID NO: 46350 - DNA, 283 bp, Mus musculus
  source 1..283: mol_type = other DNA
atatatatagttatttctcattacagccaacaaagcaagttacttggtcagtattggccaggctagagtatccaaagcctagatgtggagggccttcctgagccagctttcagccttagcaagaagcctctgtgtccttgagcaaggacccggtctggcctagaagggatgccaggccgcttcgacgatgtagctgcagcgatgaggctcctggagccagtccccgcccctgcgccctcgcgcaggtagggaagaggcggagcgctggcgctcagccttgtag

SEQ ID NO: 46351 - DNA, 309 bp, Mus musculus
  source 1..309: mol_type = other DNA
tggcagtagccacatgactatgaggccccaggtatgaggggcctgggagcctgcccaccccgggtatgataccacagtctcccaaggctggagggcctgtagagtcttgagctttgaacaattgctcaaagggacctctagctcatagtgaaaaggtacctctaccccaagagactggcactctctgtgatgaacgcatgttgaacatcaactcccgccacttgggacctcagagttcctaggctgccagcggcgccacacactccctgcagagtctctctctctctctctcacacacacacacacaca

SEQ ID NO: 46352 - DNA, 459 bp, Mus musculus
  source 1..459: mol_type = other DNA
agaaggagatgaaggatctgccttctggtactccctgctcgcaggcgtagggagggaagtggggcacgggtctctggctccccagactggacatgtgcacaagttcacctcgaggtccccacgtctgacaacgggtgcctcggcccagtctcaggctcaggagtggcggggctacaggggaagcccggatttgtctgcaagctcctcccaagcaggcgatgcctgggtgtgtttgactttgagtcagattcagctccgcaccagcccggggcgcacgccagtacacccggcgctgtccatcaccgcgtgaccctctcccagccgggaccgcggtggccttgctaacgggtgggtggtcaggcgggcagacgccagccgtgacacccccatattgactcccagaaacaggactggattttttggagcggattttttttaaaaaacattttttccccagca

SEQ ID NO: 46353 - DNA, 429 bp, Mus musculus
  source 1..429: mol_type = other DNA
aagaggagagccactcacttcctgggcagcagggctcctcctcatcttgagctgggcctgtgtcaggaccaggcaggccctctgtggtctcagggtccctgctgtctacagccaggagaaggagatgaaggatctgccttctggtactccctgctcgcaggcgtagggagggaagtggggcacgggtctctggctccccagactggacatgtgcacaagttcacctcgaggtccccacgtctgacaacgggtgcctcggcccagtctcaggctcaggagtggcggggctacaggggaagcccggatttgtctgcaagctcctcccaagcaggcgatgcctgggtgtgtttgactttgagtcagattcagctccgcaccagcccggggcgcacgccagtacacccggcgctgtccatcaccgcgtgaccc

SEQ ID NO: 46354 - DNA, 259 bp, Mus musculus
  source 1..259: mol_type = other DNA
gggaggcctggtgcacgcgcacgcatgcacacacacggcctcggtccctgaagactggcaagctttcatgtcagcagcccggcagagttggtcggatacagagttatcgcctcagagctctttgacccaggctggcctcagagctctctggagctcagccaggctttgaaggtctttgtcaccgggccaaggcccgctcacttagctcgattgcactacgtgccttgatgccaacagggttacctggcatgccttgaag

SEQ ID NO: 46355 - DNA, 545 bp, Mus musculus
  source 1..545: mol_type = other DNA
tatccacagacccagggtctgacactgggcagataccaaccccaattttctcagctatcagaccagattaaagcttggggagccgaggtccactctcagcaggccagtttccccagccccgggcgatgttgatgcctctcaggccaagtctgagcagcgcatggagaggcctggcttttctgcgtgttgccaaacagagaggtaacaaccgggtttccttccattatttgaatatactcttctgcaagtacataaggtagtttcacagctgccagccaccggcttctggtccagcagggcagcagacctggacggtgagaaccgtacatccctgcccgactctggacatccggggtgtggctctcgttggagagcagcctcaggggtagccgccatcgaagtcccccggggacagccctggaacagcgctcgcggctccagccatcgcagctgcacgacggccttagagacgctcagtctctggagttgctgcgacctaaggcctcacaggggggagctgcaggacccggaggcgcgcggcagcc

SEQ ID NO: 46356 - DNA, 333 bp, Mus musculus
  source 1..333: mol_type = other DNA
tcctgtcaagtctcttgccaaagaattctggcataattaccaactgctgaaggcccttttgcaaccttttaagatgtaactcacgagctactagaattatacattaaaatggttttacagtgccacaggcaggcgaatacctggggctgctgctgctgctactgacggtcgcccctgcagctctcgagtgccccctgccgccggaagcctggacttctcagtttcctccttcactcaatgtgaggtgagacgaacggtagatttagaactacatttcccatcaaaccattctcgacatcgcgagagttccggcgagacttgccgggaagactg

SEQ ID NO: 46357 - DNA, 469 bp, Mus musculus
  source 1..469: mol_type = other DNA
tctctcttctttaaattcagatagaatgaatgatttcttggaccattctgtgctggatctgcagcagtggtgtgctctgcacaaaggctgctttctccactatgacagaggttccataagcacctttaaatatggctatatatgtataatgtatacacattatatagatatacacacacacacacatatgtgtatacacacacactttgtgtgtgtgtgtgtgtgtgtgtgtggggcagcagacccccccggagcttgtgtaaagcctgacagcaagtctcagatgtgctgcttccggggctgtttatgacagatacatggtctcatatagcttccggaatttggacaaaaaacaaaacaaaacaaaacttgcttgagtaggagtttctcttcttagcttactgtgctttcatgaaagctaagagtcacgctaagggcagggctccctcgctctcacctgaaggagcag

SEQ ID NO: 46358 - DNA, 668 bp, Mus musculus
  source 1..668: mol_type = other DNA
ccaaacagggggctcccacgtgggtgccgccgcacgcacctgcgggacgcggacctccagcaccgcccgattgcctccgggaactggctcctcccggaaccgaaagagctgggtcccggccatgaggccgggctcgcacgtaggggagtccagggacgccgggtcaggaggcggtgcccaaggccggacccggaggccgcagcgggcccggccggaagaggggcagggcgtcggcgacgcgaccttcccaacatggcgcccaattggcgtgcatgaaggcgggtctcctggcggaccgcatgaggcggtggggcggggaggaaggccgctgttcgcccaacccaagcgactttaaaggcgccgggccggagcgaagggcgtctcggggccgcgccagccagggagggagggcgcgtttcgcgagccgcgtcggggtcggggcggaaccggacggcgagcggctcccgctgaaccccgcggccgtgccggtgagcggggcgcgggaccccacacgacggctgcccgccttccgagggccgctggtcccccgatggggccccgcagcccggcttcgctcggtcgtgggagcttcgggcccctccctcccgtgaaggggtggctccgggtgcgacgtgctcgcccgcacgcacgtgggcctccttccgtcc

SEQ ID NO: 46359 - DNA, 362 bp, Mus musculus
  source 1..362: mol_type = other DNA
gctgagacagggggctctcctgaatgctggggttacaggcacctgtgccctgtatttattcaaagtaactagtgtgttttacactttactatccccacagcctctgggctggaggggatgtgcatgtctcataggcagtctagacagcctggggcttgcttgtgtaaagcaggctgtattacatagacctcccaaacttaagagttagcgcttccataggtcctgaacttctgtagggcagaaatgcactgaagcctgagctgagatggtgccccagagcgagcttttcagcgcgaggggcgtgggcttgacgaaactccgcccctgggcgtggcctggcggcggggcgcggcgggttccct

SEQ ID NO: 46360 - DNA, 428 bp, Mus musculus
  source 1..428: mol_type = other DNA
attggggtgttggagacaggaatccctggtcccaaaatttagccagcatggtggcgcagttagggctaccactcagtggcggagcacttgccttcagtgaacttcctggcccaaacagggggctcccacgtgggtgccgccgcacgcacctgcgggacgcggacctccagcaccgcccgattgcctccgggaactggctcctcccggaaccgaaagagctgggtcccggccatgaggccgggctcgcacgtaggggagtccagggacgccgggtcaggaggcggtgcccaaggccggacccggaggccgcagcgggcccggccggaagaggggcagggcgtcggcgacgcgaccttcccaacatggcgcccaattggcgtgcatgaaggcgggtctcctggcggaccgcatgaggcggtggggcgggg

SEQ ID NO: 46361 - DNA, 434 bp, Mus musculus
  source 1..434: mol_type = other DNA
cagatcccgctcgaggtcaaggtccaggtcgcgatcgagagtccaagtctaggtcgcggtctccagaagaagagggagcagtttcttcctaagaaaatggtaatgtctgcgggaatctgagacacgccctaactcccgtgttagcataaagactcctggtgttaagagtactactgctcttaatgaaaatgtctcctgttttatcaaagaatattggccagtattgcgtttgtctttaaatgttaaagatgcactatcctcatagagaaaaacattcagtgcaactgttgttgtatggatgtggcaaaggaattgcaattaagaagcctatttttctttttaaaggaaagggccctaagtagctgattaagaacatcctcagttcattttcaaacatcttacaaagtgtagactaatttctgatagcaagtttt

SEQ ID NO: 46362 - DNA, 550 bp, Mus musculus
  source 1..550: mol_type = other DNA
tgtaaggcctctcgtagcgctccacgaacgtgtcccgttaggacactggaacaagtccagtggcggagcgagcctctgctcctccagggggccggagggacggaaggaggcccacgtgcgtgcgggcgagcacgtcgcacccggagccaccccttcacgggagggaggggcccgaagctcccacgaccgagcgaagccgggctgcggggccccatcgggggaccagcggccctcggaaggcgggcagccgtcgtgtggggtcccgcgccccgctcaccggcacggccgcggggttcagcgggagccgctcgccgtccggttccgccccgaccccgacgcggctcgcgaaacgcgccctccctccctggctggcgcggccccgagacgcccttcgctccggcccggcgcctttaaagtcgcttgggttgggcgaacagcggccttcctccccgccccaccgcctcatgcggtccgccaggagacccgccttcatgcacgccaattgggcgccatgttgggaaggtcgcgtcgccgacgccctgcccctctt

SEQ ID NO: 46363 - DNA, 506 bp, Mus musculus
  source 1..506: mol_type = other DNA
agactgccgatttccaatcttgggatgggaatcccggtacagtcgggaccctccggggacgcgaccgagtgcagaggagacccggggtctacccgccgcaactccagttgcagggaacgggatccggggcaaggacgagcagtagcagctgctggggcccgccctcccggacagcagatcacgagaccggtcagctgaccagagtctggtcgcagcgcccgccgggaaatgtagtcccggcgccccgtggggggaggggagggtcgcgtactttaggtctacactagcgcgtggagcccgggcatggaaggggcggggctctggtggggcgcgcccgcgctctcgcggacgcacccacggtagagcagcagtgactgcgcgctttccgcccgcccgccgcgcggtgcgcaggcgcacctgggaggggcggggcgcgcggcggcgacgttacgcaacacggccgaatgggccaatcaggagatgcgcgggcgggtataaatgcgcgc

SEQ ID NO: 46364 - DNA, 553 bp, Mus musculus
  source 1..553: mol_type = other DNA
acgcgcggtcaggttgtccaccttgagggaggtcatgccctccacatcgggaggcgggcggccgtagctcatggctgcgaagcggcgccgagaccctaacgccccggacaggccctcgctctccggaaacgcagctccgtcaggcgctcggtagctacagtcctcgtgggtagggagggagccagcaactaagcgagcgggcgggccccagcgcgcatttatacccgcccgcgcatctcctgattggcccattcggccgtgttgcgtaacgtcgccgccgcgcgccccgcccctcccaggtgcgcctgcgcaccgcgcggcgggcgggcggaaagcgcgcagtcactgctgctctaccgtgggtgcgtccgcgagagcgcgggcgcgccccaccagagccccgccccttccatgcccgggctccacgcgctagtgtagacctaaagtacgcgaccctcccctccccccacggggcgccgggactacatttcccggcgggcgctgcgaccagactctggtcagctgaccggtctcgtgatctgctgtccgggag

SEQ ID NO: 46365 - DNA, 452 bp, Mus musculus
  source 1..452: mol_type = other DNA
ttcgctcgctcgctaggtagcacatttgcattgagcaagggcagtctgaccgtgcctcagtgaaagagtgacggataaactcacatcaactctaagtgaggaagtgacacacacacgcagggatggtgtgcgcagggctcaacaatgctaaaatttaagccgtatactagaaagcccgttaactcagtgacctcaggcatacagctgacggctcctggcatgaatgcctctgcaggagagacaagggtcccctctccgcgccccatctccccgatgcagttaccggagcagcctcggctctccggtctgctcctagggttgcatggtccagggaggggcgcagagccatggctcccgcgctcgcgtccccctcctcctcgcacagcccggggagggagcgcagcgagactgcggccaccagatggcgctcaggcgccgaggaaacgcgaggc

SEQ ID NO: 46366 - DNA, 329 bp, Mus musculus
  source 1..329: mol_type = other DNA
ggggagggacagctgcagatggacacctctctccagatccaccactgggagatggcttgctggtgtagccaggagcctcccacaggtgggctctgggcttgaacctcctcctcatcaagggggctgagctgcttgtggcccacaggcgtgggaccaggtatcaaactcagtggttcgactctggtggcaagcactgagccagctggcctgctgctccggcacacattgtgtccacgaattgaatctgtccagggtcaggtgtgggttcagctgccccataaccctagaatggagttccttcctgccagcagggtgaagaggaagtgatt

SEQ ID NO: 46367 - DNA, 481 bp, Mus musculus
  source 1..481: mol_type = other DNA
cggagggtctctcctcattaaggagggcggggccttaattttttgagacttgtcacttattttccgagtcttagagtcttaaggactatccggatcagcttccctccgggtgagatgtttcggaggaaattactacccattggcccctgggataccttgggatacctgcatgcaggacttggatgccactttggaggttggaggtcttagcccagagatgccacatcacagatctaatgacgtcaacgggtatcagttgataccacctatgggtttactgaacagaaccagctgggtttcaactgcctttgccacaacagggctgactgggctcgggaaagtcaatgccgcccaagagtagggagtccctcccggtcccaccgccgcgtggaactctggccgctctaaccgcgtctagaacgcggcccctttaaggccgacctggatgacccgaaggccagagcgaccttctagcggccgt

SEQ ID NO: 46368 - DNA, 257 bp, Mus musculus
  source 1..257: mol_type = other DNA
ctccgtgtgtggctcttaaattttaaagttggagacgctgacaagggtgcttgggtttcaagctggagggccggtgctaactgcgaagcctcgcccgccgccaacgccaagagaaggagcctctggggctcgctccgagtcctgcgcagatctgtaactcgcgccggcgcagtacggcccttagccagcccggcggccgcccctcctcggcctggtgtgcgcacgcgcgcctcttccgggcggccctcccgccccgg

SEQ ID NO: 46369 - DNA, 304 bp, Mus musculus
  source 1..304: mol_type = other DNA
ccctggagcaagtagatttaatcttcgacacagaggcggagattacatgcgtgcacttgtaagaatttcggcaaggatccatattcccggctcggagacacggagcccaccttccggagcccatcagtgcagccagcgcggccggcgtggcacccgtggatagtgctcagccgggctcccgggaaagttggcacgggacgcacctgcgtgggggcgcggggcggggcgaggagcgcacctcgacggggcggggctgggcggcagtgctcccgccttcctcccgcccttgccacctgggagcccg

SEQ ID NO: 46370 - DNA, 516 bp, Mus musculus
  source 1..516: mol_type = other DNA
acagctcagggactcacactgaggaccaggggatgagtcactcgcccactctgcaggccatatgaatccatgcagcccgtgcccagcgggcaggagacttggctcatccaggaagtggtgaacaccgcggagcccaggagcagccttcttccttccttctgatgttaggaactatggtccactctctggggaggggcgttgcaacgattcttcagaagggccgcctctccggatgcagcagcgacccccgggggtgcaagggggtagcagtcgcgatgctgagaactcccgggacccttagggtcctgcagacccaactagcctagcccagggaaggggaggaatcttgtccccctcggcgcccgcccgctgctgtggcccggcctccacatcctctacatccgcccacatctggccgcggaggggcgtgagggggaggggccgaggccgtgtctgtcgcggtcccctgggcacccgccaggaagggagaagggggggcagcccaggtcgtgtgcc

SEQ ID NO: 46371 - DNA, 311 bp, Mus musculus
  source 1..311: mol_type = other DNA
gtactgaatgagactctgagctgcacaaagtcaccatgtacggagtgccatgtgctacgcccaggctggcaatctggaaagctcactggagctgagcacaacctggggaggcctggggctccgcacactcactggccctaggcccctcccagcactcccagtgtgggagctggcctggggccaccgtggccatgcctgagcctgggagtgactcattcaggtcaggtctggcagatcccagcactctcagggtcccagaacatcatagggcctgcaaggagttgggggaggagactactgactcattgccc

SEQ ID NO: 46372 - DNA, 486 bp, Mus musculus
  source 1..486: mol_type = other DNA
cagtgtgggagctggcctggggccaccgtggccatgcctgagcctgggagtgactcattcaggtcaggtctggcagatcccagcactctcagggtcccagaacatcatagggcctgcaaggagttgggggaggagactactgactcattgcccagcccccacggcggagtccctgaggctccagaacagagtcagggtgagccagccccagcccagccccaggttctggcctttggttgcagccagcagagcccacttaagtaagttggtcgagctgtctcagctgccccaagatgcatgcctgttgtagggtaccatgtgcaggttcaatgtaccatgtgcagggtcaatggaagaccctagcgcctccgcggataccctgttgctgctgtcgcctgcagccggtgcgcaggcctgggaggctccttgttccgaggccacaaagcccctttgatcctctgctcggctccgagccatgtgacccgg

SEQ ID NO: 46373 - DNA, 408 bp, Mus musculus
  source 1..408: mol_type = other DNA
agtcaaaggggtgaccccttcacaaatgtctttcctgaagtgaagcttttcctcctcagcaggtgctgagaaccaatcactaaggtctatgagtgctcagtgccacctggagggtgctgacgcctacccagtttatcagaagccctgaggacacaggagagagagctgacggctccatccacttgaacccctacagttggggaaacaccctatttagtgtgtcttaatcattaaattcaacagaactaagggtcacctaccctacggtgcctgactgggagggaattttaccgtctcattagactgtggcccaatggttcccatcttaaaccataaaattatctttgttgctatttcatagctgtaattttgttactgttatgaatcacaattgaaatacctatagat

SEQ ID NO: 46374 - DNA, 273 bp, Mus musculus
  source 1..273: mol_type = other DNA
tggtatccatcctgctatcctcggcaggaagaagagacagatggaggctggtgtccttcccccttttattcggtccaggaccacaccccttgcaaggtggcacgccaggctgacaatgttaatcatcacattgggtaaattactggtgtgcaccctcatggaacagcaagtgtcccagggcagagctgttcctctcacagaaaacacaaccccgctgtggtggtttgaacatccgtccctccagttgccaaatctacagctgttggaaatctg

SEQ ID NO: 46375 - DNA, 278 bp, Mus musculus
  source 1..278: mol_type = other DNA
agcctgcaggatgtgggccagaagctgccagcacagcccctgtgtagatgaatcttgttaacttgacagaattgagaactggatacaatccacagagcctggcaccagtatccatctctcctgacagaggatgccatgtgatttgttgctggatcttatcaggaacaggaaaattatttaatacagaaaaattcacttctcaggctcggccagtctgggctatgcaagtaggaggacgccccaccagggatctcctggaagctccgggcttgcaggag

SEQ ID NO: 46376 - DNA, 327 bp, Mus musculus
  source 1..327: mol_type = other DNA
ttttgagacacaaaagagagagccacatctgccatcagatctttctagggagggaaacgagagcagcaagtctgttgtgtcccttttctcttcctaccagaatggtggagaggaattaggctccttccattctacggagcgcacagtgcttcagcccagggcttgctgcggggaaagcaggcctccccagggggctgctttgcagccgggattggctcgcgtcagagcaatccccggggagcctcaagaggatgccgcgaggagcgcgcagcgagcttctaggccgcgtcccgcgcacgtacgagtggcccacagggcgtgtgcacg

SEQ ID NO: 46377 - DNA, 512 bp, Mus musculus
  source 1..512: mol_type = other DNA
gacctcggttccccgcggcgggtgcgcgcacaggtgagccaatctggggagaatggggctcctctacccagaggggcgctgggaccctggtgctggggcgcaactgcgggtgcgggtttctggaaactgccgctcccggccgctcagggtgcaggatggtgcgccccggaacagcgcacacctggctggtcccaggaggacctgagatcaggaacccaggcagatccggagccccggcccgtagcctccggagcacccagactactgaggagaagaggtgtgggcccgcccggggcctccacccgggcggtgccacctcccgccggctccagcctggcctctccctgcagtgctccactgcagcgcaggcgggggcgtgccgcttcccctcagggccctgggccaggagagcagctcagcttctctctccagccttcagctgagcctccggaggacgctccagtgtgtggacgctgcctccggtgctgggggcaggactttgcggctgcctg

SEQ ID NO: 46378 - DNA, 615 bp, Mus musculus
  source 1..615: mol_type = other DNA
ctacggagcgcacagtgcttcagcccagggcttgctgcggggaaagcaggcctccccagggggctgctttgcagccgggattggctcgcgtcagagcaatccccggggagcctcaagaggatgccgcgaggagcgcgcagcgagcttctaggccgcgtcccgcgcacgtacgagtggcccacagggcgtgtgcacggcacgggccggaggcgcgccagtgcgtgcgccaggttcagggcgccgctgcgcagagggccagcgccgccgggcgaaaacgctgcgcaaacccgggatacggcggggcgctgaatctgcggcccttgcgcaagctaacggtcacagtgcggtccgcacggctctccgcattgaccggagcgtcagctccgaggaaaggcgcgcgtccgaggcgcgtgaagaacgcgcagctcgcacccccgcgcgctccacgcgcggtctggacgaccacagcgcgggcgctggaggcggagctcaggatcagggcgctgattggccattccgccctccggtatggtcacgtgccgggggccggtacgacttcctgttggaggcccacgcggggcggggccgggggcgcgagcgccgcgtctggctgga

SEQ ID NO: 46379 - DNA, 235 bp, Mus musculus
  source 1..235: mol_type = other DNA
attgggccgtctgcagaccaagacttccggtgccaaggcgccgcttggtaaacgatgcgaagaagcgtcccaggttccttgctccagctggtgacacctggaggctggtgaacgcccagggcggagcaggacctaggggttgtatacatccaaatagtgggtgggacacgcctacttcctaccggtaggcaggaacgagtcacgtgacctttggggcccggtgccacgtgggcgg

SEQ ID NO: 46380 - DNA, 341 bp, Mus musculus
  source 1..341: mol_type = other DNA
tcgtttaccaagcggcgccttggcaccggaagtcttggtctgcagacggcccaatgcttgaagaagctgcttcctcagccagagcctggccagggcatagcaacagggagggcagtgcctgcccttaaggcggtcagttcaaaaatcctgacacaggcctttgcagcagctccagtgctgatctggggcgactgcggaccgcagataagggcacgcctaagggctggcggccaagcaggtcggcctggtgccacccgcgcctctcacctgtgcccgtgaccctccaggtcgtggaggggaggagacgcggtgggcccccacccccggggttcctgtcacgt

SEQ ID NO: 46381 - DNA, 358 bp, Mus musculus
  source 1..358: mol_type = other DNA
gcatattaaaaataaactactgtgtatctgtcacactctcaggtgacagagtctcatcccacctgaggtaggatctagctggggacacctgggtcacagctgcatgcttgtggcagtgacctccacccctacagggcagggtgggagagggcccaggtcctcccagggggcggtatgtggtgttcagatggatctcaatatgatgtgaacctcggaatctactgattctccaggtttcctggataaggagagcccttgtgttaacattagccccaatcccctcctcccctgcaggtaacagggggagaacacagacctagctgcaggcagccacccgaggagcatccaggggccttgg

SEQ ID NO: 46382 - DNA, 359 bp, Mus musculus
  source 1..359: mol_type = other DNA
tgactatcttgtcatgactccttgggaacaaatttgtgttgtcaacagaaggaggcctcttggcggccaaggtgaagccctgggttgacacacgaccccttgatctcatttgttttaatttttaaaattacaatcctcagtatacttgagatctcagatagcagccctttggctttcaggcttagctccagagcaaagagtatgtgggggccatagttattaattactacagtagtccagaggcaagagcttatgccccagtcctttggtctggtttccacgagtttggaggggctacttcccggcggttggccccgccctgtcggcggccggacccgcccccgtgggcggggcggggc

SEQ ID NO: 46383 - DNA, 279 bp, Mus musculus
  source 1..279: mol_type = other DNA
tccggaggagctgtggatgctcaactactattaggatttatgattgattgtattttaaagttggccttgaacttaagtcctaagtgatgtctgtgcctttggtaacccttgccgcaaccaatggcaggccttactttgcgactcacagcaaggaccccaaaccctaagccccttagttcctgctggaacttgagttttcgctgtctttaaaaccaggctaacttctgagaggtgggacgagtcttgtcttcgtcccgcccccttttggggcaaatgcga

SEQ ID NO: 46384 - DNA, 372 bp, Mus musculus
  source 1..372: mol_type = other DNA
atcccagatcatgagtttggccctcaccctcggggcaagggacacaatgaggtgcctggtatggtgatgcaccccagcagaggcaagcggatctctgagttgggccaaagcaaagaaaacccaagtagtgtgtgtttgttattctgggtgggactcccagagtttagaccctcacctcctaactcccaggggacacatgagagttcggtgggccctacagaggctcacctagaagagaagtcatttaaggggtctcccccacctgaatctgcccccgagtcttgctgggggagctgagttagcacgtggaaaaattttcgcatttgccccaaaagggggcgggacgaagacaagactcgtcccacctctcag

SEQ ID NO: 46385 - DNA, 237 bp, Mus musculus
  source 1..237: mol_type = other DNA
aactctgcgcctccggaggagctgtggatgctcaacagtactattaggatttatgattgattgtattttaaagttggccttgaacttaagtcctaagtgatgtctgtgcctttggtaacccttgccgcaaccaatggcaggccttactttgcgactcacagcaaggaccccaaaccctaagccccttagttcctgctggaacttgagttttcgctgtctttaaaaccaggctaactt

SEQ ID NO: 46386 - DNA, 348 bp, Mus musculus
  source 1..348: mol_type = other DNA
gttaagataataaaataaatcttttttagaaggcacaaggcagcctttgatagacctttttgagaccctgctcaaaaaaaatccaacatttttttaaatagataagtaaaaataaggcaggggctgaggcagacttggcaaccacacccccctcaccaccacacacaagatctcttctggtgacctgagctagaagaataaattcctgtaagttgtcctccgcctagataggtgtctgctatcagaatgcagtgaaatagcggcagccgcaatgccttctggccacgagtcacttgtgggggcggggctcccggcggaagctacctcagctgagcacttaccactgag

SEQ ID NO: 46387 - DNA, 486 bp, Mus musculus
  source 1..486: mol_type = other DNA
tgtgaggtggcctggagctcattggaggcccactggcaggaagccgtttgcaacgccaacctgggctgtgttcggggcatgcccagcctgctgtctgcactcagaaatagccattgactttcttttccagcggcctccatcccagggtgtctataggctgctgcagggaggagggtctcctgtcttcctaagggcgcccctccaccagcctgtgggtgggtccgaggcacggcaggaagaacctgtgcagcggacatgctttaaagaggtgccccaggcccgtccaccgccctcggccaccctccgtgtcctctggggagcagctgcggccctgcgcccgccacgcccacaaggccaggcgcagatgggcgtggggcgggactttcccggctcgcctcgcgccgtccactcccagaaggcagcgggcgagggcgtggggccggggctctcccggcatgctctgcggcgcgcctccgcccgcgcgat

SEQ ID NO: 46388 - DNA, 210 bp, Mus musculus
  source 1..210: mol_type = other DNA
aaaggtgtgtgccaccacctcccagctttaaattcatttaaaagaagaatttggggtcaactaggttacccagtgagttcagaactaatttccctggctgtcctgtgtaaaccaggctggcctcgaaagagaacctgagttccattcccaaacacccaggtgtttcccagagtggcttatgccccgggcttgcccagttcaggtccgcgc

SEQ ID NO: 46389 - DNA, 419 bp, Mus musculus
  source 1..419: mol_type = other DNA
ctacaagactccagcgcgccctctggtggactcgggggacgagcgccgagagtacctgggcggacccacagttcgccacgcaggttgggaggcccagatgagtgataaggtagtagttagctgggggtgccaggagggagcctctcccggctggcctcctagaactgcccgcgcgctcccatcgcgacgcccccgcctctgccagaaaccagccttcttagaagggagggggcgcgcgggggaggggccgctgccaggaacgctcggccaaggctggcgccgcgcccgccggtcgggcagcctcgcgccgcgcttcggtgagtctcggcgggtcctggaggccccagctccaagcccgccctcccggccgggcagttccaggaatcggggggcggggcgtactggccgggtaaataccc

SEQ ID NO: 46390 - DNA, 258 bp, Mus musculus
  source 1..258: mol_type = other DNA
tcaggtgggctacaagactccagcgcgccctctggtggactcgggggacgagcgccgagagtacctgggcggacccacagttcgccacgcaggttgggaggcccagatgagtgataaggtagtagttagctgggggtgccaggagggagcctctcccggctggcctcctagaactgcccgcgcgctcccatcgcgacgcccccgcctctgccagaaaccagccttcttagaagggagggggcgcgcgggggaggggcc

SEQ ID NO: 46391 - DNA, 238 bp, Mus musculus
  source 1..238: mol_type = other DNA
gcaatctcagcagctctggaagctgataatttagtaagatcctatcttagagttttttaaaaaggctgggtggtggagcaccctgctcacctagcaggcatggagtgtcacttcccttcagcagtggtggctgatactgcactcacactaatttatttcacgaggggtaaacatctaaaatagttttcccaccagctctaactgttgagctacagctagctctgctgtaggaggaacc

SEQ ID NO: 46392 - DNA, 461 bp, Mus musculus
  source 1..461: mol_type = other DNA
atctgacaggtgtcaggactctgaatgatcactagcttcctctctcctggagcaatgcaggtgagtttaatgtggcggcagctgtcagtgtgacaggtgctaagatgccactgacatcctcctccttgctccctcatgtgagtgcatggcactctcatatgtgagcgcagggtagcagctgaaagtctgcgctgagcatccttccttcttcttggaacaaggcagatgatgctggaagtctgacaggtagtctggtcgctgagcatccctcctcttacagcaaggcagatgagcagcagggcagcagctgctaatctgacaggattcggggtgctgagctgtccatgcctcccgcccttgagctccctgtctggcgcgacgcggtgccccaatgcagctgtcactgccgctaccgcgcctgcgcgctggctccctgttcgcgctcgcactgtcaataaagt

SEQ ID NO: 46393 - DNA, 273 bp, Mus musculus
  source 1..273: mol_type = other DNA
tgttctggaacttcctcatagcacaggctgtttattattactgttagtactattatttacatgtatgtatttgaagtagggttgtctccttcttatgatgagaagacttggcagttttccatacattttggagctaaacattgtgtatatggaattatggcagaaagaagcagctgctgcatccttgcttcccaccgctggggctaattggtccctgtgccaccgagtccagaagcagttctcccaaccacagcccaggaaactgctctgggt

SEQ ID NO: 46394 - DNA, 514 bp, Mus musculus
  source 1..514: mol_type = other DNA
gtgcaagagcctcaagcagtgctgcttggtgtgtcagcactgggatctatgtcctgggtcctgggatcccagttagcttgcctgataggtatccttgtagctcatgcagtccttgaagaatcagagacactgcttctgcctaggatgtagctgtgtctctggtcactagccatcttgcacagtcacctccagaagttgtctgcatggttcacctctggtgaagaacacctgggtaccgggtgggtcttgtaggatgctgcctcccaagaccctcccagacggtgtgtatggtctctagtttgagaagacatcttaagtaagggttaccctcttcctggagagagcaccagctttgcttctaaggggaaaagaaagcatgagcaaatgctagcaatgcctcccctcccccaggaggccaggaagaggcggcgcacaccgagtgtcagctgctgctgcagctccgtgcatcgtccccatccccgcggctgggccagcctggcacacaaatgctgtc

SEQ ID NO: 46395 - DNA, 336 bp, Mus musculus
  source 1..336: mol_type = other DNA
taccccaggcctttctggggtaagaagggtttgtgcatgctgtggtggaggacatcctggacagggacctacctcacattgctaggcaagtgctctgtcattgagctgcaatgcactccctgctggtcacttgaatttggacgatgagtttaggtaatttcctcctcgacgtgttggtgtccgaggcggatacagctagggccacctacgctggccctggctagtaaaccacgcccgcggcctgccgcgctttagagggcgttcacgcacgcgcgtgtgccgggggcggtgcctcgggcggcgcgtgcgcaggcgcgtgctgggcagtgcgggcgc

SEQ ID NO: 46396 - DNA, 478 bp, Mus musculus
  source 1..478: mol_type = other DNA
accagtggcctccactgtaattcaaaatctttttaaaactaagagaactttttttttctaatttaggtcatatgtgtctgccacatgtagagttacatgagattttgaaccaccactatgggtgctgggaagtccttggaaagaacccccttttttaaagacaaggttctgctacgtggccacttaagttaatggagtggctatagcctttcatgcagtgatggatggaacccagggcctcattccatgcccgtttttcaaaaagaagccctgagctcctcgccgcagcacactgggcctgcgcactggcaatgtcaggcacgcagaagtgacgccactcgcgcgcagcagggtctctggactccgggacgcttccggagcttttagctctacgcgcttgcgtcatcgcgtagactggcaggcctgcggggcggaggggtagtcgccgttagctccgcctcttaaggcgaacgtgccc

SEQ ID NO: 46397 - DNA, 436 bp, Mus musculus
  source 1..436: mol_type = other DNA
agtctaggctaccctgaaattcagtacatatcttgctgaccaacatctgaggataagggtgcaagtgtggactggccgtgtctttccaagaacacagaagtcctttggcctaagtctatgggcaaagagtgagcacgctgagcaaaggcggctctggaatgcttactggaaggcgctgggatccaagcactccaccctcccccatgggagggggccatggggagtgacactggccccctggtggccttcccatccagcgcgcagtcaggtacgcagcgcgcatggccctacagcgcagcgtgccaggtggtgcgggaagcccgcagcctgtgccaggctgggcacaacaaaagccggggttgggcggcgcggcgcgggaggagggctgctgggagcgcccggcctgcactggccgccagccaccgagaggaggagc

SEQ ID NO: 46398 - DNA, 245 bp, Mus musculus
  source 1..245: mol_type = other DNA
tcattaaccagctgagtattccccggttcagtcaagggaggaactttaagcttgaacttttagaggacgaggagccggagctaggattctttcttctcctgcctccagccagctgctgtctctgcacagcctgaggaggtcgtgatgctgccagtctgaggggagggagcactcctccaggctggtgctttcacctcacccctgaggtgatgtcacagcaccacagctctgctgttcccatggca

SEQ ID NO: 46399 - DNA, 366 bp, Mus musculus
  source 1..366: mol_type = other DNA
tctctagccctgactaacctaggactcactatgtaaaccagactagtattagccctactttaaaaaaaaaggtattgtagaaaccttttaagatttaatttttaaaattatatgtgtgcatgcatgagcacacttgggtgtgggtgcctacagagtctgagcccctgaagccagtgtggcccacatacctgccaggatgcctgcctggccagcctggagatgacagggtgcctgcctggctagcctcagcacagggcgcttgggtgcctgccctctgccccacagagcagcaagcagaaggctattagccttgctgacagccaaccccagaagcagcctctgtcatgtgttttctgaaaatcgaaa

SEQ ID NO: 46400 - DNA, 441 bp, Mus musculus
  source 1..441: mol_type = other DNA
tgatctcatgactggctcaggcaaagagctcctggtgctctcagtactgctggttctgagcagactgaggcagaggccatggagtgggtcttccccaagaccctgagaaaggaaccagcctttgggtgttgcccagggaaaccaacctgaataattcaactgtcccagtagtacaaaggttgactcagtgtgtccctgggtcggagatcccggagccacacttggctgagtggcctctgtggtccttagagcacacagtcacagtgcctagcctgtggctgtgcacgggtctgtgccccctaaggccctgccatcagaggctgctgggaagcctgggcatctgcctacttcttccccagcagtcggtgctggcgagtagcactgggcactgcccttccttgatcctggaggggaggagccagccgccgaacctgtttgagc

SEQ ID NO: 46401 - DNA, 227 bp, Mus musculus
  source 1..227: mol_type = other DNA
ctgcagaccaggctggcctcgaactcagaaatctgcctgcctccggtctggcctggatgactctccagggatggatccttcctggtgccaagggaaggtcggcaccttcctgccccagatgctgctaacattggcccactgcctggcgcaggatgtgttgcaggcattcataaacaaatgttcattaaggaaaaggctctcttggtccccagggggggcttattttt

SEQ ID NO: 46402 - DNA, 300 bp, Mus musculus
  source 1..300: mol_type = other DNA
cttcctttcttttgttcattagtaagaaaagacaatcggaccgaacaggttgtgtttatatatacacacacgtagaacatgtaattatattttaatttcttaaaaaaagcagaatattacaggtgcctgtaatattagatcccatccaggaatccagggatccaaggagccagggacccagggaagctaggccaccagtctctgtggcccagttccggtgaaccgggctcagggcgagccaaccgcggcgctgcacactcaccattggctgagagctgcggcaggggcaggcccaggctt

SEQ ID NO: 46403 - DNA, 250 bp, Mus musculus
  source 1..250: mol_type = other DNA
tgctttaaaaatcctacgagcaatctgctatttttcacatgtaatttagtatatattctaacgttagttagtgtccagaaggcttttgggagactggcctcttaaagtccttcacacagcaaccggggtcctccgtttgtacggccgcacaccaccgcattggctatgaccagctggaactgctcagagcccggcgctcagtgcgcaggcgcagagcagctgccgggagcgcgcggcacagagactgccg

SEQ ID NO: 46404 - DNA, 322 bp, Mus musculus
  source 1..322: mol_type = other DNA
tgagagtgcctgcatgccggaggcgctcaccccatttactgtctgtgtctggtcccaggcagcatctggagacaaagaatgactgagtccaccagggcctggtgccactcagtggactgtggggattctgagacccacctccacacagccatgagctggctgcccatcgccccgtcatgtgcccacccacaggagagctgtgctcctccctggcttcacagctgtgactcctggtaccctccttgtcaccaggaggaaaggcatgcttttccaggccctggagctgagagtgagtgtgctcaggcacagcagggtggcaccc

SEQ ID NO: 46405 - DNA, 309 bp, Mus musculus
  source 1..309: mol_type = other DNA
agtgctggcccagcaccacactccagggcttcactggaggacctggaccctccagatgcaaaggaatcatgtaccaaatttaccctcggtccctggagtacaagtagccctgatggcaagggtctcagatgggaccactgctgccagctccctggggcgtccagaagtagggacagccagtcagccagccagccagccgggcacacaggagcggtctaggctcctccacaactccctgggggccctcctgacctagcctagaaggctcagcccctgggagatgctctaagagacgcctccccgagagcc

SEQ ID NO: 46406 - DNA, 378 bp, Mus musculus
  source 1..378: mol_type = other DNA
ggctgaatgccagtaaacgctagactccctttccctgggttagggggaggctacagcggggacaagtgtgtcctccctgtgtcctgtagggtaggccaaggcaaggcatgggtggccagttaggcgcgggcgctgcagactagctctagggacccctgggggtggtggtgagctcggaggagcccagctccttctgagctctagggtgcgttctccaaggctggagctgggactccagggctcctgtgcctcgccgccctccctggccgcgcgaccgccggagccccctccctccctcgccgagctgcgcgctccgcccgtgcagccgccaccaccaccctgctgccttctcgcttcagccgagccagccagaggaac

SEQ ID NO: 46407 - DNA, 224 bp, Mus musculus
  source 1..224: mol_type = other DNA
gtatctccctgccagggaaggagccacagctccgagcccagttccttggtgttgtgtaaccccaaggtcctccactcgactccagtgcacaggagctgtctgggaaggattcagaaatcatctaatgtacctcagcagtgctaatgtacttctgatggctgtgtcacacaagctggcatgccctgtagtggctcactcttccgcccagatgcacaggagagacg

SEQ ID NO: 46408 - DNA, 416 bp, Mus musculus
  source 1..416: mol_type = other DNA
taagcaagaggccttggaagccgttcagaatcttgggtggcatcggattcagagccccacctcgcggcctaaatgcccagagactggcggggcggggcggtgggcaccgagggtggggtcctgaactgcccccgcctccattccgctctgctggacagatgtagttgggagcaactgtaaagtgcagcgggtgcttccgtggcccccagcagggatccccggggagtcccaatgtccagtgggcccggtcgaggtgcccaccctggccgcctaggcagagacccttccctgctgcccagaccgggggcctcgggtaggccgggctgcgccaatccgaggcgcgtcccgcctcctgacgccgagctgggccctgcgaggccccgcccgctgacgtccgggatttgcatgagttctcg

SEQ ID NO: 46409 - DNA, 403 bp, Mus musculus
  source 1..403: mol_type = other DNA
tagggcagaaagctttacaaccaaaagataaaccagaaagcgaattttcattggattctgctttattaaatgagagaacgcttcttcggggaactaggtcccattttcacaactctttagttaagaacccctgactggtagaggactagtggggagcagcgcccctcactggcgggggcaagaagcgccgcgtgctccccgcttcgccgccctccgcagggacctgcgatccggagcggccggaccccaggattcccggagcacgcagcctcccgacgactggtccccgccgcggctaccacgaacaatgcgcgccccgccccgcgcgcccggcgcgcctattggcccggcggctgcgggtagagcagcgcgggcgactccggcgcgcgtgcgcggggcgggg

SEQ ID NO: 46410 - DNA, 377 bp, Mus musculus
  source 1..377: mol_type = other DNA
atggttgccatggttaccatctggtgggatccccggggcttacccgagacatccggcgaagtctggaccgcgtgctccaagaccgcaggaggcggggtctggcagcgtccatcgaacaaatgtgtttgtgaccctgtactcaagagtaaccctaagtttgaaagaaatgcacatgggtacagggaggccctgcctttcggatcgagggcacagggctcccatccagggcagggtccggggtactaggcgcggcagaaagccccgagcaggggtcgacggatgcgcaggaccctccgggctgagcggggctgggccccggggcggagcgaggcggagcgggggcggagcggaggcggagcggggacggcctctccata

SEQ ID NO: 46411 - DNA, 466 bp, Mus musculus
  source 1..466: mol_type = other DNA
aggaggctcgcgacccctcctgcagggtctcgcttcaggatggattcaggcggtaaacactggcttgtgccagtctgctttgggcttctgagcccggagaagcgcccacgccagctcgcaggacccggagggtggacgcgggcagcggacccagggtggcgcaagcgacgtaggtccgggggttcgggcgcggctcgatgcgccccagcacctgtgcattgtgcatcaacggcggctggcgaccaggatggcgccagctagggggcctgggtctgcagaggggcagcgcctggctggcacctaccacggggcaagccaggggggccaggggcgggagcctagggcagcggcccccctgtccagccgtgcagactgacagcagccgggcccgccccgcttggcgtcactgagacgcggggaggggcgtggccgggcgctagtccaatcagcgcccgcagaacgggcc

SEQ ID NO: 46412 - DNA, 453 bp, Mus musculus
  source 1..453: mol_type = other DNA
ctctctctctttcctgataaaggaagttgacagataacagagtcaagagacgcttttctaacctggactagattgtggccaacatgtgacacctgtttttttctttctttcttttgaggaaagagagagagagagaacgccccaggagggcatggcacaccttgggggctctgtctgacagtgcaggcgaggaccgagtctcctcgagtgggcccactcccaaagcagagagtctcactcgagggtggagttcccgcagcaagatccgggttcgccggtcccccagccactcccggacccccgcgcagcaggcccgggtccggtgcgtgcagattccagggtacccaggaaccgcccccacccgggtcccgccgcgagggctggacacgcgccggctccaggagccaccaccgccgccgccactgccaccgccgccgaaagcgaggcgcggcg

SEQ ID NO: 46413 - DNA, 524 bp, Mus musculus
  source 1..524: mol_type = other DNA
ttatttatttatttatttatttatttatttccatgaaaagataatctggttataacgaaacatatctacacaaaatgaggtttcttatagtagctttatgtgtgagtgtggcccccacagaggccagaagtactcttaacgatttagtcatctttcctcaaaagcagaaaaaaggaaagcggctctgaaggattctcagatgtgatggcagcttaggcggcccctgctctccgggcgagcagcttgattctcccgccgcttagcgctgcggttgccatggcaacgcagtcagctgcgaaggagcgcggagcccatcgggcggtgccatcttcccttgcgtcccgagccggctgcggacaaggcgcttagcgacggcaagcccagcctctcgccgaatcccgcggagcgcggaatatcgcgagacctggagcgccgtgccttccgcccctcttgacgctcttccgcggcgctgcggcgcgtcacttcctcccgaccgggccggcggcgcgcgccttacatccggt

SEQ ID NO: 46414 - DNA, 356 bp, Mus musculus
  source 1..356: mol_type = other DNA
tttggtgtattaattacatgaaccaaagggtgccagagccaagctcagcacattcaagctggccagagtccatccacccactgtgctccgacaagctgccagagctgaggacaccgtcttctcaggcctttctcctctcccagcatgggatggggaggggggtacattgtttcaaaagtttgacagccagaggagagtcagggccttgcacatggtaggccagtgctctaccccactgtttttgaaacagagtttcaccagtgctgggatcacatgcctgcactactaccccgggcatgtcctatggctgaggggggactccgccgcctacgcaggaggtcgtgtgacgaggtccg

SEQ ID NO: 46415 - DNA, 393 bp, Mus musculus
  source 1..393: mol_type = other DNA
cccagcccagaagaagcaggtcctgcaggctcaggcttcctctggccggcagagtgtgtaggtaggggtacacacctccaccaaggtgttaggtaggactccacccaccactaagggctgcagttgtgacatcccctgtggcattcatagcccaagggtactttgttttccaaagactaactgaagctctcaaattaattctaggtacgtagcaccacccccacgccgccgctagcgcgggatcccgggatcgcggggtggggttcccggagtagggctcacccgaggactcagcgctggccccacagctcaccggacgctgagactcagggtcttccgaagtggcggtagctgagtccaggacatgggcggggcctgccgtgcacgtgaccg

SEQ ID NO: 46416 - DNA, 543 bp, Mus musculus
  source 1..543: mol_type = other DNA
caggcgaggaccgagtctcctcgagtgggcccactcccaaagcagagagtctcactcgagggtggagttcccgcagcaagatccgggttcgccggtcccccagccactcccggacccccgcgcagcaggcccgggtccggtgcgtgcagattccagggtacccaggaaccgcccccacccgggtcccgccgcgagggctggacacgcgccggctccaggagccaccaccgccgccgccactgccaccgccgccgaaagcgaggcgcggcggggagggaatatggagaggccgtccccgctccgcctccgctccgcccccgctccgcctcgctccgccccggggcccagccccgctcagcccggagggtcctgcgcatccgtcgacccctgctcggggctttctgccgcgcctagtaccccggaccctgccctggatgggagccctgtgccctcgatccgaaaggcagggcctccctgtacccatgtgcatttctttcaaacttagggttactcttgagtacagggtcacaaacacatttgttc

SEQ ID NO: 46417 - DNA, 439 bp, Mus musculus
  source 1..439: mol_type = other DNA
cctctggaagagcagccacttctcctctgtccaagctgagacaggaccgaagttccagagccacaactggctccagaggattccagcgccaatcctatccggtgactatccttggagactgcaaagacagcactgtttggcctggcccagagccagacctcagaaggcctgggctgtcacaagccaggcctgcatgagtagccggggtccaccgggtctccttggcaatgctggccagcttggggatcgggccagtggcggggaagagcccagtggccgcttctgggagcagcagcaggtggccgtgccagggacggcggcactcaccgttgcgcgagtgcgcgccgccaggccagtcccgggcagtgcatggcggcgccggtcagggtaagcggttccggctcgtccgctccccacggtcacgtgcacggcaggcccc

SEQ ID NO: 46418 - DNA, 450 bp, Mus musculus
  source 1..450: mol_type = other DNA
atatttgagtgttggtctccccacacttgctaatacttagtaagcttgcaagcacacagtgtggccgtccactagcaatgactactgctagcggcttttggtggacttgatgggttgccatcaaatcctggatactgtcacccattcagggcggtccgtcccgtgggcacgcagcggctgtagtcgctctggacaagcgagctaggccggcgccaccaggcggggaattcccgccaaggaggcggaggggcggcgccggccccgtgacccctcatcgaagcgcgccagtccgcgcgggcgcatgggcactgcaggtgcgatggggtctacgcgcagggaagggtccacggggcgacatgcggagctctgggaagagtgggccggcggctcatggcccctgtggtcacagtccctgaatggtgcctgcgtcctgatgcgccggcgcccagc

SEQ ID NO: 46419 - DNA, 418 bp, Mus musculus
  source 1..418: mol_type = other DNA
ctggtcccagcaccttgtcaaaatcctgctggcagtgtagaaatgttactgttacactttttacttaacaatgtgcgcgtgtgcatgcatgtgtgcatgcatgtgtgcctgcatgcatgccagccatggcacatgtgcatggactccttccatcttgtgggacgcaagggagagtggtacagagcattgaacccggctttacacacagaactactttgagtatatgtcaaatattattgaaaacttaaaaagaaaaaaaaatatattataaaaatggacttgtctgcagtcagcgcggaatggctgcaggccgtggagcttccactggaccctgaactggagagacagccggctataacttaggaaaaatttcaaaaactaataagacattactatgtctcgtttgacacattttttt

SEQ ID NO: 46420 - DNA, 238 bp, Mus musculus
  source 1..238: mol_type = other DNA
acgctggtaattttctacctatgatagaggtagaaaccttactaggaactactaaagcataagctatgagattctactgcattttaccacaccatattggatagaccaggctggcctcgaactcagaaatccgcctgcctaaggcgtgcgccaccacgcccggccaatattgttttgaaacatgttaatgttaagaacatttttctcatcagcaattattttgaagcccctgaggaac

SEQ ID NO: 46421 - DNA, 508 bp, Mus musculus
  source 1..508: mol_type = other DNA
acacaccctggtctggaggatccttaaccagctaataaaaatctatgctgcaaaggtgtctcaagtttgcacagaggttttctgctccgcaagcgcgtgctcatacgcaatgtgtcgatgtgcggacccgaacctggaaccgcgttaccccagggctcagggctccgtcgcagagccgccggcatctgagagagtcgcgcgggaagaagtcagcgctcggcgcccagcactgctgtgacagcggcccctggtggcggcaacctcagctgaagcggactaacagctcggcgccggcgctccggaagtgacgtcctcaaagcctcgaggcgctagccatggctcacacggccgctgagcggccgccagaggaaaccctgagtgacctccgacctcacagcccctgtggcggctgggaaactgaccctcggtgctgcggcacaggcctgctccgggccgccggctgccggaagttgcagccagcctgtttccggtaccggggattcccatc

SEQ ID NO: 46422 - DNA, 369 bp, Mus musculus
  source 1..369: mol_type = other DNA
aaagacatgaaagaaggaagcttttgttttttgcctgcttatatcggttctcttcctctagaagaaccctaactaacacacacacacaccctggtctggaggatccttaaccagctaataaaaatctatgctgcaaaggtgtctcaagtttgcacagaggttttctgctccgcaagcgcgtgctcatacgcaatgtgtcgatgtgcggacccgaacctggaaccgcgttaccccagggctcagggctccgtcgcagagccgccggcatctgagagagtcgcgcgggaagaagtcagcgctcggcgcccagcactgctgtgacagcggcccctggtggcggcaacctcagctgaagcggactaacagctc

SEQ ID NO: 46423 - DNA, 555 bp, Mus musculus
  source 1..555: mol_type = other DNA
gcgtgctcatacgcaatgtgtcgatgtgcggacccgaacctggaaccgcgttaccccagggctcagggctccgtcgcagagccgccggcatctgagagagtcgcgcgggaagaagtcagcgctcggcgcccagcactgctgtgacagcggcccctggtggcggcaacctcagctgaagcggactaacagctcggcgccggcgctccggaagtgacgtcctcaaagcctcgaggcgctagccatggctcacacggccgctgagcggccgccagaggaaaccctgagtgacctccgacctcacagcccctgtggcggctgggaaactgaccctcggtgctgcggcacaggcctgctccgggccgccggctgccggaagttgcagccagcctgtttccggtaccggggattcccatcgctgggaggggggacgccccgagcgtcgcgctcttcccatgggccctgagcggacacggaggcctggcagcgggaccccagcttctcgggcctgcagaaggctggtagtgctgagctaccccgagctcaaggtaacccggg

SEQ ID NO: 46424 - DNA, 445 bp, Mus musculus
  source 1..445: mol_type = other DNA
ttagtaatattctttaatattatccaaactttatggttcaggaacctaagactgagaaaactcagttgttgactgaagccagcctggtctacaaagtgatccaggacagtcagggcagttctcagagtgtgtcaatatctgagatttactgaactgaaccagagaagtcaacagcagggaggcttgcttctgtatactgtttgaaatcggtctcttttaaaagtggaaatatcaaaagaaagtcccttttctgaggctttttaaaaataccaccttttaaaatcatgacgaaaccaagtggtttctttctttaatatcaaggcacgaagctttgtttgtagtagcaaaaagcttttaaaaataactgaatcgcaaatggtctattttactagtggagatcaaacggaacaccgagctctacgccctagcaggggtagagcggtga

SEQ ID NO: 46425 - DNA, 362 bp, Mus musculus
  source 1..362: mol_type = other DNA
agaagctcccccaggggccccttttgagtggccagccagcttctggggcgccacctgcctggaactaggctggcggggagccagggcgtgggggatccccagactcagagtgctccgtggctttcgccacaaatgtccatgaacagcgagctgaacgcaggggtgcgagcgcatggagcccgaaccacacgggcgcttagggtgccggcgcgggcccaggcgggggcgtgggggagggccgaggtagctccagccgcgctcccgtgcgacccccgcggcgccgcggggccggtccgcacggattcctcccccgctgacgtcggcggcgccgaggcccctcccgcggctgcataaaaggcgcg

SEQ ID NO: 46426 - DNA, 210 bp, Mus musculus
  source 1..210: mol_type = other DNA
tttgcttacacaaaacaaaggtttctgcgaagagaaaacatttataagtttttcctgtgagcatcctgctcatcagatgtggctctcagtgaccgggaggaagactctgcccagtcagagctaaagactgtttctaggaacatggcttcctgatagtttgaatggaaaatgtccttcagaggttataacaaactgtgagccaaaataaac

SEQ ID NO: 46427 - DNA, 404 bp, Mus musculus
  source 1..404: mol_type = other DNA
taggtctgagcctctcgtgctgttcttaaaaccaagtcaagactgggagcctcttatgcctaaggagtcacaagagccactgctgagcctgaggctaagactgagcccttcgttcagattgccgtggggaaggagaactcccctcctagcaaaggcattgcaccaagggcctacagagggcaggtgtgatcagagaatccctggggttagtgtgtcagtcccagcaaccgggctgacggactgtccagcctgatttaggctcactcctgtgaggtgctctgaattaatcacagtcccatctgattagctgaaagcatcgcctagtaagtccagcggtgcgctgcgctagggacgaagctgcttcgcgttctgaggcgcgtggctccgcgcggccgccgtaggtc

SEQ ID NO: 46428 - DNA, 439 bp, Mus musculus
  source 1..439: mol_type = other DNA
gctcatgctgcaggacctgcacctcggccaggcctgagggcaggccatttagatggaagtcttactcctaccagcaggaagcctatttcagctgccaacagccacctggtcgcagggcatagcctgccaccatggaagggacaggttgagacctgacgggcagacgcggctgtggctcctgggcaggtccctagtcgcctagagcccccaaagccgagaccagggttgactcaccatgctctagcagctggtactacctgagcagagtgcctgccatgtccccatcatggctgaaggacaggaagactgaaggtcccctggagtccctctagaaccctgagtgaactgtctcaggggaagacttagggtacccaagaccctgggctttgattcctgggaccagcgggccccgggctgcaggtcagagggtgctgggagc

SEQ ID NO: 46429 - DNA, 373 bp, Mus musculus
  source 1..373: mol_type = other DNA
actccagagtctggaaatgaccactttggctgggcacaggcgggactgcctgtgcctaggctgctgctgccatcagagctgtcaccacagaccgtcggtcatgctctgatgacagcaagggcaccggatctcagaacttaagtttggtgttgtgcaggccgcacccctctgaattcacttggcccactgcagaaggattcggtgcaaagggcccccccccactgcaattgtcagttaatatattccccaaggaaacttggaggcttgtttgcgcggagtcacgcctgtgtgatgatggctgctggggaggctaaccccctacagcggggcggcagggcagcgtggggaggtccctgcctagagccctgtggct

SEQ ID NO: 46430 - DNA, 597 bp, Mus musculus
  source 1..597: mol_type = other DNA
cggtgccaccgcgccaagcaagcgcagggcgaccgcccgcagcagcctgcaacctccacgccccctcactctgggatgcagcggaccaggccagatcgcagagcagcccaggcctgaacatctcggtccctccggacgccaggacagacaggcgtactgagggagcgcgcgggggctgagcggcgccgtcggggtgggggcgtccactcgtgctcggggacggcgcgggccgcggcgggcgtaaggaccctgggcgggcgcggccacctgtgaccaccacacccgcagtccgggagccggtgccctgctcgggcctgaagacctaggggcgactcggagccggaccacagagcgcggcgcccggcggccgctgcttttatagccgctgaaggccccagcctccgggccccgcccccgccgcgcccggatcaccgcccccggctgtccgcccccgcccagcctagccgctgctaggcaaccgccagggggactcggaggccggctccgagcggcaattggtcggccgctgggaggcggaggcgcggcgcgctgaggccctggagctgcctgaggggggcggtgcgggtggcaccggcg

SEQ ID NO: 46431 - DNA, 427 bp, Mus musculus
  source 1..427: mol_type = other DNA
gttcgtctaattgatgtaaatatttttcaaagggaaccgcgttggaaccccgtgtccggaagaccgtccagggtcgacgcacgcctcgccgctgcaatagcgcgggagccaccggcccctgtcgcgcactcctgagggacccttgagggcctgcagctcggatcgctgcctcccgagtgccgcctccacgcgcgctcgcgccggtgccacccgcaccgcccccctcaggcagctccagggcctcagcgcgccgcgcctccgcctcccagcggccgaccaattgccgctcggagccggcctccgagtccccctggcggttgcctagcagcggctaggctgggcgggggcggacagccgggggcggtgatccgggcgcggcgggggcggggcccggaggctggggccttcagcggctataaaagcagcg

SEQ ID NO: 46432 - DNA, 412 bp, Mus musculus
  source 1..412: mol_type = other DNA
agtacctgtttgagccgaatgcatggctctggtttacccactggctcaaaggcctgcaggtgtccttagcacctcctggccaaggccaggagagggcaaaggtgctttttgcactgcttgtgagatgggtcagcccacctaagccgccgaccctgaacccactctgggacaactgaggtcctagagaccccagggtttccaccagtccatgagctgggcaccaagcagacttagtccccgagggctgccaggtcccagcagccctgaccccggccttctgggctatcagcggtgggtgcagtgagccctggccctttcctctgcctgtctcacagggagaatggagccagtgtgtcccgtacagggctgtgccaagcagcccccaacaaaggcggctttgctgtggtggggg

SEQ ID NO: 46433 - DNA, 19 bp, Mus musculus
  source 1..19: mol_type = other DNA
ctcgcgcgcgctcccgcgt

SEQ ID NO: 46434 - DNA, 308 bp, Mus musculus
  source 1..308: mol_type = other DNA
ataggaccgggttttgagatccagtcaacatgatgcacacgcacgcacacgcgcttgttcataagattaatatgcggataatttttaaagcatttgagtttataacattgttatttaatacacttggagactccgacagtgtctttgcgcggtcctgccaaggcaccggagaggcccagggctgcgcgggggcctcagagggtgccgggacccgcaggctccgcctccttaaacagggcgggcgtccggagagccaatccctgagcggcgcgcgctgcaaaggcgggccggcgtgacggacagcggag

SEQ ID NO: 46435 - DNA, 405 bp, Mus musculus
  source 1..405: mol_type = other DNA
tatggcagatgtcctgctatgacagcctgtctgagctaataagacctctccccaggcctcactgagcctgcttgctgctgggccaggaaggaaccattagggaatctctgctcagagcacctccgagtttccctcaggcctagggaccgaggcaggagcggagcacttcctgagggcaggctgggcccagccctccaccagatctcccatggctcttgagacagggactagggcctctcttactgtctcataggctgggccctgcctggctgtcacagaggaaccagtagcattgggaccagtgtctgtggcctaccccacccccaggccagttcccaggctgacagtctgggtggatggttgcctgaggactgtcacaggaggcagagtcacgtggcatccccc

SEQ ID NO: 46436 - DNA, 481 bp, Mus musculus
  source 1..481: mol_type = other DNA
ggacctgcttctgatgcagtgtgcttaaccaccgaccctagctctagtggaggggtcacggctctcagcatcgcttccgtgctgcagggagaacctgctgcgcactgccctggcactgggagaaaccgggtcggtctcatcgggttgcccatcggcaagacgccaacagctaactggacccacgcccacctaccgcggcggcgaagcagctccgcagggcctcgaactcgaggcggcctcctggggcggtgccccccgaccagggaagacgggacagtacagggacctgacccgagtcgccacccatccatgctcggggaaggctcggaaacggctccgcacacgcccccacaccgctccgttcacagacatgagcggtcctgctctcgagggcgccgccatcttgggccctgcctcttccggagtcgaacgcgtgaacatccggacgtgcccgccccttgcgagcgattggtcgggggag

SEQ ID NO: 46437 - DNA, 443 bp, Mus musculus
  source 1..443: mol_type = other DNA
taaggttccttgaagatagcaaacttccatcttattgagtcatgaatcagcttgaacacctcatctcatccatcagacaagtatgtcttcaccgagctgcacagttcagtacttcagatcttgtcccagacttgagtgatctgatctcttgttcttaaaagcctaagaagggtccctggggccactcagtgccctcgcaatcaatttattgcagtcaacagctggcagcagagccgatgggccccgctggagatcgcccgccgccctactcattctcggcagctgctggacagtgtctgtcccctagcgaggttcccgggcgccggaggtcagcacacccggcgagtttcactcacagctcaagcggtcccgcaggggcggcacagctgccatgctcccccgaccaatcgctcgcaaggggcgggcacgtccggatgttcacg

SEQ ID NO: 46438 - DNA, 87 bp, Mus musculus
  source 1..87: mol_type = other DNA
ttactccaggaagaattctcattagtccttccgaaatcctatgtaaaacgttagtgctaattttgtcccaataagctgagtaggctc

SEQ ID NO: 46439 - DNA, 434 bp, Mus musculus
  source 1..434: mol_type = other DNA
caggtctgagaccaggacaaggcggtgaactcaagaggagacacctgcctgctcctgtaggtgtctggggcaagccagcaacagctaggtggtcctggggcagtggcccccattgcacaccctgaatttcaaagttcaagggcatctttccagatagtggaaaggaatccaaaatttgtaattccaggagccagctcgaagctgcagacactctcggcctcagagcccagatcctgaaaagcttaccagtttagtaagcaccgcccacgcgatgccattggtttgcaccggctgcccagacaaagggagcggccgctgcgggcaggcggggacgctgccctcatggaggcggggcgggggcctccacgtgggtggggctgggcgccctccccacccccacgagggccgcggccgtggggcgctggtagctctcc

SEQ ID NO: 46440 - DNA, 503 bp, Mus musculus
  source 1..503: mol_type = other DNA
ttggcaggtggcagaacctgctgcacgtaggcccaacttccaagcgcagattctgaggcatccccctgcccgagaggcagatgtgcagcgtagcaaatgaaaatcgaggctctgttgccaagataaggatttactttttctatcagcccctagattttaaaaatatcttcacttgataattttaggggtgtggtgtgaaaaccatgcttagcatctaaacaattctctttatcataatcagaatcaaagcgcttttaaaatattctgcaagcaaatatttcggttagaatttggttgcctacccaaatgttatgatgaatacatagatgccaatcgacacagctatattcctttggatttttccagtctctttcctgcgtggacacaaaggagttaaatctgagatctgtggtctattggttggcactttgccagcgggctgtccatcactaatgtaaacaaggcgctgattggctgttatccagtccgcaccgggcctcctg

SEQ ID NO: 46441 - DNA, 523 bp, Mus musculus
  source 1..523: mol_type = other DNA
gggtaggcaaccaaattctaaccgaaatatttgcttgcagaatattttaaaagcgctttgattctgattatgataaagagaattgtttagatgctaagcatggttttcacaccacacccctaaaattatcaagtgaagatatttttaaaatctaggggctgatagaaaaagtaaatccttatcttggcaacagagcctcgattttcatttgctacgctgcacatctgcctctcgggcagggggatgcctcagaatctgcgcttggaagttgggcctacgtgcagcaggttctgccacctgccaactatttcttcttttttattttgtgcataaaaacaaataaaaatgccccagcaatgatctgcgcaaaggagctgcgcagtcgctggaggcttggtagtagccctgctgctccctgattggcagctccctggcccggcgccagcctattgggaccgtggagggccgagcagccaatcagcgctcgggctgctccgggctgagtggcacgagcttattagta

SEQ ID NO: 46442 - DNA, 597 bp, Mus musculus
  source 1..597: mol_type = other DNA
ccggccccggcccgccgccgccgcctccagcaagcagcgtggccggggcctgggaacgactcggagtgcgggcggtgcgcgagcggcgcgcgggaggcggcgtccggggtcaccggaggcacagatagccgagccggtcagcacaccggcggactgggcttctccgcgggcggccgcgctccaagccggcgaccgccgtgcaggtccatggtctgcagccggggtaccccgcgcagaccggacagcgaggctgggagcgctcggaggactccctactgcacacgcttacgcgccgggtcattggagccgcccagcacgcgggtccgcgagcacacacgcaccgtccgagccacgcttggcctgcggcaacccaaccgcgctgcgcgcagcttccctttctggtccctgagagtccctgcggcgaaggcgccgttgcgaagaggtctcggaggaaaaagccctgggtccacgcttggccccctaaccgaataaccatgctaattaagcgagtaattttattgattgtaactcaagagttctttttaaaataaccttgtgccacaaccccagactggcgtcccggagctccgggcgccc

SEQ ID NO: 46443 - DNA, 490 bp, Mus musculus
  source 1..490: mol_type = other DNA
gtcgacctgggaggcagagagaaaacaatttctgactctctgagcagcctcaccgggaagctccgggctcggggacagcaggccaggcactgcggcgtagcggcccaggtgatgccggtggcggtcgaggggcgcccggagctccgggacgccagtctggggttgtggcacaaggttattttaaaaagaactcttgagttacaatcaataaaattactcgcttaattagcatggttattcggttagggggccaagcgtggacccagggctttttcctccgagacctcttcgcaacggcgccttcgccgcagggactctcagggaccagaaagggaagctgcgcgcagcgcggttgggttgccgcaggccaagcgtggctcggacggtgcgtgtgtgctcgcggacccgcgtgctgggcggctccaatgacccggcgcgtaagcgtgtgcagtagggagtcctccgagcgctcccagcctcgctgtccggt

SEQ ID NO: 46444 - DNA, 320 bp, Mus musculus
  source 1..320: mol_type = other DNA
acagtgtctcactgtgtagccctggctcgaaacttgctctgtagaccaggctagcctggaactcatagggaacctgtggtggtccgctggtctgccctgcagagacgaggcccgaggcaaggagacactgcgcatcggggactgtgcggtcttcctttcggccggccggcccaacctgccctacataggggcaggtgcggtgggggcccagcccctgccctgggtctctgggggaatgggcggccgaggtcggccccgacactgtatgtgttccctcgcccggcagaacgcactgccatctctgcggggccgcaagtacc

SEQ ID NO: 46445 - DNA, 488 bp, Mus musculus
  source 1..488: mol_type = other DNA
agctgccgctccccgggcttggcccagtcaccctgcctgccgcaccgctgcggagcggagcggagcgcagggcgcctgacgggtgggcctgggtctgcagccgcggctgggggcagggcggggcccgacgcaatgcgcagcccctcctcgccgcggcggaacggggcgctgccggtagccgacggttacgccgcccggggtggggactgcactcctccggggtggctcggccctggccgaggacgggcttcttcctgcgcagatcgcaatggaagaagaaatcgccgcactcgtcattgacaatggctccggcatgtgcaaagccggctttgctggcgacgacgcccccagggccgtgttcccttccatcgtagggcgcccccgacccggcgcgcggtgggtggggcgagtctgaccgcggtgggcgcaccacaccttctacaatgagctgcgtgtggctcctgaggagcacccggtgcttctgaccg

SEQ ID NO: 46446 - DNA, 667 bp, Mus musculus
  source 1..667: mol_type = other DNA
ctcattgtagaaggtgtggtgcccaccgcggtcagactcgccccacccaccgcgcgccgggtcgggggcgccctacgatggaagggaacacggccctgggggcgtcgtcgccagcaaagccggctttgcacatgccggagccattgtcaatgacgagtgcggcgatttcttcttccattgcgatctgcgcaggaagaagcccgtcctcggccagggccgagccaccccggaggagtgcagtccccaccccgggcggcgtaaccgtcggctaccggcagcgccccgttccgccgcggcgaggaggggctgcgcattgcgtcgggccccgccctgcccccagccgcggctgcagacccaggcccacccgtcaggcgccctgcgctccgctccgctccgcagcggtgcggcaggcagggtgactgggccaagcccggggagcggcagcttaccggcacgcggcaagccggcggcggagtgtgagaccgaccgcggcctcccccgccgctatttaagcgggagcgggccgcgcgcgcgggcgggggcgcgcgcggccccagaacatgtccatatatggcgatctttccaaaagccgggcgcctattggcccgcccgccagggacacgtggggcccgggcccgcccgcccctggcccgcgccgccgccaacg

SEQ ID NO: 46447 - DNA, 582 bp, Mus musculus
  source 1..582: mol_type = other DNA
ccgggagaagggcagcgaggccggcccgccccccacgcctgtccggaggggactaaggcctaagcattctgtggtctcgccagctgacccacgcggggggcggggctggaccatcctgaaagtcgggagacttcccctgcagttggtgaccctctcccacgtgactgggatgtgatggccgctccccggacccccgggaatccctccagccggcgggggccacgggactcaccccagatcggggcgcggcccgccccgggcttggcagtttcggggcgcagcccgggccctccctgctacgcggcagtcccggggcagggcagggccgatcgcacgcacgccactcgccgagacccccgcgagcaagaaccgggcctcccggggtcgcgagcgcgcgggggcggcgcgggcggggccgttggcggcggcgcgggccaggggcgggcgggcccgggccccacgtgtccctggcgggcgggccaataggcgcccggcttttggaaagatcgccatatatggacatgttctggggccgcgcgcgcccccgcccgcgcgcgcggcccgctcccgcttaaatagcgg

SEQ ID NO: 46448 - DNA, 310 bp, Mus musculus
  source 1..310: mol_type = other DNA
tgatcaaaggcagttgaagctagaccacccacataggatccctggcataccctgctacacaggtgtgtccctgcacatgtagtcctggatgtgagcatcacatggttgcctagcataccacccagcccatgactcaggggcagacacaggacagtgtcaagaggctgctgctgcatgctacagggggccgtattgctcctggcagcaggaatcagagatgcagtaactggatcccgtggaatctacagtttatggacaaggaggtggtcagcctcgcttttgtcctgcgcccgctggccatgtaagatct

SEQ ID NO: 46449 - DNA, 474 bp, Mus musculus
  source 1..474: mol_type = other DNA
aaacatttatacatataaaatatattaaaaactttaaaaaaaagtttagttgtgtcttaacaagttctttcaataaaacatattgtataaatatacattatatacaatatataatgtacacagtaaaatatattatatctaaaacaacaaataaataaaagggggcctgcctttcaatcccagcactgaggcaggcccagcactgtgagttcttacagccaaggttgtatttagtgagaccctgtcttaaaaaagaggcgtttagcctcttaagaaatttcaaaagtcttctacttcaaatcatatgcagttacaaagagacagtacaaaacttccgtaacggttatacacagtcttctgaacccagggtcctgggcccagcctaggggacacggacgagggacgcgcggcaccacttggcgcatgcgcgcggccgttggcggggcctgtttcgcctctctctccgcctggcgg

SEQ ID NO: 46450 - DNA, 361 bp, Mus musculus
  source 1..361: mol_type = other DNA
tgtggatgctgggaatcaatacagcgtgtgctcttacggctgagccgtctctccagctagatttgtccgctgtaattttcagatgaacgttcttttaagagtcaaggttgcctgcgctggctccgaactcattctccgcctgctccctcagggagccccattcagcatcctctgctgtaagccttgcaccagagcaacctctgctcaacaggtaggtgatccgaggcaagggccctgacgcgggccccagttcccgccctctagcggaccgtagagcaactgtccccgcccctgcagcaggctccggccacgcctccgcagcggccgctttacggcggaggccgcgccgcgccgtgggcgg

SEQ ID NO: 46451 - DNA, 217 bp, Mus musculus
  source 1..217: mol_type = other DNA
tggggtgttgctgctgctgctgctgctgctgctgctgctgctggaagacaacaagtgctaggccattcgattgtctggcatataaagttataagtcgcctgactaaacatgtctacagaagacagcaaaatcctgcttccaacaagcttggagggaagggtgatggccatggatgactgtgcagacattctgtaactcctcacatgataccactgtg

SEQ ID NO: 46452 - DNA, 362 bp, Mus musculus
  source 1..362: mol_type = other DNA
ctttttgagaccagcctggtctacagagtgagttccaggacagccagggctgcaataaaaatctaattcttagctctgagttcaaggccagcctggtctacaaaatacagagaaactctgtctcgaaaaacaaaacaaaaaaaaaaaaatctaattcttgtttttcttttctgcctggccaaaaacccaactcagcttcatacaaatgagtttgaaaagctgatctgaataggtgttctagcctagcttgtctagtgaccctaagacactagagaacatcatgatctgctgacatttcctcagtggatgggacagagagcaatctgattagtgtatcgtcagaaaagagagtcatatcccta

SEQ ID NO: 46453 - DNA, 485 bp, Mus musculus
  source 1..485: mol_type = other DNA
tgggaaccacatgggctcacactggagagagcaatggtgtattcatatgcataaaaagaacttcaaaagtccaagtacttttatataaattataaaagcactgctgtaaaatcagccctgtgctgtgcactcccagtaccgggtcttggtgttgtgcgtgcagatatggtggcacacagcaatggctgtacaatttctcggagccgaaaagtcttttctttgctggaaaggaaacccaggcggagtgtgacctaagtgcatttttctctgcacgctgaggcaaaaggcgctctagagcccagggaggctggcagctctcgttcattcaacacatggcctgggctgagggacgcaggaaagttcccaaatgggtcctctcccggggttggcacctacctgcgctgtccgggcagtgaggcgcgctgctgtccttgagcctgctgctgccgccgcccctgcggctgtccccgaccaggcctcgcagg

SEQ ID NO: 46454 - DNA, 365 bp, Mus musculus
  source 1..365: mol_type = other DNA
tctgtatactgtttccctaatcaggctggcctcgaactcagaaatctgcctgcctctgcctcccgagtgctggggttaaaggcgtgtgctgctcggctcaatgcctaacactatagccagactgactacacatcctggacaggagaaggccctaaagctctcagtgagcacgctgaccatggttcccgaacggggaaaccccggctgcacgaaaggcttcgcgcaacccggttggggcactggcggccgctcaggccgcgggcttgtgtccagcaccagagcgcagctcgcacccggcctccccgggacagggtctgcagcggcgaccccatagctggtgcggctgccggagccaaggagcttgg

SEQ ID NO: 46455 - DNA, 602 bp, Mus musculus
  source 1..602: mol_type = other DNA
tatgagactaaggtaaacatctcatcatctaagattcccctttgaaaaccttagctggggcctgctccttgagggaatggtgcatgcatgtcaaactcattccaggcactaccagagcgcaagaggctgtaaggaaggcagtatcggttccaccctgcgaaaaggtatcggggtctgagacccagctaagatctgagtcatgacttcatgactcaggactttggcccaatcggttcaggaccgtcggacccggaggaagagaggtccgtcacggacccccaaccttacagcccgggcggccacacccgaggcccgggaaccgtgcagtgctccccggaggccgacggccggtctaggtggccggcccgctctcctgagacctacggaggcagcatctggccggtgcgcgcgagggagctgacttggagctgacgggcggacgctaggagacgctcgaaggtgccgctgcctcgccccatggcgaccccactccggaccgacgctgcagcgcgcacgcgcaacgcctccgcgccgccccgagtcctgacactgactctgagcgtccattggaccgctcagtccattgggactaaccaatgagc

SEQ ID NO: 46456 - DNA, 371 bp, Mus musculus
  source 1..371: mol_type = other DNA
tgtctgtaaggttggtgcccaccactgagaccagcgcaagcggtgtgctgtggtgagcttctggcagcaccgccatgagggagcgcagctctctgggggctccaggccaacgtcaaccatagagtctccacgagaagaggtctgaggacctttgcaagcctcaaagggcatgagaggccgacacctaccgtgggccgcgtcggtgggggctctcccaggtgcgagcgaccccggtgtgctccctccggaccctgcggcgcggaagtacctccgagctgctcattggttagtcccaatggactgagcggtccaatggacgctcagagtcagtgtcaggactcggggcggcgcggaggcgttgcgcgtgcgcg

SEQ ID NO: 46457 - DNA, 456 bp, Mus musculus
  source 1..456: mol_type = other DNA
ctgacctccccgggactggggctctgcagggcaagtagggtgtccaggcctggccctggtacccagaagaaccatgtggctcctggcagagcagtgaaaataaaatgtatttcaaaacgacttgccaacagtctccttcctggtggggattctgcagactcatctggtgcaggatacatcaccaggcgggtgaggaagtaaacgcgggcttttgcagcctagctctcaatagctcaccctgaaatatacggttcaacctgacttctgtggctaagcgcccgccttagtgtgcactcaaaggaggcggttccgcctagtgagctcttgggaggactccaggcccttccactgagttgaattccgcctacttattcccctcgcgcctgcgcgtcgcaccgcctagtgcgtaagagccaacccgggctagagcggcccggacagctcgcctcctcccgg

SEQ ID NO: 46458 - DNA, 353 bp, Mus musculus
  source 1..353: mol_type = other DNA
gtaagtatcttggcatgggaggccacctagagttctagacgacatcatgctctctacttctgcaggacacgtgtctttttcattcacaatgccagacttaaagagcaggtgcaccctcaaactgggagcacccaggcagattggagctgcctcctaggagcctgaagaaccctctccatggtggctgcctagggctgtgtccacagcaagggcaagctttccatccccccctacatctgggcgggggctgggagaggtccactgctgcaacacgtgtccttctcctggtggagtccggtggcgggcggagtccataggccccgcccccggggctgcgcgggcgcattggctgt

SEQ ID NO: 46459 - DNA, 382 bp, Mus musculus
  source 1..382: mol_type = other DNA
gtcctctccagggctgagtctaggagcgaaaggcaggcttgtgcttgagggcttattggacaggagtccctgaggcccacagggcatagccacccatggtgcatgtgtggcagctgcaaccttccagccaggagccacttagtccttctagctgagtcacttattgttattcgcacctgccaggtcaggattcacatcctcaggcgtagggtcggatccaggtcagggcctgctcctgtgttactcggggtttcgctgcaggtccgctgcactaaggcgcgggcgcggaccctccccttcgccgccgcccagcgtcgccgctggaaagtttgcgagcggctggcgcggagctggcgccgaccccgatcacagcgcggccgag

SEQ ID NO: 46460 - DNA, 380 bp, Mus musculus
  source 1..380: mol_type = other DNA
agcactgagaccacagtgggtgagctcaaaaccactcagggctggatccctaagggttcagtaacttggcatcaggaagctgaggctgacttcagccccatgaaattgagactctggggtctctgcagaaaacgtctggactttaagagagcagagatcggcaccctttcccttccactgaaggagagaggctatgtagtgtgcctcctgtccccacggtgggcaaatactgacactcagacagagcctatcagctctgataaatctcagggtgacaggcagccaggtgtgcacgacgcgctctcgcacctgtgatattaccctccctgtcagggaacagatggacataagtgactctcagtgagacccctggcattgaa

SEQ ID NO: 46461 - DNA, 358 bp, Mus musculus
  source 1..358: mol_type = other DNA
gggtaccctccaggttcagggattctggcagtttctacccgattgcaacagccggaaaatctggccatctctttgggggcagacagagatgcagccaatgacccggacttcaaagacttggtggaactcttcaaacctccttggagaagtggcaagcaccttgccccaaggagcctttaatggtgatactttttactttttcaataaacataattcccaagctgtgatgatgacttgatgctcgctggcagcgcagggccggggaaatgcgtgtccggggccggtgcgcccgggacgacctcgcgcgcctccgacccgccagcgatcacgtggcccgcgccgtttgcgcctgcgcgcc

SEQ ID NO: 46462 - DNA, 259 bp, Mus musculus
  source 1..259: mol_type = other DNA
caaaggctccctcagaacctcagaaggagcccttcctggtatgaggctgccaggggtttaagctggcttatctgtagctccacagccaagcaagctgcaggaagctttgtatggggtccttcccttcaccctaaagagggagctcagctcccagtaggtagacaggtgatccatcatcctcctgtgctcagggagcgcggagcagctcagtttcagcccctcgcggctttatatagcctcgcaagccctttataagctg

SEQ ID NO: 46463 - DNA, 565 bp, Mus musculus
  source 1..565: mol_type = other DNA
tccacttccccagcagcttccgcagaggtctcgggcaccgaattccgaatggtggacaggagcctcggacgaccacggggcgcccgagaaacgtgcccgcggcgtggggacacgcctggcagctacagggtccgtcacccaagacctgggcagggaccgcacgagccgcacgcgcaccggaagtggcgtcccaacgcggtccaggaggggcttcggaggcgcaagcgtagccccgcccaggggtccgggactccgcccactgccacgttcgacggagaatcgggctggcggaaagccgcagccattccagacgtgtggaaggctttcgccaggggacattgggtttgtgcgcgcgcgcgcgcgccgtggccaatcccaggcaagaaccgaaaggcctccgggtctttgtcgacttggtggcccagccttgagtgggtgtccagtccccgcacggcgagggcgggtctctggccaatcggagggcgcggcggggcgcatgcgcacggcggctgacgcgcgcagcgagggggaggcgtgggcgcgtccccggcccaggatttaaagg

SEQ ID NO: 46464 - DNA, 658 bp, Mus musculus
  source 1..658: mol_type = other DNA
ctaaggaggctccatcctcagcgtcgtgaaacacgcctggcggtgatggtgcacgccttcaatctcagcatcctggaggcagaggcgggcgcgtctgggggcacgcagtccccagagcaatgcgccaggcagcacagctacagggcactgcggtgaaccctgggagccacagaatggccgcgcgacgctgctctggaagagccggctctcgtgtccctcgcacccggcattcggcagaaggcgcgagggcgccggcccacgcgggacgcgcccacgaggcccgcagcaaaatggcgacggcgccgacccgcgccccctggcggcgcatgcgcaaggcgaccccgcccgcgagagcggactgaccgtccgagcggcgggcggcggacgacgttcgtcattgcgtggcgcagcgcggtgcagtgcgcggcgtcgcgggcgactgcggcgctcgcgggcggggcgcggtcacccgggcgggcgggcggggcgggccagggcggcagcgcaggtcctgccggaggggccgcggccccccgggcctgcgcgcctgctaccaggggacccccttcctcggcctcgcgggcggggtccggcgcggggcctggcccggggctcccgccgcgcggccccgccccgctcggattgcgggctctacgga

SEQ ID NO: 46465 - DNA, 529 bp, Mus musculus
  source 1..529: mol_type = other DNA
taaatgagcttgaaagaacacttggtttgcttcagattgatgtatagcccattggtccggagccaacagctgtttcctggataccacaggggcaggtgtggccaacaggctcccctcagtctgaggctacactcagaagaactgagactcctcaggaggtggagtggctaaggaggctccatcctcagcgtcgtgaaacacgcctggcggtgatggtgcacgccttcaatctcagcatcctggaggcagaggcgggcgcgtctgggggcacgcagtccccagagcaatgcgccaggcagcacagctacagggcactgcggtgaaccctgggagccacagaatggccgcgcgacgctgctctggaagagccggctctcgtgtccctcgcacccggcattcggcagaaggcgcgagggcgccggcccacgcgggacgcgcccacgaggcccgcagcaaaatggcgacggcgccgacccgcgccccctggcggcgcatgcgcaaggcgaccccgcccgcgagagcggactga

SEQ ID NO: 46466 - DNA, 555 bp, Mus musculus
  source 1..555: mol_type = other DNA
acagagcctgtgacctgagggagctgcggcaagtgctgcactcgtcaagaacggcatcttaaagaaaaaggcacgtgtttgtctttaaagacgcgagtttattttgccacctttaaggatgcctttaaagatctaaacattggttttcactaaccagggcctcgcttttaaagatatggaaagagtgactgtcacccacggaccggccgggacccccacgatcgcacggtgaggagggacgcgggacgcgcacactgcgctgcacccaggcgacgcccgaggatcttccggcctcccagggaggcgcccgcaggccccgccccctgctcgccctcgccgcggcctaatcacgaggcgccgttgcctccgcgcgggaatgtataaaaacgaccgcgccgcgtcgggctcctccgaagtagcgccagccaccgcggcgagccgtacgcaggcgctctgcggaatcgcgcgcgcccagaccaatcgccgctcgcttcgggcccgcgacgccggaaggcagggggaggcgccggaagtgacgccgcggcgtgctgacgc

SEQ ID NO: 46467 - DNA, 723 bp, Mus musculus
  source 1..723: mol_type = other DNA
tctcagggtgacagtggctggctctgggcagcctagtcctggagcccacgtccgcgtgggacgaggaaagcggaggaagtccaggttggacaagcagcgccggtctccacgccggctccacccccgaagccgctgtcgaagagggactcgtcccgggagcccgcgacacctcggcgacgctctcccgtcggccccgcggccaaggtcgaggagccccgagagtcccccagccccgccgcgcagcggcccccgccgccacgaggctgggcgtcccggaagatcctggcctcgggacggcctcgcccccgcccacccctcggccgcggtcccgcgcgggacgctcacccggtcccggccggcccgggcgcaccctccccggcccgcgccgcaggtccccgcactcactctgctgtacggcgccggccggttcctgccgccgcctgcggcgccgcgggcgatggcgggccggttcctcataggcccgccgcctcgattcacccgcgcggcggcctgcactgcgccgccgcggccgccctgggagccggccctgccgcgaccccggcccccgccgcggcctcctcgctggctccgaaagacatgtcggccatggcgggcgcggattcgggcctcggatcgagcccgcgcgtcagcacgccgcggcgtcacttccggcgcctccccctgccttccggcgtcgcgggcccgaagcgagcggcgattggt

SEQ ID NO: 46468 - DNA, 801 bp, Mus musculus
  source 1..801: mol_type = other DNA
tctccacgccggctccacccccgaagccgctgtcgaagagggactcgtcccgggagcccgcgacacctcggcgacgctctcccgtcggccccgcggccaaggtcgaggagccccgagagtcccccagccccgccgcgcagcggcccccgccgccacgaggctgggcgtcccggaagatcctggcctcgggacggcctcgcccccgcccacccctcggccgcggtcccgcgcgggacgctcacccggtcccggccggcccgggcgcaccctccccggcccgcgccgcaggtccccgcactcactctgctgtacggcgccggccggttcctgccgccgcctgcggcgccgcgggcgatggcgggccggttcctcataggcccgccgcctcgattcacccgcgcggcggcctgcactgcgccgccgcggccgccctgggagccggccctgccgcgaccccggcccccgccgcggcctcctcgctggctccgaaagacatgtcggccatggcgggcgcggattcgggcctcggatcgagcccgcgcgtcagcacgccgcggcgtcacttccggcgcctccccctgccttccggcgtcgcgggcccgaagcgagcggcgattggtctgggcgcgcgcgattccgcagagcgcctgcgtacggctcgccgcggtggctggcgctacttcggaggagcccgacgcggcgcggtcgtttttatacattcccgcgcggaggcaacggcgcctcgtgattaggccgcggcgagggcgagcagggggcggggcctgcgggcgcctccctggg

SEQ ID NO: 46469 - DNA, 242 bp, Mus musculus
  source 1..242: mol_type = other DNA
ttattttctccaagtgatgttatgttacgtgatcctcaagcgtttctgtgcatacatgcattctcccagtgcctatagaggccagaagaaggcatctgacccctggaactagagaacagcagttagtgcttttaactgttgagccatctctccagcttggaaaaattcatcacagtaatagtgccctaagacagttgggaggaacgggccctctgccccatctcgcagggtgtgagatccca

SEQ ID NO: 46470 - DNA, 430 bp, Mus musculus
  source 1..430: mol_type = other DNA
cccttgttcaggggctccgcccgtgtcgccgtgaaggcgagagtgccccctccggctctagtgggtttgatcttcaaggacacctccctcctgttcacccctgtacaaaggtggcagcaaggcctctgtgagaagagctccggcccttcccaggcctggccagcaggagagcctttttctgtattgggtatgcggcacagggagaatctaactagactgtcacacgcaccaccgaggtgcctgcatctgagggcctgcatcgaggcgcttttgaagaacccagcccctgaaaatgcttttggttggggggtagaccattggccgctcgatctgggcggaggggggtgtggcccggctgggggcggggccctggttggcgcacgccattggctgcgccaagcgggtgagatccgcgtgagcacgcgcaagc

SEQ ID NO: 46471 - DNA, 330 bp, Mus musculus
  source 1..330: mol_type = other DNA
tgggccagctaacatacccctggaggacatcagcccctgcctgccctgcagggctgaagccatgagaccctgtctcctctggctgcaaggtgaggcctggacttggagagcaatcagtctcctggcctcagcaggcagcagccttggcctgcgcagtatttattgctaaattattgtccaggaggggcggcactgggcctggccccccgataaggttttctttattttgtatatgatcaataaacgccttttaaagagatctggtggtatttctttgaggtggaaagggccgggcccgcgcatgcgtctctgtagctgccggatgaggcg

SEQ ID NO: 46472 - DNA, 332 bp, Mus musculus
  source 1..332: mol_type = other DNA
tgttagttcctttgataagatgcacctaacctggaaatccctggccctgtggtcactgaccctaggcagagagccaaagaccagtcagtgacctgaaggggctggctcttgggggcaagagtacaggatgctgcaaccaagccacaggatggggaggactggaggggcctgggctcagctcctcccagccggattgcctgctacctggaaggtgagaggcctctgccagactgaggcaggaagcaacctcctacctaagtcctagagggagaaagggctttcttgaccggaatacagggtccctagtagtgggtctcctggggaactgctgg

SEQ ID NO: 46473 - DNA, 271 bp, Mus musculus
  source 1..271: mol_type = other DNA
ttgtctcaagaaaccaaatttcacaactcctacagtgcacgcacactacctccaccccatagacctcggtctgaggtagaacctgtctctgcaggagcacggtcaacccggcgagcgccgggacgactcccgcgagacattgccagggcgcggcgggcgttgccaagggcaacggcgcggggctgcgcaggcgtgatgggggcgcgctcgccttgctgccgcctcgcctttctttaagcttaggccagccgcgtcgccgcttcatgaatgg

SEQ ID NO: 46474 - DNA, 848 bp, Mus musculus
  source 1..848: mol_type = other DNA
gagccctgtctcccgactagaccggccgatagcgggccccggccccccgccctggcccagcgtcagcaggagcaccgagtgacctcatgctgatgactcagcacgtctccgctgggctcgcacccgcgtggcgagcccaagccgcgcagcagggtctccccgccgcctcccctgtgggcccgcgcgcgaccccgcccgcgcggaagccgacggacacctgatgagtcagcagctcggtgcggccaccccgctgacccgggcagacgcgcgcagctcgcccttaaatcgcgccccccgcagggcacccggggtccgccgccgcgcgcacgcccgtccccagcctcgcggtcgcccggtccgccggctctagggggacacaggcgaacagccggctggcggggaaaccaaggcacgcgctgccgtcgggtgcgccgcaaccccgaggccaggccccgccgcccgccccagccccgcgcactcaccacactgcgggcccgggcgggccaaggcggggctggggcggggccgcgcgcgcgcgctccggggctgcgcggggctggggcgggcgcgaagggtccgggccgggggcttaggaggactggccgcctgcgcgggccgggccaagcgcgctgggaaggccgggccggaccgggctcagaatccgccgccgccgccgctcctcagacgtcacatgatgtttggtcacgtgggttccattcatgaagcggcgacgcggctggcctaagcttaaagaaaggcgaggcggcagcaaggcgagcgcgcccccatcacgcctgcgcagccccgcgccgttgcccttggcaacgcccgccgcgccctggcaatgt

SEQ ID NO: 46475 - DNA, 460 bp, Mus musculus
  source 1..460: mol_type = other DNA
agcactgaggattctctctagtcctgggaagcatctcaagttgggaactgaacttctaggctttgtgcatagacttgagctgtcaacttggcacagctggttgagtcaccacagagcagtctcctcgtttgggtggtggtcaaagaagaagggatggaaattccttccccaaatcttgcaggctggaaacttcctagtgatttaaaatttacttttctaaagcaacttgtctttatctaaggaaaagcagagtgtgaactcagactgctctgcagcttcaagaccagcagatgggcctgaaactcctctaagaggttgcgcctgtggctgcagaaggtacctcccgtggcttttgtgaatatactgctcacctcagggagggagcaaggaggagcgtctgtccctgccctgtgtatgatgcaatgcacaaggctccagctgcagctccagctcattggct

SEQ ID NO: 46476 - DNA, 611 bp, Mus musculus
  source 1..611: mol_type = other DNA
ccagttttgattgctggtcaccagagcctgatcttcttcatggagtgcagtacagatagggagactctacagcgggttgaagtcacacgctcgcaggtcgaccccgaaagcccggccttgggccccacctgtccgctcctcgcagaggccccccctgcaccgctactaccggcccctcggcgcggagccctgtgtccgccgccgctttgatcccgggggccccgctggataaaagtctctggcggctctacgccagcgccagagagggagcgcagcgcagtcgggcgcaccagcgggatagcgcagctccagcgacttccaggacctacggtgagcgcaggacccaagtgcgagtctcccacgaatgcacggggcaggggcgcgggcccagcggcactaggtgaacgttcgcatcctgcgccctgacccgtcgggccgggcagctgcgcaacccgcagggcgcccccgatgcggaaaggcctcttcctccccgcccccgaggcgctccgagggcgggggtagcggcgccgagctggccgcggagaatggagttgcccggggccagcccggccgcgctgccccccacggagccgggccgggagcgcctccgg

SEQ ID NO: 46477 - DNA, 422 bp, Mus musculus
  source 1..422: mol_type = other DNA
cttcattcacataaaataaaaataaatctgacttaatttaaatttaatttaattagttaaaaaagttttttttttttttgagacagggttagccctggctgtcctggaactcactttgtagaccaggctggcctcaaactcatgagatccacctgccaaaaaaattaaggtcttcctcaactatttggtgctgcgtgagaccctgtctcataaataaataaataaataaataaataaccaacaaaggcagaattgatgtggtatttcttcttctcagaaattctttctcaaaaaaaaaaaattttttttcagtaaatctatttttgttttgctaaaagaaaggaactcagcggtggagggagcatccagacaaggggcttttcagcgctgggggggagggctcccaacccaggcagcagaga

SEQ ID NO: 46478 - DNA, 415 bp, Mus musculus
  source 1..415: mol_type = other DNA
gaagctgtccaatattcagcttctgagatagctcagtaattagaagctcaaacatcttcattcacataaaataaaaataaatctgacttaatttaaatttaatttaattagttaaaaaagttttttttttttttgagacagggttagccctggctgtcctggaactcactttgtagaccaggctggcctcaaactcatgagatccacctgccaaaaaaattaaggtcttcctcaactatttggtgctgcgtgagaccctgtctcataaataaataaataaataaataaataaccaacaaaggcagaattgatgtggtatttcttcttctcagaaattctttctcaaaaaaaaaaaattttttttcagtaaatctatttttgttttgctaaaagaaaggaactcagcggtggaggg

SEQ ID NO: 46479 - DNA, 513 bp, Mus musculus
  source 1..513: mol_type = other DNA
aaggttgcatagaacacgcaaactcttcccattcttttccccatgtttgtcaatacacacgtgtgacacagatgctgtatgatttttacaacaatcccaaggaccataggccttgaagtccaataaaaaaaaaacacataaaatataactttattattattgttgttgttattttggaagactgttgctctgtagaccaggctagtctcaataaaatatttttctaaaaggttgtcgtgacgatgattacccagtacttggtgacagacaggtagctgtgggccccaggctggccccaggcagcatagctttcttgcaggcagcccccagagcttggaggttcccaggaacacgtgcctccgcaatgtccctgacagaactgtgctccttccagggaggtgcctttggtccgcgccgtcgggacgccatcaggctgcctaatagcagagcgccgggggcgggcccggaagcgagttggccccgcccccgagaccgcgtggctgtgcgtccggg

SEQ ID NO: 46480 - DNA, 359 bp, Mus musculus
  source 1..359: mol_type = other DNA
ccagggctggactacagctacgcaacagcctgaaatgtaagctagttcagtgaactatcagtactgaacggagtgcggaggccaggctgaactctgcacagggcgcgcgctggcctgatgccaagagccgacccctcaggtggcaccactcagtgggcgagtcctcccaaacctgtcactgagagatggcctcggcccgatcagtgtgcctcgcgcacccccgctcagtccagccgcagagcgcgcgggctgctcccaccctgctgatgcacgactgtctcgcggggatccgcaacgccaagccgggacttgagttccagctcaagcccgtagccatgccttccgcaatgccttgggag

SEQ ID NO: 46481 - DNA, 505 bp, Mus musculus
  source 1..505: mol_type = other DNA
cagtactgacctctgttcccaggttttggaaaaggtcgcaaagactttcctgctcacagagtttgcttcaccttcttcactcagcatgcagtcgctgaggacaagctccttcaacagcgtctccttatgcagcagcttgccgagggccctgcaggtctccaccgtcaggctctgagtagtcaggtccagtccgcccttcggaagctggtgcagttgctgcagaacagcctcctggggctcagccccactctcctcgcagaggcggttgtaggagcgccgggtccccgaatgctgacggagcctcgcaagcatcctagggcgtgtagcgatgagctgagctggccctatataaggccctgtggcccccagcccgccctcgcgacgtagcctcgggtcgctggtgtggcaggacgcggttcctcgcgcctcagtatccaggaagagtctcccaaggcattgcggaaggcatggctacgggcttgagctggaactcaagtcccggctt

SEQ ID NO: 46482 - DNA, 252 bp, Mus musculus
  source 1..252: mol_type = other DNA
ctctcttgaacgcatctctccgagagaagctgcggctgcatcagctgcagttgcaggttaagcatcagtctcggccgccccggcgcatccatttctgtggcgtcgccgctacaccgtggcacgtccttgttcctgggtgcggaccctcagcctgagccttcggggtccaaggactggctggggctccgcccccgccgcagctcgccccttgccccgccccgcctgcgcgcactcggctgcgcacccgaccgg

SEQ ID NO: 46483 - DNA, 306 bp, Mus musculus
  source 1..306: mol_type = other DNA
gagtagatcctcagagctattgctttggtcttcctcaccacgactctaaaaacaaaatatttttatagggagacccatactgcctataaggggccactgacccgatgcaaaccaggctggccttgatccactcccgggcctggggatagagcacacagaaacggttttagacatgtctctcaggttcacgagtatccatgaaacccctggaataactactatatgtttttaatggaaatcttggtagtagaaatgaccagaactaagcagattctgccctctatagttgggtcagtctggtgcagt

SEQ ID NO: 46484 - DNA, 466 bp, Mus musculus
  source 1..466: mol_type = other DNA
tagaagtcttcagacgcctggtggccaactggcatccctgaaaggccaggccaccagttgatcttactggatagatcaggccagacaccagtattcagtgccacctggtcaaggacacagtgagcaggcatgatctgtccctgttagctatgaggaaactgccaggcagcaatgattgggctccgggcccccactgtgtatccctgagccacaggaaggtcccagagcacccttctgaccagtgcggaggaatgctcaggggaagggtactgctgtccctgcactatagagcactggaagtacaggtctcagtgcagagcctggactgagcaagggaaaggcggcagtctgagcacacctcctccccaggggcatgaggcatctgagcctcctgcccggcccagaagaaccaggtctctgctcagagaagaggagaactggggcaggaaaccccagaatccatgct

SEQ ID NO: 46485 - DNA, 340 bp, Mus musculus
  source 1..340: mol_type = other DNA
tggaatgctctgcagaccctggaaggggacatttaatgctctggttgtgaggtctacctcagagtgcctcagtgtggtcaccaaaggcagagtctacttgtcttaagcagtctaagccacctagccagctgggcactgagaacacagccaaaccagggtgctggattaactccgggaactgccaatgctgagtggctggccactgtcacatccatgtgcgcagcggtcaggctggagcacccccacctgactggaaagtgcagcttcccttccaaagaaggcaaatcaaaatgtctattctcctagattaggagtctcacaggcatccaggccaaagctg

SEQ ID NO: 46486 - DNA, 529 bp, Mus musculus
  source 1..529: mol_type = other DNA
gcacagtgcttggcgggtgcgcacagcagagcaatcatgcggccgcctgcacggcaagacttggcaggctgagccttcctcgtggcaccctgtcgggaactgggggctacaactcaggccaggggagcatctcacccggtgcagagcccggggaccaggggcgccagcctggaatccaggaccctgcgcggcgggggacgggacgcgcacctgccgtggggctcgtgagatccaggtacgcagcagcagccgcaggcgcgggccgtggttcttccttgactgcaatgaagacgtcgtcgggttgcaggcggtctccctcgagggtcaggctccgggtcgggacccgatcggggtccggtgcgggcgcgcgaggcagcggcagcggtagcggcagcggcagtagcagcaacacagccaggaccgcggccagcgcgaggcaggcccggcacaacacccgccgcgcacggctcatgcgatcgccccggcccgggcgctgggcgcccgcctgcgaccgcggcggcccctttga

SEQ ID NO: 46487 - DNA, 700 bp, Mus musculus
  source 1..700: mol_type = other DNA
cggatcttcctgcggatcgacatcaatctgcatgggttccacctgccagggacagcagaggatgttcctgtcccccacgggcagaactgcactgggcccccacaggtgctggcagccaagcgccctcagctctccaggtcctgcgcacaactcttgagactgaccgatcaagcgttccgggcctgtcaccctatttggggtcggcgcatcccggactccagggcccagggcctcaagcgccgtcgggagagccgctcccgggcgggcgcgcagccgtacctcggaaagcaacgtgcaggccgacaggctggcgctcaggctgtagtcgcccgccgtgccgggccgcaagtcggacctgctgtgcgcagggctgcggctcaggtcggaggccgacgacgaggccgagctgggcgccgggctgccccgcatgttggcctgacgcgcctctctgcgaggccggcaccgcacggaaagcgttggcgcgcgaggcgggggcggggcgggggccggggcccagggcggcccgcgaggcaggcgacgctcgcgcgcccaggccagagccgccggccccgccccgccccgccctgcctgccgccggccccgcccaccaggcccgctccggaccgaacggccacgcggcgggcagcggcatcttccacccccggcgccgcggcgacgttcgcttccggggcggcgcgtc

SEQ ID NO: 46488 - DNA, 652 bp, Mus musculus
  source 1..652: mol_type = other DNA
cgtggcaccctgtcgggaactgggggctacaactcaggccaggggagcatctcacccggtgcagagcccggggaccaggggcgccagcctggaatccaggaccctgcgcggcgggggacgggacgcgcacctgccgtggggctcgtgagatccaggtacgcagcagcagccgcaggcgcgggccgtggttcttccttgactgcaatgaagacgtcgtcgggttgcaggcggtctccctcgagggtcaggctccgggtcgggacccgatcggggtccggtgcgggcgcgcgaggcagcggcagcggtagcggcagcggcagtagcagcaacacagccaggaccgcggccagcgcgaggcaggcccggcacaacacccgccgcgcacggctcatgcgatcgccccggcccgggcgctgggcgcccgcctgcgaccgcggcggcccctttgacgcgccgccccggaagcgaacgtcgccgcggcgccgggggtggaagatgccgctgcccgccgcgtggccgttcggtccggagcgggcctggtgggcggggccggcggcaggcagggcggggcggggcggggccggcggctctggcctgggcgcgcgagcgtcgcctgcctcgcgggccgccctgggccccggcccccgccccg

SEQ ID NO: 46489 - DNA, 416 bp, Mus musculus
  source 1..416: mol_type = other DNA
taaatggcttgagtaatgcatatatattacattatatcattataccgttatacatgtatcattatacatacatatatcattataaagtatgtatcacgatacaaactctggattctgaaaacaactcagacatgggttcagggtagatctctctcagtgaaatacatcactactattaaaacagtaacagtttacggccatactgacaaaaagaacttaggagagaactttttttatttttgtttagccctggctgtcagaccgggctggcctcgaactcagaaatctgccaggcctctgccgatctgaagtaataattctttatcgcagaaccaagggctgctccggacagcgtgaccccgggcatgcgcagtctggctgagctgctgcaccgcagacggtgcggagcgcctggc

SEQ ID NO: 46490 - DNA, 677 bp, Mus musculus
  source 1..677: mol_type = other DNA
cccaactttgaaaagaggaaactcagggaggcgcgcagcagctcccccaccaggcgggggaggggtggtatcccgctcgccagatggccgcgcctggacactgagcggactccggaggccgccacacgcgcccgtccgcatcctggtctccaaggtggccacagagggtgggagtaaccccgcctgaggcgccctccgccagggtcaacgaccgcgcttgcgcgggggcccgcgaagtgctttgcaacgcccacccgcgcgccgccattgggccaccgagaacggcctcccctcggttccgcgcgcgctacgatcgcggcgtggaatcgcagcgacacggacctgtccccccgcgtggcccccgacccacactgcgcgcgcacagtgcacacctggcaccggccgcgagggggtgggggtgtcgggatgagccccgcgtggcccgcgcgaggccgggggcggggacggaagcaggcgggggctgcgcgttccttgtgctccagcgcgcgcccgtgcagggtcccggctgggggcggcgcgcgcgggcatcaccccaccggcggcggcgcgccgggtcccggggcgcagccccgacgctcattggcctgggcggcgcagccaagctgtcagcccatgtggcgtggccgcgcggggatggccgcggtttaaatagcgcc

SEQ ID NO: 46491 - DNA, 470 bp, Mus musculus
  source 1..470: mol_type = other DNA
agagtatacactggcacggcattctacagtactcctgcatccctatcccagagaagcatgacccaagaggtgcatcaggtctttcagtctgggggagaaggtctcctgtccttcacagctgtgtggctcccaccaggaaccagagcaccccctgtggctctggccctggcctcagcccactccagcatgcgctgcaggcatgccatcctctgcctctgtttcccgggggcacggaaagcagcaggaggcctttgacctggccagccgcccgtgatgtcttgagcaagctgggcagcctgtgtcagcgtggccagcggcctctccccataaggccaactcgctgtcctaggccaggacgacagacccacagtagccatcggtgagggcctaacagacctgctctgccacagtcgaggtccggtgagatgctcaggagcctgcctggaacctcaagttggtaggcagagcct

SEQ ID NO: 46492 - DNA, 342 bp, Mus musculus
  source 1..342: mol_type = other DNA
cctcctggaggaggggattcccagacactccccatcccctaggaacagtataaagagataagaataccattctttttattatttgtgatctctccttccattctgtgggtcccagagtgtgaatcaggtcatcagactgacacatccagacacgctccatgaaacagggctctgaaagaggatcagaggaggcacctcctgctaagctgaagttagccctttgggactccagaatgggcaccttggggaccctcaggacagctgggggagggcacagggcccttgctcactggctctactcagggagcccggcgggatcggagcgccgctcagggtgcaccg

SEQ ID NO: 46493 - DNA, 237 bp, Mus musculus
  source 1..237: mol_type = other DNA
tgtgtggcatgggtttgcggcaccccttgcacccctcgcgggaagtcagcatttgtagagcagcatgcaaagctgcggacatgggcagcgtattgaccaatgtgctgtggagaatgctccccaatatgttatagcaatctcagaacctgcccggtttaaacttacagcttgttaataaaaacaccaggttagcagggctgtgtcagtgcctgtatctgactttgttgcagggccccg

SEQ ID NO: 46494 - DNA, 409 bp, Mus musculus
  source 1..409: mol_type = other DNA
tgttatagcaatctcagaacctgcccggtttaaacttacagcttgttaataaaaacaccaggttagcagggctgtgtcagtgcctgtatctgactttgttgcagggccccggcatagcccaggctgaggcgggcgtgtgccacccggcagaaggcgcaggccatcccagtctcggagatagcgaggacattgccactctcttgcaggagttgggtggggcccgggccccgggcgcctatagagcgagtgccagcctggtctcccattgtccgcgccgtcggggaacagcggccagggcgccccctccggcagcggcgcggggtccgggtggggagggcaggggcggcgccaggcagcggtgacgtgcgcgggggacgtgccgcgcgacggatgagagcacttaaagtcg

SEQ ID NO: 46495 - DNA, 524 bp, Mus musculus
  source 1..524: mol_type = other DNA
agtcttggaagctggccgtcagcctgaacttcagaattcatgtttgtgtttgccaggggaacatgcagacaggcagacagccctggagagcgatcagagtctgagacattgcccacagtgggtcccaggaagacctcttttcttccacccttgtgtgcaagaagctggcaggcagcagcaggcacgttttgcaccactcagagctaggcctctatctgtaaagggcctttcccgggaaaagcccaggcaagggctggaactacaggcatttcggcctggttgcgactgcgccccgcccccgagcacggtggccccgcccccttgggttgctaggggaagtgacgtcacagcgcgatggcggcggctcctttaggcagctgccggaagatccgagtccatccgcggcgggcgagcggggccggcaagggccggagcagcggcggcggcgctcggactgtcccatccgccccgtattgaggcgctgagagcggcggagtcggaccggacccgcagtagcggcagca

SEQ ID NO: 46496 - DNA, 456 bp, Mus musculus
  source 1..456: mol_type = other DNA
gagctgggagactagaagacatgtcagctccacgtgcttctgcagggttgcaaatagaagcattacactcggttgtcccctcctggttagggggcacctcctgtgtggtagctcctccagagtccctccaagtcttggaagctggccgtcagcctgaacttcagaattcatgtttgtgtttgccaggggaacatgcagacaggcagacagccctggagagcgatcagagtctgagacattgcccacagtgggtcccaggaagacctcttttcttccacccttgtgtgcaagaagctggcaggcagcagcaggcacgttttgcaccactcagagctaggcctctatctgtaaagggcctttcccgggaaaagcccaggcaagggctggaactacaggcatttcggcctggttgcgactgcgccccgcccccgagcacggtggccccgcccccttggg

SEQ ID NO: 46497 - DNA, 251 bp, Mus musculus
  source 1..251: mol_type = other DNA
tgttaccacaacagggggagcatcttcccccttagagtaggaccccggaggaactgctttgagtccctatgtgacactgtacacacacacacacacaaaactcatggttgacaagacctgggaaccagacacagggccctcggttttgtcccatgcttctaaggaaggatcacccgcccaaggctactgggtatgctgtgtcaggctgaacccagtgtgtccagttggggtcaggtggcttcctccacctg

SEQ ID NO: 46498 - DNA, 393 bp, Mus musculus
  source 1..393: mol_type = other DNA
gagatgtcacaacttctgatcagagaagtgtctgccagtgagaccacagcaggactgtatacacactgagaccgtgtacacaccggggtggttcacggtgagttttcactgagacaacaaaggtgttttaatgtttggggtagacacggaacctttaagcggagggatactacaatcatgggatcatggttatctgagagcccatgcactgtgtccagtgtgggcactaggcttgatgtcccatgcagggagacaagtccatgactagcctaggaaaagcctagactttcttccctaaggcaagtagctaaaagccgctttcaattaaaatgttttaatgaaggagtcactcagaaactcatcgccctcaggtcaggatgagctcagcaaggg

SEQ ID NO: 46499 - DNA, 268 bp, Mus musculus
  source 1..268: mol_type = other DNA
ttgccctagtgtccactgtatgtgggcaccccacagccctgcttagcatggtggacagcagcgtaatccttgttgcgaaaactctttgcaaggagcagttgtcaaatgcctgcagtctccttgaatctgacatatttcagggacaaattcctagcccagggtagagaatcactaagaaactcatggtgctgttacattaactcagagaagttcctggaagttgaatgccttcctacagagtgtctggcaaggaacaggacaggctgcc

SEQ ID NO: 46500 - DNA, 430 bp, Mus musculus
  source 1..430: mol_type = other DNA
gggccctgagggcagccccgagggcctgtccctgtgatgacagagtacaccagtatatccaacctggtcaaatatatctgtatgctccaactcctttaaggataaactcttcaaagaattattttgggtttattttaagagtactctgttgctctcttcagagacaccagaatagggcatcggatcccattacagatggttgtctacaaagaatttctttaaagagtctgtttaagaacagtttcccaagtgttaaagaactttttactaccgcgggcccaactctgagcccgggccttcgagtccctcgaaggcaccactcaggtggcgcaagggagcagcgcatgcgcgctgtagggggcgccaggccgcatgtgcgccttcagagccagagtgactcagggccagagtgactcagccctttataagg

SEQ ID NO: 46501 - DNA, 247 bp, Mus musculus
  source 1..247: mol_type = other DNA
gtgggctgaccataggtaatttctgtccagcccacagagcactgatcactcatgcatccatatatgactgccctgtgtttctacacgaacacatgtgtacgtaaaccagcaatgtcagaaatgatatgtgtaagtttcctctacgacaatgtcagcctaatcacaatccctacctctgtcaagtctcagtagggctggtggcacgagtcccacccctgttaggtcccacccctgggatggcccggag

SEQ ID NO: 46502 - DNA, 417 bp, Mus musculus
  source 1..417: mol_type = other DNA
ctcatggaggcatttcctcaatgtgataactccagctgtgtcaagttgacacactcctgaggaaggaggattaaagtttaagacttgcctgggctataaaggaaggtcaaggctagactttgcaaataaggactggattgcttagtggtacaacaagaactgactatagtttccattttcaagtcaagatattagaaacagttttcctaccttctgtaaaatcacaagcgattattaaaaacaaggactcaaaagctgccactctcaggcagttcaaagtccctgacaggcttctcggccgcaggtcatccgggcccagcacaatcggtggctgtgggcttgactcacccgcgtcgccgccgcagcccaggcagtgccaagggccgagaaggctccgcctccccccccgattgctct

SEQ ID NO: 46503 - DNA, 204 bp, Mus musculus
  source 1..204: mol_type = other DNA
gtagatgatggccatgctctcagcaagtacctgttaacgtgctgacatctgacatcgtggagtggccatgtccccaccttaggcatctatatgacctcttatcatttcctgaaaattagatccctctgagttccaggccagccagagctacacagagaaaccttgcttaactaggaaacctaatcactcagtctccacccctgg

SEQ ID NO: 46504 - DNA, 353 bp, Mus musculus
  source 1..353: mol_type = other DNA
agaatgcacttatttaatttaaatttgaattgagtctgtctttacaacaaaagaataatgcatttaatctgccttaattgccaatctggaactcagagatctgcaaagcaagcctgctgcgcatgtgcacttgtgccgcaccggcctacgtgaggcttcggtcatggcggcggtagagggcggcgccggctccgccctccaggagacgttgagcgggccaggccgcggccactgagcaaggcgctctgaggtcgccgcgattcggcctcgtatgtcccggccgggcaactactagtcgagggagggacctgccacttcctcacactctcattggcttaagcggcggaggcggc

SEQ ID NO: 46505 - DNA, 645 bp, Mus musculus
  source 1..645: mol_type = other DNA
agacacatatgtcaaataagatatgtaaatgttataaagactgtttcccattaaatgtattgcaagtttagacatagaatgaattagaacgcaaaatgttcatgcctctagtctggggcctctgtttagaagctcttggctagaatgtccactttatcctgctgcgtcccatcgcctgcacccaggggccaaggtcactgcccttcgttcctggggaagaaactaggggtagcctttaatgggagagatgggatctctctatcacacatacacaggctcagatttgcagtccttggtatgaattactgagtgcagaactctatgcatacgggtcgatgcggcaggttcccgagcagcgcgcctgactctacgcaacctagggcggagtgtgagaggggccagcggctcccggggcgcactcgcgcccgtcgtgaccttggacccccgctcagtccgcgaacgcgcgcggccccacgcccccgggttttccgcgccgccgcggccaacctgcgtcgcgcgacgacgccggacgtgcgggcgctcggcggcgcggctccccattggccggcctcggtagccccactgcgtgcgccgcgcccattggtcggcgtgcccgtccgtcgtagggccggcgcgcggccgtgc

SEQ ID NO: 46506 - DNA, 320 bp, Mus musculus
  source 1..320: mol_type = other DNA
gttgtgcaaatgttctcacagatggtgagaccgtttagggcttgaacattcatgcccataactagagagatgaaaggacagtccctgaagtggtttcccctcccctcttcagtgctgatgggatgattaagcttcttgaatcctaagacgcaacaacagtcgcgaggtctggtgagtgcggggcacccagctctcctgccccgccccttatggacgcgcccggcgagccctctcggcgcttgctggttgcgcgcacgcgcgcccacagatccgcgcgcactgatgacgcagcactgcgacgcaagtccccaggaccctgg

SEQ ID NO: 46507 - DNA, 347 bp, Mus musculus
  source 1..347: mol_type = other DNA
cagggaggcagcggtcaccttgctccaagaccagcctgttctgagccaaaccggccttgtcctgaatcacagcacagctgtggcgcttagaacaatgttcacatcctgaacagagagcagattcactgctccctgaggcaccactagcagacacctttagaggtgcacttgtccatgtgtccacttggtgctgaaactcacaactacctgtaactttagttacatctgattagcattcaaagcgggaggggcgagcttgctaaccaatgagcatgtgtatatacctcagcaactgaggctcgccaatggcaaggtaaggtgggcggggctcttcagctgtcaagctc

SEQ ID NO: 46508 - DNA, 449 bp, Mus musculus
  source 1..449: mol_type = other DNA
taaaggctattatttatggaaaataacaagtcacgagttttcacttctttaaacaagtttatttgcatctataccagatctactggggccatttccctgggaacctgggcaaggatctgaccaatacttaaagtattaaagcttacatgaaatttaatttaatttatgtggtcttatttaaagatcggttctgtagattgacaaactcatactagtgcttgtaggcacaaggacctccatacctcccacaggagggcaggcctcctggccagggaaatggtctcgcggccagcacatccctgacacctcgctggcggtttcagacagaacccggagcggagggagcaacctccgtccttcacacagctttttaaagagcggggaggctgggcgctccacccacttaccacccggctcctgcgctccagcagccagagaaaacttggcgc

SEQ ID NO: 46509 - DNA, 316 bp, Mus musculus
  source 1..316: mol_type = other DNA
ccagcagctcatggtgggagctgccatctgaggcaacctctcctttagcacaggctgtctcttatatgtatgtgtgtgtgtgcccatgcatccatgagcatatatgttggctgtctgaaatccagagttccacctaccctgggtggagtagggcctttctccatgggatatctaagtctctaggctagctttacagaacacccgccacccggtctgggttctgtcttggagagagaaattcctcgctctcttccccctcccaccctagctctggtgcccaagagcatgcagggatagcgtgtcagacaatgttgtg

SEQ ID NO: 46510 - DNA, 55 bp, Mus musculus
  source 1..55: mol_type = other DNA
tcagaaacttttcaggacctacggactttgaggtcacggcaaaagccttcatccg

SEQ ID NO: 46511 - DNA, 286 bp, Mus musculus
  source 1..286: mol_type = other DNA
aaaatgtacatgggttatctacattaagtaatcagtttttatatctgcctaactttgggactcccacagcagatgtcctaatgcaggccacacgagggccttggttcctccaggagggggtccttcctccttgtctttttaaagttacataggcccacttccgcgccaggggcgcccacggactccggaagcccagtcggccaggcccctcgcccgagctgctcccgccgagaacggcggctacgggccgcctccctgagcattctgctgcgagccacgtggctct

SEQ ID NO: 46512 - DNA, 366 bp, Mus musculus
  source 1..366: mol_type = other DNA
ttttaaagaattaaacatgaagccaagtaaaatctaaagtctcgtgctggcccttgccagcagcttcaggtatgctccaaaatttaaaatctaagttattacttaaagcaaccagtacaggccctgggcatgttccggcaggtcccaaggcagcaaggtggtggccagaggcttctctgggcatcaccacttgtcatgtttttcctatgctggagtactgaagcgagcaagcgattaatgagcatcaagtgcttgtgatacaagtacatcagcactagactctgcacgcctgatccaggaccccacctagagtcctgtggggcacctggagtggcacaggactctctggaacagccggctccagtt

SEQ ID NO: 46513 - DNA, 289 bp, Mus musculus
  source 1..289: mol_type = other DNA
ccccttcatggccagactggaggacacttgaaagtgtggcctggggacttccagagtctcgattactaatggcagagtctcagtctctctctgatattctctccctcccaaggcaaattttgagctggggaacaaccagggcgttccaggctagagctggcaggacacagatctgtgagctggcgcacggggcggaactgctggcccgggccgaaggccaggcgggggcggagctcggccgagggcggggtggcttcacggttccgccccccagctgagccagaccacg

SEQ ID NO: 46514 - DNA, 528 bp, Mus musculus
  source 1..528: mol_type = other DNA
taatcctaatagcttaatactcattaaatttattttaaaaatggagggagcagcatcaggatgggcatggtaattcagcaaatgaccaaagaacttatcttctgctgtggtgatattctgtttcgtagactaaactttgttaagtagtcttaaccagtctccaattttacggcttccgaggaaataactggaagcaaccatctaaacgcttccttctttggactgtgtaaactttagattgatagataactgtttaagtagtataagcagtttttcctctaagaaatacttacgtttctggtttggcatttaaatttgttagcaaaactagatataataaacaaagtaaatgtgaagttgtcccagccactgggccgccaaagtagaaaggttaaatttatgctcccacaaggacggatctggtactaactctgaccctggaacagatctgcaccaggagggcgcctcgcccacgtgctctccgcatccgggcacaggagcaaccaacggtcctgggtcctgaaccgt

SEQ ID NO: 46515 - DNA, 645 bp, Mus musculus
  source 1..645: mol_type = other DNA
tggttacaacatctcaggtggcatggacactgcatctcatgtaagaatgttcactgccaaggtgagatggtcactgcatctcaggtggatggtcactgtatcgtggcatgctcactacatctcatgtgggatggtcactgcatcacagttgggatcgtcactgcatctcaggtgagatggttactgcatctcaggtaagagtcattacatctcccttgggatggtcactgcatcacaggtgagatggggaggccgggcatgcgggcgcttcgacccggtgacagggcagctacggtacgttcctgggaggttagacccggagatgtacaggtaggaactacacctcccagcgtgcctcccagtgaaactcggggcttcatgcctaaagcaggaaataactgcaactcccagcatgcttaacttccagacaggaagttcctccgttcggagcggcagcgtgacattgaagacttccagttccgggttccgctgatcagaagcggacaagcaaacagcggatgtgcagttcctctcttcgccgaacccggttttccctttcggagcagcgcgacccggcgactccagcgacgtcaccggttcagctcctgacctttcggcgaaccgccgctgtgacatcaccccgca

SEQ ID NO: 46516 - DNA, 689 bp, Mus musculus
  source 1..689: mol_type = other DNA
catcccatgtgggattttcactgtatctcaggtaagatggtgacttcatctcaggagagacgatcacatctcaagtggtcacttcatctcaggtgggatggtcactacatctcaggtgggatagtcaactgcatcacaggtgggattatcatcccatctcacctgggatggtcactacatttcagatggcatagtcactgcatcctaggtggaatggttacaacatctcaggtggcatggacactgcatctcatgtaagaatgttcactgccaaggtgagatggtcactgcatctcaggtggatggtcactgtatcgtggcatgctcactacatctcatgtgggatggtcactgcatcacagttgggatcgtcactgcatctcaggtgagatggttactgcatctcaggtaagagtcattacatctcccttgggatggtcactgcatcacaggtgagatggggaggccgggcatgcgggcgcttcgacccggtgacagggcagctacggtacgttcctgggaggttagacccggagatgtacaggtaggaactacacctcccagcgtgcctcccagtgaaactcggggcttcatgcctaaagcaggaaataactgcaactcccagcatgcttaacttccagacaggaagttcctccgttcggagcggcagcgtgacattgaagacttcc

SEQ ID NO: 46517 - DNA, 688 bp, Mus musculus
  source 1..688: mol_type = other DNA
ccattcgcagggaggttctccccgcacccggggttcctcaggccgatgacatcataaggagaccaggttgtcaggaccagcccacaagcgggatctcttctggagatgtcctgactgctgctcctcaacagcagcagtcagctggtacggacgtagtgcgcctgcgcagttcccgggccgcacctcccccgcggggcgtgttcgtcaagccgctctcaggaggccgtagggagcgcgcccgcggcctcgccccctctggtcccgcctccgcgtgccctacttgcccgcccgcgcgcgtgcgcagaggcgggccgcaggggcgagggcgcgagacgtccttgcgtgcgtctcaggctgcgcgcacgccggcgtgagagggcacggggaaaaaggtggctctggccggggcggctctgtcagggcttgtcggctcgcgagacctcccgctgccctcgcccgtgtcctagcgcggggtttctgctccgggcggaggccgtgttcaagcccgccgcgctccctcgacgtagagctcgctcgtccgcccgtgggagcgtcccggccgagctgcgctgaggggggaggggaggccattttgtcccgaccgactccccggaaccgggcggagcggctgggagaggctgcggagccgcgggcgccgcccctcggaggcacgggcgccgccaccgtc

SEQ ID NO: 46518 - DNA, 493 bp, Mus musculus
  source 1..493: mol_type = other DNA
tttgcttatttcgactagcacaggtgtggtggagttaccccaccagagtagccctcaggaggattcatgaattggaagtcagtactggtgtacagactttgcaagcgcttcagctcccgggattccaagggctgcttaggcccgaagcagcaaagaagcttccattcgcagggaggttctccccgcacccggggttcctcaggccgatgacatcataaggagaccaggttgtcaggaccagcccacaagcgggatctcttctggagatgtcctgactgctgctcctcaacagcagcagtcagctggtacggacgtagtgcgcctgcgcagttcccgggccgcacctcccccgcggggcgtgttcgtcaagccgctctcaggaggccgtagggagcgcgcccgcggcctcgccccctctggtcccgcctccgcgtgccctacttgcccgcccgcgcgcgtgcgcagaggcgggccgcaggggcgagggcgcgag

SEQ ID NO: 46519 - DNA, 160 bp, Mus musculus
  source 1..160: mol_type = other DNA
gctggcttatcacctcccacagtggggagacatctctagattgtgttgacaaaaattaaccagcacatgaaatgcttgtgctgcccaagtggctgtctattacagcctgtgttcggtggggtgacggctggcggtggctgcgccgcatccgactggtggg

SEQ ID NO: 46520 - DNA, 231 bp, Mus musculus
  source 1..231: mol_type = other DNA
agacatctctagattgtgttgacaaaaattaaccagcacatgaaatgcttgtgctgcccaagtggctgtctattacagcctgtgttcggtggggtgacggctggcggtggctgcgccgcatccgactggtgggaccagccacgaggggtccgtggggtgcgggcggcgatgcaccgctgtccctcgcccaagggccgcgccgggctcttgttccccgccccgcggccccgc

SEQ ID NO: 46521 - DNA, 228 bp, Mus musculus
  source 1..228: mol_type = other DNA
tggcgcaccaccaagccgggcgtggtggcgtacatgagttggaggccagcctggtctacaaagtgagttccaggacagccagggctatacagagaaaccaaaaggaaggacataaaatatatatatatataattttttaaggttgggatgatgcctccttggactccaggaagacttctgatggcttagtgtcttgtgacaagacaaatccagtcttcacacagcagt

SEQ ID NO: 46522 - DNA, 492 bp, Mus musculus
  source 1..492: mol_type = other DNA
aagcgggggccccggtctggcagcacctctggctgcctcctgtctgcatccaatcggggctctccgaggcgcacagccaccgcgagaagtcgcagtcgcgcgacggattcctcgcgccgacgcctcgggctgcgcgcgcacccggtcgcggggccaagtgacctcccttgccttgcgacgggtggccggcgagaaaacgaactcctgccagccttcgccctgcactgcttttcccgcggtgccaggaaaggtgggagctcagcgagcaagcggccgcggaggcgcgcagtggcgggggtagggggctctacggggtggccggtcctgctgccgctgccactgctaccgccgctgccacaagcagcttctgtggtcacgtgacccctgccgcgcggccgtcactactgtacgctgcaggccgcgcgaacgagcgcgcacttgcgcgcgcccccagcctcggcgtcggaccggcaggctgcagcagttcccttg

SEQ ID NO: 46523 - DNA, 585 bp, Mus musculus
  source 1..585: mol_type = other DNA
ctgaaccattcaacaaatatttaacggattcctgatacatataggctctgtgatcacatgtaaaaacacaatgcgatttctaaactcctttttaaaaaatatttattttatgtatgagtacaggatcccatggttgtgagccaccatgtggttgctgagaattaaactcagaaaggcttggtagctaacaacttagtttttggtatattcacatcctatactagagagttggtaaatcaatctaacctgtctcatctattaatcagattaataatagacaagtcttcaaaaagataagctttgtaaaactgtaattaccagtaatgggagacagaagttcggagtttaaggtccgccttacagcctttcccgaaaggagcagattctgtttccgccagaagatcttcccggcgggtgtgaccgccagacatccgacccacagaccatgggccgccctccgtcgtgcgcaagggaactgctgcagcctgccggtccgacgccgaggctgggggcgcgcgcaagtgcgcgctcgttcgcgcggcctgcagcgtacagtagtgacggccgcgcggcaggggtcacgtg

SEQ ID NO: 46524 - DNA, 450 bp, Mus musculus
  source 1..450: mol_type = other DNA
cttgctatgttatcagaggacggggtggcactcacagggtgcataaagtcctttaaaaaaattcgaggccagcctggtctacaaaggacgaaataaatagtctaaatagtcccacttttaggaacggctgctcttctccctaagttatgcattcttggggaccaggggccgtgacccggatcgtgtccatcgggcaccaggcgcggagtcagggctcagcgagccttcccgcgctcgaggcaatgattcaccgggtgtttctcacgtcggcgcagcacgcagccgcccggcagctacctgtggagtggaagggcaagtccacctccacctccgcggccggcgcacagcagaggcccggagggggcgcgcgaacccgcgggagggcactcggccgcctccccgccccctctcgcggcggaagccccgcccctccgcgcgcccgccctccgc

SEQ ID NO: 46525 - DNA, 532 bp, Mus musculus
  source 1..532: mol_type = other DNA
taaagtcctttaaaaaaattcgaggccagcctggtctacaaaggacgaaataaatagtctaaatagtcccacttttaggaacggctgctcttctccctaagttatgcattcttggggaccaggggccgtgacccggatcgtgtccatcgggcaccaggcgcggagtcagggctcagcgagccttcccgcgctcgaggcaatgattcaccgggtgtttctcacgtcggcgcagcacgcagccgcccggcagctacctgtggagtggaagggcaagtccacctccacctccgcggccggcgcacagcagaggcccggagggggcgcgcgaacccgcgggagggcactcggccgcctccccgccccctctcgcggcggaagccccgcccctccgcgcgcccgccctccgcgcgcacccgccctcgccctcgcgccctcgcgccctcgcgccgggggcgggctcgctgcgcgtgccgggcggggaagcggcgcgagccggcgccgttccgttcgccgcgggggcggctccggggcc

SEQ ID NO: 46526 - DNA, 419 bp, Mus musculus
  source 1..419: mol_type = other DNA
ctcacagggcatgacgagtcctaagatatttcaatgaattaggcaactgtcccttcagtgccaagctccagtgatggtagctggagaggtgagcactacagacccggagccctgagagcacccccacactgagggagccagaggcaggctggacacctcaaggccttctagggagcccactccgtggcggtgctcgatgctctaggatggcctcgaggcgccaggcgctccgaccttggccctgtgcagccgtctggccaccgcggcacctggctgtgggtggcgacgcggctgagcaggcgctgctgtccccagccccagtgctgaggcgcgcaaagcgcaggcgaaggccgccgggggctccgcgggcggcgagggggggggacgggggggcacttgacaccggcccgggagaggag

SEQ ID NO: 46527 - DNA, 698 bp, Mus musculus
  source 1..698: mol_type = other DNA
tgagagcacccccacactgagggagccagaggcaggctggacacctcaaggccttctagggagcccactccgtggcggtgctcgatgctctaggatggcctcgaggcgccaggcgctccgaccttggccctgtgcagccgtctggccaccgcggcacctggctgtgggtggcgacgcggctgagcaggcgctgctgtccccagccccagtgctgaggcgcgcaaagcgcaggcgaaggccgccgggggctccgcgggcggcgagggggggggacgggggggcacttgacaccggcccgggagaggaggggcagctgtccctacgaccagtgctggatgcggggacccagcgcagaagccgcgccaggtagaggggcgccgcaaggtggggaggttgcggccgggggaccacccgaggggcacagggcggccgagatcgcagctccggcagggtgcccggcccggagcgccgcagtcggggcgcggcggggtcccgaacccgctcctcccgccgggggcgctaggaccgtccgcggctcggatagctcccgccgcggcgccccggggcccccggggttgcctcccgggcggctccgcagcgccggggccagagccagcgcggccacggggggcgagcggcgggcggaggcctgggcggcgggcggccggcgcggcaggcagcgggcgggccgggaggcg

SEQ ID NO: 46528 - DNA, 424 bp, Mus musculus
  source 1..424: mol_type = other DNA
tgccagtgcagagcccaaactgggggaagggacaggcccatgggaaacccaagcctgggcagctcccgttcctggttttccagggagccctggcagagggggctgggaagggtgtgggtgggctcggatccagcctacctcctactcctggcaggcacacactcaaggcaggggcttggcgctgggttgatttgtggcagtaacacacccaccctgcagcccacacctggaagtgggggggggcccccagttctgacttgaatgcctgttcagggcagccatggccttgggcctcatccgttggcacccggcatcccagaccagcctgggtccgggcctcagctttatcagtagggtgccggtcctgggcaggctgagcaaaatgacatcacttcctcctccactcgaggagctgtgtgggggt

SEQ ID NO: 46529 - DNA, 402 bp, Mus musculus
  source 1..402: mol_type = other DNA
ttctccctgaaaatcattagtagccatgtggctctggctcacctggaactcaaggagatccgtttgcctttgcctcctgagtgctagagttaaaggtgtggtctcagagaggacctaggttccccatggtggcttacaactagaactccagttccaaggggtggtgatatatatacatgctggcaaaacattcatatacataatataaacaaaataaaacaaggcttcatgtaatctaggctggtttcaatcagccagactcacacccactgtgggttctggggctgaacctccagttccctatagctaagtctatctgtagggcagtcccctgcagcatcagcacatggcctgagaggtttgagctgctggcccctcccctcacagcctccatttcatgtc

SEQ ID NO: 46530 - DNA, 331 bp, Mus musculus
  source 1..331: mol_type = other DNA
accccgactggtctggtacaggcctggtcctgctgccagcctgagttcacagctaagccagaatgcctgggcctggccacatggtgagggctgtcagacaatccccacccagaccaaaggtagcctgccttgggcggccgtgactctgacaacggaactgagattttggtttcacaagatatcacactttcccatcattggggaaatctgccaagatctcagaactaggcctcgctttccaggcagatgtgccttgcgctcagccaggaccgggaagcccccctcccgaggcccgccgccccccttcgctgcagaagcgctgccaggaagg

SEQ ID NO: 46531 - DNA, 280 bp, Mus musculus
  source 1..280: mol_type = other DNA
aggcccttctctaatttttacggtcgggaagaaactgcagccttggaggttggtgctgtatttcctgaatacctgacccaggtagcaaacagagtttggctcttgaggcagcccgccagtggccaagggggcggggcgtggcagaacacagctccgccccctgcgcgccgcctagcttgcggaccagagcaggaggcggcagccaacctcgtcgctgaatgggcgggtggcgtcccgctctgtcccgcccgccgccggccccccatcggctgctcccgcc

SEQ ID NO: 46532 - DNA, 332 bp, Mus musculus
  source 1..332: mol_type = other DNA
actaaacagatacttttttgtgtgtgattattccctaaaggacaacaatatagactaacaactatttacataagaatgatatttacattgtaatagcatttactttgtacttggttatggtgtttcttcacagcaacagtaacccttacataaagctttctacacatgtacaatttatacataaaggtttttatatatttattttgaaacaggattgcacaatagcagaatcactgtgatcctgtgcagaaactgtagtctgcagtcactgctcccgggccccgcaatgacgtcacggcgcgcagtcatcgcgagactccgctcgcccgcgg

SEQ ID NO: 46533 - DNA, 448 bp, Mus musculus
  source 1..448: mol_type = other DNA
accaattaagtgatggactattccctgggtgttgcaggctgagggcctcaaaaggagcatttgcttctttaaggaagaactcaaatacatcccaattggttggatgtgctggagatcttgaagagagatcaagccccacgcttgacgtctgggctgccagggtgggcggagacactgagatggggcgcgcccactcagggagctgcccccagcctctcctgtccccggaaggaagggtagaagaagggcggccggggtgccccagcacgcctcaccttcagggaagatacgtcccgaacgtttgggggcaaggcgcagattcgcctcgtttccacgcagtcgtcgccgggcgctggcaagagggagacaccggggacagcgagggggcccctccacccggcgcccaggaggcggcgacaaggcggggaggggccgcccgcctcctggg

SEQ ID NO: 46534 - DNA, 524 bp, Mus musculus
  source 1..524: mol_type = other DNA
tccacgcagtcgtcgccgggcgctggcaagagggagacaccggggacagcgagggggcccctccacccggcgcccaggaggcggcgacaaggcggggaggggccgcccgcctcctggggcctgcggcgcgtgtgaatcagtgtgcagagcgcagcgcacggactcggctggctcgccctgcgtgcggggagaggatgctggcaagctgccccggcctgggcccgccatccgcagcgcgcgccgccgccgtcctctgcgcccaccgatgctgagccgcagcctcgcgcctctcccagcctgacccggggcctgaccgcgaggggacccgcgcacaggctccgggtggacgagctggcgcggcggcactgcgggaagcagcctgcggctcgctgaagcccacttggcttggctccgcagccccggtttggagcgcgcggctcccgagttcccgcacaggtcaagggaatccccaggaccgctccggctccttccgcaggaaaccgggtgtctggcgccatgtcctt

SEQ ID NO: 46535 - DNA, 376 bp, Mus musculus
  source 1..376: mol_type = other DNA
tgtcagttaggagacttgagactcagagcttctgaattttaaataaacagcctctatttcttactaacaatattaaggcagtgctaattttaggcctctgtatagccctggctgttctggaactcactttgtagcccaggctggcctcgaactcagaacgccacctcgcccggctagtcccagggatctaagggaccatgctctgccaaagggaaggttcactgcgtagcgcagagcccaagagcagatctacttccggcctccggagatgtggcggcgtgacaagcctgcgctaccagtgcgcctactaagtactgtacagcatgccatcttcctgatcatcagactggccggctgctgggcgccaccatgttcg

SEQ ID NO: 46536 - DNA, 410 bp, Mus musculus
  source 1..410: mol_type = other DNA
ctaaatgtttcaatcttttggatttggagaataattgacctgtcgaagtttgatgattattcacaaactttaagggcaagttactggcaaatttgggattacatagtaatttttatacttgattgcaacatatttttaacaattaagtcatcaaacttttagtttttagtaacaatttcaacccacatgatgctttcacattaagttttgtttaaaggagaaagaaaacttcctttgcaataaagtctggaaacactgtggtacctggacacaaagtatttgcagaccttaacttaaatagtaaaagccttaccttggactggtcagccctgtccacgcctacctcaccgccgtggccactatggtccagccgggcgctacagtgctcgaacatggtggcgcccagcagc

SEQ ID NO: 46537 - DNA, 450 bp, Mus musculus
  source 1..450: mol_type = other DNA
acacctacacgtctgcacccatgtgcatacgtcccacagacacacacacctacacgtctgcacccatgtgcatatgtcccacagacacacacacctacacagaatttaagtagatctttaaaaaagggttaatcaaatgcgtatgtattttcctggataaagatttctctagagaagcaggtgctaaatgtcagttaggagacttgagactcagagcttctgaattttaaataaacagcctctatttcttactaacaatattaaggcagtgctaattttaggcctctgtatagccctggctgttctggaactcactttgtagcccaggctggcctcgaactcagaacgccacctcgcccggctagtcccagggatctaagggaccatgctctgccaaagggaaggttcactgcgtagcgcagagcccaagagcagatctacttccggcct

SEQ ID NO: 46538 - DNA, 482 bp, Mus musculus
  source 1..482: mol_type = other DNA
agagctgcaaggagctgtcctgtggctgcttgattcctccggacaaggaacactacttttgaaagtagcatttccattatccagagggaaaagatctgtgaatgacagacattttagtcaatttcatctgcaaaaagaaagggggcagatgatctttcttttccgttctcaaagtaaaacaactcgcgagtggtcagattcctctgggatccccagggccgtcccacagcccgctcagggacgctaagggacaccctggcagcagagagcttcgggccccggcgtgcctgcggccggcagagggcgcggggcggcttcacgctgcgcggggctggaggggtcgcgctgcccggggcgcgccgtcggagccagagggcagcggggctctgggcctgtccgcggagggggggctcgagggcggggcgctgcgggcggggcacgggggcggggccgcgagcgggggggcggcggcggcggtggca

SEQ ID NO: 46539 - DNA, 504 bp, Mus musculus
  source 1..504: mol_type = other DNA
ctcaaccttaagaaagcttttttttttctgtcaagaatagaaataagttctaagtatgagtttctcctactgcaagcagaaaagtccgggacggtcttcctgtctgtctctctctctctctctctgtgtgtgtgtgtgtgtgctttaaggagagtccttgagaaggatctgcagcaaaggtggaggcaactcctttgcacctggatgtcctggacatctcttggcctggcaggaaatccacccagtccccggcaagtcacctcgaagaggaggagccaggtggggggtcttggcagctcctggaagggctgtcagccgcggagcttcgggacctggcgggaggagaagcatttcggcccacgccttccacggttccgggggcgaggaggagcgccacgcagtgtcacgctccccacggtgaggagtaggtgtcccgcggctaggcgggcgggccgtcactgcccgcccgtcgctcgcctccccgccccccggcttcctgcggag

SEQ ID NO: 46540 - DNA, 388 bp, Mus musculus
  source 1..388: mol_type = other DNA
ctaaaatttctaagattatataaaaaaatgtccactttgtataggataaaatgaccaaaataaattcttgaaaaattctctaagtttgggtgttactctgtttttgtaaaaatgcatttttaaagtacaaatccaagtacatatctcctcacactcaggaaatatatatgttgaacatttttttaacttcgttaaatggttacggcctcccatcaacttgtataaatgttgtaggccatgtttctagattcttaccttgcgttacggcagtaatttctgtgtcacaaatgagtgtatttgccacggacaatcactgaataatgtctttcagcagaatgaaacttgaatgcataatgcagagttctcaatacgcgagcagtggacgcca

SEQ ID NO: 46541 - DNA, 392 bp, Mus musculus
  source 1..392: mol_type = other DNA
ttagttattttgcagatactttacataaattcatttagttagttgaggaatttgagcaagtataataatttcctcagcgacctagggtataaatttgactttgatcatctgcttataatttgtgttcatgatgatgagcatttccccaggatcgtctttttggatggacccatccgtcttacatgtagattaccttagggcaagtatccatgtgggaatgaaacctgtctatttccttttaaaaatatgctaacttactaaaactacttttcttcattctttttccatttttcttgaaaaatgttgagcctaaagaggtgaaggagacttctgctgtccgtgcctccacctcctgaacactgggactgcaggcagatgcagctgcccctgct

SEQ ID NO: 46542 - DNA, 396 bp, Mus musculus
  source 1..396: mol_type = other DNA
cctgtccttggatgggaatagcaattccaaatacttcacaaatagttcctttgaaagagcctcttcaaccccctggaggctgatgcaggattccaagttgcaggccagcctctgggactatgcccatgaggaaaatacctaattaaaaaaattattctcagtccacacagaatgtcatactgttacattgtatatgtatgtatgtatgtatgtatgtgtgtatatatatatatatatatatatatatatatatatatatatatattccatatttaatatttgtcaggtgttacgatttgctatcacaacttacattaaatacatttttatttacaattttaaagttatttttaatatcagtaactactaataaacttggacgttggtgtcgcaggc

SEQ ID NO: 46543 - DNA, 286 bp, Mus musculus
  source 1..286: mol_type = other DNA
gtcttcggctctgaaccagaacctgcagctgaagactccacgagggacaatacaagtgcttcttgtgtaaacggtggacgagtgaaaatagtggtccatcatccaggtatagaaaaatcagaattcacagaatggtttatgaatgagtttgaaaaaaaaatcagagcctcaatatttttatctatttaatgatttacctgagatttaaaaacaaaggtctatgcctattatttaaaaagatactcttttcgaggctctttgacggccctcaaagggtcaaccgaga

SEQ ID NO: 46544 - DNA, 412 bp, Mus musculus
  source 1..412: mol_type = other DNA
agattcagtatacaaaaagcctatgaagcttggaccttcgacaggtttatgttcctaaaatcctctgtagcatcataactgcagccttcagtcttacctggtacagaatgagggtgcacatttgaaagcatgctctttcctgatacagggttaaggcctttcttcaggctgacagcccccaacgtctgctgctggcttgatacccggcaacttatattcaagtggcgacctccgagcaaactcggaagtggcctctcttcccaaggtgaagcgcgacctgaggcccagggccccgggatcggccttccgaggacctctgttggaagcgctggcgagccgggttcctctccgagacctgggcgcgctaaatcgcaggctctgggtctgatctctctctccggtccgcaatccg

SEQ ID NO: 46545 - DNA, 551 bp, Mus musculus
  source 1..551: mol_type = other DNA
gtggttccaaccattctttggagctcttgtggtcatcaagtaacacagtccctagaaaagctaaaatagcatttattttgtaattaaaattcacagtaattttcgagtaaacagggccttgaagccctcctggctaggaatctagttcccagcagttttctaggtttgatatgacatgaaggaatttgggaccttcaagctccaagagatccaaagccctccccggggcctgcactagggtaccaggcccgctcacccgggagtaccgggcccccgattcgcgattcgccggctccgacacagaccgcgtgcgcgggccgtcctgccgcgcaggcttccacagggccccctctggcggtgggcctgcccttcggctctccgcaccacagtgagcccgcggcctcagcccgagaccttggattcggaacgcgcgggcgttcgtgggacgcggcgccacccctacgcgcccctcggccagcgggaagacgagaacgcgcgcgcacctcgccgaacagcacggagcagtgcagccctctggcctgggagcgagg

SEQ ID NO: 46546 - DNA, 365 bp, Mus musculus
  source 1..365: mol_type = other DNA
ttgtcagaaacaaattcagatctgtgcttaaagtctccttcagggccctggcttccctggattcaagtcccaggaccaaggaagcggaaaaagtatcttttttagaggtaaaagaattcattcattccttctatagcaatatacctgctgtaaaactttgatcaaacttaaagagttagtttaattacccctgtaggtgctaaataaatatacactgagtggatagatgtgtgatgtgctagtgccggcacgcctcgctcaccctcatggtggttagtctggccaggatccggagcagccacgtcagggtcgcttccctcgggctccgccccggccgacccccccgcgcaggtcctgactccagc

SEQ ID NO: 46547 - DNA, 389 bp, Mus musculus
  source 1..389: mol_type = other DNA
tttgggggtggggtggggtgagcagaccataccaagcacaacatcaaagttgacacattggaaatctttctcgcacgcctttcctagcgaggccagcctggtctacaaagtgagttccaggacagccaaggctacacccctttatacccattgtttcagtagtctgataatacaaggaaggatagtcacactgtcctgggtgagctatcacacccacccactcacacagttttaatctggacaagtgaagtgctttatttaaataggtttatcctccttggagaggaggacccgaagcttcgaggtcctgggctgcctcaggtggcacgcggctactagagctcccggagggcgggctgcctgcacaatgggaccacgcccacttggcc

SEQ ID NO: 46548 - DNA, 179 bp, Mus musculus
  source 1..179: mol_type = other DNA
gcacagatctgaatttgtttctgacaactggaacttgtccactcttccaagtggctagctcgcagatactagcttgccaggatctgctacaggcctataaactaaacatgtagaccaggctggcctagaactcagaaatctgggcggtgatttcgcgggaactacaactcccagaaaca

SEQ ID NO: 46549 - DNA, 460 bp, Mus musculus
  source 1..460: mol_type = other DNA
tttaaccttcagacttgcctgaaagatggaggggaactgagccacaggctttccctctgaatctcaaaacaggtgaggggttctgtgaggcctgtgtgatctgagcaacccagggaggtctgtgggagcagcagggaagctcccttcagtccgtttccttgaagcccgggctctctcggaacccggaggccatggcccagcagcccggccatgcgtcgtgagtctaccggcgcggccacggagccgggcgagccgggtatctttgcagggggcgggggtggcggaccaaccacggacacacccgctggcattgagcctggggcccggcgcgcggctgcaggggatccctggggccccgggagccaagcgctgagccgggccgggggcgccccgcctcccccaccctccgcccccgctccgcccgtccctggctgcgcgccgaagcccgcctccctcgcag

SEQ ID NO: 46550 - DNA, 452 bp, Mus musculus
  source 1..452: mol_type = other DNA
ttttgtttattccaaaatcatcaggctcaggctgaggcgggtgtttaaagagtatacgcctgacctataaggggcttacagccagggctacacagagaaaccctgtcctctaaaagaaaggggtctttgtagagagcctttttaatttaacagtcactcttgcagcagcaagaaggccaccgccattagtgcgcgccttgcggcagcccgccgcaagaagccccgcccccggcgcgcctcacggccgcgcggagccgtccccggcgcgttcccgtcagccaggcgcgccgagccatccccggcgcgctcccgtcagccaggcgcgctcctccgagccgcgcggagccgtccccggagcgctcccgtcagccaggcgcgctcctccgagccgcgcggagccgtccacgcgcgctcccgtcagtcaggctcgctcctccgagccgcgcggagcc

SEQ ID NO: 46551 - DNA, 566 bp, Mus musculus
  source 1..566: mol_type = other DNA
atatatatatataaatacacacaactactctgtacattctatatagtgaggactgaacaaagcttattaattttatggctaaatgttataactatgaagctatttagtctcacttttttagtgtaataatcaggggaatttctgcccaaataaagactaggctctctatcttagataaactgtgatgctttgaaatgaacatttatccatattacattaatttaataattacatagtactttgactttaccggtaggatggagatcaaagggaacaacacttgagttcagtgtctttaatcctgcttgggatgaatgcagagttcaaggctaaagttcattaggggtcttgcccaaagtacctaggctggcgtcctccaggccaccgcaggggtctggaccatcctgcgccctggccggctctgcccatcccccagtctagacagggcagcaaaagctggccactgtggggttcacagcccagagcgcctccccgcaggcctcccgctgctgacgtcacgtcgaggcggggcctgtgcagaaggaagggctgcgcgtccttgcagc

SEQ ID NO: 46552 - DNA, 353 bp, Mus musculus
  source 1..353: mol_type = other DNA
agctgctgtaaaattcaagcacgcagttagtgatactagttagttccaatagcaatttttgagaaggatattagaaaagattttgcaggatttcaaagatctccttaaaggagaattcctaggtaccatccataggattctggtgaatgctgtaggatgaagaaaaatctcttatgattcctaattctggggaataggaatggtgcttaactgtgaaaaacaagcaatgaccattgcccaggattaaagctttcttaatcaatgtttgcttagtcataggatacatgtcttctgccatcatcatctgatagtgatgtcagtcattgttagcagatagtgctgtcttttagcta

SEQ ID NO: 46553 - DNA, 313 bp, Mus musculus
  source 1..313: mol_type = other DNA
tacattgtgttcacatataataaataaatctttaaaaaaaaaaaaatctgtatgcatgtacacaggttcatgcatttctatgcgtgcatgcccatgaacctatatatacacgcacacacacaaagctccctgtctgtggggcagattgcctcgccactagactggaggtgtgcccacagtggaccccgggagctgatcatctctgggccccttgctaaattagttaggacaggattgtttattcaaaaccaagaaaagcaaacaggcccgggccgtgccctttggacctagccagctcctcctataaatggag

SEQ ID NO: 46554 - DNA, 731 bp, Mus musculus
  source 1..731: mol_type = other DNA
gcagcgcaggcgcaagggcttctgcaggcttgcgagctcagacgcgggaggctccagctccagccgccgccactgccagagccgagcccagcgttccaggctctgggccacactcccaagtcctgcctggcccagaagctaccaggaccctgggcggctcttacctgcggccgcgccgctccagccccggcccgacgcgcagagagcccagggtcgcgacggcgccggcgggtagcggtagctggggccgctcgagtcctggcccggagaaacggatccaggtccaccctcctccgccgccgcctcccggcagcccagggaggatgcccgggagagggaagtcagtctttctgcctgtcagcctgcgcggctatgcgcggtgcggcgcggctctcatcgaggcggcggcagcggcggcggctccggcagcatcgcccccgccctctccccgcagccgcggcggccgcggggctggggctggctccgggcgccgggctccgggctcgggctccgggagggggctgagcttaggctcgccaagacctgggtagccggagccggggttagagctgctgctagatcggcggtggcagggacagcggcgacggcggcggcggcgcggggattggcgcggccgcggcgcggggaccatgctcccttctctgcgagggaggcgggcttcggcgcgcagccagggacgggcggagcgggggcggagggtgggggaggcg

SEQ ID NO: 46555 - DNA, 388 bp, Mus musculus
  source 1..388: mol_type = other DNA
gctaagggtttaaaaattagttcatgaaaaactcttaacacaatgaatatctttttctatattcattaaatgttacctattggatgtgtatgagcactaactccttttccggcttatgtggttcaggtcccagggaacccagtgccctcttactaatatacaaaaagatttttaagttaaaatataagtgatgttggtactatcaccgaggtgctacaagcgcaaagtggctataatactgccatattggcgacagtattttgcaattgtctatctatcctgaatatgaaactgaatactatatgaagttgaatactagcactaaggtcagctgagagtcaactttcctgtgatcatgatctacgggtcccgacttccgggaccggcg

SEQ ID NO: 46556 - DNA, 267 bp, Mus musculus
  source 1..267: mol_type = other DNA
ttggctagcacaaacatgtacacacacatgtgtacccacacacatgtagacactcggacccacatgcacatgtacatatgcaaaataaacaaaatctatatttcctcttcctagttaattttttaaaatttttcttggctccgtgactgccacttaagttgggtttcccaagctctgagaggacagagcaggtgagacctccaacctgggctctctctcagatagagttggtctctcatgactgggctaggcactgatctgtgaata

SEQ ID NO: 46557 - DNA, 295 bp, Mus musculus
  source 1..295: mol_type = other DNA
cccatgctcatagagtgctataaccatgcttgcacattcaacctaatttgagtaactttaagacccactgttatcttcagagggctgtggacgggagaggccctaggacctgacttggcccggctgggcgggtacgcgagacgccccatcttccagccaggcagatggccttctcttggcaaggacaaggacgcagctcagcgctgcgggttgaacgttcagcagggggcgctgctccgagcgctgggcgtgggagaggaggggggcagcggcttgctgcgcacacttcccccat

SEQ ID NO: 46558 - DNA, 307 bp, Mus musculus
  source 1..307: mol_type = other DNA
gaacataatatgtcccttaggtgcttttggtgtggcccagcatctgcagctacttatctggagagagcaaaggacagacagcagtttgtacctgtcacctggccctggtttcagtctcctgagccacgggcagaagacaggaaacagcaggtatggtctctctcattctccagccatggtccactcgtgcttttgtagctagcctggagagaagcctgaaaactcacatccgctgccaccagggggcgggcaagggctgaggagacggcgctgcgccggagcggggcggggcggggacgcagcgacg

SEQ ID NO: 46559 - DNA, 371 bp, Mus musculus
  source 1..371: mol_type = other DNA
gcaagttccctgcgaggccgcatgtgggtttactgttagcctttctcagtgaaaaggctgccctgatctaaacataacaaaaccgtgcaccggtgtctgtttaagtgaaaacaaaaccacgtagacccggagggctccaggctgcctgctccacgatgtcgcactcagagaggctgcgacgaaggcggggacccggcggccacacaaccccacggggcgggtcgccgcgcagactccacagtcaacgcctctcccagccccgcggacagggcgggcgaccaatcggagccaagctccgcagcgatgagctcagccctatggcttcccattgggtggctatattaagaaagtggccggactctttaaatagc

SEQ ID NO: 46560 - DNA, 288 bp, Mus musculus
  source 1..288: mol_type = other DNA
cactccaagctgcaagatgtttgaagcctgcaatcagcatctgcgtgtgcttataaacaggctcttagcctgcccggcggggacaatggtagctccaagagaatttcctcgcgactagaataagttgtttgaggtgaagagtaaaatttataattttgagccctatagtattgtggaatctaagttcaaaaattcaggtccaggcacagccggacccaccttatagctgggaatttccggtgactgaatggccatctggcaggatggcacctcctgggcggcgcctca

SEQ ID NO: 46561 - DNA, 439 bp, Mus musculus
  source 1..439: mol_type = other DNA
tctttataatgatgaaaagtggtcccaacgactgcgaccaaatctttggagccattgttgttccctgcagatttcaaggaatcagtcagtaacacttgcctactgtagacgataacaaggtgcattttttttttatccctaaacctccaacatttgagtggaaaaggggcaccacacgaggcgcgtgaccagccccgggagcagagcgccagaggtccggcgtgcaggccagccctgatcccagaaggtaaaggccgggaagtgcacgcccgatggcggcctcacccgcgaggagagcgccgcgccagtgcgcacgcgcggagccccggccggccccctgcgcccggcgcgcgggagaagtacgcacttcactgcgaggcgtcgcggctgggtgagcccccctttctcccgcagtgctttgcgcgcggccggtgggcgg

SEQ ID NO: 46562 - DNA, 513 bp, Mus musculus
  source 1..513: mol_type = other DNA
gatggatgccatctatggcccctgccttgcaggtgcaaagggcctttggcaccatctacagattgagggcaagacagggcgaaacaaagaggccatttattttttcctttggtcttttctataaaaaaagaaaataataataataataataataataataataataaaaacaataacaaacagtgctcatgtctttaaaggtctttaaaggtctggagttcccctcaggggtcccctatcctcagcccgtggggaggtgggaaccatacatcgatccctcggtttatatatagcctccctggaggacccctgggtgtcctcgcccagagggcgctgcagcctcggcgtgcctccggactccggaccaggacatagtagcgagtgcacctgacagattgccggcactcaccagtgctcaggggaggaaggccctggggggtggggcgctccaaggggcggggcaacccagggggcggggcccgaggggtggagattgggactacccaggcccgc

SEQ ID NO: 46563 - DNA, 311 bp, Mus musculus
  source 1..311: mol_type = other DNA
ggcagcctgcaatttcagctcctagctggccagagagcttgcagggatgtctcctcactcaagacatctgtctggctgtaacagctgggttttacagaaaggtaaagccacagcgtctggttttccatgaatatatactatattttcattaataaaattctagcattgtctactggcttaaattatccaaaatacttttgaggttctttgaaattattcagtgtttatcagtcaaaaacttgactcagttaatgataaaaatgataactgaatcacccaacttatgtcagcatcccacagtgtggcttgtt

SEQ ID NO: 46564 - DNA, 610 bp, Mus musculus
  source 1..610: mol_type = other DNA
gcaccacacgaggcgcgtgaccagccccgggagcagagcgccagaggtccggcgtgcaggccagccctgatcccagaaggtaaaggccgggaagtgcacgcccgatggcggcctcacccgcgaggagagcgccgcgccagtgcgcacgcgcggagccccggccggccccctgcgcccggcgcgcgggagaagtacgcacttcactgcgaggcgtcgcggctgggtgagcccccctttctcccgcagtgctttgcgcgcggccggtgggcgggtcgccgccaccggaggcggagggggaggacggacggccgagagcgtcgccgccggtgcccaacggtcggtgtcccccggctgaggcagcgcggccgcagcagccctgtaagtcagcccgcgctcgcttcgtcgggtccgtgggcgccgcgggggccggctctgggctttgtgtggcggcctccgcgggagcaggcctcgggcgggaacgggtcgggcctgggcggggatcgcggcgggccgcggcctgggccccgctcgcacaatgccgggggaggggagccggaagggggtgtgcgccggcgggggagggggcgcactcgccgctttcccgcttcct

SEQ ID NO: 46565 - DNA, 245 bp, Mus musculus
  source 1..245: mol_type = other DNA
tccaaaatacttttgaggttctttgaaattattcagtgtttatcagtcaaaaacttgactcagttaatgataaaaatgataactgaatcacccaacttatgtcagcatcccacagtgtggcttgtttctcacttaagacacacaatctttctcttcaagaagaaaaaaaaaatcactattatctgtataaactcaacagctaagcgcctcctttctggtctgagcctagagggccacgccagaat

SEQ ID NO: 46566 - DNA, 312 bp, Mus musculus
  source 1..312: mol_type = other DNA
atactatcttctgagaggacaccaggttacctctacctcttagctgttgtataatttgtaggagacatgactgtccagaaaagactggatcggctctgttgagactcattattgcagtggttgatttactattcctggtagtataagtttaaatgtttatgaatatttaaaacgggcacagcaagttttcttatctggccgggatagagcaggccccaatcctagcctggtcggccacccagccgagcccaccggactaggcgggcagtgaccactgtgccgctggccgcctagtcctgccactggaatgca

SEQ ID NO: 46567 - DNA, 239 bp, Mus musculus
  source 1..239: mol_type = other DNA
aatgacccaaaggtcatattactcccattacaaggacccttgacataatttttaaggtgttttaaggcggcattttaaaaaactatcttagattatgaactttgtcgcagccataagaagtgcccactcctaaattgcttcagagggctctgtagttctctcaaagacaaaatgcacatctgcactgccattttttatttgtccgatgctaccaaatgcaacagcccgcgcaggcgcac

SEQ ID NO: 46568 - DNA, 498 bp, Mus musculus
  source 1..498: mol_type = other DNA
tcattatattttgctgaaatgtactttaagatcacttttctgaccgggcagaatcccagcaccagcctagtctagtgtctcgaaaaaacaaaacaaatcacttttctttattctcagagctcagatcaaaagtttttctgagacattatttgaaataaacatgaaaacaaattctgaagggaaaaaaggacgtttatcccatgtttccttccactataatgtagggaaatgtggcatttgatatatcactaagtctttttaggaaaatatacagaaacatggacaaatttgtttcaaagtaacagaatattaactctgtattttgggtatctaaaatgaaaacagcaatattatgttgtctgcttctataattattttctaaaaaaaaattttttaaagacttctttatttactatgtatacagcattctctaatctaatctaattatgtatacacatgtcacaaagatttaaattctcagttgtctcgcgatactaa

SEQ ID NO: 46569 - DNA, 287 bp, Mus musculus
  source 1..287: mol_type = other DNA
tgacagctgactggggtcagccttaggtcagttccgtagttgttctaggtccccccgcaggcccaggggtcccagtccactctaaaaagaatatgtgattgctgtggaactccacaccccagagtctgtggtcagccatagaggagcgctgctcgactttgtcagattacaaacctaactagtatgctgcttgatcttatgtgtcttagaaacacacacacacacacacgcacagctgccaaagtccgctgcccgggtcagcaaaactttgtttcccaatgcgcagg

SEQ ID NO: 46570 - DNA, 467 bp, Mus musculus
  source 1..467: mol_type = other DNA
tatctaaatagtttctccattttgtaatggagaaaattaagattattaaaattagccaaacatacagtaaaagattatttagaaaacttgagttaggcctgacagaacacatgtatcttacctatattgtaatgaagattaaaatcagaacaaaaacataacaatatggtttgactctatttttgatataatgctttctctttacacaaaaggggaaatgtcagccctgacaatgacaagggtctttgccactgtgaaagaaatcatacactttcagctgtcagagtctctgaatctgcaggaaatgagtttgtattcatttcaaccagaatattttaaaaaacataggtataatgaggttataaaatggatattgcagcataatggacatctgagcaatttacacatcaattccttagtatatgtgtggcatcagttagttaccatggaatcacacatgatgtcat

SEQ ID NO: 46571 - DNA, 542 bp, Mus musculus
  source 1..542: mol_type = other DNA
ggtcctcttaaaagctttctggaagatttagggaaactgcagaaacccgtgtgctgaagacccttcgccgatggggtctagagatagatgaagctcttttcctggctggagcccctaaacatcttgtgaagattcatcttcttcgacgaccaaatgttccacattgaatcagccatgtgccttatggcattgctcaaaaacgcaaaaacagtctggtattacaaacggcatgtgttttgcagaccacaaaacttagtttgctttttggaaaaaattttgaactttcaagctacagtcaagcattctacttttttaaagctaaggatgttggatatcatagtttagaactttgacacttaagttgtttcacaagaagcttaattaattttcaaaaagcattgctcacttttagtgttagtcaaatgaatgaatctctatatgcagcatcacctagaaatctgtggcaagaattttaccaagaaatgtcattttgtctataggcatataacccaggacagcaggcggcgccccagagtccttcg

SEQ ID NO: 46572 - DNA, 482 bp, Mus musculus
  source 1..482: mol_type = other DNA
agaacactgggcgcctacaattctcctgcacaacttaaaaatctgcagttggcgggagggggagcgcgggggtgggtccccacgcgtcccatttctgggaggccaggcgtgtcttcaggactacaatatgcataagtccaaccactttgttgcaagaaaaccctggcaattttgcgaagtgttgtttgcttaggccacgagaaaggtcatttttcccctctgggacactcctgaggaggtgactctgcacttgggcctgggccgggatgcaagtcccgcactgctgtgttgggtccaaccatccgtgcgtggggctcgccgtgggacccccctcagtttgcggcggtccgtgcgcgagcgccgcgccctgggccggggggaaccctggcggagagctgcacgccaggcggcgggaggagcagagagcagcagggcgttgactgagagactggccccgcccggtcccgcccgcctcccgaggc

SEQ ID NO: 46573 - DNA, 688 bp, Mus musculus
  source 1..688: mol_type = other DNA
ttccactgtaatggagggcaagaaactagatttaacggccacggtgcctgcgcgtgtaacacccagctccgacgccggcctcaggcccggcccgacctctgcggctgcccgccaacgcccgggccgcctggggacgcgcgagggcgggccggcgcccacggccaagtttcccgcggcggagagcggcgtcccctccgagggcgcgaaggtccccgcggcccgcgcccaggcccgaccctgagcacccgcagcccgcagcttccaagagggccgaaggctgctcgccgaggcacggggctcccgggcacggagagaggaagcgcgcgccctcactctacctccaccccggggaagctacacgccgcggctgtcacgacacgaaggccaccctgagggcgtcggacctcggccaccgctcgcccgccaagggccacccgcccaaatgcaggcgggagccctgcagacaggcgcccgccgcaggacagtccgcgcctgcgccccgcccctccccgcccccggactccgcccgcgcctgcgcgctcccgggctttcgcgccgctctggtcagccagagagaaccgtggggaaagcgcggaggcacgcgccccgctgcggcggatctagacagcgggggaggtgggtgggaagatctcccggcgccttacgcatgcgtctgcccggccgacag

SEQ ID NO: 46574 - DNA, 285 bp, Mus musculus
  source 1..285: mol_type = other DNA
ctttagccactatgcactaacgcacgataaagaacgcaatatatgattactttttgaagtaaaaataaggttaattaacagtgaatgccatttcccccaacattggagaatatttatttggtcgcccagatgggcttgaaggggacctggcagggcggcttcgccctctcgggagccagtgttctagaagccggtaggaccgggaggccggtctcagcctgtcccgcgggacttacccagacacccgtggaaggggctgggggagcctcccgctgctctccctag

SEQ ID NO: 46575 - DNA, 387 bp, Mus musculus
  source 1..387: mol_type = other DNA
gaatatttatttggtcgcccagatgggcttgaaggggacctggcagggcggcttcgccctctcgggagccagtgttctagaagccggtaggaccgggaggccggtctcagcctgtcccgcgggacttacccagacacccgtggaaggggctgggggagcctcccgctgctctccctagctgtcggccgggcagacgcatgcgtaaggcgccgggagatcttcccacccacctcccccgctgtctagatccgccgcagcggggcgcgtgcctccgcgctttccccacggttctctctggctgaccagagcggcgcgaaagcccgggagcgcgcaggcgcgggcggagtccgggggcggggaggggcggggcgcaggcgcggactgtcc

SEQ ID NO: 46576 - DNA, 304 bp, Mus musculus
  source 1..304: mol_type = other DNA
gtgaaacccctaaccttcaacttgaatctgaagggttaatgcagagaatattcagtacttatgtgctttgtgtacaaagacggcagttgtggtgcaaggaccggtgcctctcttcacaatctgggggaaaacaagcccacgtgttcttgtctcctccccttggccccagaatctcagggcgtgggccctatctcatgcccatcctagagcaggggctggagtaagccgggctcctaaatccgaagcctaggaatctgcaaaaactgtggaggctcgcgcgcttgcgcacgcagctccagggacc

SEQ ID NO: 46577 - DNA, 367 bp, Mus musculus
  source 1..367: mol_type = other DNA
taacccttcagattcaagttgaaggttaggggtttcaccctctagagtttcattcctgtgggaacttcattttccaggaaaggaaggtctgggaacctaatgaaaaccagtgttttcctcctggtggccaaccagctctaaactggttgccaggcggctgcgggctccaaattgggagagcagcttggaatgcgtttgaagctgctaagctcaggaatgaatactctttccaggccagattcttaagaaaggtgggtagtggccatcccctccctgcagaggcgcgcagcggagccgagtgcagaccgagtctggcgggcgcccgccctgcgctcccaggccgcagtgcgcactgcgcagtaaggcg

SEQ ID NO: 46578 - DNA, 535 bp, Mus musculus
  source 1..535: mol_type = other DNA
ttaacagtaattatatgtatcttaataaatatgtatataataatagacatttaaaagatcattttctccttcacgattacaggatagaaatcataaagaaaactttctaaaatgaaagagctttaaaaattcattaatttgagccactacaggattattgtatttacagtaaatgaagttcaaacatgtaatttttatttctaagtaaatttatccacaatctttgggaagtaaattctacaacatctgtgaaaataaatatagtcttagtcttaactgtagaaaaaataattttctaggtactaaattctgtccaaatataattaagccccttctccacatttttaatttaatgaagtaggaaaaccgattttaactattatcccccctcagttctgcccgagggaaggccggagacggtgtttctgtcttcacagcgctaaacctcggtgtaacggtcagggcggggcgagacctggattgcctaagtctggcctcgggcggggcggagcctgctcgcgccctttaaaaggcc

SEQ ID NO: 46579 - DNA, 315 bp, Mus musculus
  source 1..315: mol_type = other DNA
atagagcaatgctctccctgaagcaccttgacacactgtgaaggtttaatactgtataaattgtataatgatctttggctgactgggaaaaaagccaacctacacatacaggggctctgactcacaacctgtttggcagtacaaaacctcctcggcagatgttttaaaacaatgatctgattttaaattcataacggtggcctttaaagctgtattaacattagctgggaggtacagtgggccctccgggtgacagcagggcgggcgggccgtggggcgggccgtgggcggggcggggaagtcgactctcgggct

SEQ ID NO: 46580 - DNA, 428 bp, Mus musculus
  source 1..428: mol_type = other DNA
cactgtgaaggtttaatactgtataaattgtataatgatctttggctgactgggaaaaaagccaacctacacatacaggggctctgactcacaacctgtttggcagtacaaaacctcctcggcagatgttttaaaacaatgatctgattttaaattcataacggtggcctttaaagctgtattaacattagctgggaggtacagtgggccctccgggtgacagcagggcgggcgggccgtggggcgggccgtgggcggggcggggaagtcgactctcgggctgaggctgccgccggagaggcatccacagcagcggagcgggcggccgagcggcggcgacagcggctgcgactccggtgagcgtggtgcggactcggctggggcgcggcaggcgctgcggaggcacaagggcctcccgggcgccggat

SEQ ID NO: 46581 - DNA, 303 bp, Mus musculus
  source 1..303: mol_type = other DNA
cggtccgtaattcaaccctggcttaaaggggacgtcccggggtggccccactcgggctccgaggctgggcggtgccgaggtgtcgccttcggccgaagaaagcggtaaccgcacttatttattttcaaacaaggggggcgccccttcctttcaatttgaaactagaaacctcggattcccagctttgctgcttgcagtctgaaaaaagcaaatggcttttggcgcgaaaggctttggcgcctcccctgatttttatggaaatcaagagggcggggaaaagcctcttgcctctgcctttctccc

SEQ ID NO: 46582 - DNA, 421 bp, Mus musculus
  source 1..421: mol_type = other DNA
tctatccatcatgatatatccattcatgttaatatttatcatctattttatagatgaatgaactggagcgcagagaagttctacgattttaggatcgcacagctagcctgtagcagggctagaattcaaacccaattacataatctattaacatttattaatccctttactgatccagctctctaaagggagggggtacttaaaataatttgcctgtcacgcctgaaatgtcagaaattgaatgaaaggaacatataccactaatttttccaataaaaatatttaacaggtaggttggctgggcaatgaattcaatgtattcttaagtcattccttggctattagggaaagtacaggccctgagtgaaccacccggagggtcttttcgtcctcgtccggaatcggaacaccgaagagctcg

SEQ ID NO: 46583 - DNA, 303 bp, Mus musculus
  source 1..303: mol_type = other DNA
aataggttattctacaggataatttctgaaaggtatcttgtgaattttcactacaacaatatatgctgaatgaatgaatgaatgaatgaatgaatgaataaccctctagggaatcaaggcccagggctgggcctgatggcacatctctgtactctgagctgacaagctctccttgttacaggcactctccgaacacgttctgtgtttgcagaagaatctgtacatgcttcttcagtgacttgactcatttcaggcaagacatatcttacaagacaaggccattcttagacccacagatctgtc

SEQ ID NO: 46584 - DNA, 269 bp, Mus musculus
  source 1..269: mol_type = other DNA
ttctagtcagatctcattctgcaaggcatgccacctgtcagacagtgcttagacactgggtgacacttttatctcattattctgaagcacctagaaattagatgatccatatctcattatcaataatagacctttaaaaagtttttacagttattgtgtacagtgtatagaattcagtttatccctttcaccctcaaaatctacattattttagtagcagttaatggagttatagcaaagaagttgatatttcttcaatcatgtctaag

SEQ ID NO: 46585 - DNA, 382 bp, Mus musculus
  source 1..382: mol_type = other DNA
aactcttccaaagtttaaggcagaaaagtttagaaactgtctagaatttccttttacggaagaaagtcactttgtatcatccagtgtccatgattcccttaattaggacagttttggaattgggaaacacgactcagggctgggtcagcactttcacttggctgtgactgacaggaacactgtcctcttataatacagaacacgaacgcgggcggactgtgttctcagttactagggactcggttgcaaaggagcagctgggtgtactagccacgcccctcttatgcggggcggagttccacccccagccgagattggcagggctcggggacgagtcctagccaatgggcgcgttccggggcgggcctggaaaacggctgtt

SEQ ID NO: 46586 - DNA, 517 bp, Mus musculus
  source 1..517: mol_type = other DNA
gagcccagagcccttggttacctcgcgcctggccgagccatccgggggcgaggctggcgcccccagtgggggcactgcaggagtggcggcagcagccctggccgccggcgggcgcaggggagccgcgcgcgcactggcagcggcgccgctgattgatgggctccgggctcaatgacaccgagcgcgagcaagcgaggcgcgcgcgcacacatacgcgcacacacagccgggctcgctctaataccgcctcgcccggggatgcgggcgtgcttgagcgccgggattggcctagggcgccgtggccatcccctttaatttttaaataataataagaaaagaagacaagccgtcgatttttatttttcctgcacaaaccccgccgtgcaatttggtcgcaaggcatcgttcggagtccggggagcatctgctggcagctcctgcaggacccccggaaagctcctgctgctggtacctgagcagcgacagcaagagctagtgctgaccgcgcgggctctgc

SEQ ID NO: 46587 - DNA, 379 bp, Mus musculus
  source 1..379: mol_type = other DNA
ggtaaagtcaagaggcttaagctgtggtctgaactttccccaggtctgttcaagccaatggtccagaaccttctccttggctaggagccaacatcctttgctgggaatccccaatcctataagcaagaatccttcattttttttaaagggcagatacacagtccagcatccctgtcgctgcagcgcgaacagcaggccaggggagcccagagcccttggttacctcgcgcctggccgagccatccgggggcgaggctggcgcccccagtgggggcactgcaggagtggcggcagcagccctggccgccggcgggcgcaggggagccgcgcgcgcactggcagcggcgccgctgattgatgggctccgggctcaatgaca

SEQ ID NO: 46588 - DNA, 194 bp, Mus musculus
  source 1..194: mol_type = other DNA
tgtatatataatttgatatttgtccttgtctcctagtagtctcgtgacacttaagagtgacttggtctgactttccctagcttgtagaagactttggctgcctactccctggaacgccaaggcagacagtccagtctggtgggctctgaaagcatcccagccccctggcgtcgccccggagactccgcctgaca

SEQ ID NO: 46589 - DNA, 414 bp, Mus musculus
  source 1..414: mol_type = other DNA
ctcacgccgcgcggcagccagaatccgcgctgcacccccctctttttggtggaaagggtggggggcggcagagcccgcgcggtcagcactagctcttgctgtcgctgctcaggtaccagcagcaggagctttccgggggtcctgcaggagctgccagcagatgctccccggactccgaacgatgccttgcgaccaaattgcacggcggggtttgtgcaggaaaaataaaaatcgacggcttgtcttcttttcttattattatttaaaaattaaaggggatggccacggcgccctaggccaatcccggcgctcaagcacgcccgcatccccgggcgaggcggtattagagcgagcccggctgtgtgtgcgcgtatgtgtgcgcgcgcgcctcgcttgctcgcgctcggtgtcatt

SEQ ID NO: 46590 - DNA, 333 bp, Mus musculus
  source 1..333: mol_type = other DNA
ggagcatggcagcatccaggcaggcatggtacaggcagagctgagagttttacatcttcatctgaaggctgctatgagaagactaacctccaggcagctaagatgagccaacaaggctatgcctttttttgtgtactgggattttgctgaagcctggcaaagccttctctgagctgtctctttctcagattgctcatagaaaaaggcttttaaaaatcacatggcttaccagcaatgccatccaggtgaacctcaatccaggctgtcctcccagttttggaggttcccagaaggagctggctccccgggcagctagcccaggctctgggcagt

SEQ ID NO: 46591 - DNA, 393 bp, Mus musculus
  source 1..393: mol_type = other DNA
gggtgacagctctgacactcatccagactggtcatgacaactggagagtacagtacaaaccaatgagttgtctactttggtgtgtatcagtggttctcaaccgtcccagtgccgagacccttctcctcatattgtgatgatccacaaccataaaattagctccaaacctatagggtttggaccccataggggttgtgacccacaggttgaaaaccctttggactttaaagggagaattttaacagccagccttttaccaacagcagagatagagtctgctgatcatcctaaaacctgggctcatgctctcacgttatcacagatatgagtagccatttctggcaaaagttaatagaggcagtgggctctctgagtgtggactcagtgagagcc

SEQ ID NO: 46592 - DNA, 250 bp, Mus musculus
  source 1..250: mol_type = other DNA
ttcctaattagaatagaaagtggggataggagagcattcctcaacctgcccattttgtgagcagttgctgtctctggcaagttctaaacactggctgctcgcagccacctctgtgttacaggggccaggcaatgggggcctaagtcccctacctctgtcgtgaactgcaggggtattgtcctcacgccctgcgccgggtggagctgggagggggggggggtcttgctcactggttcgtcctcccaacccc

SEQ ID NO: 46593 - DNA, 314 bp, Mus musculus
  source 1..314: mol_type = other DNA
aagttttgcctacatgtatgactgtctaacatgttaacatgtccgttctgatatccagtctattatattcaaaacagtagatttctgagttcggctacacagagaaaccctgtctcggaaaataaagtttgtggttttggaaattctactgagcatgtgctaagcagatgggagccccaccatcatcgccccggggcactcagaacctgcagtccgctggttgggactagagagcgcctgctccatcctccggaacacccgggcgtcggcagcgggcgaggaccggtgtgcgcgggagcggcgctgcgcatgtg

SEQ ID NO: 46594 - DNA, 581 bp, Mus musculus
  source 1..581: mol_type = other DNA
tctgtgaacagttttatagctcttggcacagggcaggaatgcggagaagcagcccctctctttcactctccagggccccgcggatgcagaagcgcttcaggccaggcgcactcttagcgcgggctaggggcgcggcctccccgccccctgggagccccaggcgcaggcctcaggcgcaccaggcctgggaagggcgctgacccggggcgcagcagttcggcgcggcttgcatagctgcgcgctgagtcagcgggacacagcgggcggggggcgcggacgtcaactaggcctctgggtccggccggcgacgtgggacacacgacggggaccacggggcaccgcgctgccatccgtcccgcctcccagtcccgcgaaccggcccgacgaggcagggagactagccaggcggaagaagcctggctgctcagcccggtggcggggcgtggccggaggccaggggcggggcgtgccgcggggccgcgccggggtgggcggggcggggccgggccgcgcgcagccgaccgcgggcggaggggcttgtgggtagcggcggcgcgcggccgagtagggacgcggctccg

SEQ ID NO: 46595 - DNA, 748 bp, Mus musculus
  source 1..748: mol_type = other DNA
ggcaggaatgcggagaagcagcccctctctttcactctccagggccccgcggatgcagaagcgcttcaggccaggcgcactcttagcgcgggctaggggcgcggcctccccgccccctgggagccccaggcgcaggcctcaggcgcaccaggcctgggaagggcgctgacccggggcgcagcagttcggcgcggcttgcatagctgcgcgctgagtcagcgggacacagcgggcggggggcgcggacgtcaactaggcctctgggtccggccggcgacgtgggacacacgacggggaccacggggcaccgcgctgccatccgtcccgcctcccagtcccgcgaaccggcccgacgaggcagggagactagccaggcggaagaagcctggctgctcagcccggtggcggggcgtggccggaggccaggggcggggcgtgccgcggggccgcgccggggtgggcggggcggggccgggccgcgcgcagccgaccgcgggcggaggggcttgtgggtagcggcggcgcgcggccgagtagggacgcggctccgagtgggcgcgcgaggcggccggcggcgatatgcgggtggacgggcgacggccctagcggcctgagccccgagggcggggtggtgcggcgcgggcgccccttccccgctcccgcccgccgggtcctggcgagctcgctacgggccgggcggcgcgcgtgcggctgaggggcggggacgccgtgtgcctcgctgctcccg

SEQ ID NO: 46596 - DNA, 333 bp, Mus musculus
  source 1..333: mol_type = other DNA
caagcttgtaatcccagcatttgccaaaagaaggtgttagttagttagttagttagttagttagttagttagttcacaggaaaaaggccctgggcccacctaaccttccactctgggaggcggcagtgcctgacagggcagggcagaaccaccgccctggggtctggaaggaccatcccgagccaagccaactccgagctgggtgcgctaggagcggagcagactggggcggggtgcgctccgagcggagcagactctgggcggggcgcacgggcggagcgcacttgctgcacagcagctcggggcgtgatcagggcgggacccggccggcgg

SEQ ID NO: 46597 - DNA, 342 bp, Mus musculus
  source 1..342: mol_type = other DNA
cattctccctagggctgcagccttcaagggcagggctgggggcccaggccattagctcactgggtgcagtggctcacaaccatctataatatggtctgatgccctcttctaaaataaataaataaaaatttttaaaagatccctccatggctttatgatattccatcacagcaattaaaagggaccctgagttctccaccagggggcagcacagggtcttgctctgcggactctcccgcccaggggaagagctgggcaaagccatctgcaccccaccgagtggctccgaagtctttggagggcgcacagtgggtccgccccttccgcatgcgcacttgggag

SEQ ID NO: 46598 - DNA, 344 bp, Mus musculus
  source 1..344: mol_type = other DNA
caacaagcagttttagagtcacagaaaatttgtacagaaaaatgcagtttccacagtggaggaaattccaggaatggagtgacaagtgtgaatgacatgtttgccaccacacacctagcctaggatagcttccacctctagaggttgccctcctttcctaagtgagggaaagcttggatcatagtttatgtggtacgggataaaagggccggcccagcttatgtttttaaatccaattccaggccatagctagatccagggttgataaccccgatggtcaagaacctggatttgaaccagagatgttcttgtcctgctggaagctagcagctaggctagcagga

SEQ ID NO: 46599 - DNA, 512 bp, Mus musculus
  source 1..512: mol_type = other DNA
tagcctaggatagcttccacctctagaggttgccctcctttcctaagtgagggaaagcttggatcatagtttatgtggtacgggataaaagggccggcccagcttatgtttttaaatccaattccaggccatagctagatccagggttgataaccccgatggtcaagaacctggatttgaaccagagatgttcttgtcctgctggaagctagcagctaggctagcaggacaagttgtggtacaaggtcacaccaccgcagtgcttaggagtgtcaaggacttatccagggcctaccgaagcctagaacagaggttctctttcctctctcacctagctgggcaggagggatttggcagcctgagccgggctggccttaaagctctggatcttaacctctgagccctcagactcagcgggtggcgccggtggcagggcggcggcagctgtgcaggtctgcccaagggttaactcattcctgggcagctgcagcgcgtgcggtgcgaaatctcac

SEQ ID NO: 46600 - DNA, 212 bp, Mus musculus
  source 1..212: mol_type = other DNA
tacttaagcttggtcttagtagaacctatatttatctatcagtcagtctgtctgtctgtttcgtgccagggcacccacgcagactgtagagaagcctctcctccctgcaggtatactccctggagcagctgcagctgggggaccctccttctgcgggcagcccgtatatcagaggggcccaggattgcccctcccgctgggataaaaggcgg

SEQ ID NO: 46601 - DNA, 484 bp, Mus musculus
  source 1..484: mol_type = other DNA
gccctttcatcactaattgagaaaatgtcctactgttggatcttatactctagcttgagtcaagttgccataaaactagccaccatagtcaccatgctgtgttttggtgctaacagaaaggcatcccctgccattatttttctatgttagccttaaacacctttgtaaatattgcaaagcaagataaaccccgcagtttatactctgagggtccaaaataaagtttggaatgatactatatacagaataagtttggcaaatggttttcactgaatgctgagtccgcgaacaggaagaaatgaggaccccttagtcctgggttttttgttttgtttcagttaactcagaaaaaaattagggcgcaggaacagggccggaggtcccctgaccccgccccggccgctttcaattggcaggcggccacggcgtggcgagcccttccggcccgcctccgcgcgccggcgcaccgcccgctagaagccga

SEQ ID NO: 46602 - DNA, 360 bp, Mus musculus
  source 1..360: mol_type = other DNA
aggccttggtaattctccagtctcagtcttttagacactagaattttcgcttgggaattggcaattcctcagtctctgtttgaactttaaggggctgacagggacctgcaactcagacctgggagtccggggactgtagcacagaaaagttctgtagcagatcgctctgctcagaaagaaaaggcttcccatggcccaggggagtggtttcacatgactttggagaaagcattacttaaccactcgtcttttcataatgtgtttggaagaggaaatggtaagtggttataagcctctagtgcctccgccctggggcagcctagtgagcgcgcacttccggagccaggaagtgcgtcatca

SEQ ID NO: 46603 - DNA, 634 bp, Mus musculus
  source 1..634: mol_type = other DNA
tatacatagtatacatagtaacaaattgtatactgaatatgtaagtcagccacttgttctttaacaatgtaactttggtggatacaaatttacagagacagctggtggctgtccaccacctacccttgcttagatagaaggcgtacttagcatgcaactgatgcctaacatctagttggaagccaccaacataacggccgggtcagccacagggtcgtgatgcagggtcagtctgcgccaccaagtctagtctatgtggccggcgcacagcaagccgaggaagaattttgctatccactggcgaccaggtacatgtgcgcatgcaccagccgactcccgcccgctgcccatagggccctgcggcatgctggcagccaggactggtgatgtggtgcgcgtgcgcaggcctgccgcagggcgtgtccgacacgaggcccggcggggagcgcggggcgtatgggcgggtgggtgggcacgcgctgcgccccgccccactgacgcgcccggcccgcgtcccccgcctccggcgccgggacccgggttggccgccacggagtccccgcccctcccccgcgcctcccggccggaaccgatcgcggctggtttgagctggtgcgtgacgacgtgctgcggc

SEQ ID NO: 46604 - DNA, 360 bp, Mus musculus
  source 1..360: mol_type = other DNA
gtttagccacaattgctctgtgtatatgtctgggtccgtgtgacagacaaccaaagcttgtatgccttgggggaccttcagatggacggggtcagacccagcccgcttcaggctttttgaagcccacaggccttttcagggccggcctggatccctagggagacaagccctcatctccaaatttgaaatctgtccacttggccggtcagggtgtgaacgggctgtgctgttgggcagctggccagccaggttaacagcctcagactggggctgaggacctcacagactgagtttgtggggctcaggacctctcagagatgggagagtttaaacacgtgttctctccctcttgcagactgc

SEQ ID NO: 46605 - DNA, 275 bp, Mus musculus
  source 1..275: mol_type = other DNA
ccaagaaggattctggatctcctcgttgtcctaattacagctggaacgcatcccagatggtcctggggagcctagggcaactcaagcctccacccctgcctggcgtaaggccggcccttttgggcaccgcctctcggcctctccccacccgcaggccagaggccaagggttagggaggtggggccagtgctcggcccctcccctgctctcctgctgagcaggctgcggctgaggcgggggcccgcgatgcgccccgccccggcctccgcctccgg

SEQ ID NO: 46606 - DNA, 320 bp, Mus musculus
  source 1..320: mol_type = other DNA
tctagagtatctgaagacagtgtacacacatataataaacttcttaaggctgtgagaaggagcacgggtgggctcccttccagcagggaagccagtatccccggttcactctgagcaatgttgccggagagggcgcgctctcggcggcccacagtcactgctggtggcgcggtagcgacgggcgacccgattggcggccaggcctgcgccccgccccgccgggcgggcctccgcgccctccccatccgggccctcccctttagcgggaggcgtccgggacagccgcttggtggcgcgcagttcccactgactgtgcgctc

SEQ ID NO: 46607 - DNA, 331 bp, Mus musculus
  source 1..331: mol_type = other DNA
acatgggagccttaaaaagattgactggtctactgtcctatggcagtaggagcacacaaaaggtttttgtaaaaccatgcctttcagaacctctgggtttttaaaatacagttgagaatttctgaatgagctatagacgaaaatgtcctaattcagatgatttaagcctggcctagcaccctaaaactgtcttcaggtaatccaccaggtgggagtccggcactgcagcccaggagagggcgcgccgcttccgggctgctgggtcgcggcgagcgtcccgattggcggccaggcctttgccccgcccctcctggccggccaccgcccccag

SEQ ID NO: 46608 - DNA, 311 bp, Mus musculus
  source 1..311: mol_type = other DNA
acgaaaatgtcctaattcagatgatttttggcccagttgtgtctgatcaatcaccctaaaactgtcttcaagtattccaaattcccattcggcaggcgggtgggctcccctcaagccgggaagccaggatccccggttccacggggcactgtatcccgggagagggcgcgccctggaaccacgctgacaggccgggagtgcacgtcggcaacgctgtggcagcgcgcgccccgattggcggtcaggcctttgccccgccccgccctggcggcccccgcccgtcccgcccctctccgagggcggcgtcgagg

SEQ ID NO: 46609 - DNA, 368 bp, Mus musculus
  source 1..368: mol_type = other DNA
gtcttcagaaactctgggtttttaaaatacagctgagaatttctgaatgagatatagatgaaaatgtcctaattcagatgatttattggcccaattgtgtcactctctgagaactatcaccctaaaactatcttcaggtactgacttcttaaggctgtgagaaggagcacagggggctggtgggctcccttccagccgggaagccagtatccccgggtgcggggtgggagccgggcaccgcagtccaggacagggcgcgccctcgagaggcctccgcttcctggcggcgcggtagcggcgggcgacccgattggtggtcaggtctgcgccccgccccgccgggcgggactccgcgccctccccagccg

SEQ ID NO: 46610 - DNA, 382 bp, Mus musculus
  source 1..382: mol_type = other DNA
cagaacctctgggtttttaaaatacagctgagaatactctctgagaaccttcaggatcagtgcattctatgatttcaccctaaaactgttttcaagtaactgggttcttgaggctgtgagaaggtgcacagacacatggtccctacatcttggccgggggcgggtgggctcccctccagccgggaagccagtatcccgggttctggcgggtgcggggtgggagccggcaccgcagcccgggaaagggcgcgccctcgaaccccggcggcacacagccgctgcggcctcagcttctcggcggcgcagtggcggcgagcgccccgattggcggccaggcctgcgccccgccccgcccatcgggccaccgccccctccctagtcg

SEQ ID NO: 46611 - DNA, 344 bp, Mus musculus
  source 1..344: mol_type = other DNA
aacacgtgtattggatgagtctctatggtgatgaaaggaggcgaaaggcttgcatgaaaacacccaatgacctggattttttttccccaaaaaaatgaattcaacctagatagacgatcactgagaggctggacccgcagctgcctccgcgggggtccctccaggctacatacggggaggggggctcgctccctctctagcatccgggcagacatcctggcagtctcaggagcagcgtggaccacgaactcgtcggcgttcccggagctagattcggccctccaacttccggttcgagaacgaggttctttgcggcctaaagactgcgcctgcgcatgtggccc

SEQ ID NO: 46612 - DNA, 565 bp, Mus musculus
  source 1..565: mol_type = other DNA
aagaaagccttccttaaagacatcagatcacagcattaaaatgtcatcttcttctttatcaactaactagtgcaaggcgaggctgaattggttcagatagagaaaccgctagccctcactctggcccatctggagcagccggtccctagggtcatcggagccttccgagccagctgcattcacgtgagtcaaccaagcttacttggggacccctccaaccccacctgggtgcagcaacaagcagagggaggcctcagggtcttgcggagcctggtccccggggaggcaggcggtagacctgtcacgggaacgcgggtccctccctgaccgggcgccgagggagggaatgggaggacggcgggctgcggggtactccccacacacccgcaccctctggcccggctgaggcgaggcccggttctcacctcgcctcctcggctcgttccccggtcgccccggtctcgcggggtgtgggatggtccagcggcggcggccgggccacatgcgcaggcgcagtctttaggccgcaaagaacctcgttctcgaaccggaagttggagggccg

SEQ ID NO: 46613 - DNA, 487 bp, Mus musculus
  source 1..487: mol_type = other DNA
ggtggctcacaaccacccgttatgagatctgctgtctgaagatgagtccagcccctgtgctggacagtccagggttgggctatctatgtaaaatagctcaagggagtgcttcaaggcaaagaacttctgtaaacgctaaatctgacttccttaaaatgaaatttctataaaacagccaaattcccatgtttttggcctataccaaaagatacaaaaatttattacataaaactagaaatttccttttaatgcggtctacagtgagggtccctaatcaagtccagtactggaagaggaaatcctccacttgggcatggccaccacagctatccccagtctcggagaggcggggttggggtgaaccggtggcaggactcacccggccggggacactcgcttcaggagacctgagggggctcaccccgcccacggctagccccgcccgcagctagctccgcccacggcgcgaggctcctccacatccggc

SEQ ID NO: 46614 - DNA, 295 bp, Mus musculus
  source 1..295: mol_type = other DNA
agcatgcatacatgctttactggaaaagtagtaaagaaatgtttaagaaatatttccataagggaaaatttgtagccgaaacaggaaaattgtaagggttgcattttaatgtcttcaagtccagctgcagccgcagcagctcgagagctgcaacgccccatctgcagtggttgctgctacaggacacgcggtcgcagcctcggaggtcgaaagcacctccggtcccgtgccgcacccaggagtgccgggctggcgggcagcctgggcgagctcgtcggctccgtgctaggctgag

SEQ ID NO: 46615 - DNA, 484 bp, Mus musculus
  source 1..484: mol_type = other DNA
acaaaaaaaagctggcatctaatttgtgggggtgactttcttttttattccttgaatgtgtacctagtgaaagtgtttatacctcggttgtacagactagtttagctaactgcaaagtcagtaactgttgaaaatgttgcaagacattccacaacgaacaaatttaaatcagtttatctttttctggaagttgcataagtctatgtacacagcacacccgatccgcgtggggcggatctccagggcactgtgacccttcaataaagacgctgaaggggacttcccaccttcgttccccgcggtcacccggggacagaggcgagaatggcgttctgccggcgccgcgccggggcggggcgagccacgcctcccagcacctcttccggctgtgggccgcggggtggtctccggctgcggccggaaacgagttaagccgctctcagcgagcgccgcctgcacttccggggacgtgagcctagcttcc

SEQ ID NO: 46616 - DNA, 568 bp, Mus musculus
  source 1..568: mol_type = other DNA
gccccctaccacgtttttgtaggccaccgacagcaggttggacagctcggcgccctgctccgtcacggctcatgcaggtggccatgtcgtcgtagcgctcggcctgctcggccagcttggccttctggatcagctcggtcttctccatggcgagcgagggcgagcgccgagccggatccggagtcctcctgagagccgcgaggggcggggcggggcggcgccggcgcagacaatgcagccggacgcccgctttgtctcagcgcacgaggcggcgcgtcctccggcctctcacggggccgccgccttccgcccgcgccctccggcccgcccgccgcgcctccccaaggccggagcgcgggccccacccggcccaagatggaagcggccgttggtgccgcaccttcccgtcccagcccgaacctcaggcgcggctccgccaacccggcctcggtacctcgcggcggctgttgcagccgcagtcccagagctgtgtccgcactcaccttctagtctccgcagccgcgacgcgctcagcctagcacggagccgacgagctcgcccaggctgc

SEQ ID NO: 46617 - DNA, 354 bp, Mus musculus
  source 1..354: mol_type = other DNA
tcttcagaatctctggatttttaaaatacagctgagaatttctgaatgagatatagatgaaaatgtcctaattcagatgatttactgaggaccatctgtacctctggtcagggtgaaggcttcttaaggctgtgagaaggagcacagacaggtgggctcccttccagccgggaagcagagccgggcaccgcagctcatgagagggcgtgccctcgagcaactcagcagcccacagccactgacaggccctccaaggcctccgcttcctggcggcgcggtagcggcgggcgacccaattggcggccaggtttgcgccccgccccgccgggcgggcctccgcgccttctccagcct

SEQ ID NO: 46618 - DNA, 377 bp, Mus musculus
  source 1..377: mol_type = other DNA
cttcagaatctctggatttttaaaatacagctgagaatttctgaatgagatatagatgaaaatgtcctaattcagatgatttattggcccaattgtgtctcagggtgaagcctgcttcttaaggctgtgagaaggagcacagacaggggctcccttccagccgggaagcagtatccccggttcccgcccgtgggagccgggcaccgcagctcatgagagggcgtgccctggcagagcaattcagcagcccacagccactgacagccaaggcctccgcttcctggcggcgcggtagcggcgggcgacccaattggcggccaggtttgcgccccgccccgccgggcgggcctccgcgccttctccagcctggccctccc

SEQ ID NO: 46619 - DNA, 377 bp, Mus musculus
  source 1..377: mol_type = other DNA
tcttcagaaactctgggtttttaaaatacagctgagaatttctgaatgagatatagatgaaaatgtcctaattcagatgtttcagggtgaagcctggcctagcaccctaaaactatcttcagaaggggggcgggtgggctcccttccagccgggaagcagtatccccggttcctggcgggtgccgggcaccgcagtccaggacagggcgcgccccaggccctgagcgctcatagccctccttgctgaggcctccgcttcctggcggcgcggtagcggcgggcgacccgattggtggtcaggtctgcgccccgccccgccgggggtcctccgcgccctccccagccgggccctcccctttccgcgggaggcgtccagg

SEQ ID NO: 46620 - DNA, 462 bp, Mus musculus
  source 1..462: mol_type = other DNA
gtcttcagaaactctgggtttttaaaatacagctgagaatttctgaatgagatatagatgaaaatgtcctaattcagatgatttattggcccaattgtgtcctctgagaaccatctgtacctctggtattttctcagggtgaagcctggcctagcaccctaaaactgtcttcaggtaactgggagtgtcgcttgtaccatggtgaactcgcttcttaaggctgtgagaaggagcacagaagggggcgggtgggctcccttccagccgggaagcagtatcctcgcatcgcagctcaggagggggcgcgccctcgaacccccagccactgacaggccctgagcgctcatagccctcctggctgaggcctccgcttcctggcggcgcggtagcggcgggcgacccgattggtggtcaggtctgcgccccgccctgccgggcgggcctccgcgccctccccagccg

SEQ ID NO: 46621 - DNA, 346 bp, Mus musculus
  source 1..346: mol_type = other DNA
aagaatttttagtagacatgtctctgacttcaaggccaaaacagatataaatgttcacaaaggtggagacttattttgttcacaggaaaatctaaaacaactttagttgataaatgtattaagaatttattaaacgagacataattatattcataggcaaacatatattttttagtgaatttcaaatagacaaccagttctagttcaacaacctgtgttcaaacactgagaacacattttgtcacgcctttaatcccctctgtcactggggcctggtcctggtccctggaacgcaaaggcagaggctgtgtttccgaccggagcgctctccccgtctctcccggaa

SEQ ID NO: 46622 - DNA, 331 bp, Mus musculus
  source 1..331: mol_type = other DNA
tgacgaggcaggaaaattagatgccctcaggaggctggtgcaaagaaattccctaggtatttcccaggcagaggccttggggctgaaacgcgcccacgcgggtgtgcgccgaagcctctcggcgccggcggcactaccggccggcgccaccggggccagccgcgcgcaagctccccagcgccgctgagcaccgccgagcaccgcgtggcccccgccctccggtccgcccccagcaatcaggaggagctccctcctcccagttccagaagctccgccttgggccggagctccgccagccaatgggaggccgagcccagcgcccagtgcgcgc

SEQ ID NO: 46623 - DNA, 459 bp, Mus musculus
  source 1..459: mol_type = other DNA
aataggcagctgtctgctcatatcagcaatgatagctggcacgacatactgcatgcattgacctctgctctccaagacttgtgatgagtgtacaggtctcacgtaggcctgaggacaccccaagtgggtgtcctttgtatggccactgggggggtgaggccgtccctgtgggtcccacggcgtggggccagcgcgcgacctctgcgagcagcccctgcggcagaagaggaccttactgcggtcgactgccgccgcgccgccgccgggaccgccgccgcccgccccgccggatcacgccgcagccaggctccgatcacgcgcccccccgcggcgcccattggcccgcttcttgccggcctggcgctgattggctggcggcagaggccatgcccccagcagggagcgcccgcgcgccccgcccagggccgctccctccgtggcgccccgcccctcccgcgc

SEQ ID NO: 46624 - DNA, 390 bp, Mus musculus
  source 1..390: mol_type = other DNA
gactcctgtgcaagcaaacgtgttttcttttaaatgattaaactgagttgaactttgctcaaggaaaaaattcattctctctgaatgaatttcaagatgagatttgttttcataaagagaaaacttacgtcagtaatctctagatgaaaatagtaaaattttatgcctccgttggaagaatttcacccaaattcttgggttggggttattgggggtatttaaatcaccctgcgggtcgccccagtcctgtagaaacctcgtgtgacagctttagtaaccagatctgaagaggaaggtcgtctttcgacctctaaattcaccctgtccgggccggggggtccgagtccctgtccagggacacgcccttcagtgtgccctgcccagggcctc

SEQ ID NO: 46625 - DNA, 403 bp, Mus musculus
  source 1..403: mol_type = other DNA
gttttgtccccagcatcaataaattgtcacaagcagaggggagcctcccctcgtcctcttttaaaatatttgacctgggagagtcagtggagccttcccaggttccacggattcgtctttagactactggacgcccagagtcgtaaaatgcaaggctgcatccgtacccctcgggacccgggtccggcaacgcccgcccggcgaccccctgcgcgctcaaccctaaccggttccggccccgcgagcgcccgcgcacccggccggcgcaggctccttaaaggtctttgtgcggaaggcctgcggcgcaactcaaatctcccgcgctgggcggcgagcggggtcagcggcgtccaatgggaggcgaggccacgccccctcggagcgcgcggttgggtggctcttg

SEQ ID NO: 46626 - DNA, 684 bp, Mus musculus
  source 1..684: mol_type = other DNA
ttccaaatccttggattttgagaggaactgccctcctggaatggaggtgtggacacagcagaattcacatctggcagagaggctcgcaggcacgaagggatgcttaccagcagcctttcctttgaggagccgctggctacccaggctttccctcgggcgctgcccaggtccgacctgtttccctctcagctggatgcgcggtgagggcatcgtcccagcgcggccgatcaggcccaggtgggcggcgggtgaggtaggaccacccggctttccgcaagtttgggcagcccaggagacaaaggcactttctgctttggggttaccgtcactgccagtgaggggtggggacggcgcccaccattcctgagaaaggccagctagcctgactctcggtcgccctcgggcgacagccatggtcgagcctcagcccctcgctggggtcctcagcacggaggaggggcgcggcgaggccagcgtcctctgattggtgggagtcggggcgccgcgacgccattggaccgcggagctgtctggcgcacgagtgcgcgctggaaatcgggccgcccggcggcgtgagggggccgcgcggctgggtgggcggggcgcccagcagtgggcggggccactaactccgcccactgcccctccccgcgcggctgctccgaccgcgggcggccgaggggc

SEQ ID NO: 46627 - DNA, 500 bp, Mus musculus
  source 1..500: mol_type = other DNA
ctgactacagattgatttgtaattaatccccagctcagtaaagtagctgcttgcgtcacaatggctgacatcttgactcttttaattaaaacaacttgaattattactatcttcacccacaatttaatcctaaattagggtcagtgaacattttctctaacaagatgagatagtaattattttaggcttctatgactgctgtaagacaagaacagccattgtggtacaagggccaaataaaaatatatttatatatattaatatatttataaaaccagacatagccttttttccttaaaggctaaaatggatgatttgattttaatgaccagatttatcttattcttagtattgtaccattgtgtaatatttccaccattatactgcagactttgtcctaagtgtactgagtaatacctacttaaaggatttaagaaattccattcttcaaggtagcatccagacagatgattaattgactggctaatagacatgagtct

SEQ ID NO: 46628 - DNA, 259 bp, Mus musculus
  source 1..259: mol_type = other DNA
gtgatatgtgagataactttccacttcctgtaatatcggccatagccctttgaagggaatctgcggaggcagtgcattcttccgaggcagatttcggacttctggatgcaaagtaaattaactttcaaaaatattgcctggggcacctgtgaaaaatacctgcttgggcgactttgactctgtatcaaaaccaaccgcaatgtttccattcctttaaaatagagggaagggcgtcccccctccaggaggcgtggccaca

SEQ ID NO: 46629 - DNA, 523 bp, Mus musculus
  source 1..523: mol_type = other DNA
ccgggcggggaccccgcgggctccggggcggcgatgggcgctgggtgacggccgcgtcctcctggccgcttgcacttggggatcgcgcgccacggagaagtctccagccgcaggcgctgggcggccgtctgcaggccttgggtggactcccgccgtgacctggacatgggcagagcgagggcgtggggaaggtcttctggccagtggcagtcgcgagtaccccgcagtgcttagccgcgcctggccgtgggcatggtcctctgctagcctctggcccaggagtctccgctggccgccgccgttgcgcgggaagaggcgacttcttcacagagaatactttaaagtatacttattttgacaaggctctgggaaaccttcccagggttcctgtgtcctaggattagaaggacagtccaatcttgcttaggacagttctaggaaggaagggccttccaggcgtggtgtctgggagacaggtccttctcaatgaccccggccagggtagtagtttagagtgccctcc

SEQ ID NO: 46630 - DNA, 449 bp, Mus musculus
  source 1..449: mol_type = other DNA
ttccaaagtaacagaattttcttttaaaaacaggcttcacgatttgtgcataattaatcgcatcacttacctacactgaggcacagaccaagggcagtgtatgtaaatgtagttccagtgtgcaactaatgaccttcgattaatggagtcattatagttccgaatgcaccgggtccctcggggctcctctgcggtctgagggagaccgcacagccgcttgctccaagtgcaaagcttcgtgggtaggttcctttcctttatcttaaaagaaggaacactctgggggcgggtatagctagctccgggcacacccccggggcaggggtcctgccagctctggaattgcacactcaggccccctgggcgcccagcgcacactgtttgggagaattcgcacgggagcccttccaccaatggcaattcagggatgcccgacaacataaaagacg

SEQ ID NO: 46631 - DNA, 597 bp, Mus musculus
  source 1..597: mol_type = other DNA
gcacagtgtgaggccctaactggctgtcagagccatctcctgctgcttcatgagctcaagagttagcttaagatgctgatacaaaggtatcttttgtataatatatgtagcatgcaaattgctctcaggtaggcttctgcttaggagcaagctactagcaaggagctctatgagaatcttctgatgccctcagggtaggaagggccccttatggagggcccattgtggccagagagacattctgttggtgacccagagatgctctagagagcagcttccagtttgctgctcgtgatgaggactgaatttcattggcagacagtttttccctcaaaggaaggaaaaccatagcatttcttcatctttcagacaatggggcatcctgtcctcatagcccgtgggttctcaggcttccaagggctcagcgacctctaggagatcacttctatacatcactgaaaagacatgacagtatttactatcaagtttaattgcaaacaaatttcagaattaaataggcaatattaaaataacttcacaatttccagtgtcttcttactattacgtttagagattgaagaaaactcttgatttaat

SEQ ID NO: 46632 - DNA, 286 bp, Mus musculus
  source 1..286: mol_type = other DNA
gctgtttggacccaaagtgagagaacgcacacaagtgtggtgtgtgtgtgtcaaaaggttcattgcaagataataacttatgggaattcccatccactggtggatcttagtctaagggaaagaaacgaatgctttggcttgtgcttcatatatatgcacagagcctcagcctcaggaaaagatggcaggttctggcaagtccagagacttgctgtaatttgcatagcttctagtattgaaaacaggggtccaacacggcagggggcgctggcgtgcaaactggctc

SEQ ID NO: 46633 - DNA, 544 bp, Mus musculus
  source 1..544: mol_type = other DNA
caaaaggttcattgcaagataataacttatgggaattcccatccactggtggatcttagtctaagggaaagaaacgaatgctttggcttgtgcttcatatatatgcacagagcctcagcctcaggaaaagatggcaggttctggcaagtccagagacttgctgtaatttgcatagcttctagtattgaaaacaggggtccaacacggcagggggcgctggcgtgcaaactggctctgcctcccgcgcccgcgcttagtgcgcgctcgcgccccgtcgaccccgcgcgcagttctcagggcgcagggcggggaggcataaagggcgctgcgctgcggggcgggctgcacgcgggaggctgacggggcagcggcacccgcgagccggcaccgggcggggccatcacagccacgcgcaaagaggccgagcgggagcccggaccgcgcgggaccaggtgggtgacgcgcgcgtcccctttgtgtcggcatcgcccgagcgggccgcgcgggataaggctgtgcggggctggtttcggccccctaaccc

SEQ ID NO: 46634 - DNA, 397 bp, Mus musculus
  source 1..397: mol_type = other DNA
tgttattagaatacagtctgtttatttttctttcagtttgactgaactaaaaagggagtaaaaagttcggttctcagaggagcaaggtcccatttcatttatatttgaatttttgtgtggattttattttttgctaactatgccaattttgtcaacaggaaactggaatattggactttttactcaaaagtgtagaatcaaggcatagagccttaagttagaatcttactcttatggaaggagttatttcctagaacagtgctgcttcaagatggctgctttatactgcagcaattccacttctgcagctgcaactgccctggcattgaggctgcttgagtctctcatgctgaaaggttgtcacacttttctgaaaagctccaaggccatgtggcac

SEQ ID NO: 46635 - DNA, 328 bp, Mus musculus
  source 1..328: mol_type = other DNA
accattgcctacagcagtagtcactcatggggtcagcccatgccatgccccattttcctgtctcatcaatagggacattgaggctgttgttactgaagcaggttaagtgttacccaaaaccctttagtgggtagatatgtttgaccaaacagctggctagggcatcaacatctatgcagtgacatcattgctatagcaggatatcagattacagggtttaaatagctgtatatcctttctacaaggagctttaagagaataaataaagtatcttcacacttaagatgttgattgacttaactgactcattctgctcaaaatgatggct

SEQ ID NO: 46636 - DNA, 572 bp, Mus musculus
  source 1..572: mol_type = other DNA
aggagaggcccttggtcctatgatggtgctatgccccagtatagggatttgaaatgtaaataaagaaaatatctaataaaatatatgttaaaaagtagcttaaaaaagaatataaaagaagaaaacatgagaatatattgtattattgtattattatattgtattcaataaaaaggttttaaaaacataaaatgactaaatttactttgccaaatttctctgtaatgttgccaggcactgtcaaggtcaactgacttgctacataccaagctataaacataccaagttacaaaactctagggttttggtgagtaatatttaaaaattgttgagtgtgcatagataatcgttgtaagaggcttaatgcaaatattttgtttgtttgttaaaataacagcctgcaaggatgcagctatatgtctgtctgtaagaaacttgtttcagaaactcgtggctgctggaattcttaaggaaaggcagtgagttggattttcagaaaacagaaactctgtttaactgagtcaagggaggtgtttccctcctccttgtgacacgggccacagtttataagc

SEQ ID NO: 46637 - DNA, 393 bp, Mus musculus
  source 1..393: mol_type = other DNA
gctcccagggtgttccacctgcctgctgtctctctgagcagccaccagatacctccctctctggaggaggctctgggtggtttcacactgcagtaacttctttataacaaattccctcattttaagatctcatagcagccaggcttttttttagaaaaagaatttatttttattttatgtataggagtacactgtagctgccttcaaaagaaggcattggatcccactacgccaccatgtgtgagtgctctttctaggatgtcctagtatctgtattttctgaataaataaacatctgtcttgaagagatacaacgcaaattcaaattgtagacaacagctgaagaggcctgcttcagccatggtcccttggtctctccagggaccatcacaa

SEQ ID NO: 46638 - DNA, 416 bp, Mus musculus
  source 1..416: mol_type = other DNA
ccaccgctccagcggcagcccttcgctttaaacgagagtgcacttcattttagccccgggctgtttcaccgatccggcctgaatccgtgaactcctttccgaaccgctccggagccgcccggacacggcggtctccgaagacgtgcacggtgccgcgcggtgtcgaagcgccaccttctgctggatagcggcgcagcgcgatcgcgcgcgggtttagggcgcgacgcgcccaggatgagcaggggcacccactcgcggtgcccgggtgggtgcatctgcactgcgctccgtcctgcatccgcccgggggacacgcgcagctgtgcgcactcgcggatttcttttgaaaaaataacatatttctagacactccccccgccccccatctttgcaaactggccaggaggcggggctggt

SEQ ID NO: 46639 - DNA, 367 bp, Mus musculus
  source 1..367: mol_type = other DNA
gttgtcctgaagctacacgccagcagtacagcttccctgatggaggaccccgatcaacctcctaacaggctctcaggagtagttggctgtcttggactcactttgtagaccaggctggcctcgaactcagactgtgtgtgtaagcaggtgcatgtgtatgcagagattcatacacagtctcagtatgcatagtctaggctggccgaatgcaggggggtggggttggctgggctccccagacacccctttggcaggcaggaagctcttgcagataaggctgcagcctccagcagattcgctgggctgtctgacatcccaggcagggtttctctctgagctggactgcagctggtctctgtaaataaca

SEQ ID NO: 46640 - DNA, 173 bp, Mus musculus
  source 1..173: mol_type = other DNA
gcaggcagaagcctggccagaccaagcctgccttcacagtgatcctggacatgttctagtaaaaaccaggaattaatgactattaattaacactacctcacttctttgtagaccaggctggccccaatgaaacatttgaaacgtcccatcttcgtggggaaggaagctgcttt

SEQ ID NO: 46641 - DNA, 419 bp, Mus musculus
  source 1..419: mol_type = other DNA
tttgcaaaggctttcccaggggagccaatgccatttcctggtgggcagaaagtatgtctgtggcacaaacatagatgcaagcaatacataaataaacaactgatttctaaaggaaagagaagggtagagttgctttacattaaccattaaagggaaattttcccttccctattttttctttatatttagaaaaacttttcatactcatgacttcaaggaatatacatttattactttaaaattgcatctatggtggcaagtgccttcactttcaaagtcgccttggtagtccctaaggagtagattttaaaattttagaaattatatggccagagtgttgttatgtattcatgacatcttctcactattctgcagagttgggcatcctagacctctccgcgacgggcgcctcgcgacgt

SEQ ID NO: 46642 - DNA, 248 bp, Mus musculus
  source 1..248: mol_type = other DNA
tatatgtcagacaccagaagagcagtcagtgctcttattaatcagattttgaagaaacacaagagcaacagatgcccttaactttattttaacagtcatgttaacatagctagaatcacctaggagtgattgcattaatttaaaaagaaaggtgaacacacatgcattcatttgcctttgtaagaatattttatcatagcatttgcaagccgaggaggctgtggatatgccaccaccttctccagagg

SEQ ID NO: 46643 - DNA, 203 bp, Mus musculus
  source 1..203: mol_type = other DNA
ggctgtcctggcactttgtagaccaggctggcctggaactcagaaagggaaaggcatgtgctgccaccgcctggccctatctctgactcattctgcaaacatggatgtgtctgcgttccagctggatcacacaagcctaggtcttggatgtgatcccttgccagagcaatccacacttcactgggaccggctcttgacacttt

SEQ ID NO: 46644 - DNA, 315 bp, Mus musculus
  source 1..315: mol_type = other DNA
ctcatgacagtaaaacttcatcaaattgttcagaataaattcttcttccctttgagtgtgtttttacgttgtcatagaaatgtgacacagaaaatcaagaaagcaaggttcttgacttgaggacgattctcaaccaaccatgagttcagcaagcaaggctgactcttgaacatccttggttggtgccaaggacagacgattttcaggacccacagctcttgagccggatatgcgcccggcttccagtggagagcttagcggctcccaaactgagcatgtgcggaagtcgggtctccgcggccagcacacgcagac

SEQ ID NO: 46645 - DNA, 205 bp, Mus musculus
  source 1..205: mol_type = other DNA
agggaagaagaatttattctgaacaatttgatgaagttttactgtcatgagaagtgcacaccgatctaagagcctgcttctctctggtgctcaggaccaaagttaactgttctctttagggctcagatagcagcgcaggataagagcgccgccctgatggacgtccattcccgctgcccaggatctcctgtagctgctgggcatt

SEQ ID NO: 46646 - DNA, 428 bp, Mus musculus
  source 1..428: mol_type = other DNA
gtgatacctttttaaaaacgcgtgcttgtcagacaggcaacaaagccgagctccagttccgcccagacatgtaatcagcctgctcaggatggctgcaggatgtccccctgggagccaaggtggaagcctccggcggcgggtgagctgctcttgcatctaggcaggatgagcgggaggggagctcacccacaggctcaatctgctactgcagaaaaaactgtcaaattgtaggatcgtcatttcattgtcagcgtatacatagatgcacatacctggtaactagctggggtggtatctgacaaccttattatgcagtgagcttattattgatattgagagacattcaattttctctcttaaatgaattcagcctcatttgcatgactgataagcaattttttttttatctatttaacagaaggtcatat

SEQ ID NO: 46647 - DNA, 226 bp, Mus musculus
  source 1..226: mol_type = other DNA
actatagttaaagatattatatatactgaatattatgtcattaaataatttaaaagtccgttgtaatataatacagttctttaagattcagatatcacacaagaactagcatccctgatttatgctcatccacaactggaagttcaagatgctatcctggttaacagctagttgccgctgttgtttggactaccaaaccagcccaaatgcaggatgaaggcattcc

SEQ ID NO: 46648 - DNA, 451 bp, Mus musculus
  source 1..451: mol_type = other DNA
gcattatgatgagaaaatcagtggaggattaaggaaaatagctcagcaatgtcacattcttattctaagcttttaaagcagatttctgagtttgaagccagcctggtctacagggtgagttccagtacagcctgggctacacagagaaaccgtgaaatcaggggcaaattatatcactttttttaagtactaaaaaattataccaaaatttcaacagttttaaatctgaaagaattctgtttttatatttcctaaatatgttttccatgaattagagaggctgtggaagtcagacaaacacatgcaggccgagcctcaaggacccccatcctggtcccagagaggacgtcctctgagaccaggctgcattcgggctgataagccttgtctccagtaggctgactgcggccgtgtttccggggggaacaggcagtgtttccggtagtcaggc

SEQ ID NO: 46649 - DNA, 480 bp, Mus musculus
  source 1..480: mol_type = other DNA
tttaggtaactttctataaattcccccagagttgagttttatactctcctaggtgctcagtccaatcaagttgagaatcaggatcaactgtcacacctgggctccagtcagcattcaatcttgcagagtacactctgatgttaacctcaggagggttcctcattggcggtgaatgttggagacggaatcgctaggggcacagccttcccacaagctgtgcactgggggacaaaatttgtaagtattcaaaaaaggtattactagcaacaagtactgcagttttaaaagcagaatccccccacagtggagtctgtgtgcactggtcctgcagtccaaggaggccctgctgcacctccgagaagggcaaggccctggtgattgcccagcccccgccctctgcgaagctaagagggggcggagccacgcgcatgtgcacagctggcgcccccctccccgccccccgcgcacagctgggacgtg

SEQ ID NO: 46650 - DNA, 287 bp, Mus musculus
  source 1..287: mol_type = other DNA
actggcacatacatgcctgtgagtgtatgtttagcccagactaatttttatttacatttatactagtatgatatgaatctataaaacccaatatcacttttatgacatttcttttgttacaaatttggtcaaataagagaccagatcccaagctgccctcagatgggaacttcgtccttagggtagccagtctaggctactgttatcaccagaatccactggtaatagcttcctggtcccaaccctaagggatgcgcgcatggaggtggcaaccagctcgcttgcta

SEQ ID NO: 46651 - DNA, 398 bp, Mus musculus
  source 1..398: mol_type = other DNA
ggcacacagtgatcccttgctcacccttggccagtgcaggtgcgcacctgtaaggcactgcatcttcgaaggcttttaatgcttgctgagcccttgcaaatgtgcctggctatttccaaaagatcaaactttcttaaagatgcagctttctctggagccaaccaggccccgggtccagcgtggtacactgctctaagaaccttcgtaggctgcttgggtcattcagcagaacccttcttcagaaaacagatcccagttcccggtaaaggcgtttctgctcatcctgtcacttgtggacgaatatccgcgccccagagcggcgctccgtggttctaattaaagcggcgctcggaacccgggggacccgcctgacgtcggcggccgcgggaataagaagc

SEQ ID NO: 46652 - DNA, 281 bp, Mus musculus
  source 1..281: mol_type = other DNA
ctgagagggtgagcccccactggggcacatgtctcagtcagctgctggctggagcctctcagaggacagctatgctagactcctgtccccaagcatagcagggtatcatttaggcaagacaaatttgaggtatcccactggggtagaagtgggattcctgccggctgcctggcgggctactggagcaaggatgccatcggaccctggcaaactctccccagccgccggctgcatctgacacttcttacagaaatgcactactgcaataacggttcgtaccc

SEQ ID NO: 46653 - DNA, 366 bp, Mus musculus
  source 1..366: mol_type = other DNA
ctcttcctacctcgtgagtaagaagtgagcattttagaaaacggcaattattgtgctagcaactttctgagaatcgtgcacatttcaaaataactaaattatggaagttggtttttctatatctagttataattctgttactataagaagatgttttgatgcttaaaatgttttaacttttagattaaatatctatttcaaaagttaattgagtgagaattagttagagagaactttgctattcttatgcacaaagtgctgagaaaaaagataggctaaaaggttaaaaaaaaccttttgctttttttttctgattattgtgaataatttagttggatggaagtgcttctaagtttcagctaaaat

SEQ ID NO: 46654 - DNA, 415 bp, Mus musculus
  source 1..415: mol_type = other DNA
aatgctggaggaaaaaaaattttttttctgcaatgaagcggaacgactgtggttaagcccagagagttgccgcggtgccgacacgccccagccgctcagaccctctgcagtccaggaagaggaaagcgttctccttggtccgcctccctgacgggacccgcccagcgggcgcacacctgacccaggtaagggaataggtgtatgccctgtttttgccaaagctaagtaccgtggcccggcctggggtcgcgggtagctccgatcggaggagccaccctaggaggctcaagctgctctgggggtcgccccgcgttcaccgacgtgcgacctgggcagagctcagagtgaacgctagcccgggctgcctggccccgcctctggccgcgtacgaacgtggggcggcggactgcgcatg

SEQ ID NO: 46655 - DNA, 501 bp, Mus musculus
  source 1..501: mol_type = other DNA
ttgctgagcccttgcaaatgtgcctggctatttccaaaagatcaaactttcttaaagatgcagctttctctggagccaaccaggccccgggtccagcgtggtacactgctctaagaaccttcgtaggctgcttgggtcattcagcagaacccttcttcagaaaacagatcccagttcccggtaaaggcgtttctgctcatcctgtcacttgtggacgaatatccgcgccccagagcggcgctccgtggttctaattaaagcggcgctcggaacccgggggacccgcctgacgtcggcggccgcgggaataagaagcgcccgaggacagcgggcggagcagcagggtgagcgctgtccccgtaggagctgcgcgtcctgtgtcccgacgcgggacctctggtgatcaggtgcccgaggacgacgcgggatccacggcgtgggcgcaggtgcccgagggcagtgcggggcccaccgctggcaggtgcccggacctctcaagtc

SEQ ID NO: 46656 - DNA, 329 bp, Mus musculus
  source 1..329: mol_type = other DNA
tcccccgaggatgtgatataagggcactgacctagtcaatggtttaacccagtagattcaaaaacaaatctgttctccctaaagttgttttggttggatatttttcagcacagagatttggaagtgggacaaaaattacacagatctcgggctcagaggagctcttgttcggaagcctaacattggacccaacctctgccatgtttcggtgcagaccctggcgcccagaaaccgcgtcgggacgaggcgcatgcgcactgccagggttctgaccgtggacatgcgcagtccgccgccccacgttcgtacgcggccagaggcggggccag

SEQ ID NO: 46657 - DNA, 255 bp, Mus musculus
  source 1..255: mol_type = other DNA
ggtttggggtctgtggtccccaagctctgctatgagaggcttccttattacccgggatcaggtaacacaggttattttgtgtagttataggtacgtcccgaataaattcgttccttcctatgaaataggactcttctcacctccctctagcgctagttcttgctccacttgggaagcgcgcggcgcctggggaggtgggacctggacctcaacccccaccccccccgctctccatgtgcgcatgagcagagacgc

SEQ ID NO: 46658 - DNA, 406 bp, Mus musculus
  source 1..406: mol_type = other DNA
tcacttgtctggcagaggaattttggaaatatcttcttaagctttctacaatcttaagccctaggttttctaatcaccagggttgattcttacaggtgttagggtttttcttaataataataacaacaacaatatggtacggaaaatttccaaatgtaatgaggtcactttaagaattaaaaggacatattgatctctggactcttgagcccccagtaatgcctggcgctgagcaagcaggcttggtccctcgcagcctgtgaaacttccccaccttccagaagagggagtgccagctggcgccggaatgattcacactctggctcgccccaactccggatctgggcggaggggccgtagggcgtgtttccccaccccttgcggacttcggaacggactcgggcag

SEQ ID NO: 46659 - DNA, 476 bp, Mus musculus
  source 1..476: mol_type = other DNA
ccctaactctatggagttcagtacagtgcctgggctgtaaacttttgagaagtatagagttaaggtttaaactagagactgttattacaaagtggtatcagaccttaaagggagctctggctgtcctggaactcactctgtagaccaggctggcctggctgctgggattaaaggcgtagcccaccacgccaggctctgtgctcaatcttatagacaacagttagcaatcttttaggttttcttctacaagggaggcgtgctttcaaaatacaaaaatagaagggagcttgttttctatactttttgtgaagaaaggttcaagcctatcctttccattgcctaaaccagccgttaaaatcaaagcctttgttcgtacggtttttgtaaagcataagcttgtcaagttgtcaaactttctttactgaagaaacaacatttttatttatctagttcgtctttcaaccggaaagcctctg

SEQ ID NO: 46660 - DNA, 296 bp, Mus musculus
  source 1..296: mol_type = other DNA
gaaatctaaggacctctgggggccgtgggatttcatttagaaatatttattcacacgtcttttgaatgtcagggagataacactggcatttttttttttttttaaaccatggctgtgcaaatctctgcaaaccaatgaaatctctctgtcacacacacaggtgctgtagtcatcatcacttctgctgatcagagactcaaaggtcaagaccatattggagtctttccattgttgtaaaagttaatgaaagttaattattaaagttgacagaaagctctacataacctatataaaga

SEQ ID NO: 46661 - DNA, 356 bp, Mus musculus
  source 1..356: mol_type = other DNA
gtcttcaagaactggaactaggtaccgcctgttgtctcctggtgctccctccagcgatccaggcgcgcgtcgggcacccacggagcgtgcgtgtttacccggcggcggatccggggggaccgttactccgcccgctggggtgggaccagcccaacggctgagactgcgctctgggcggacccagaaggcctcgcgccgcaggggggcgggcggcggcttacctgcctgccgcgctactgcgagaagtatatgtctgactccttcgccggagtcgggtgcagcccgtgagagcagttcgggcgcacttccgcctctgcgctccggaaggtagggcgcaggcgcttactgcgactccg

SEQ ID NO: 46662 - DNA, 498 bp, Mus musculus
  source 1..498: mol_type = other DNA
atcagcagaaagcttgcttaggcttttggccatccactaaagaaaaacagaggcaggtgttaggcttttctgaattagaacccagaaaaccaagcaaggaagctccttcaaaataattaagacagtactctacttgggtttttctttctagtgttaccagggaaaccagactatctagttacctaagggaatatggttgcctggtcttgcctatgggcacaggcctgggccatgacttaaattcagtttagctccgggcagggaggcaggttaccaccctagggcacctggctgggtcccaccatagacccgggccctggctcccgtcatccggcatcagccgcatcggggatcagccctccggggataccgagcccacgtggaggagcctcggccgcctcacgccgcgcaccaggaaacaagggccgcgggaggcgcggtcgcgccagtgtgacctcagccgggcccggcgcgctcccggcggcgtgggacgtgcgc

SEQ ID NO: 46663 - DNA, 491 bp, Mus musculus
  source 1..491: mol_type = other DNA
gtgataaatgcaaacgcttttaatagatgaaagaactaaggcctaatacctttagcaaactgaattttgttctgtctctcagattgagcattagactttcaagcgtactatactatagaaaggtatatagttaatttacttgggataatttctcttctaccagtaatcctgacttcagtactcgacatgtatggagaaatttccagggtgagttcacacttctgggcacggacagtgcaatccttggtcaggaactgagcagctgcgccccgaccacgtcgtccacgagaggaacacgttccccgtgaaactgggggaccaggacaatcccggacgccagggggccgggcctctgcgcaaggcagggcgacccaggccgggccaccgtccgacgccttaccgtcctgcaggatcgcctgcacggtcgccgccactactgtttggcaagtgccgggttgatgacaggcgccgccccacctgcccggcccggg

SEQ ID NO: 46664 - DNA, 276 bp, Mus musculus
  source 1..276: mol_type = other DNA
aaattttgtttccgggaatttataaaattgtcatgatttgcttcagaataataaccaggcatgactgatctgaagttccaaacctttttgcctgattttctagctggaggctatactcctgtgaattagacacatgcacaaaagtgaaaaagaatgttataatcagtgagtgtttcagagttccaaaactttggtgtaagcatgcatggaacctgggtgctctcatagccatcgtggtgtccctgtgagacaaccattaagagtcatggctctctg

SEQ ID NO: 46665 - DNA, 269 bp, Mus musculus
  source 1..269: mol_type = other DNA
ttcaaagcaatagtccagtactctaaacagctgtataaattcttgagtccgatactgtctcattcttaaacccgtgaatcaacttttaatccccaacgtgcttgggtaagtgatcaagctaggccctctgggaggcctaaaggaagagaggtggtttgtctcagacaccaaaacaaaccccggtaatttcctcagctaaggagcaaggctatccaatccaaagcgctttctgtagtgattgaggctcagccccccgggggcttcagggg

SEQ ID NO: 46666 - DNA, 563 bp, Mus musculus
  source 1..563: mol_type = other DNA
tcttgaataagctatagctttcaatcttgatagtaaattaggatgcagaaacttttaggaataaaaacaaagcatgcagcaccggacataatattttggtaatatgtgcttctacacctagaattccttttaaaatataagtgaatttttttttttttgaaaactttaaaaactttattgcatattaatatgtagactaaagtcaatcttttttttgtgaaaaacaagaaagctaagaattcagataatgctattcgtcgtgtatgattattacaaacaaagtagtttcgtaaactatgcatacgtgaactcaataaatagttacgaatatttaaacgtttttatttttaagggccgggcttgccactccaggcggggactaggtaaggctgagcagccctaagctcccacgtttgggcgaggagggccgtgacgctcccaagagcctcttccccacgccggagttctcaggccccgcggtggctgcgtccggagcggaatgggagaaggccccggcggcgacctgcaaacgcaacccgggccgggcaggtggggcggcgcct

SEQ ID NO: 46667 - DNA, 577 bp, Mus musculus
  source 1..577: mol_type = other DNA
gaaatgtattttaaattactaacaattgatagaaatttaattttaaattaatgttttatttttatcattcctttgttacttttaacactcatcttaaatagtttagctttatagcctatgagaatacatacattttctacatatacataaaaatatcagtgataatcccctttagtctatgtgatcagtaacatgaactaatgacactgaagtcagtaagtaacataaaataattacaatttaaaatacaaagaaatgacttggatacaaacaaactagttgaaatcaaacctggttcactgtgaagatgcagggctttctatctgtagaagacttaaaatatattatttttacgatgacaacaaaaaagaaaaaaactatgttcttaatgtttggcattgggaatcaataagccagaaccaaatacacatttttaaaagactaatttactcatattctatttaagagcaccagttaaaaaaacttaggcttttaaaacagcatccttatataaagccattggggaggggggggaacacccctgccagaatgcactgcatctctctgcagtggggag

SEQ ID NO: 46668 - DNA, 542 bp, Mus musculus
  source 1..542: mol_type = other DNA
tttccttatgtgtgggcagataaataaaacttaagaataaaataaaactcaagtgagtttgcacttgtagaaaataaagtatgcatatttatacagcgtttaatttggcaaaagataaatttttctgtttcaaaattctcagggctcgttttaaagacaagggttttctttaaaaagcacaaatgtgtagttctcttttcctttttattgctatattcaaattttggagatttaattgaagtatcaggtaacacacccttagttgtctgtccagctggatcaactaactttgttaagtgctacacaataaattttgtgacagacaagtggcagcatctcttttatcccttggaaagccagcgggagctcaggtggagcgcgcggcctcagccccacgccccaggctcaggctgcctccaccctggggccacttgagaggcggcagtgctcccgcccgccgggttgccatggtttccggggatcacgtgggcgcgcgggcggaggcggggcgccgggcggggggcggcgcagcggcggcggga

SEQ ID NO: 46669 - DNA, 367 bp, Mus musculus
  source 1..367: mol_type = other DNA
aagaaaattgcaatataaatgcaaaatatataattaccttgttctaagcaatttcagtgctgcactccatttcaaaatccatttggtatgcattcaacgcctattatgtgaatatactactgtcttccaaggtgattcattcttaaggatgtattcttctcaaagaatcttattgattacgtggaatactacatgtggaatagcactctgatttaaaaaaaatgttttctttcagcagaacagctttgctgccattggtttggcagactttttagttcatacagtattaacttttagttttcttaaaaggccaaggatttgagactttagaccctcactcggagagcacccaatgggaggagctgag

SEQ ID NO: 46670 - DNA, 452 bp, Mus musculus
  source 1..452: mol_type = other DNA
aacaaagcctaaatcttagaattcttaaatgctattaaacatgcaaagggaattttagttctatgcaaaacaaatttgcaactcttgggtgacgtcatcagacgtcacttcgatttaatgatttaattagattcaatttgtgtctgagagggttgaatttaacctttccctaagacgcaaaggcttttctccaggaaaagtcagcgcttgagctctgattttaaaggaaaatctagagctggtggcgtgactccaacaggaggggcgaggctgggaacgccccacgcccctcagaggcaggcgcccaggtcacgcgctggggcggctttaggcccggggcgggcgcagctgaggcagagcgcgtgcctcacgtcctcctcagtcccccccgcccctgcgctgcgcacgcgcagccgtgccccgccccttgtccccgggatgggcggggcgcg

SEQ ID NO: 46671 - DNA, 268 bp, Mus musculus
  source 1..268: mol_type = other DNA
ttccagctggaagcctcctccctgttctccaagcctgtggaaactggaagccatctctcagtgattacctgcctggagcaggcagtttctagctcccttgtctgactaattcatcacacacattgcatgctgcaggactttcagtttgtgatattttgttccctgcagggaaatagatttcctgagtctctcacaatctttgaagagttaattcaaagagtgagagaatttctgacacttttaaaatgatgtataatcaacttggtat

SEQ ID NO: 46672 - DNA, 568 bp, Mus musculus
  source 1..568: mol_type = other DNA
taatgcgtcggccagcgaagggcgcaacccaggtctagcctcgcccgcggaagccgcgggcctccgggcggtcggtactgtcttccttcgagcttccacgcctccgcggctaggggcggccgggagaagccgcccacaccggcgactcgactcgacgccggccgccatctccgccccgcggccttcgagcgtgggggactccctcacgaccgcgtccccgcctcccggcaaggcgccccgcgctggaccgggcgaggtcggcgtcgcaagctgcactcacccactcgaggatcttgatgaagccgagcggctccttgagcggggcgactccgcggcgagagcgggaggcggagccggcggggctgggcgggacggcctggcctttaaggcggggccgggcggccgttgagtccgcgcccaggcaggccgaggagggactgggaagggctggctcctcccccggccgcacctgactcagccggctgaaccgcgcgcacgcgcgctccctaggccccagactcttttccggcctttgcgagcgcgcgacgggggtgggtggggtcggggg

SEQ ID NO: 46673 - DNA, 417 bp, Mus musculus
  source 1..417: mol_type = other DNA
cttccttcgatgttggtgttatctcaccatgcatgaagtgtctgcggaaatgtttggtgaatcatacgttcaagcacccttacataagtcgccagacggccgactttaagggccctgtgtacacacttgacacatttgcccaaaagttcaggggccgttgtgagggcgggcagtcacgaggtggagggccgtgctgcgcaggcgcagctgtcccccgaccccacccacccccgtcgcgcgctcgcaaaggccggaaaagagtctggggcctagggagcgcgcgtgcgcgcggttcagccggctgagtcaggtgcggccgggggaggagccagcccttcccagtccctcctcggcctgcctgggcgcggactcaacggccgcccggccccgccttaaaggccaggccgtcccgcccag

SEQ ID NO: 46674 - DNA, 493 bp, Mus musculus
  source 1..493: mol_type = other DNA
ttgggtgacgtcatcagacgtcacttcgatttaatgatttaattagattcaatttgtgtctgagagggttgaatttaacctttccctaagacgcaaaggcttttctccaggaaaagtcagcgcttgagctctgattttaaaggaaaatctagagctggtggcgtgactccaacaggaggggcgaggctgggaacgccccacgcccctcagaggcaggcgcccaggtcacgcgctggggcggctttaggcccggggcgggcgcagctgaggcagagcgcgtgcctcacgtcctcctcagtcccccccgcccctgcgctgcgcacgcgcagccgtgccccgccccttgtccccgggatgggcggggcgcggagccgccgggaaagccgccggagcgcgctgggcaggggagcgcgctagcctccaccgccgcgtcacggacctgcccgcgctctcccgcccccctgcgagcgagcggtgacttaagcaacggagc

SEQ ID NO: 46675 - DNA, 258 bp, Mus musculus
  source 1..258: mol_type = other DNA
ccttccttcaaggacttctgaccttttacaaaagcttggagcctgagaaagatgcacagtgccccttggagaacagtgtgagctggcctcatggggaatgccatctggaaagatgcccaggttcccctgaggctctgaacatcttgtccagatgggtttttaaaaagaatccagacaccttttgaacagcagcggctgtggctgtgttctctctgcatgttgatgcagcacaagccgtgcggtgctatatttagcgca

SEQ ID NO: 46676 - DNA, 360 bp, Mus musculus
  source 1..360: mol_type = other DNA
ggatggccttgcacttgggaggcccaagcaagacttctcaaggctgagcttagaagtgtgcaccactaaattctagttatatacttttttaaaaagaccacattttttaacaaaagtaagccgtattgtcagagtctggcctgacacgttcaaacacctctctgaaggcatttaggcactttgcaaacagagatgaatgcttcatagagacaattctgggtctcctgtggcacaacagaggatgacaggcgggccccgttccagccagggctgttaagaatcagacttcctctgaaccgaagaccttgcctccctgcctacactaggcacagggagagaagagcctcccccacctacaag

SEQ ID NO: 46677 - DNA, 544 bp, Mus musculus
  source 1..544: mol_type = other DNA
tctcatttaccagcccctagggtcagcgtctacacacctggcagtcaggttctccggtctgcttgctctgtgagccttgagccctcagtctctggtgtgcgcggagcaaagtctccgcagtggctctaccacaaaatgattttggaatagtccctgctctaccatggaggggtcccactaagcctccgggatccttctgggacgtcgcgggaggaagagacttgcagcgagcaaaactttcggtcctccagcggcgactggacgaaagaacctgtgcttcttcccggggtcgcgccagggttgctggctggacagggcggcggggcgcagcatcctggcgcgaggcgaccctgcccggctgaaccggcggcgcactcaggctctgctctcagcctgccggactccgcgctctcccgagccccgcgcacacggcgcctctctggcgcccccagcggctgcacgcagcacagcagggccgggcagggccgagcgcgccccgcctcccgcctcctccgccatgtcggaacgttccgaagatgacgtc

SEQ ID NO: 46678 - DNA, 294 bp, Mus musculus
  source 1..294: mol_type = other DNA
cctgccacccaggatggcgaagcatgctggcagcctgtgtgcagacctgagctcctggtctgtgggcagggctgctgcagtcgatggggacagcagctgcctcctggaggctcaagcctcgggtctggtggtgcacacgacttgaaactcatgtgagcctcataggaaccacaaaccagaattctgtttcttgcatgcccacggtttctcagtaacagaagtgtagttttcaacaaaacaactcaggcttttctctctgagagaaaggggagagtgcgtctctgtacgcatatg

SEQ ID NO: 46679 - DNA, 494 bp, Mus musculus
  source 1..494: mol_type = other DNA
caaagcctgtgaagactcttctaaatctacatctgcagatgaaaaagaaaagatactgtatctgaaaatcttgcaaaatttgacaatgcaacatttcctggcccagaagtcgccttttaaacagacaccaccgtggggctgcgaaagcccaccccgcaggctgcctgccccggagagccaggcacagacagacagacagctttgctggcagccgggcctcgtctgtgtctgtgtgtatttatttagagagagagagagaagcatggaggacgccgggggccactctctctcactttcccagtggctgcccagaaacgcctccggactgggcactttgcggtgcagtgtccctgttccttcggcagcagcagccgagagatccgacgtcatcttcggaacgttccgacatggcggaggaggcgggaggcggggcgcgctcggccctgcccggccctgctgtgctgcgtgcagccgctgggggcgccagagaggcg

SEQ ID NO: 46680 - DNA, 418 bp, Mus musculus
  source 1..418: mol_type = other DNA
ggaggcactgccaattccaggtcagggaaatgacttatcgtggaaagccttcaccaagggcttcgtaaagcataggaatctgcagccactatgcccagagcacgggactattttaaataaaataaagtatttgcaaactgcctgaatcagactcagaaagtctgggttcagagttccccgagtggttctcgaaacattagttggtggatatgtgcatttaaaaaaaaaatgtagtcttaatgccaaatcctatttttttgtttgtttcttaaaccagagagagaatttgacccaaatcctgcaaggtatttctctttccataaaaaaatacttcactctctgcacacggcagggtgtggaacccaatctgtctggctttttaaggggaagagagagaggaggccagacagtaaatata

SEQ ID NO: 46681 - DNA, 321 bp, Mus musculus
  source 1..321: mol_type = other DNA
ctctcactgtgataccaatactcagttgggagtagtggctcgtgcaaatgttagaaccaaaccagcttggtctacatagcgagtttcaaacaagctattttgggcctctgcctttttatacttaggtgcccagatcaataaattcaataaattcaagccataactgagcatactttgaagtgatgaaagagcagcagccctctgctggtcaaacctctataatgcagctttagaagattaaaaatccccaggccgcggtcggtcgccttttgatgatgtcagccatcatcaacactcagaggtgaggcgggaggaatgctt

SEQ ID NO: 46682 - DNA, 342 bp, Mus musculus
  source 1..342: mol_type = other DNA
tccctaacagagagtgagctgttcactctctctctcttattaaagctaaatcgaccctaaggggtaattacacagtaaagggcttatgcagtaaataaatataacccatcagtccgacttcagaaggaaggtcttgcctttcagcagccgctgtgctgggataccagacaccctggcaggaagggcctctcttctggagcccttattccattggcaaatggaggcaagattcaggactcctatcctgaagccaagtggaaagattttggctttgaaaatccaaatcgaaattaaagacctaactgccctgcagtgtcatcttctatcagcttacagaagagg

SEQ ID NO: 46683 - DNA, 440 bp, Mus musculus
  source 1..440: mol_type = other DNA
tatcctgctataatggagatctaacctccagtctggatattctagttgctataccattgagctatgggcataagaagaataaaataaaatcattaaagtatgtttttgacttggggaaaagataatttccaagaattctaaatatacatcagccaatttgtattatgtttttggccttgacaattataaactcaaaataccatcaagtattcagctggcgtttaattccttaaaataagcaagcacctacgtgcacattggtacacaaatttgcttttattgttaatgatgtttacaaagcaaaacgttttgctttgattcttcaaagaactttctttaaattatatatctattttatacaggtgccagggcaaccctgagggctggctatttaggattcttagaactgctaacgttcttttctcattgataaatcctag

SEQ ID NO: 46684 - DNA, 473 bp, Mus musculus
  source 1..473: mol_type = other DNA
agggctggcagcgtggagcaccaaggctgctgctcccttcaaaagaacaaggcttttctctgtaaaagaactctgagatccatagcgcccacgatgtggccacgtctgagaaccgccctcgaccacagggccaggcagccgcggggaatcccttgggactagaggtttccgactagaggtttcctctacctgaccgttagatgcccgggcccgagccacccccaaagggcccggagaactccgagggatcccaggcgggatgggacatcacccagagcgtccctgctgtcacagccacttggggagggggagactgcaacagcgacccagacagtcccctgtgctcgggtgcgggggcgctgggcgcgctctggcgcggaaggaaatcgccccgcgtcctccccgaagcggagggggagagctgggggggcaggggctggccgctcgggcaggaaactttcctataaaacttc

SEQ ID NO: 46685 - DNA, 659 bp, Mus musculus
  source 1..659: mol_type = other DNA
taatctacaaaatttccagctgtgcatggatattaattttctatttaaatagacaattctaggaagacaaaaagatgttgccttaaaatttattttgatggtcttgctgttgattaacattttactttaagtaattaattattttgatttttattttcttatattacttatgttcaataaaccttcacagttcatagaggtggctcatatgaaagaacacaattgaaaacttatccttcatttgacagataaattctaaatgaatcttctgtgagtgctgaaaaattttgaacattatacattggagtatctggaaaatcaaaatctaagctatatagaatcttatctcaaagtttatgggtaagataagtcttgaaattgagaatcactagatctttaaaagctgataggatttttcaagtgtactaagttttatagaggatcatatacatcaaaaatgtgaatattgcttgagtaaaatttatcgatattgatatgtaaactgtcagccagttctagtataaattctgaattaggacaatgtttgtagggaaagttcaaataaagacagtaaacaatctcatatcttttcaggttgcttttattcacatttgtcagtaaatgacttctgaaatatttttctttgataggtgaaatct

SEQ ID NO: 46686 - DNA, 456 bp, Mus musculus
  source 1..456: mol_type = other DNA
ccgttttttttaaaattataattactagtttttagaaaaaatatattcaggattagcctttttattaaatatttagtgttgcctactttacaaagcgatttacagacattaggaatattagtatagacaagttatagctgtaatttctttttcagtctcagctccatgccgggtgtagggatgcactaggtctccgctccctacagtctgcgcggccaggcgcgcacctgagcgaccggggctggagggcgcgcagggcgaggcccgggccgcgctcctcctccgcaccagcccggtcgcctgcctgtccctgggcccccaggtgtccctgcagcccggccccgccgcctccccggccgccccgccccgccccgctccgccgctccggggctcgggcccggccccgcggtctccctcccccgtcctccgcgcgccgcccgctcggcgcagctcgcc

SEQ ID NO: 46687 - DNA, 605 bp, Mus musculus
  source 1..605: mol_type = other DNA
ggaagtaactactttttttttttcccggtaagaatgagatacaagtgttttatttttcaagcccaaacacttctcagtttcactgtaaatagtgatttttactgtcattcctgagccacagaacttcggagttcagtctcattttattcgtaactttcactgtgatatataaacatatatatatatatatattttttttttttgaattcccaataaagccatagagttgatttttaagactatgaaaagccttcaggaggatcggggtgaaggcgatctgccctgatcgcgcgcgcacccagcacaggacttactgagcgctgggcgaagtttcggcgcggcgcgggcggcagtttcaggtcaccgcgctgcggaggggaccgcagccgagtgtcccgagcactctacgggctccacagggtcggggagacgcgagatgccagtttctccgccgcccgccaccacggtggcccgggatccagcccgcagaggaggtcccgggtcgcgcgcggcccagcccccgccgccgaccctgcgcgcgccggcgccatggagacagtcacaagacgctcgcgcccggcgcgccagccaatgggagcgcacgt

SEQ ID NO: 46688 - DNA, 350 bp, Mus musculus
  source 1..350: mol_type = other DNA
aagatggaacatcatcttccaaattacgcctttaaaagaactaacagaaactcaggtctctggtcatagagtctgatggaggaaacgatgttttattgtcttctgtagacataaaataaattataaaactcgtagccttcaagactttgtcaaaaattagatgactcaactctaggatgagctaagctttttgcctaggcatgtggcctcacaccccttttgaggctggaaaatgcaagaagtgttgggagtcactacgtcctgcgtcatcacgtgagagggtggggccctcctgggaaccgtgaggggcggggccgagcggggctggagcccggggcggagctgcgcgg

SEQ ID NO: 46689 - DNA, 294 bp, Mus musculus
  source 1..294: mol_type = other DNA
tgtatgcaaatactctggaatagaatcccattctgttgaagaactagacttaatgagactttctttttttatttaagcaattttttattaggtattttcttcatttacaatttaaatgctatcaagagcctctgatggccgactaggccatcttctgctacatatgcagctagagacaccagctcacaatagctgttgtttttccatatattcaaattttaaatttccaaaaagttaataatgattagtcagcactcatagactataaagtcttcttaatttgaaaagtgtgca

SEQ ID NO: 46690 - DNA, 292 bp, Mus musculus
  source 1..292: mol_type = other DNA
ggagctcacctgcattttactgcaagtcagtgagacaactattctctaaaactaaattggataaattcatagtatatagcaataaaatcactattttgatatcaaaacattaaaaaattaaaatctctctctctctctctctcagctaaaggaaggaaagaaagaaagcaaccctgatctctttagctctgtattagaatttcaattttctttttgtgtaataaaaaaatcacaaagaagtctttggtgtcattttgtgaaaggcatgagaactgtgtgtgcttataaatcc

SEQ ID NO: 46691 - DNA, 437 bp, Mus musculus
  source 1..437: mol_type = other DNA
gcgacgccgcggcacagcgcgggagccgggaagccctagagcactgcggcccctcctgaccctcgggaccgggcgcggctagccgcggccagctcgggcagcccgagtctcctctgtcgcccgcacctgcgcgtcgcggtcgtcccgccctcggcggcggctcacctgggcgcagcgcgggcagggcgccgcctccgggacgcaggtggagcgggcagggcgcgggcaccacggcgggcaggcgcgctccgagggtgcgggaggtccccacgcgtgccgccattggttcgttgacagctctgacctacctagtgccgctctagcttagttagttaagcttgcagatctccgctgccgtgagctttaggcttttgggtctgtaaaattttaaatcattaagaagaggaaaaagaactagactgacttctaagttattt

SEQ ID NO: 46692 - DNA, 454 bp, Mus musculus
  source 1..454: mol_type = other DNA
ttaaggcccttaaaaatctctttataaaacctattggtagaatttcttttgatagaaaataccaaatagttactgccgcttaacagttggaacccagtagtgagtgccttatgcatctgataggatgatatacttctaataatctagatgataaattaattgaatctgttatcgaaaggcttcctagcttgtatttatgcaaaaataggataaagactcctgatttattttgcacatatgtattcataaggtttattagtatttcaaaaatccctgtagaatctgaaatctgtcacaattacaggttacagaaattagctgtctctcctgccagcgtggagccccgccctctgctgtcctgggagggggccacagtctcgtgagccagaggccggctccctccagacagtctcggggccccgaggcggcggggcggggcgcgcgatcggcggat

SEQ ID NO: 46693 - DNA, 297 bp, Mus musculus
  source 1..297: mol_type = other DNA
ttggtaattaaaaacatctctaatttgctgtaattcactataatgatataacagctatcctggagtatacaaagatgaggtaattattacaacatcctgcacatactacagtagctgtacatatattaatcatcagggccattattatacctgtgattaaagcgcacacaaaaaatgatattgtggaaaataacatgtcttgtgatcataactgtaagaaggattagaactgtgaatcatccttttcaacgactgctttgagaagacaattgcttaggaaattgcttccataaatac

SEQ ID NO: 46694 - DNA, 357 bp, Mus musculus
  source 1..357: mol_type = other DNA
atgtaaaaatctgaagtgttacttacttcagtctcaagttcttctgagggtgagaaaaggatttatgagaaaaaattgctagcaattgccggccttgaagtcggtcccagtgcctggaattcctgtcttccaggccaggcagggccccacctcgtcaaaagggatagttcattactgaatgaagtcaggatgcagaagaaaccttgttcctccaggcttgctcagccagctttccttcagctgcaggcttgcctacagccagatctgtggggttctctagcatgtgtcagattgctataatactagccaaggtttagcaacttgtgtttcatcacaaaggcctccctagtggagcct

SEQ ID NO: 46695 - DNA, 457 bp, Mus musculus
  source 1..457: mol_type = other DNA
ggcgcccagggccacgcgtgactgtctaggacagtcggtcggtctaagctctagatctagaaaggctttttaggtcctccgggcctagggcgcgctccaggctcctcaatgccgagtgcagcactctatttctttggaaaggttttttaaaaaaacaagagaagcccagtgaagcgctagggtctggctggcgggtgcggcgagcttgagcgagccgggctggcgctctccacaagtcccgcccccgcgcctcaatggccaggtcgggaggaggagctgcagcaagcgactccaattggaaaaggagacatttggaaggggattcaatacatcttctaggtttcctattcccatgataacctattaagaagtacagggacacagggttccttggattctaaggatagaagttctctgtagacgggctgcactgcccctaagagtggcgcggttcggg

SEQ ID NO: 46696 - DNA, 441 bp, Mus musculus
  source 1..441: mol_type = other DNA
ctgtcctggaacccacgttgtagaccaggctggcctcgaactcagaaatccgcctgcctgtgctgggattaaaggcgtgtgccaccacgcccggctttcaatcaatattttttaatgcagtatataaagtcctgacaggaaacaagagacgccataaactggatcttgaatacatacatacatacatacatacatacatacatacatacatacaagcctgttagaagagattgtgttcaggatagcgccaacctcactctccattctaggtgttatgttaggggtacccaaaccacggcatttgaaataaaaatcttaagtctatgatttcaaatcaaaattggttcaaaataataatccataacaatccaaaatgtcaaattttatataagaataaagtcgtaatgtttttcacatagatggccgcactgtgcgtctgtg

SEQ ID NO: 46697 - DNA, 584 bp, Mus musculus
  source 1..584: mol_type = other DNA
gcaaaaagaaatttaccttcttggtcatggggtgttcccctcacctcccggcagtgggcctccccggggatcgccacgcacgtggccagcttacggccggcccgcggtccccggagctcttggggcgggtctaggtctcgctcgagcgcggcgcgggggctcctctatgaagaggaaggcaaccgccccaggtggcacatgcttcctccacgccagctccagcccgctgggaccccttggctcggaggcgggagggagcgaccgcgagactggtggctgcggcggatcctgcagcagcagtggcggcggcagtggctgaggcagacaatcccgaaccgcgccactcttaggggcagtgcagcccgtctacagagaacttctatccttagaatccaaggaaccctgtgtccctgtacttcttaataggttatcatgggaataggaaacctagaagatgtattgaatccccttccaaatgtctccttttccaattggagtcgcttgctgcagctcctcctcccgacctggccattgaggcgcgggggcgggacttgtggagagcgccagcccggctcgctcaagct

SEQ ID NO: 46698 - DNA, 303 bp, Mus musculus
  source 1..303: mol_type = other DNA
agacaactaaattactgagattttcttttgtggctggctacaaggcactttcagcaggcacatgatgtacacatacacacacacacacacacaggtgggtgcacatgtgtgcgacagctaattttgatgtagagttaacatcttttaaaatttatatgtcatctcataccgactcaattgggtaagtggctcctaggaagctattggttgtacagcaattgccaaattgtaattccataacaggatgtggcactttatgtgacttttgaataaatgtttagaattcagttagaaattacattg

SEQ ID NO: 46699 - DNA, 556 bp, Mus musculus
  source 1..556: mol_type = other DNA
ctgtggaatttaaaaacattcaaatcttaaaatcttaaaatttgagtgtggaatacagaattcaaggacactctacttggttgttcaaaggtcgaaattcttatgaccgaggtgcacacatatgggtctgcctcggctcgacctgcccggagggcgctgggcccaggctgggaagacaagccgaggccactttccccgagtccgctcggcgccgttcctggcccagtgcgacccttgatctcgtcccagggccggtgctgctgctatggagcctgggccgtgcagcaggcccgctgagcctgggcattgcgtgagcggccccgcgggcgcgggctcagcgttcccggagtccccgttgtccgtcgctggggcggagcccgggaaccgccctggaaccgtggccgccgtgctgccggctgggggttgcggggaaaggatgggcgtccgcaccccgaagcagttctgccgggttctggtatggagaggtaactggcgccagccaccaacaggcagcgtggcgggcagcgccgggcctggggccctggctaaccagtgc

SEQ ID NO: 46700 - DNA, 466 bp, Mus musculus
  source 1..466: mol_type = other DNA
atataactcaggacctgcagtatatgaacaatctagaaatattttgaattggtaaagggtaataaatagaaaatggttttcttttgggcaagtgacatattttaagatgaaaactgatatgagttaatttaattcagacagagttcagtaccaggaccgctggcagtaatttacctagcagagctctgtgtcttcctctttatgagaaaagagaggggaaaaaggttttcttcttaagagacaaaacatatttaactaaatagatcttttactcaagtctgacactactcaaaaactcatatggcttcttctaacttttggggaagaagccccttcaggccccaaattttctttaatctgaggggaatagagaaaaagtgtaaataaaataaactctgtctctttatgtgaacagggcaagtggtagcagttgtgacagggctgtgccttgcctgcttcagctcgt

SEQ ID NO: 46701 - DNA, 365 bp, Mus musculus
  source 1..365: mol_type = other DNA
ctctgtgagctaaagagagatttcattgcaacacttgtgtgtcgccaaggcgccagagtagcactgtgctagctgcacagctctacaggctctaggttttctaacaatctattctcagatacctaaaagagaataaacctaatgtgttaagctcgacagactaggctctccaagagcagtgagctactcagagacactgtgtgctggcttagggaagctgagtgcctctgggcccggagcgactgaggctctgggagcaccactagctgtggtggaagctcccagggcccgacgggcgggcgttgggcagcggctcctgtcctgccagctgtggtcagcgctgggctcctaagccagcccccagc

SEQ ID NO: 46702 - DNA, 551 bp, Mus musculus
  source 1..551: mol_type = other DNA
ttatatttcatttaaatatattgaagctaagttgcctggcatcaggcttctctgacaaagagaagtctgacgaagcttgcagaagcaccctcagattttgctaataaagactcacaatgagtctggatggtactatctcatgatatgggtctctttaagaagcaatacaagaggaagccagcttaatgtcaggattcttgattttctctgtatcctgactgcaaacaaaatattaccatccattttatattttcgggctgtattttatttatttattaaactgtgatccaaagtttgttacagcaacatgaaaagtgatatcaggtttcacacaacactcctttcaatataaccataatattccatagtaatcatattgactaaagttcactctgactaatgtcagagctccaaaagagttcagtgactttaactcattttcatgacaatccctgaacagtttcttagggagtccctgaactggtttgcagaatgtccagtaagaaattcaaaggcattgtgccttttagagaaaatgtcattttgctcaa

SEQ ID NO: 46703 - DNA, 417 bp, Mus musculus
  source 1..417: mol_type = other DNA
tgtcaggattcttgattttctctgtatcctgactgcaaacaaaatattaccatccattttatattttcgggctgtattttatttatttattaaactgtgatccaaagtttgttacagcaacatgaaaagtgatatcaggtttcacacaacactcctttcaatataaccataatattccatagtaatcatattgactaaagttcactctgactaatgtcagagctccaaaagagttcagtgactttaactcattttcatgacaatccctgaacagtttcttagggagtccctgaactggtttgcagaatgtccagtaagaaattcaaaggcattgtgccttttagagaaaatgtcattttgctcaactttagagtgaattcagttgttgattagttacttaagcaacaggcaaactgc

SEQ ID NO: 46704 - DNA, 333 bp, Mus musculus
  source 1..333: mol_type = other DNA
tactgtatgtattacaaataaaattgaagagaattaaggtcatttttagctcagaatctgaaaactaacatgtgtgtgtgtgtgtgtgtgagagagagagagagagaattctattacagaacctatcgctagatcagatgatgtctcatacctctatgatattttgtagaaagactgagagccatcagtgtaaccttcactataggaaagtgaacttgcaccttaattgcctggatcatgtaaattgatgttatatttttattatccaatacattacttttatcacatgactcaaaaacgtgtcctgattagttataactacatgttaaacag

SEQ ID NO: 46705 - DNA, 294 bp, Mus musculus
  source 1..294: mol_type = other DNA
atttgcagagacataggcaaatgcattggaaaaaaatgacaatataattttaatcttggtagctctcaactgaagatagttttacctatgttgtccaaatagcagtaatttggctatttttttaaaaaaaaaatcaagtaaaaaattacttccttatattaggactcttttttttggggatggggtaggagatagcctatagccatccctactacgcctcttccagagatctgattctcacctcggtgagtcgtagtttgctagaaaaccagtctgaatggtaaacaatctgag

SEQ ID NO: 46706 - DNA, 496 bp, Mus musculus
  source 1..496: mol_type = other DNA
tttacagatcggctaaaaaaatttttttttcttgaaagcttgattaactcaagttctgttggtattttgtacataaaattcaagtgtaaatttctattttagtaagagttaaacactcttaggaagggtttctgtacttagaccattctttttctgagcttacttcttagttattttgaaaaagaaaaaaaaagataaaagaaggtaatttgatttagttgcctaaatataatattatttagttgcctaaagaaatctcttaaagtgtctcttaattgatgtcataatatgaatcctaaattaaaatcatattgaatggcagtgtcatgacaaacattttcatgtgatgaagtcaagatctgagtcagttacaagaatgtcttaaatgttcaacccaattaattgagctctaaaagagccacctcatgtgtcatgcatacattagagcggactctggggctcactacccagtgtgctcacaatcacatctgctttt

SEQ ID NO: 46707 - DNA, 295 bp, Mus musculus
  source 1..295: mol_type = other DNA
actaagctctgtgggcaggcagcttcagagagattctcgctccacttcttggtggaggaagtgaaatcttcaagtacagtaagtgtgcgggaggggggcatctgaactaccaagtcctcccccaccccatattttcatgtccaacggacgaaaggagatcatttttgttgaagatgtattaaaaaaaatcttataagccctattacagtgttgagattgtggacactcgatctgtgtttaaagggtgcggaccctgcgacttctcccagagtggtcgaggcagcgatccatcagt

SEQ ID NO: 46708 - DNA, 794 bp, Mus musculus
  source 1..794: mol_type = other DNA
ggtaggctaccatcctagccagcacatgctagggagggcggcagcgcagactcccccaggctgccttgtgacgtgacgtaagggacccacccggccagccgcggtcgcccagaggccgccctagggtgacaggaagaggggcggtaccggcgacgccctcccgcacccagcctggggcggcagaaccgagaacccgcggccgaagccccgcccgtctgcgccggcggcgggcgccgaaagggttgtaggagacgcggccagcacgcgcgcgcgcgacccccgcgggcaggcgcggcgcgaggggcggagccgcggcccggagcgaggctggcgagcaccgttagcccggctggcgcgcggcgtcggcccggccgccgtcaggcctcgccgctgcccggggacagactccccggcggctgacagccgcggaggcgggacgacggaggaccgtcggcggggcggaggcaggaggggctggcgcggcccagcgagcctgggcgcacggcgagctgaggcgcggtgggccgctcccgccgcgtagggccgcgtcaccgtggcccatgctgcaggtgcgcgaggcggccgagcgaccggacctgcagcaggggctcggcgtccccactcagggcaacaggtggtgccggagggccgagagcgagccctggcgctgccgccctgggagtggcaggcacccttgccaattagggcgccggggcgggagtggcagggcggccctgacgcgctgaccaatgggatcgcggggcctggggcgtggccagaggccgagtctgggc

SEQ ID NO: 46709 - DNA, 670 bp, Mus musculus
  source 1..670: mol_type = other DNA
atctatctatctatctatctatctatctatctatctatctatctatctatgtatctattgagtcacggttgctatgtagaccaggctggccctgaagcatccagatctgcctgccaatctagtttaaaatacacttttaaattgcactattattatagccttccagataaaaatttcttgtaggttctaccaagctttaaatttttctaaacatctttaaaagattgctggtcacgttttataattggttcatgaccaatttggttcattctgtttttacaaagactggaatattcacaaaaacgacagtttcaaacatagtggtacacaattacactatggagcccaatgtgctttacactagtaaggtaggctaccatcctagccagcacatgctagggagggcggcagcgcagactcccccaggctgccttgtgacgtgacgtaagggacccacccggccagccgcggtcgcccagaggccgccctagggtgacaggaagaggggcggtaccggcgacgccctcccgcacccagcctggggcggcagaaccgagaacccgcggccgaagccccgcccgtctgcgccggcggcgggcgccgaaagggttgtaggagacgcggccagcacgcgcgcgcgcgacccccgcgggcaggcgcggcgcgaggg

SEQ ID NO: 46710 - DNA, 683 bp, Mus musculus
  source 1..683: mol_type = other DNA
gtgccggtaagtgccttttcttagcagaaaactcaaaaaaagcagcccatggagggacattggctgatgtgtctctctctctctccccgcgaggaacaacctccgcgccgctctggcggacgccccacagggaagcccagactcggcctctggccacgccccaggccccgcgatcccattggtcagcgcgtcagggccgccctgccactcccgccccggcgccctaattggcaagggtgcctgccactcccagggcggcagcgccagggctcgctctcggccctccggcaccacctgttgccctgagtggggacgccgagcccctgctgcaggtccggtcgctcggccgcctcgcgcacctgcagcatgggccacggtgacgcggccctacgcggcgggagcggcccaccgcgcctcagctcgccgtgcgcccaggctcgctgggccgcgccagcccctcctgcctccgccccgccgacggtcctccgtcgtcccgcctccgcggctgtcagccgccggggagtctgtccccgggcagcggcgaggcctgacggcggccgggccgacgccgcgcgccagccgggctaacggtgctcgccagcctcgctccgggccgcggctccgcccctcgcgccgcgcctgcccgcgggggtcgcgcgcgcgcgtgctggccgcgtctccta

SEQ ID NO: 46711 - DNA, 403 bp, Mus musculus
  source 1..403: mol_type = other DNA
agagcacccgactgctcttccgaaggtctggagacagtgtacttagatataataaataaataaatctttaaaaaaaaaagtcatggacagcccagtacagagcgtccctggtcttggctaaggcaggcaggtggcaccttaccacagttcccaggcgccaggggacttgccgatctctgacgctagtagccagagaatttgtctgagtacctttgtacatggagtttccaaacttatctcctcaccctggcatcagagggtgaacaatctgttgcaacgtaaaataacaattataatatttatttacattttttttttttttgaacttggtccaaactgggattcaggttcccgcccgggttcgggcgtggcgcctccgcttctggcgagccgctttaaagcc

SEQ ID NO: 46712 - DNA, 394 bp, Mus musculus
  source 1..394: mol_type = other DNA
acaactgcaagtctgttttcatccaaactgtgtgtgatctggcacccggagcttgcaggccccagctctcactgtagtacctattgtgtacaccagagggcagaaactgcctgccacttgtggaaaggaaacaaggctgctatttccaaaaggcaggtgcgcttctgaagccttttggatggaatgctgaagtgtgcaatctttgcactctctgaagtctccttaaagaaaagtgtagattgcatggtcaccagcctggaaccgctgacaagtccacaccagatgtcccagtggcagctcctgcctgctgcagggtatcagcagaagtgctaggaaatgtgctgtcagattcaacttgagcttcatatgaaccatgttgttttaaagcaaagct

SEQ ID NO: 46713 - DNA, 572 bp, Mus musculus
  source 1..572: mol_type = other DNA
tctgcgtcagagggagcgccacaggcagcgcaacagcggcaagccaccggcgctccgccccatctctagctcgataaagaaccgccccgcccccagggccggagctccagcactgctcccgcgtgccagctcctgcagttcagccgtcgggcgtccgaccaccgcgccccaggccggggtctcccgttcggccggccagccggctcccgggcgtggggacacccctcacctgccgtggccgccgacgtcgctgccccggagccgccgccacccccgccaccgcggtggggagcgttccgctgggccgcccggtgccgcctacacttggcgaggatcagccgatggagctgcactgtctactcgtgcgtctgtgcggcgggcggctgagaggcgagtctcgatacatgtttctctctagcgcgggagcgaaggcggggtggccagaccacgacgccttaagtagccagacggcggcttgtcgtcaccatgcgtgggcgggcctccatcgctcgctggccaatcgctgcagatctccccaccgcggcgtccactggggcggtgcctgcattcgg

SEQ ID NO: 46714 - DNA, 408 bp, Mus musculus
  source 1..408: mol_type = other DNA
taatatattaactattcactatagcatcggtaggtcacatctttgtaagaaaatctgagactgaatcactcgttatttgagatattagtctagaatatgaggtccacgaacaatttttttggagggtggggagcccacgtccctaaacccacacacgtgatcttacaagctgacgttcatcaagctgcataatcatcgcggtgactacccgggtgaattccagggcggacgcctcgttgggacgaggtcacgacgcaaccctaaggcatagcagcccaggcatgggagtccgaatgcaggcaccgccccagtggacgccgcggtggggagatctgcagcgattggccagcgagcgatggaggcccgcccacgcatggtgacgacaagccgccgtctggctacttaagg

SEQ ID NO: 46715 - DNA, 691 bp, Mus musculus
  source 1..691: mol_type = other DNA
ccactgccagctctctgccgctgtgggccagcaggggtagaagggagagaaaccctgttggcttccccttccagccagccagcagagaccggagcggcagtccggacgttctgggatcgggttcgaggagcgccgagtgcacggtgaggagcgagccccccagtgctcgcccctcagccggaggccggtgcggccaagcccgggacccgctgtgcaatgccaagacctggcatttgcagcctgaagttcgcccgcgagcactatccacatggctatgaagggcgttgaggggctccgggctgtgcaatccccgcgcccaccgctcccgaagagcagctgtgtcgctggagcacagcggatcgcgcgggctgcggcgctgggcagggtctgctcccggggctccggagccggcactgacactacaccgccgaggcggagccgcccgccgctctgccggccgcggctgctcacagccctgcgacgcgctcccggggacccggcggcgcagtcatgcgaacacgccggggcactcgcgggcgcacccccgcccgtcagcgcccgtccagcgctgcctacccactgcctgcacgctcccggctccggaaggaggcgggactacagcggttgggggcggggcacctagttaggctcgccacaatcgattctccctcagtgaggcggcatgcgaccc

SEQ ID NO: 46716 - DNA, 353 bp, Mus musculus
  source 1..353: mol_type = other DNA
gtgactagtctccaacttggaaaccggtcccatctcagagccgggaaaggtcgaccagcttcaaaggtttgagcggctgccagctgcacctcactcaccttcatgatctgtgtgtccgattccgccgcggaccccgcggaccccagcctcccgggggtccacaggaagcccctggacctgggtcgcatgccgcctcactgagggagaatcgattgtggcgagcctaactaggtgccccgcccccaaccgctgtagtcccgcctccttccggagccgggagcgtgcaggcagtgggtaggcagcgctggacgggcgctgacgggcgggggtgcgcccgcgagtgccccggcgtg

SEQ ID NO: 46717 - DNA, 394 bp, Mus musculus
  source 1..394: mol_type = other DNA
ttacggcttgagaatgatagttcagcattatctaagctagaaaaagcaaattaattttgttgtctatattctgtagtgtttttctaggttgtaattacacagttaagattttttacaattaacgagcaaaagcttaagtatattaaaaaaaacaatagtttgcaaaaaaaaaaaaaaaaaaaaaaaaagttctggatttttttcttttggcttgctagaggaagcaaacccaagaagctgaagatagcttctgataggcttcgacctagggcttagacctaaggcttctaagcggatctagtaggcggagtctccggctgccgcccagctgggggtcgggtctgggcgagcggccggggcgagcggcggcggagggcggggcgtgccgcggcgg

SEQ ID NO: 46718 - DNA, 562 bp, Mus musculus
  source 1..562: mol_type = other DNA
cttgagaatgatagttcagcattatctaagctagaaaaagcaaattaattttgttgtctatattctgtagtgtttttctaggttgtaattacacagttaagattttttacaattaacgagcaaaagcttaagtatattaaaaaaaacaatagtttgcaaaaaaaaaaaaaaaaaaaaaaaaagttctggatttttttcttttggcttgctagaggaagcaaacccaagaagctgaagatagcttctgataggcttcgacctagggcttagacctaaggcttctaagcggatctagtaggcggagtctccggctgccgcccagctgggggtcgggtctgggcgagcggccggggcgagcggcggcggagggcggggcgtgccgcggcggagggcggagcgtgccgcggggacttcccctgggttgagctgcgcagcgggtgcgcggcggcttggcacgcgggtgggcttaagcagaccctctgtgtccccggcagggtctcgctgggaggtggggagccgctcggccgctatccgcgcgatggtagcgagcatgcgtgcgtgc

SEQ ID NO: 46719 - DNA, 491 bp, Mus musculus
  source 1..491: mol_type = other DNA
taactgttgatccctgagttattactaataaatcatacagcacacacacacatacatgtacatctggatgcaggcacatacaacacatgtccgatgtgtggcatcagatttgttataccatgtatagataagtagttataattggaaaagtttattttgtatatgcttctccttacattaggagaagcaaatatttgttgtaattttaagaaatgtcattgtaaaacctaaacaactatcaagtatttttaatattcaggaaatccttgttcataagtgtttcctgtcttatctcagaggaaatgaaaaacagcaaatgggagaacttgttgaaaagcgctggaaaaatatgcaagcctgtttcatttatttcataggacagacaggctgcttcagccaaccaggctggagcagctgcgagtgctacatcttggcagtctgaagcgattggctcctctctggggagtggagggtgttcagttattaatgac

SEQ ID NO: 46720 - DNA, 543 bp, Mus musculus
  source 1..543: mol_type = other DNA
accctgacttaaaaaaaaaagtagatttttttttttaaagttaatgttcccgccgcttcaagctgccggatcgccctccccgaacccgctggagggctggccggtccggcgtcccggcccactcctgctccggccctgccggcgagctccgcgacctgccggcctggcctcggggaagacgaccccccaaccccaccgcaagcacgagctgtgacgcagccatctcggggtacagtcgcgtcgcttggcttcccaacaagcgggacccgactcggcgccaccctcgcgccccgacgcagcttctccacagcgcggcggcccggctccggttccctgaccccggccgcacaggctcgagtagcctcctcccagctcggcccgttccctactggcgggagcccgtggctggcgcgaccgctccgtcgccaccctccgaggggcggtgccaaggtgtgcgaccctcatcccgggcgcatcgcgcgcaggcgctttagagggtgcgccgggccctgcgtccccgccctagaggacagggctctccgg

SEQ ID NO: 46721 - DNA, 530 bp, Mus musculus
  source 1..530: mol_type = other DNA
agccctggcttcattttgtagaccaggctggcctcgaactgtgtattcagagtcatcaaaatgtaaccattctaaaatgatatattcagtaataaatctttaacggtcacattgtcaattattatttaacatctagtgcctgattttttataatcttcaatgtataaatttaaactattttaattctttctaattaaggctttcttatgaaattttattgttgggaaagttttttatctatcataatggttctgtaaatgatttagaaaggggataatatggtcatgttaatggccccatcaagatcttggcctagaggtttccatgagaactactgtagtagctattcctggttgtcaacttgactatatttggaatgaactacaatccagaattggaaggctcaccagtgacccttcgatctggatcttggtatggagatctagaggcatagtggctatggatctccaagttcatcatctgggattaaaggtgtggtggaacacacctttaatctgggctacaccttc

SEQ ID NO: 46722 - DNA, 382 bp, Mus musculus
  source 1..382: mol_type = other DNA
tctattatgctctcttccataactgaagacataatgggacaagttataattctagtcttcctttttcgcaggagaaacagggcacatggtggctcacaccctctttctggcaaagaggttcaacatacctactgttgaaatgaggactttgctgtgttaaagcaacacagcgtggtcttgcctacaaagcagtgtgctcacctggccacttatgaataaaagctctttggctgaaaaggcccacgaggggcgccggagagccctgtcctctagggcggggacgcagggcccggcgcaccctctaaagcgcctgcgcgcgatgcgcccgggatgagggtcgcacaccttggcaccgcccctcggagggtggcgacggagcggt

SEQ ID NO: 46723 - DNA, 433 bp, Mus musculus
  source 1..433: mol_type = other DNA
ctctggacatgcttgtaaagcatttttgtaagttacttgaggaaagaaaattctccctaaagaagcacaaagcattcactattcttttgagtcctagcagcagacacaatgctgtgacttccctgaaataatgaactataacttagagtatgtaagaataaatcccttctcctttaatttgctttagcttatagctttgagtactcaggtcaaaaactcacaaagagctcagataatgatatatcttaataatagttgtaaagaaataatatagataaagatcatttattctgcacaaaaaaaaaccttactctctaggaagattaggtaatttctaatgtgattggtaggggccaaagtggtaccattagtataactttgaatggctactatgttagtctgcatccatggacagccagaagctgtttacagc

SEQ ID NO: 46724 - DNA, 368 bp, Mus musculus
  source 1..368: mol_type = other DNA
gctagggtttaccagacagtatggtagacacaaccgttttcttttttttctttaatttttaggggaaagaaacgtcaacctttgtaatgtttaacctctgtaatccaaaatcagtgaatctggcagcacatgtaatgcccttcctaaagggctttacaatcattttcagttaactagatagtggtatacaaaaatttcaacgtgttgattacagatcacagggtccagccaggctgctcacatccaggctgcggttaaagcggttccctggaacctaggcaacacagcgcgcgcagagtcttctggcacgctcagcccgcgctgagattaaaagcacaggccctagagcttgcgtcacttccgctggg

SEQ ID NO: 46725 - DNA, 402 bp, Mus musculus
  source 1..402: mol_type = other DNA
gacaccattactcaaattctacatattcttttaaaaaattctacacacttttgcattgaaagtatcgctaaagggacccttcctcaagtgtatttgaaaatgacagttgtaaaagaatgtgtgatccggatccatccatcacactcacatggttttccctgagttcctggccctacagccaccacctcacccggtgcgtggtggcagaggtccggagtagcgcgacctctcaggtgagaggccacccagtcctcaaggcgctcaaggccggagcccattcgctgcagcctaagctgtgggtcgacgctgggtatcgccgggagcggagggcgggagcggcgaggacgcgcgcttcgcctgggtcgctggcggacgcgcgccggagtccgagcctgagacgcg

SEQ ID NO: 46726 - DNA, 379 bp, Mus musculus
  source 1..379: mol_type = other DNA
tcggaagcgtcctcaaagtagccttccgcattagttaactccgaatgatccagcgtttatcagtctgaatcatcctggatccttgccagcgccttgctaagccaccgtgggcaggcgctcagcacctcactatatgttaaccacttatttatttataaaataaaatccagcaaaaccacgcttagagcacagcagttgctctgcctgcggagctccttgccaggccccattaggttgttttttaaatacttgcttcgcgccccaagggctcgcccccacttgtcccccgggctctgggcctgtggcggggccccggagccctgggctaccgatctttgccccaggccaggtcgttcgcccacagcagcactgggcatgc

SEQ ID NO: 46727 - DNA, 800 bp, Mus musculus
  source 1..800: mol_type = other DNA
acactgtaggaagtgcagtttgatgctgtacagtgcattaagacattggactgtgtgaattaaggggaggccccttgtgtctggcacacactcagacgcgcctgtggctttctcttatctgaatgaataaaaacaaaaatgctcccatgcaagaatacgttatagtattttggtattgtctgcagaatatttttacgtatagtaaagtgaatttgtcacaaatatttactagctagctagacagtgttttttttttcctatatagtatatttatgaaaaataagttttttatttgctattaaagttcttaatatgacttggatatgtagcatccaatttaaaatgttttaatagaaagagttactaggaaatagtggttactagagtctaaatgaaataaaaaaccaatttgggctaatttaaagctttcttagtttttcataaaaatatagaaattgaaaaattacagttcttgaaaagagcaaatttgagagttgagaaattagcaaactttgttttggtaactgcacacacactcgaatgtctacgcatacacacccatgctaatatagagacatttctactttctgagggataacatagaaataatttggtaatttaggatatatactctaatgtggacaaaagctaatttgcttcagattacttagctcatatgataaaatgcatgcttactttttaagctaaactacattttaactactggaatagagattttaaactccatggttagaagtatatgtctctagtagcacttaacattatacaaaattatactg

SEQ ID NO: 46728 - DNA, 478 bp, Mus musculus
  source 1..478: mol_type = other DNA
aatcagagctgccagtttttccagagcctcaaagctttaaaagcagatttgtggcagcttcaaaaatgagctttgacatgaaatataatcgtaatatattgtatactagtaatatctgacttgaaaaatgatcatatatatcatttaaaaacccctacatcttggaaaggtgtgtagaacatagttctaatgtttaattttacaaagatttcacattaaactaaggagtctgtgaatgcagtcaaaatcctgtaaagaaataatgtttccttagctaaacaggacttctaaatgttagtttgaatttatggtaagtttgagaaaaggaaaaactctctgcatattttctccttttttttttttttggaaacaatacttctgaaaatcatccattgtttcttttgctagatgattttgagccactaagcagatctctctggcttctaaatgcaggctgatcgccctgggaggcctgagc

SEQ ID NO: 46729 - DNA, 473 bp, Mus musculus
  source 1..473: mol_type = other DNA
ttagttaactccgaatgatccagcgtttatcagtctgaatcatcctggatccttgccagcgccttgctaagccaccgtgggcaggcgctcagcacctcactatatgttaaccacttatttatttataaaataaaatccagcaaaaccacgcttagagcacagcagttgctctgcctgcggagctccttgccaggccccattaggttgttttttaaatacttgcttcgcgccccaagggctcgcccccacttgtcccccgggctctgggcctgtggcggggccccggagccctgggctaccgatctttgccccaggccaggtcgttcgcccacagcagcactgggcatgcgctagctcgcactcggcggcagcgggccggcgcgaggctgcagctggagctctggcgcccggagttggagttgccagccccgacccctccctcctcgcgcacagcggcaggagcccgcgcggga

SEQ ID NO: 46730 - DNA, 413 bp, Mus musculus
  source 1..413: mol_type = other DNA
cccagctggaccaggatcccgcccggcggtttccgcggcaagccgctgacgtgagcggcgttgcctgggccccgcgacccgcctccccgcgggagcgccccggcccgctccgcgcccccgccaagcccgcgcgcccccgccaagcccgcgcgcgcccgccgccccgcaggcggagactccggcgcggaggccggccccgcgcggcgcgtgtgggagtcgcggcccctcgcggcccccgcccgccgccccccacgcgcgggagacacgatgagcgcgggcgggcggcagcggcgcggagcagcgcaggcggcacacgcgcccaggcagcggcggcggcggcagcagcgggagcgagcgccgcgttagccgggtccgccgctccggccgcccgcggccgctcctctgcagctgct

SEQ ID NO: 46731 - DNA, 244 bp, Mus musculus
  source 1..244: mol_type = other DNA
gaaaatgaaggagttttatgcatattctgttctgcacaggaaatgtgtaaatgaacacattatgtagttaggatactgagttcagattctgagccctgactgctttccctttccaggtaagcaggcaacagacccattggcagacccctggggtcattactcactttagatcctaccgaaggaaaggggttgctccctccatcccctccgtttctcccttttcagtctctggataaacaaaacc

SEQ ID NO: 46732 - DNA, 500 bp, Mus musculus
  source 1..500: mol_type = other DNA
ttctgccagatttgattaattagtacttctaaagttggcttcttagtatttcaaaatcttatctttgaacgctttcagtatcaggagtcatactttattgttaaacatcatttcccactgttaaaaaacgttacatcggttaaaaatctaccttcgtgttaggtatctagattctagaaatccagcataatcctagctctaatgcttacagttctgatctttcagatatctgcctaaaagatctaaatgcttgtggaagtctcttaaatgtatttcagaaactccagacatctctgggattaaaattttcatccgggagaattcgccttcgcgcgccttctcattgcctgttggggggtgactggtgcgctccgcacgcctccgcggacgtgcaggaccgggagttgttttcctggccgggtccgcgcagccacccctgcgcgcacgcgacgcagcctccctgcgtccacttccccggggaggggccgagcagccgtggg

SEQ ID NO: 46733 - DNA, 659 bp, Mus musculus
  source 1..659: mol_type = other DNA
aaaaaaaaacggaagtagacgcccactcatattttcttcaatgtcaagcaaaatgaaaatatttctgccaccgggtcacccgcgcgtgagcgcgactctgggagtacacgtgtgtgctcgcccggggcagctctccgcccgcccgcccgcgtgcgtggaaggcctccaccctcagcccagcttcacagccgagctcgccgcgggccgcaggaagctgtaagtaccggcctggccgtggccgcccccgccccaccttccaggccccgttcccccgatgcccggctctccggagcttgctggcccgctcgctcccagggcgctgccggggccgccgcgtccccagggttcacgcccttggatacaaactttaatcaataaggataaatattgaggccacagtcgagcggccgcggcccggggcgcacgccccacgctaatcctggccgggtgggcgatctcccgccggtccccgcggctccaggcctgggccccgccacccggagggggcggtgagcggggggcggggccggggcggggcggggatgggcgggccctgggcccccgattggtcgacggctagccagacgctcctgcacgccggcggcactgattggttcggcagtaggaaaggttaaaccaaaaatttttttacagcccta

SEQ ID NO: 46734 - DNA, 481 bp, Mus musculus
  source 1..481: mol_type = other DNA
ctatatgtaggtgggaatttcaagattccattactgacatacctcaatgttctggtccagaagcgaaaatatgcaaaaatggtttgtgtgcttgtgcattcagaatttactaagaattatcagaaggcctctggtccctgtacatctacagatgggctctactagtataatcagatcaaaattagtgctgtgttaaagaggtcagctgacaagggctcccagagggagtcccccgttaggtgggctctaccaggctggctcccggtccactcctgtgcgggcgcttggaagggggtggtcaggactgccctgaatgggcgggtccgcggctttagagtccgccgagtgggctggggcggctgctgcgcgcagggggcggctccccgtcgggctccggttcccctcgtcggctccgcggcgccgccctcgccccgccccgccccgccggcgccggtcgcgcggacccgccgtggtccccgga

SEQ ID NO: 46735 - DNA, 357 bp, Mus musculus
  source 1..357: mol_type = other DNA
ctgcggaaggctgaggcaggatacaatgaattcaaagtcatcttagactaccttatgaaatataattgaaataggaatctttcctaatctttagacaagttttccataacatttatcaaatgctgggcgcgaagctgggaagttttgttctcagaaccgggtggcttggctgctctgcaccctgctgaggcgccagtccgctggcctcccccggggaccgtcggggggggggggcgagggaggagctggccggccaccgccctacgggggcgggagggggagggctggggaccgctcctagcccctgctggcgccccccgcacagtgctcatgcgcgccgcccgtctttatagcggc

SEQ ID NO: 46736 - DNA, 584 bp, Mus musculus
  source 1..584: mol_type = other DNA
ggtgagtaagattaaactcactagtccaactggtagttatagataacctgttgtaactttataaaaataggtatctacatctgtcaaatgtgtttttattgtaaaaaaaatgcaatcttgattttaaaaaataagataaattatttgtataattttgaaagccaaatttttgaaagtatgatttcatttcagaatctgactgcctgagaattaatccataatgcagtataagttgtcattgtatatatttttgacattaataaaatctattatgaaaatggtcgatgtgagatttatttcataatcacagggctctaccaaacctggctgtgatcatccggattctgctcacaaagtttcccccccccctccccccccagaggaaagagggaagggaaagaaaacgcaatttctggcgtctcatttggccttgtaaatttttatgaggatttaaacttgatgagaagtgcactatcaattagattgtaagcgctccaccaccgatgctgggaccggggaggcgggccggctgccgccatagcccgcctcctggttctgcttccggcgcgggaggtaggcttcgg

SEQ ID NO: 46737 - DNA, 465 bp, Mus musculus
  source 1..465: mol_type = other DNA
accaaatcagaaagatactctcaagagtacagtgcagtttttaattttttcttcaatattgtagtatcacatttatttaagacaacagttgccatgttgaaagaacatttcctgaactttgaggtcaggttatgaagttgactcccaacgatcactacttatatcagggataaaatccaagttcaaaatgttgcaagacatagattatttctaacaatgtgaaaagtttattttaattacagtggtagtcagaagataaaactgtcctagattagtcttgctaaacaaaatgtcaattagcaaagaccacatttaagaaatgaaaaatgttagttttagatttggagtaacagttgtcagcttaggaatgtacatttatgtaaaatctgaaagtcacagttaagagatagaagtattgtgttttatagttcatagtagtgtttctctcttaaaagttaaaaatct

SEQ ID NO: 46738 - DNA, 520 bp, Mus musculus
  source 1..520: mol_type = other DNA
tagactcttatgtaactaaaagattaaagacttctacacctgggtatttttaatttttgaataaaattgtttatagtttgtaaataatcaggtcagaaataaattaatcaatgtaattaaaaagtttactattcgacaccaaactgaagactcatatttatttgaggataattgttgtttcaacattatttctcaccaaagttattgtgttgtgtataataacgaacaatattgcttatgtcgaaatttataagtctgaaaaacaggtgcaacgcttaattagatacacgctttttttcttctaagcttaaattaaaccctggaaaggaactctccagcttgaataatcctttcaaacagatgcagcaattttaaaaattccagaggatcacattaagtggacatttaactccgttttagcttgtactaagcgataagtacggtctacttcaactctagagaagccgactcttgtccggccggccgcgagccattgtgcgcggcggtagcccgaagcggc

SEQ ID NO: 46739 - DNA, 518 bp, Mus musculus
  source 1..518: mol_type = other DNA
ctacacctgggtatttttaatttttgaataaaattgtttatagtttgtaaataatcaggtcagaaataaattaatcaatgtaattaaaaagtttactattcgacaccaaactgaagactcatatttatttgaggataattgttgtttcaacattatttctcaccaaagttattgtgttgtgtataataacgaacaatattgcttatgtcgaaatttataagtctgaaaaacaggtgcaacgcttaattagatacacgctttttttcttctaagcttaaattaaaccctggaaaggaactctccagcttgaataatcctttcaaacagatgcagcaattttaaaaattccagaggatcacattaagtggacatttaactccgttttagcttgtactaagcgataagtacggtctacttcaactctagagaagccgactcttgtccggccggccgcgagccattgtgcgcggcggtagcccgaagcggcgccctctccgcgtggcctcaccctcaagggg

SEQ ID NO: 46740 - DNA, 403 bp, Mus musculus
  source 1..403: mol_type = other DNA
tgtatgtagtatttcattctaaaaccatttaatgatgaagaaagatatcgttgtgttgatttagttcatcttaagttctatttacaatatttgtttcgatcaaaatttctgccactaatgacaatcatcagtctctttgaaagttatcgtttctcaagatatttgccaaacgtagacgtctccagaatcctgcaggaattccagcagctccagagcccaggccctcagctgagacaagcccgacgccggaaaagctggggcccggcgcccgagttggggcggggcccaggcctttccccgcctcccgaagagcggtccatcctcagtgcgccgaggccgcggagtgcggcttgcgtgccgtgcgcgagcggcggccctccgtcccggcccccctctcccccaa

SEQ ID NO: 46741 - DNA, 774 bp, Mus musculus
  source 1..774: mol_type = other DNA
cttgactccagccttgtcacggttacgtgaggactccactagcagcggctagtatttgatttttcaacgccatgctggctgcttcccgggactccacggtgggcaggcaggaggcacgagttcccgcagccgtcctggtcccatctgcgccgaggcgataacgcccggctgcgcagcgctcgccgagttcccaggctcgctgggaagcgttctggaaaccgctggggtgacccgggcacgccgagcgcctgcgagacggtggcctccgttccgcaggactccggagcggctcgcgccgggcgagacgggcggagcgtgcgcggagcagctgctggcggcgcgcgcggattgacagcgcggcgactcgggcgccgggaggccgggctgaggagagccgtagccgaccgccgaaggagcccggcgccccccgtcgtcgccccgtgccgcggggtccggcctccgcagcgccccaggtggccgcgggcagggcggccgggaggcgttcgctccgcctccgccggcgcggccttcaccagcctccccgcccggcgctcggccgacccttctcctgcccccgcccggctggcgatggacgcggcgtctccccgctgccgccgacggccccgcgcggacctggctctgaaccgcagggtctgaggagccgcgtgctggggtcgggacccgcgctggctgccgccgctcgggggagcctctcgcttccttgtcaccgggtccccgcggaggaaggggagggacgagacacggcttttcctg

SEQ ID NO: 46742 - DNA, 554 bp, Mus musculus
  source 1..554: mol_type = other DNA
aaattaggtcttgactccagccttgtcacggttacgtgaggactccactagcagcggctagtatttgatttttcaacgccatgctggctgcttcccgggactccacggtgggcaggcaggaggcacgagttcccgcagccgtcctggtcccatctgcgccgaggcgataacgcccggctgcgcagcgctcgccgagttcccaggctcgctgggaagcgttctggaaaccgctggggtgacccgggcacgccgagcgcctgcgagacggtggcctccgttccgcaggactccggagcggctcgcgccgggcgagacgggcggagcgtgcgcggagcagctgctggcggcgcgcgcggattgacagcgcggcgactcgggcgccgggaggccgggctgaggagagccgtagccgaccgccgaaggagcccggcgccccccgtcgtcgccccgtgccgcggggtccggcctccgcagcgccccaggtggccgcgggcagggcggccgggaggcgttcgctccgcctccgccggcgcggccttcaccagcctccccgc

SEQ ID NO: 46743 - DNA, 358 bp, Mus musculus
  source 1..358: mol_type = other DNA
tccaggccagcctgagcttaattctgtcttagttagggtgagcacgaaagggtttcggagtgctacttagcagtttaccctgccctaggggtggctccacctaccttgtgtcaagttgacaaaactagccagtgtactccagttctgacagatctgatcgtggtatacatgcatacatacatacatacatatatacatacatacatgcaaacacattaaaaaaagtcttaaaaattctttttaaacaaaagactgaagtagtcaaaatgtacagatgtgctactgtaaacctataatagtggctcagccttcttaatgttacaatgttgctgttgccatagcaattgtaccttccatt

SEQ ID NO: 46744 - DNA, 290 bp, Mus musculus
  source 1..290: mol_type = other DNA
ttctcttccagaaatagtatagaaacaaaaaggctttttgctggctatagtgaacaaagagcttctttctgggaaaacaagcttggggaacgtcccaggggcttttcaattgatctcattctagttatgtctttataataaatatagaatggatttaactctgacttacattctttccaatctggaaacctaagctttctgaaatgaaaaatatttcttcaaaagctccgggactccggagagccaggcggaggccccgcccacttaggtggggccacgagcagtgggag

SEQ ID NO: 46745 - DNA, 476 bp, Mus musculus
  source 1..476: mol_type = other DNA
agtgctgattatctatatgtacacattcttaccttatgctatgcaaatgctttactactagcctagcccttaagttcccacactgtaggtcacacgcaatgtgtgtgtgtgtgtgcgcgcgcgcgtgaacacacacacgtgtaaatataataatgttaacagtggcattgctgaaatgaccatattaaggaaaacttaatcctcaaattccagcttttcccatttctgttaagatgggatatcttattaaaatttccaaatctcagtttttagattaataacaagagaggaggattgaaggaggccctgagttcagccctagcataaagccacccttcaaacataaaatatatttttttcctaataagtcttcttgtttactctggaagaataaactagttaaacgctgcaaaaaaatatttctagctgatgacaaacagattgccaagggttgccacgtgacgtcatttttccgc

SEQ ID NO: 46746 - DNA, 580 bp, Mus musculus
  source 1..580: mol_type = other DNA
cccagaactatgggcaccatactctaggaacgcagcaaaagcttggggaggtcctctagagcctggggtacagtctgttcccagcaggcgctgcccggcctggacccgcgagtttgactgggcggccacgcccgtccactctctgcgggtggccggtcgcaggtaacgcctgcctgtgcacattttgcgcaggcgccgattaggtccaggaccgaggctcggggaccaggggccgcaccccttcacaggtgtctggcaggcgctaggcctggtacactgctcactttggagtagaataatagcagagtcactcttgtacttccgttccttttcctgtatattaaatgacatgttagccctgttatgatacaaatgtgtaaaacatacctacttggaggaaatatttgttgtaattttaaataacagcgaagtcttagctctcagaatgaagtctgggcaaagcagtacttgatttccctacatagtgaatacaagcccagcctaggctagtcagctaacttctcttgagcagacagacaaggcctatccttgttccagcagcaaacagaagagtcctcca

SEQ ID NO: 46747 - DNA, 385 bp, Mus musculus
  source 1..385: mol_type = other DNA
ttcagagcttaaaggccttgactctctgccttttcacgtcaatgcacagatgaatgagcccttggggctaccctaatgggactgtctgagtggctccaggtgccggagagcgacgcacagagacctaagactccaagggattctttgcaggactccgagggaaggctcggcgaccatgctcggcgtgaggcgcctgaaggggagcgggcctggagcggggacgcggccccgcgcgctcgcgcgccccctccctccggcgcggcaactcgcgcctcctcggctcccgggagacgagggcaggggcggggccgaaccgggatcgcggctcgggaggcgtctggagagcgccgcggggcgggggaattctggggcgggcggcgcgggc

SEQ ID NO: 46748 - DNA, 400 bp, Mus musculus
  source 1..400: mol_type = other DNA
acactggaaagaaaggactgatttctttggattttcctccggcatgttgtgagtggcagtcacaagaaacttcgataggtttcactgctcctgaaggttaagtggtagcgagttctccagcagcaggcgggtggtgtctacccgagaacaccagtctgtgcactttagaattagactcacttggtcagctgtttattacattttaaattgtttcaaaatctgaactaaacctctttttaataacttttaaagaggtatcgttactagccactctgtagagcagcaaacgaagaggtaatttttattttgttttctaaaattattctaagaaatccccttttaaacttactggaaatgcagcaaggattcctagcacatcccagttgccatagcaacatga

SEQ ID NO: 46749 - DNA, 410 bp, Mus musculus
  source 1..410: mol_type = other DNA
agtagtaactcagctgctttaattctgcagagaataatccttacttagaggctctgtatagcatttataatagataagtattgccatccaaatctagggctagagaaataaatcttgatacagttgttttttaattaaagtttctttatatgaacatattgttttgtttttttaaaaaaaggcttttagaaactagagacaagagacagctatatcagggtcctttcagcaaaatcttgatgctttgttcccaattctaagaaggggcaaagtgtccacgtaatacccaaggagctaaaggggtctgaccctatatatgtagcagaagatggcctagtcggccatatttgaaatgtaaatgaagaaaatacctaattttaaaaaaagaattatttgaaaaaaaaatttga

SEQ ID NO: 46750 - DNA, 312 bp, Mus musculus
  source 1..312: mol_type = other DNA
agccattccgcgggctgggatcctggtttctggcagcctcggaaggctgaagccagccctttctccagagaaaggaggagaaagagcgcaccacaatcttgcactttgggtctctcagctgggctcgcgcggcgctgctggagcagccaagcgcctctccgccgcgcacagtggccgcggggtgcctggctccgctgctgccgccgctcgcgccgctgctgccgccgccgcccgaacccgagcccgagcccccgccagcccgagcccagagcagccgcgcctggggctccaagccgcggcgatgatccgaat

SEQ ID NO: 46751 - DNA, 365 bp, Mus musculus
  source 1..365: mol_type = other DNA
tcatttgacttaactgaaaatctaaatctctctctcatttggaaggaaagggcgggcctagggctctagtgcaagttgcatgaatttcagaaccttttagtaaaaagcttgagacaaaaatttgatgaatcagtcagttttggttaaaattaaattcacctctctctagagcttaaaccttaatgtttaagaaatatagtcacatgtgcatctcagacgtgagaggttttcaagtttgttagatttaacgcaaatcaatatgctgggtcacacacaggttagctagagtggagctcacccagatgctccgcagcacccgggggcgggacccctcccccggccacggccgccgcggcggtggctct

SEQ ID NO: 46752 - DNA, 380 bp, Mus musculus
  source 1..380: mol_type = other DNA
aattgactggccgtctgacctctgggcaagtcattagtttccacatctgtaaagtggagataataatgtttccctacttcaaagaattatagattaatcaatgtctgaaaatgtctcttatgttaattcattcaaaatgtttcaagtggaaaataattgcaagagtcttcattctcgaaaacatcttcggaccaaggcctcttggactagtcctggagcatggtgtggccagtgtatgtggccagagactgctgttaaggatgacattcttggctcttccctggaggattaagggatggagaacgaggaaacctcctggtttatatgcactctagatagtttcatgggatccaaaatgaatagctatccactctaactca

SEQ ID NO: 46753 - DNA, 434 bp, Mus musculus
  source 1..434: mol_type = other DNA
gttttaaagcttaaagcagcaggtttgaaacttttagacatgtgagttgcaggctacttaattatgtcatttcacaagcacacagtgcatgggctttagctagatcaagtgcacttgaaatattggcaactgtctatggccaattcgcgcgcgcagctgatgaacatattacttctacagttctcttggcccagaagggattcggattggggactgaagccggtcttgcaaccgccatgcgtgcgcgtcccagaccgtttcccagggctggggagctcgctccgggcgaggcgcggggcgggacaggagcacccgcttggcccaggaggagccggcggtggccgctcgggtgcgcgcggggttgggcgtacacggtgacgcgcaggctcggcgtggtggcgggcgggccccaaggcctggggctttaggaggtg

SEQ ID NO: 46754 - DNA, 386 bp, Mus musculus
  source 1..386: mol_type = other DNA
atccataaatatacgcttatattatgtaaatattatcaataacggaaaaaaatggccgcgggaactcgtctgtaggcccctcaacgcgactccgcccactaaggctgtgaggcgggggcgaacctaagcttctgcccaggctctgggcaaagaaaaagttttttttagctcaattcattgttaagtttaactagtaaaagaaaaatcgtttttccgtaggtctattatacattatttacttgcacacagatagtgatatacaactgtcagctctccgcaggtcacggtggttagactgggttagtgagaccttttcaaaacctaaataaagcttaagttaaggcggcggcggcggagagacgtgttaacactggacggcttgcgca

SEQ ID NO: 46755 - DNA, 512 bp, Mus musculus
  source 1..512: mol_type = other DNA
gcagatttctgagtcagaagccagcctggtctacaagtgagttccaggacagccaggcctatacagagaaaccctgtctctaaataaataaataaataaataaataaataaaagtggagacaggtaagttagaaatgattatttttataaaatttatttatttattggagtcctggggcttgaactcaggcctctaggcttagcagcaagtactcatgctggaagcaagcaccccaaactgaggtagttattacttccccagcagtaaagcttttggctcctgaaacttccacaggcaatatggtattaatggtgattaatcatcatgtaactcaatacaaagacaagaatatttactgtgactcggacgtggaccgttctccgggtggccctggggccttcccaagcctgagctcgccccttcagggactgctccccctcctagagcgggcggggggcggggctggcgctcggctccgccctccgccccacccgcgcggccgactaggttc

SEQ ID NO: 46756 - DNA, 487 bp, Mus musculus
  source 1..487: mol_type = other DNA
tctctctctctcttataaacatttatttttctagtaatctcaatacatcccatttacaggggaaaagaaacgtaacttgagcagtttctggttttacttggattataattctgtccaaggtatgaatagtacttcaatcactaaggtaatatttatagtgttcgttctccttttagtaataagaggggtggtgcttgcctgtaatcccaacacctgcaggccgaaaggttacaatccggaccctttccgtgcgccaggagcccgcgaaccgctcgagcgttgaacccggattggtcgctacgaccatccctgtcagcatcggggctcccgccgccgctgcgcgtggttctggctccggggtcaggcggaggacagcggcgggggcggggcctgaccacgtgaccgcccccgccccgcccgccctgcggccctccagcccgccgcccgcccgcccggctgcagctcccggcgtgccctgcactctctg

SEQ ID NO: 46757 - DNA, 606 bp, Mus musculus
  source 1..606: mol_type = other DNA
cagtttttaaaatcatttcacagcattagtaattaggaaaaaaagtaacattttactggaagactattcctcagttatacttttagactcattcttacatgttaatttgcaaataagcaaatagagtgatggcaaaaattattaaaagttggtgaacattctgaatgacttctaacttagaatatccttttcaattcaaaagtcccaagtcttataagaattaaatttggtttcatttgtgaaaattactgatatgggaaaattgtttaatgagacatctcggtagtaaatttaacatcgttaggactctaattgaactgaaaattgaccttaagttacttgtagattataagttacttatactttttaaaaattctgggtttagttttaaatatgtcatataagtgagatgacatttcaaacttttgtctcaaactctttgaattgtagtatcaagaaggactggtgtcaaaaaaagttctttctttcaagatggatgattacgcatgcaaaatactcgcaatttaaatcggagccggaatccccttttcaactccattaattaataatggtatcagtgacaggctgtaaagaaaagctcctccc

SEQ ID NO: 46758 - DNA, 406 bp, Mus musculus
  source 1..406: mol_type = other DNA
aagttctgaacaatatgctaaccaacatgttagtaaacactaatgtcaaaaggctttggggaaatagctttatctaaattcttgttcttacttatttggctcgggtaaggcgatcactgcccgtggccacccgggaagacttccgcagaagcggcgctctaactaggggttcccaggggccgtggccccacagggccggcgagcccttagcgagggacagggacggagcccgtcgcccaacttcccagctccgaggagacgtcatcactcggcggagccggctcccccgaaaggatgccgcggcaagctagcagcgagacaggacctcctcgggtgcctccgcaagggcgcgcggcctagggcttctgaagccgcgggaggcggggtcccggaggtcgcagcgcgc

SEQ ID NO: 46759 - DNA, 414 bp, Mus musculus
  source 1..414: mol_type = other DNA
acgaactcaggaccttcagaaggtcaatcatgtatcaatgaagatcttcgtgttaataaaaagctattgcggatttctgagttcgaggccagcctgggctacacagagaaaccgtggcacttgactcaaattagggagtttttgatgccatgagaccttgcctcaaaaagaaaaccaacaagtcttgtataattattgcgactatttctttgatcactaggaaaaataaagtctggaaggaggctgtcccccgatcgtgagaaatgaaacatgtaacaaatgcagttctggttttaccagctgggaactggttctcagtcccagactgggccctgcgcagcccgcgtgatcatccggcgcaggtagggcggtacctgcagaggccacgcccccgggcccgcggaagcgacgaag

SEQ ID NO: 46760 - DNA, 504 bp, Mus musculus
  source 1..504: mol_type = other DNA
taatttgtgagttttcatattaactattaacagtttaaaaagaagtgttttttttcttccccataccatggaagattattaattggtctattttaccatgtataagataaatgtactaggtatatgtgattttatttgccttgaggataactccacagcctaaaaccgagctttttcaagtagtatcggcctgtacgagtaatcctaaaatgcgaccaagagacctggtgcctatttacgggtagtcctcatccagtggagcagtgccgggacatctgcgggagccgtagttccgagcaactgaagtacagctctccgagcggttctcactgagcacgcgcagccagacacgcgcgctgcgacctccgggaccccgcctcccgcggcttcagaagccctaggccgcgcgcccttgcggaggcacccgaggaggtcctgtctcgctgctagcttgccgcggcatcctttcgggggagccggctccgccgagtgatgacgtctcct

SEQ ID NO: 46761 - DNA, 335 bp, Mus musculus
  source 1..335: mol_type = other DNA
gaccttcggaagagcagttattaactattaacagtttaaaaagaagtcttttttttcttccgattattaattggtctattttaccatgtataagataaatgtactacatgactgcttacgggtagtcctcatccagtggagcagtgccgggacatctgcgggagccgtagttccgagcaactgaagtacagctctccgagcgcactgagcacgcgcagccagacgagcgcgctgcgaccccgccctcaaaccccgcctcccgcggcttcagaagccctaggccgcgctcgcacccgaggaggtcctgtctcgctgctagcttgccgcggcctccg

SEQ ID NO: 46762 - DNA, 236 bp, Mus musculus
  source 1..236: mol_type = other DNA
aatcctgaagtgcctgttaccttccaattttcgaccgaaaactcttcggagagaagttcacttcatcccacaacgcaccgcgctgaacgtggtgctggggccctaattccagggttaaacaaaccaggataattttgaaacttttagttgacgaaaatgcttttctcaattcggaaatggcaatggagaagtcacgcaggcttcttctggcctttagaaaagcttggcgaagtctg

SEQ ID NO: 46763 - DNA, 340 bp, Mus musculus
  source 1..340: mol_type = other DNA
cttccaaagtttcgggatgctccgaaaagttgaatgaaacttaaaaataaaacagtttcactccactacgtaaaattaaggtagactttttttgtttctccgttacaaacaaatcaagactatgtagcacacgtgttctatttattaaataaggaatcctgaagtgcctgttaccttccaattttcgaccgaaaactcttcggagagaagttcacttcatcccacaacgcaccgcgctgaacgtggtgctggggccctaattccagggttaaacaaaccaggataattttgaaacttttagttgacgaaaatgcttttctcaattcggaaatggcaatgg

SEQ ID NO: 46764 - DNA, 269 bp, Mus musculus
  source 1..269: mol_type = other DNA
atgaggtcaccgttatgctctcattctctgactcctttgtcagagaagtttaacagacggggcgggctatctagagggcggtcccgcgacgctaaccgccggcgaacagacttcgccaagcttttctaaaggccagaagaagcctgcgtgacttctccattgccatttccgaattgagaaaagcattttcgtcaactaaaagtttcaaaattatcctggtttgtttaaccctggaattagggccccagcaccacgttcagcgcggtgcg

SEQ ID NO: 46765 - DNA, 451 bp, Mus musculus
  source 1..451: mol_type = other DNA
agagatgtctctgccttccaagtgctgggataaaagatgtgtcccaccacacctggcttatatttttttctaaaggaagaaaaaaattagctcgagaaattaaaacttccttatgaagaatctcttcaaatgttttgctttaaaatgggtgcttttagagagaaagatctgaatatttcagtattacatcagtaaattgttataaatattgctgtaaacaaaacttttatttaggttaataatatgcgtgcacaatgtgcagaattttacagtttgaaaaaccaccagtgtcttgccagactagaagaaaacttttgttatttccagtggggctgcgacccagagccaccacccggaagcccgcggaccgcaggccgggcgcgcgagggcccgcctactcaggggcagtgctttgggacgtcccgtcccccctcaccagagcggaagcagc

SEQ ID NO: 46766 - DNA, 433 bp, Mus musculus
  source 1..433: mol_type = other DNA
atgttagccttggctagggcactaacaacagttgcggttgcaaggaaactacaacttctactaagacttggggaaaaatgtggttcccatggagctaggatttgcccctcccccgggggggggggcaagattattgacccctaggaaataatctaggggttctccaagctcgcagaaatttaggagaagcgaattttccactcttgggttttcaaaaagatcaaaaaccgcagcctagcaggtctgcgtccttggaagctgcgcagcttgggacccagggaaagaagggttcttgccctgtgcatgaccccagtggctcatcgcagggagtttctccgatgaaccccggccctgggtttagttctttttctagtctgactggcttggaaattccccgcgcctgaccccgccccgccagcgtttatagggcgcc

SEQ ID NO: 46767 - DNA, 446 bp, Mus musculus
  source 1..446: mol_type = other DNA
gtatggaaaaagaactcttgcaagttgtctttcaatttacacacacactgtaataaaagctttaaaaaagaagggatacaaggttattttcttaaatatctataatatctttacagcgaaagtatatttaattatgaaaacattatttcataaagttatatgattagaaaggatttttagcttaaaaaagaggcttatttttatgagtatgactatttctatgtatgcataggagttacagaatgagccaccccgtgtgggttctgggaatccaacccgggttcttttagcttcaattagtaaaactaatgtgtagatccgtgtaaaacaaaatacaaaaaagtaatttttgtgtcattctcttaatttcagatgatcattcagttatgaatattaacttctgagctcctctgagtaggttgcgtttgctgcccgcctgccgcagc

SEQ ID NO: 46768 - DNA, 588 bp, Mus musculus
  source 1..588: mol_type = other DNA
ttgacaatctgttgagttggtgtactgcacatctttagcaggtgtaatgccgattccaccagcatttcttaaacaggccagttaggcagagaaaccactttatgtgaagggaggggagctcggcgcctgaaccgtgcagcgtcctgagctccagaggtttgccagcacgcacgatctgcggcgccgagagctcttctccccagatctgtaggcacagggcggtggatttagctgccctgcagttcgctcgcagcttctcatcagctcagtactggcggagggacgttaacccgttcccgcgcggattcccgccctgtcgcacctcccgaggcggccgagcctttcagagcgacgcccaggcgtgggcctggtcagttctcggcgcgtggcgggctggtggctctggctccctagcgcgaggtccccggaggctgcactgggcgccccaagccccttcgtgccccgcgtctctgtcggggcgcccggccgggtggaggccccgccccgggacccgctcccactcctgattggccggcacagcccgaggggcccggcccgacccggcccggcgtctcagctataaagcgg

SEQ ID NO: 46769 - DNA, 356 bp, Mus musculus
  source 1..356: mol_type = other DNA
aaacaaataaaataaattatttaaagtctctaaagaaaaatacaaacaaaattgtctaacaaatattaattacaaaaagccagagtttgtgattactacttgggtgagtatttcacatctaaagacagaaaaaggatgcatttacttgtacaagatattttatttatttatctggtgctagagcgaactgcagctctagccaatttttaatcattattttgcaagatgatgtttaagttactcagtttaaagaggagatgaacgactttttcaacaaaaactctaggaaccgctgtttatagctcacgctgacatgacgtcacgagcacttgacgtcagaaggcggttgccacggg

SEQ ID NO: 46770 - DNA, 564 bp, Mus musculus
  source 1..564: mol_type = other DNA
atactttaaccatatattttgttgataaaatggacataatgcaaatccatgcagtgaatttaccataagttacgattattataatcctgtttttgaaaaaaaaaaaatgacatctttttaagtcaaatatttatttttcactggaacctgaaattaaatcaatttaatttgggtagcttcttccattaaaaaaaaaaaaaaaaatactaagataaaatttcctttctgtagttttggttgtaaaaattccaagaacaatgaaattttctttgtgaaaattatttcttacacatacaattcaatttaatagtttactagctgtactaaaggtactactagtgtagaagagacgattctgtaaccctccaggctcacagagtatgcaaagaccctttcaggcaaaggatcttttcatgaccaaatccgcacaatctgtttctgtttagtttataaactgcgtcccagttgggacttaacccatagcccctgaagctctgaggcctaaggactatccgggacagccttgaccaatggcagagctcgcagcgcaagcctgcgggttag

SEQ ID NO: 46771 - DNA, 366 bp, Mus musculus
  source 1..366: mol_type = other DNA
ggggatcggtgacagcctcccggaggcagtctccgcccgctgggattctctcgggtaaggggtgtccctctgacggcggcggcagaagaagcagacagcagcgcagcgaagcccgatgccgcagcgggagggaggagcagccccggcaggctcaccccgaccaaattggaccgcggttccactttgtaactcgcgcgccacaggcaccccacaaaaatgggggtaagggagggggaaagtaatgctttggttctctctctctcttctctctttgagacctaaaaatcttgacaagtgaagcttaaaggtgtttaccttgtcatcagcatgtaagctaatggctgcctaaaacctggcgccgggcta

SEQ ID NO: 46772 - DNA, 472 bp, Mus musculus
  source 1..472: mol_type = other DNA
aaaaaattaatagaactctacattataaaattataacttttttcgctaaaataaagctatctaataatacccaacaagagtcgatttagttttatatcctaattttaaagccctggctgtcctggaacactctgtagacaaggctggcctcttatatttctattggatttatattgaaacaattttaaggtcaaactatgtcagaactttgacataagtaggaaaaagaagcataatgtagcccttgtgttctttttaaattcctcatatcaaacagtcttatagagatgaaaatgttctatccaaattcctgggtcaagtttctagtaattagaaaattgtaaagcactgcctcgactgttaacattttaaattttaatagcgggactcaaattctaacacttaagagtaacttcctgtgtgtctgtcacacacagagggtggggcctatcctcaagctctaagtgagacg

SEQ ID NO: 46773 - DNA, 457 bp, Mus musculus
  source 1..457: mol_type = other DNA
aagaattacctccttctgtaagtggcactaaaaccgggagagacaaatacactctacccttggtgttcctatgaccaccaacaattataaagacttctctcgacactgtagaccgtgcttgagagcgccccccagagaagtccctgggaaaggagagcgcagagctctgctttccacttgttaaagtcggggttccctgcttcaaagccacctcgggggcggttcgaaaatgcgggcccagatgggaggcccgctgatgcccagagccttccttcccttcacgatggaggtaggtggtgaactcttcaaggagagatcttaaaaagcacaactttccatactataattgctattaatggaaaggagcctaccctgctgaattaagtagttcattccttgactggccgccgaagtgtctaggaggcacctgccgggccaggaagcatctgtgccatgc

SEQ ID NO: 46774 - DNA, 343 bp, Mus musculus
  source 1..343: mol_type = other DNA
attctatgtcagacggggcagctgtggttgctacactgtgagcagtgagtaatgcagaccgctcacagctttggtaggcttgggtcctcgaatggaggagctcagccagagtcccagactcagggtccatagatgccagaccaggatggacatttccccacaggcttccagacctttcagactgtgtgtggtgacaagaccaggccatcctctgatatcttaacgtagttataaatcactttccaaataattatgagaaactacccacgtcagcctgagaggagagaagctggggctcagttgggaggaccatggtcactgttcgcgcgacctctgggaggta

SEQ ID NO: 46775 - DNA, 425 bp, Mus musculus
  source 1..425: mol_type = other DNA
catacctgccagtaacagctttcaatgtaggtaatttatttatgcatttgcttgctaattttctcaaacatatttgcttatgaaaataatgttcgattgaattaatggatactgcctttcaatattggaagtgttagtttttcataaaagaaatattctagtgtcctgtttgacaacagatacatgaaagcttttatcccaaccgatcctagatatcttttgaagaagacagtagtcatcaactatccaaggcacccagagttggatgatcttggcatcaaagtgcctttggcagccttaattttgcatattaaaatcctaaggctccgttgtgtcaatttgacacaggctggagttatcacagttgaggaaatgcctccatgagattggggcattttctcaattagtgatcaagggggaaaggc

SEQ ID NO: 46776 - DNA, 356 bp, Mus musculus
  source 1..356: mol_type = other DNA
aactgaactgtttggctagacctcaccaaccagacagctcaagaatgaaaataagatataagtattcatttcgtatatttgatttgacattgtattattttaaattgcacatacccatgtttttgacagagaacaacggcagtttatatggcccagaatatatgcattaaacacaactaactggtgtgtgagttaattccacattttgtagaaagaaataagcaggcttaaaacaggtttctaggccctaagcccaaagaactcgggtgaccctgtgaactgggcacaggacacttgaataacagttttcagtaagtaaaactcagtttattatgcatagtaagtcagatctgctt

SEQ ID NO: 46777 - DNA, 310 bp, Mus musculus
  source 1..310: mol_type = other DNA
tctgaaaggtgaacctttgctagaggaatggatggctagccactttgccatcctgcctttataaaaataaagtctttcacgaactttgtctattaattcagaaaataaatataattttctgctgtgggtgtaaaaaattactattattactgttaccccagagtgactggacactacttctctttctttaaaaggagaaaaatattcgaatattatcagctatatcatctaatagaatgcaaagcactgcgcacagacagaacgcgacctcgagtcgccggaagccccgccccgtcccgccccgccccgc

SEQ ID NO: 46778 - DNA, 318 bp, Mus musculus
  source 1..318: mol_type = other DNA
tcaatccatcatcatcaaggtaagagcatggaatcatccaggcaagcatggtgtaggcaaagggtcttaagccctttttaatatattgtatactagccctcttggcaaattagtgctaataacatttgccatttgtatataaaagggctatttaatttttatatagatgttctgctgagactgtttatcagctgttgaagttccttgatgaaatttttaaggtagcttatgtataccgttatatcatctgataataaaggtacttaaattttttccttttcaaaactgttgatgatcttccaaggacttttatcatgg

SEQ ID NO: 46779 - DNA, 615 bp, Mus musculus
  source 1..615: mol_type = other DNA
atgctttcatgtcagtaatatatgcattacatgcatccagctcaatgcacatgtatctgtaaataattttattaaacaatgttcacttataatcagactgaagcctgagtattgtttctgaaaaagaaacattctgtttgagcatgagatgttttctgtgcttttcttacataccatatttaaatccagacagtgccaattcaaatggaatgtgctgagacagtgttcacagtcaggtttatatcagatattaaaattataatcttaattgattttgtttcaaaatattggaatgatactgtccaatattttaggattagtagagtctttcagcatcctttgctttaaggcaaaggaatgaatgaagttttatgactgtatgcacatatacacatggattaatattttccattttctataatttcagtttttcattactcagagagtatattgcaaccttaattttgcctctagaatcagtgtatttaagcagttaaatactatataaggacaataaaatcctatgttagaattaattacatatggaaagcatttattagataagaacagttttttttttttctaatgtgttttagcttcaagaaaaattggcta

SEQ ID NO: 46780 - DNA, 299 bp, Mus musculus
  source 1..299: mol_type = other DNA
aggcaggcttgactaggatccgccgctgcagttgtatgtcataaccacctgctcttagccgcaggtacgagtttcgtggcagcgcctccgttctgctcgccaggagcccaggtcggcgcttttcccctctccaagccccgccgggacggggagcagcacagctctttgggtccagagccctggcctgtcctccgggaggggcgcggggggcgcgcggcgctggcgcggcggggcgggaggcgcggcggctggactggcgggcggccgcctcacaggtgcacctcgtgggcactccggcg

SEQ ID NO: 46781 - DNA, 426 bp, Mus musculus
  source 1..426: mol_type = other DNA
taagatttatgaccacacattttgtgaattttttcaatttttagccagatagataaaatggctaagttttttttttaattcaaatataaatggtaacaatttgcacttttcctaaaaaaatgtatatattctgtatgtgtctgtttggtgaatattaagtatgtgtatattcaactttaatagataaggtccattgtttcttagatcatatcagaaaaagctgaatattgcagaatttaagcttattctctatgtcctggaaacttgaatctcatgcctcagagttcaaatcggtgatcaatgtggcagtacactcacaggtaatacagacacactcctttagaaacaaatgattgtatgtctgtataatgagacctctcatgaagggtttaagctgctggaaccagggcctggaactgatttctg

SEQ ID NO: 46782 - DNA, 455 bp, Mus musculus
  source 1..455: mol_type = other DNA
gttccacctggaagatgcttgaccagtctccgggagagtgacagaatgtttctgcagactccacagcaaaagttcaagttgactttataaaatatctgaatgccagaaaattatttttccctggcctatgtagtaaaatacaaagttggaaaggttttcttcattttcctatgtgtgtgtgtgtgtgtgtgtgtgtatacatacatacatacatacatacatacatacatatatggggtcatattttcaaacttatgtaaatgtggattcaccttccatttatttacttttactccatttcaagtttagtttaagtggagtcacttcattttccctggtggacaaaggaaagctttgcttctgatttagcaattcttctagataaattgtatagtaaaataatgcttgcttagaggccaggagtttcactcaagacagtttctgaaagcccatac

SEQ ID NO: 46783 - DNA, 461 bp, Mus musculus
  source 1..461: mol_type = other DNA
cactggactgcagcaggccagtcttcctggccatgcttcaggctaagacttgcagggatttcctggaaggaaacagcattcatgaaaattgaatcctttgacagaaagtgactgtaaggccaaagagtccctaagttcggagtcctgggaactccagggtcccttaacaaacaaaagcctgcagttcctagactagggatgggaattgtaggggatcttaatatccatatggaggaaagcttgaatgccttgccactgatcccaggcttccatcagttgctcagccagccactcatagattaagagttggcgtacagcctggacgcgcgggcacagctgttccaacaatacggcgccaggcaggttcctggggcagtgccagcctcatccactccctgctgcagagtggagggctacggatgttgtaactcagcatcccttaacacacctgggcacttgtg

SEQ ID NO: 46784 - DNA, 520 bp, Mus musculus
  source 1..520: mol_type = other DNA
ggtagccagtgtcctctttgatatggtaaataggcaactcagtgattgaaacctaacaataatgctgattttatgagcaagtgtgcacatgtagctgattcaatcatttttcaaattacagagtattattatgattgaataaatagtttgattttcaaaataaaaatttttgagcttttatttgtgtccttttacacttttcttctataaatgttggcagataatcacaggagctgtgattttccatagttcaaggataaaaatcacatacagatgtgattttataagaccgtgaactcattcgcatatgacctaatatcctcaagagggtttgagcacatgtactggtgaggaaaccaccataatcagacctgttgtttgtcacctcgatgtaaatattaacttaggagctatttttccattgaaaatgcccccaaggaattctaggccccttgactggcaatgggtttccttcagtaaagaaagtggttttactagtgaggcctccatggaacagtct

SEQ ID NO: 46785 - DNA, 508 bp, Mus musculus
  source 1..508: mol_type = other DNA
taaatagtttgattttcaaaataaaaatttttgagcttttatttgtgtccttttacacttttcttctataaatgttggcagataatcacaggagctgtgattttccatagttcaaggataaaaatcacatacagatgtgattttataagaccgtgaactcattcgcatatgacctaatatcctcaagagggtttgagcacatgtactggtgaggaaaccaccataatcagacctgttgtttgtcacctcgatgtaaatattaacttaggagctatttttccattgaaaatgcccccaaggaattctaggccccttgactggcaatgggtttccttcagtaaagaaagtggttttactagtgaggcctccatggaacagtcttctaagcggggcattggacccccttggcccagcgttgaggcgccagctgtgttcctgacccctgaataaatcagggccaaaaagagcctggcagggctctgggacacatttcctgtcacggcctatt

SEQ ID NO: 46786 - DNA, 196 bp, Mus musculus
  source 1..196: mol_type = other DNA
cacacgagagatacttaaaaactttaaaattactattttgcgagccttctcattggctattttctagcgaatacttcaaataattgaagagccttttctatatactagaaaacaaaaacaatcgcctcctcccctttgacgtggcagaggcggcaccagccatgttgtcctggcccaggccctccaagaggccggg

SEQ ID NO: 46787 - DNA, 316 bp, Mus musculus
  source 1..316: mol_type = other DNA
tgttttctagtatatagaaaaggctctcaattatttgaagtattcgctagaaaatagccaatgagaaggctcgcaaaatagtaattttaaagtttttaagtatctctcgtgtgtgagactccttgagctacctaatgagttccagaacactttaactaaggggttgtaagatttagacgaatgtaacgtgtttacaaatggttaaaggctttagtactctaaaaatgacgattatagcgatattgttcattaattttaaaaatattaaagatttcaaagttcccggtgccataagcttgatgcaaccagcaggttt

SEQ ID NO: 46788 - DNA, 389 bp, Mus musculus
  source 1..389: mol_type = other DNA
gttactaaaaacaaaacaaaaattcttgttccttttcagggagaaaacttgtaaggatttgacctttgcatttgtgtaacatttttccgaactaaaacgtgtccatattggcattgtggtttttaacgactatttcagtgtccacaataactattagctgttaggatgtgccatgcccttttctgattaaacctcttggggaaggaaaaaaaggatgtatagcctcttccgtcccatatccctccccgctctgcgcaagcagcggagcgcaaccacggcaggcggcgagccgtccggtcctcgggtggtccaggcccgagaagaagcccgcgatcattggctggggccggctgtcagtccttccgcgtggagcggcgggcgcggtgcgg

SEQ ID NO: 46789 - DNA, 360 bp, Mus musculus
  source 1..360: mol_type = other DNA
cataatgacaatcctcaaaggcaagatggctttttaggcttttttaattcctgcacagctgaaggagctcaaagtttgaggttagattgagctaggctggcctcgaactcagagatctgcctgcctctgcatcctgaggcctggaaattaaaaaataaaaaaagaatatatatatatatgttatatatatatatataatgttatatataatatatacaacatctattatataacatataacgtattgcatatataatatattatgtgtaatatatatatttgacagaggcttctttttataatttattgaccctgcctcatctgggagagcctggaccaggccgcagcggaagttgctca

SEQ ID NO: 46790 - DNA, 366 bp, Mus musculus
  source 1..366: mol_type = other DNA
acaaacaaaatttggagcaattttccagttaattttgagtgttcaacctgattcaatacgttctgagaactcttacaacctacctaagtctagtgtccctggatatttttccatagttatgaacactaataacatttgctgtttatttccttgaaagaaggccctttataagataataaaacctcatgctttcttatggagaataaaattttcagtgtttcacaattggattttaatgtgtaatatgtacgatatttgaaaaaaatgcatatgtgcaggcatgtgtgcacacatacatttaacaagttatgaggtccctgaaattggatatctgttacagcgtcaaaacaggatcacactctgtgt

SEQ ID NO: 46791 - DNA, 697 bp, Mus musculus
  source 1..697: mol_type = other DNA
aatttacaaaggtttatgatttttatcaatagaagacaggttatcttttaaaccttacgtttcaaaccctcgtgcaatggctctaaaaatagggccctaaatttagaggacaagctgctctcgggtcgagcaggagtgcacacgggctccatctggcaccccggtcccttttcagactggggcgcctggccagcgcccaccaggtggaccccggcgagcgagcgaacccgaaggctggcccgacgaggaccgacgtgtgctcgcccaggacaggttaaactctgaccagaccacacagttgacccggacgccttcgtgtccagagtccgaagtgcggactcgcaaagcaggacgcgtgggctcgtgcgtcgcgccacaattatggcggaggccggcgtctctgtgactgaggggtcccccggggtacgacagtgtggggctcaggctctagacgctccccgggactgagccttaggtcccggggtggaaggcggcagccgcacgctccggctcctcgtgctccgaagttggaggccggggagcggtgcgttaaggtcgagcgcggacgtggccgcggagctcgtgcagtagaaggggcgtctccgccgcgccggcgagaccaaggccggggtggtgggggtgcgacgcgggctccccccgcagggccgcagtggtatgcgccggccgctagtgcgtt

SEQ ID NO: 46792 - DNA, 691 bp, Mus musculus
  source 1..691: mol_type = other DNA
cagtgcactgaagagaatgactttaagaaactgaaaattaaaacctgtcttaacttcctaatttgatgttaccactaagtgatcgttagctattaataaaacatactaattatacagaactctgggtaccagccctcaagatgaaaatcgttagccagggcgtgtgcggcctccgcacgtcggaagaggaaggtccgcgtgccgccacgatccgcctttcctgggaagccgattttgtcctgctctgaacaagatgtaaaaagaagccggcgtgcgagccctcgggcgccgcgacctcagcccagcacgccggggttccgcctcgagcacgctgcaagggccagacctacccggcgagggacgcccagagtggccccgcccccacgcctctagccccgccccgggtcgctgacgtcaacggtcacgtgccgcgcgatccaggcaaccaggagctcccccggttccggaagtctcgcaaagccgcgccaggctccgcccgtcgccgtgagcctccgcgtccgggtaccgggagaaccacggtttcctcggaagcagcgcggtcgcctccgcatccctggtccgttcgagagaggatttcgaggtcgttgcccgggccggccggggagcacttgcttgcggtacggaaagtcagcggcgtgcaggcctccccgcgcagtgcgccgaggcgcac

SEQ ID NO: 46793 - DNA, 245 bp, Mus musculus
  source 1..245: mol_type = other DNA
ccactccacatactgtctttagggggtgggaatcttggcaggattccaagagtaaagccagggagggccctacccgacctggccaggtgggcagattctgcaaagtaaatgttcattttggaatccgcttccatctgattcatataatgacacagcctttttttttaatttttattatttttttttaaatttaaatcattattcctgcagctagggaccggctctcggccgcgcgcccgccgccg

SEQ ID NO: 46794 - DNA, 451 bp, Mus musculus
  source 1..451: mol_type = other DNA
actaatcaaactcaagtagtcaggtttggagacagctgattttacctgcttacatatatttgcaaggcattgctatatttagcatttgacaaactgatgaattgtactgttgagtagttttctttccaactaaagctaaggtcttcatttgaaatattttttcaatgtttattgagaatttcaatttggttatattttgtaaattctaatttattctgtatagaaatcttgtatgcatgtatgttatgttggaattacaaatgcttgtaacatgtgtatatttgtaggtgtatgtatttgtatgtgcccttgtatatgtatagtatgtatacactgttatctgtgctatatttaactcagtagtagagtgactgacacacatatgataatgcctgtcatttggtgaaccatctttcaagatcagaggaatttattgaatatttcagagtca

SEQ ID NO: 46795 - DNA, 547 bp, Mus musculus
  source 1..547: mol_type = other DNA
agaatatactttaaatatctgaataaataaaaaataaaaataataacaataataattttcttaatagcaaatgcttatcaaagttaaatcaagaagattaaaaacaatttatatagacctatatcccctagctcctaatgaaatatagtatagttttaatgcagaattaaaccagactttctagtatttggtgtcaatactcatcaaattattccagagaagaaacatttttccagtatacacataagctatgagcttagtacttttaggggatttttagcacctagaatctaattatatattttttatcatttttagaagcctaatcttttttaatgagatagagaatataataaggccttacataagaaaataatctattctaaattaaagtatgtaataaaagattgtttcgagtgagttatataagatcccttactctaagtcttcccagttcatggaagttgtaggacaggtacctttgtgacatccaagtagccattggctggaggaatattttgttagccaatcaaagggatatatacat

SEQ ID NO: 46796 - DNA, 542 bp, Mus musculus
  source 1..542: mol_type = other DNA
aaggatgtatccataatacctctgtgtacaaaatagggattgttcaattttctagaagtagtaaggaaaattttgaaatattttcagactaatgatttagtgaatgttcattattggttatctatctatctatctatctatctatctatctatctatctatctatctatctctacatcatctctatataaaacacttcaatacaattctttattgattaattttgttatttaaaaatttaataaatgtatacaatatattctgagtaaagcagaatggagattccatggatattgacttcatcttttcaagtcctataaatgtctatttatcagacatttctacacatatattaactctaataattgaaaacctagatgctgagttatattttataatttcaggaaaacaaacatgttgcacaaaaacctttaattattctgggaaagacattctcctttcaactagatttttaaaaaagtagacactatttttgtcattgcttgtgtgaatacagatgaaaactgataacttctggaactt

SEQ ID NO: 46797 - DNA, 456 bp, Mus musculus
  source 1..456: mol_type = other DNA
gagagatttgtgcataaggtccttgtccagccttgcataagcattatgtcattcaagaaggtgttgttcaaattcactcttcgaagattaaaaagctactaatgaaaattaattatgggtaaagccgcaaactctagaattaaaacatcttccacttagcactataatggggctttactacgtattaatagtattcattgtaaaatactgctatggctaatcttaaaacggtttttatgatgccaattcaattttttccatatacatcaacttcaaatacctatacaaatgtaaatgattatctcccatagtcataatatgctaagaaaataagctttctctttctgagttaaggattcctagaatcaaaataaaaacaagactggtgcaaaattggtactaatttcaaaatggggcgattgggcaagtccgaaggctgtacacaacccgacacgc

SEQ ID NO: 46798 - DNA, 556 bp, Mus musculus
  source 1..556: mol_type = other DNA
cgtccgagagaagctgcaagcagagcctcttctcctccagcgcccgatataaggcttccttgcggcggggaaagccaagccggccgcctcgccgcggcaaggcagcctgcaaagcctggaacgcctcggaaggatccggtgcggtgcgcaggagttgaagaagccgagtctcctcctcatctccgcccttccaggcccggaccagctagttggccagaggcgacggcgtcgcggggcaggagccatgatccccggcagccccacgggtgcccccggatcgacgaccatcagtccctggggcgtaaggacagcgggagcagctcggaaggcgcggccgccgggagggctggatgaagcccagccttccagttcctctccaagccccgagctgcagaggaagaggaacggccggtcagctgccaggccgctcgggccttccactcccggagccagcctccggcaaaatggcccccgctgagcctgggaccccacaggcgccacccggcgtaaccagggaaaccaatctgccgcggtggaacgctcccttgtccggggc

SEQ ID NO: 46799 - DNA, 262 bp, Mus musculus
  source 1..262: mol_type = other DNA
gccaggagactgaaagactgcagagactctaaggctttaagcactccgtttaatgcaaaggggaaaacactgattctacctatctataagaaacactccgacaagaaagtcttttttaaaaaagtactctgtgtggaacccgggatgggatcctctcttgctcccgctcttatgggtggggtggaaaacttccgccccggacaagggagcgttccaccgcggcagattggtttccctggttacgccgggtggcgcctgtggg

SEQ ID NO: 46800 - DNA, 371 bp, Mus musculus
  source 1..371: mol_type = other DNA
ggcaagtgagaggtttatacaccgttacaaatcatcttaacggttaaaagcactgactgctcgtgtacttagatataataataaatcttttaaaaaatcatcttaaaaagaaacattcctctgaaattccaaatggaagatcggtgagtgagaaaacattcgctcgctcaattgtccgagatttttttttaaaaaacggatatttttgccctgaaagttttatgcccaaatccttcagagcacatttttcatgtgtaaagggaaaagaattacggtttttcaacaagtgctgcttagcacaaccggctgactggaggccacccggggcggggcctcggttgcgcgcgtcacgtgaccgctgcgccttcgga

SEQ ID NO: 46801 - DNA, 461 bp, Mus musculus
  source 1..461: mol_type = other DNA
ggcctggaactctgcatcatgattacagctatagagcagtaagtgttcttgcccagttctgttagtgacagctttctgcttttagtcttgggtaccagtacaaaatcggtaaacatctatttcctcagttactgaaaaagaggtattttaagtacagcgtaattacattgttttattcaagtttctaaatttgtaggcaaagctctgactaggccaatccagataagattagagtagaactagcctctttaaaccgtttacaatctgtacttttaaagacatcgtaagccgtaaagcatgccgctggttaggaccatggcggccgggccccggagtcccgcgcaggacccgtggggacgcgccacgcatgcccaggccacccttcagggccggggctgcggaggccccacccctagagcgtggcgtaagcccgggccacgccctgagggcgggaccgcgcc

SEQ ID NO: 46802 - DNA, 480 bp, Mus musculus
  source 1..480: mol_type = other DNA
ttcagtaactgaggaaatagatgtttaccgattttgtactggtacccaagactaaaagcagaaagctgtcactaacagaactgggcaagaacacttactgctctatagctgtaatcatgatgcagagttccaggccagaaagaaatcccacgacaaaaatgtatttgttttagtttctcaaaactgccatttgtataacacaaaactgcattttctcagcatagatggagaaaaatattatttatctctacttttgcttcaatcatgttacggttacaaacgatgactgaatgcttgcctggggtcacgaagttatgtatcttaagcacagcaaaaactacattctatttacttatgttaattttgacctggaaactctggacgtcaaggatgacctagacctgatgagattgccttcaagcccgctcgagggatttccggaaaatcatcttcccgccgcaaaatcggcggcgggttctc

SEQ ID NO: 46803 - DNA, 495 bp, Mus musculus
  source 1..495: mol_type = other DNA
aaagaaattctactatggtccttagattttttttttaaagattaatttatttattttatgtatattgagtacactatagttgtacagataccaggctggcctcgaactcaaagaactgtgctgtttcaggggggcatcatggttgtgagccaccattttttttttttttttcctggcccgaagaaaatctaaacagcaaactgaaagaaaaattctttcaaactctctaaagcagtttttaagtgtggcccgcaagggtcaaatttagtaaatcgcgcctcggtaagcgccgctgggcgtcaaccgtcgtggggttttctccccgcggagcatcacgggaggagtggcgaggcgctcccgggggcccgccttgaaccgaggggcttcggtcggacgctttccgctctcacagcctcgggccgagttccggaagacgcgccgtgtcgcaacctctgcgcgggccaatcgcaggcaccggggggcgggctctcggga

SEQ ID NO: 46804 - DNA, 442 bp, Mus musculus
  source 1..442: mol_type = other DNA
catgagtgaaaatatattaaataatgttcatgttatcatcatttttttcagtactataaagtatgacctttgcatatatttttgagcgaccaagtctattcatcatactatagtcaatgagaataattgtgtaaaattcttcaaagcctatgctaaacagtctaatttgtaaaatggttgagctgtgatagtgaagcaccttaacatagtttaaaggttactctggggcttcacatgggccgtacgtatgattagtttccacatttatctaaaatgagacagactagtattcgtcactaagaaattcaccatgaccataaagccctggttgtcctggaactcaccctgtagaccaggtttaaacttttgtttttaagcctactacaaagcttaagcggcctgaaagaaacctttcaggtctatcttcaagtcggcttgatgg

SEQ ID NO: 46805 - DNA, 194 bp, Mus musculus
  source 1..194: mol_type = other DNA
tttatattatcctttataatattaaatgatttgatagtgtcacttggcaattcattgcacacagaactgtcagccaacatttctccttgagttactgtgaaatgatttagaaaaaccctttcttctcatatctttgttcatctgataaggattatcaaagcagtgcattgagcttgctcatggtgctttgactg

SEQ ID NO: 46806 - DNA, 517 bp, Mus musculus
  source 1..517: mol_type = other DNA
cctatatttagtttagtttatacccacaatggcagttttctcacatgtataaacgcgtctaaccatttcactcacttaccatattttggctaagtggatctagacagtagagtaactcagactgtgtgggatattccccattatgttttagtttattagttttacacctgttctagtgtaaattaaatctgaccattttgtagtagggagaattttaagctcctcagaactgaccctgtttcaaggaaccctgtctttcatgtgagagggaggtattatatataaaaccttggcctgctctttcccttccgcgtgcaaacgccagcggaggcatcggaaatgaattaccagccctcgcccccgcggagcgtgctgcacccctctgcccatcactgctgtccaagctgatgagcaccagtgcctaccctggtgagcagagccgaggaggctcaggggaaggcgcccgagccctgcactcacgtcgccgggctgcggctagcagcctcgcgctctcagc

SEQ ID NO: 46807 - DNA, 451 bp, Mus musculus
  source 1..451: mol_type = other DNA
tggtggcacaagcaagcccattattagaggctgttatatttaggtatcaagggtggtatactcacatatacgtaagaccctattttccatccatggaatgatcaaaagatttaataagaggcccctagttgtcataacgtttgtaagcgaacgtttgtgttaagacaatgtaaaaaattaaggttgtaaagaaagtgagaataatgttaatattattaagtgtccgatcccactactgatcagcacgggagttttgacctgctccgtttccgacctgggccggttcaacctggtggtcccccgctcccgggaggtcaccatattgatgccgaacttagtgcggacacccgatcggcaccagaactcctgggcgtgcgccaccgcgcccggcgagcgctgagagcgacgggcggcgggccgtgacgtcactcactgtgcccgcccagcctac

SEQ ID NO: 46808 - DNA, 280 bp, Mus musculus
  source 1..280: mol_type = other DNA
tggttttgaccaaatcaaacatcctgggccagaaatttaagaaatattcagttactatgtacgtggacggcagcgtgtccttcgcgtactgccggaagcactggcggcacatgttcagcccgtatttgccgcagcagggcccgcccggcccggcctagctaagcccgtaatggcgacggcagcaccgaacgccctgcgcgccgcccgcgggccttgaccagtagagctgctgggcctctgtaggctgggcgggcacagtgagtgacgtcacggcccgccg

SEQ ID NO: 46809 - DNA, 353 bp, Mus musculus
  source 1..353: mol_type = other DNA
aaggctaaatcataattttgaattttgccacggttaaattgaaaattggtatttctgaaagccatttcacaattgcaagtgtgtaacttgtattaattgtagcaatttcgtagcttttacttgaaagttgaaccgggtgggggaccctccagggtatctcccaccctttccaaggccgaccatggctgcaaagtaaagtttgctcaacaggaattgccttgccagttattgtcacctacagacacccgggtccgctggcctctagcaaagggcgcgggaaggacatggtgccctcggcggccgcccctccgggcgctccggagcctatcgcgaggaccccggcagacctgtca

SEQ ID NO: 46810 - DNA, 817 bp, Mus musculus
  source 1..817: mol_type = other DNA
acctggaccaccagcaccagctccccggggctccaggtgccccagggaccggtaccgcagcgttaggttgtccacctccggccgcgggaccgcgggaaccagaggagcggccgattcgtttgagaccctgccagcaaggtggcccgcaccccgtacgggctccgcgtccagcagcggcgggccaagggcgtcgctcttcctttgtcgcccattgctactccagaggacgaagccgcaggcggccaccacgagcgtcaggattagcaccttccgtttgtagatgcggaacctcatggtctccagggcccggagcgcgggcgcggaaaagaagctggcggcctctgcacggaaggggcgggcgggcggcgccgtcgccttggcctgcagccctaggaactggcccccgcggcggccctcgctaactcatcccgggctccggcgtcctggggcccgaaggctctcaactgcctcgcgccgcccgggctccgcgcatcctctctggcagttgcagctccggcagccgccccgccgctacgagccgcggctcaacgtcgcctcggtcctctccattcagcacccgggggtcccggaagaagccccgccgcggtcgccgacaccgtgattcgcgcgctcatccttgctcgcacggcggaacggcgacaccgaacgccgcagcctcgccccgctccggcagcgaccgctctgacaagccgcgactggcctgcgagcgcccgggccctccggcccacaccctccgccccgccccgccccgccgggcgctgattggcgcttctcagaagcctccggaggaggccgc

SEQ ID NO: 46811 - DNA, 492 bp, Mus musculus
  source 1..492: mol_type = other DNA
gttttaaacaggtataatttgtaggaacatataaaaaacagtaatgttcgaaaatttgtatgagcactggcttaaacaccggggttcacctatagaaaaactgttttttgtttttttaaactaaaacgaggcattaacagttaaaaactcggaactgacacttggagtggccattacagttctctcactgcaaggacaacgcagtggcgtccgggtagagcgttaagcgggcccgaaggctgacgtgtcgttagcagccagcacgcctcgccgcccgggagccgccatgctggagcggtctcttccgagagagccgcgggctgacctcaagccgcggcgggcagcacctgcccctttccgacgcctcaaagagctaggtcggctccggcttccaggcgaccgcggtccccaaggaagcgcggcctcctccggaggcttctgagaagcgccaatcagcgcccggcggggcggggcggggcggagggtgtgggc

SEQ ID NO: 46812 - DNA, 464 bp, Mus musculus
  source 1..464: mol_type = other DNA
catttccagaagtctagagagaagtcactaaaatccactggttttctagtcggtggaccccgagtaaacagtcttctcttttgaatagatagaaaatatttgtttatgtgcctgtaacaaaaaatgtttaaagtaagatagagtatcgccaaagtccgtggctctctggagatttagggcacacgggtgcgatgctctcggttccggggtcacccatggctgagcccgcggtgtcgtggcgggtaccggggtctccgcacagggattcggtgtcgccgcccgggaggtccccaggagaagtccctttcccgaggtctagaggtgccaccgagtcccctccgaagtccgcgggtgtgcagccccggggtctggggctcccacaccgcctcttcccgcgccgctgcaaaatcgcccgcggaagtgcgggctacgtcgtcagtccggtctcctccgcgggctcttcc

SEQ ID NO: 46813 - DNA, 306 bp, Mus musculus
  source 1..306: mol_type = other DNA
aatgccagtatctgtgcactcaggccacaggtgggaagtcctggatcccacacctagtttctatagtctggcacagtaaagttccattatgtaactactacattataaattctgtaattttgctaagtgatttgagagcttgcatttacattataaaaagcgaacaccaagggtttctgggagacaactataaggtggaatacctctaggtttgtgaattagctagtaaacttctctcttgttggtgaaattaaacagttaatagtaatttaaaacctgtagcaggtagtgtcaagcacgcgctgc

SEQ ID NO: 46814 - DNA, 281 bp, Mus musculus
  source 1..281: mol_type = other DNA
ccagtgtcatccagcacgaagtggctggtggaaacgcctcttgcaatggcagtgaggaaggcccccttgcatggcaaaattgccccagggagacctggatgaatctggtcaaaagcttattttgctcagtatatatttagcagtttcgtaattttcatttggcctcttagaagcccagattgtgagtctgggattcgcatgcagtaggacagcactgcggtgggaccggaccagcagcgcagggggcgagagcgcttccggagcgtggggacagtgtccgc

SEQ ID NO: 46815 - DNA, 387 bp, Mus musculus
  source 1..387: mol_type = other DNA
ggaaggggggggggtgtttcaagctcccacccccagcttttgttttattcagtggaatagctatgctcatgtaactgtaattaaaatcattggttcttcaaggaagacttgaggttcgaaagatgcaagacaataatgtttcctttcgtgtttagaaaaggggaattgtgcctgtgttccatgcgtcttgaaggagcactgctcgtgttaaaaatacatacatacatacatacatacatacatacatacatacatacatacataaagtaagttcatgagaaaccttgattaatgtgtcttcgcagcgcccggtgctcccgggagcggccaggccccggtccggggcggtggccgcgcagacgcgcaggttcctcggttccgcctccg

SEQ ID NO: 46816 - DNA, 358 bp, Mus musculus
  source 1..358: mol_type = other DNA
cctgggattatagatctgtggtcttatgcccagaaagttgcatgcttatttataaacagccaattgattattcatctcaacagcacaagtatatgtgtgtggtgattcactgactggtctggaactcattctctagaacaagttgccaaaggcatgtgccatcacactcagcaagagggaacattttaagatgtgctctactgagttttataatcttgggtttgttactccaccagtaaaaaaaaaaatggagaggccctcaaacagtatttcctgagcaacaacggctcttgttcagaaaatgcttttgggataaaggaagcttgttcccctccctaggcagggtctgagattcagg

SEQ ID NO: 46817 - DNA, 446 bp, Mus musculus
  source 1..446: mol_type = other DNA
gaaaactttccactgtaaaagactattgtctttactgtcttactgttgatattaaagccaggatggtaaggtcacaacaatttttataattattaaatcagttaatatggactatttgctaatcttttttttttttaaagaaaaattcaccaaagaatttaacacatttcttaagattaagaatttacaaatcaagctaaacatgaaagttattagctgatgatcaccttagtgaactctcagtccatttgagtccgtggcctacttccaccaaggccaggtttgccttccctgagtccacgtggtagaggaagagacttttgcacctgcacatgcatgcacctgcacgtgctgtgacatacctgtgcccaagcacacgagcttcctcgggctatcttaaagctaggagagtccctggaatataagttaataagtctcgtaggaag

SEQ ID NO: 46818 - DNA, 563 bp, Mus musculus
  source 1..563: mol_type = other DNA
aatgactttaaacttttaaatacatgtttcactgattttaaaattcctccagtttctaaatgtgttggtaatttcagcactcaaaaaggcagaattcagagttctaaggtgtcctgggctaataaaaactagtagatttttgttcttagttttagatttgtttattactaacattagaacttttaaaaagaaaaatttagacgaattaactatcgtatatttgaaccctgaataatttatgtatgaaaggagaactttttctccctttacttagtgaatttttgagtatttgaggtgccaagaatttatgaaactcgggctatatagagaattctacagtatgccgcagaatcctatttcggagagtagtacccagcaaaaccaaccgttggtttttgtctagtctcaaattaatccccaaacaaggggacgggattaacccggtcattgttctgtcgagttttttttacacagtgaaaaaaataattgatcatgatttgacaacaaacttcggttaaatagcgcactttcactataagtaaaagcgctcatgcgcagaagca

SEQ ID NO: 46819 - DNA, 374 bp, Mus musculus
  source 1..374: mol_type = other DNA
agttattttacttttaaactagaactgcaagtcccactttcattcaggtgccactggccattgggacaaaatatcaagggtaaagactttgggtacaactaaacttctgccacatcaaaatcacaactgtttttgacgaggccactggttttccttctcggaaatctagggattacccttggaaatgccttcttcacggaagcttgttctaagtcatgctatacactgtatggtatacagtatttagaacagatggatgcagaggaaccgtttgaggccctctcctttccttgtaacagtctctggaccgcccgagctgggcgtgtcagggcgtgtcagcgaaggctttgccctgcctccggtgacgtcacggc

SEQ ID NO: 46820 - DNA, 379 bp, Mus musculus
  source 1..379: mol_type = other DNA
ttagtaatatttaaacagaaaatactttaaaaagctttattaaattttttaatcaggataaagctttgccatttggatactatcattcaaagtgatcagtgcaaaagtagccaaaagccacgttgtttatctacttgtatcagagttcttaacaagattaataaatcacctcagtcttaatttgtaaaagatttgcaatattgtttttcatcacaaagctgtaagcgactcgactacgaacctgcaggtctcaaaaggactaacttttctttaccattaaaagcaagacctgggtagctgcctagatctatcgccagcggcgtagcagcagctgggccactcctgttgggcagccgccctgccgctgggaggtacgggt

SEQ ID NO: 46821 - DNA, 520 bp, Mus musculus
  source 1..520: mol_type = other DNA
ccatgtgagcccctcatagagtccgtccccggaggtggcacaggaccagttcctgtcccgaatccgggtcaggcccagtttctcctggatctcatggggtttagatgaggatgatggcgtccctcatctcccggcctcgtcgatgcggtcgcggtcggcgcagtctaccacgaagatccggggccactcccacacgttgaacttgacgtttttgtaagtcaccgtctccacgttgaagcccaccgtggggatggtggtcacgcattccccatcgcgtcggaagagccggggccgggggcattcaggtgtcccgggtcccctcaagcctacaacgccgccgcgagcccgaaacgtcgccgccccgctgcgaggacgccctgcggcctgcgcgaagctgccggctaggggagcaggggcccggcctgcgctcactcgggcatcgcccgccgccggggccctgcgtctgcgccgggagagccgccgccctgctcaagcgaggcgaggcgaggcgcggccggcc

SEQ ID NO: 46822 - DNA, 556 bp, Mus musculus
  source 1..556: mol_type = other DNA
gtttatttttattaaaaatttcaccttactttaaccttaaaaaaaggtttcctggtcaagcttgacttgatacctgggaccaagaaaggggagaactgactttggttgtcctctgacctctctccgcgtgggagttggttctctccttcctggggaacgaaggcgggtccgccctctcagaaatcggttcagaccagacttatattaaactcctcccacgtgtcttccaggaaactgaaggaagggtccgggagcgagcctgggaagcgtggctggggcgccggtcctaagggccgacgaagcccgccctcggtggatccgtgccccgccttcgagtggcggagaaggagccggacaggtgggcacacggccagccccacgccagcaggttccgcgaggcgccggcgttgagccccgggagccgccgtagccccgccccccggcgcgtggcgctcgtgacgtcgagagcgcgggccactctcctttcagaggtcgcgctcttccgaacggtcgggccgaggcgcgcgtgcgcagttggtcctcggcgccttttccg

SEQ ID NO: 46823 - DNA, 586 bp, Mus musculus
  source 1..586: mol_type = other DNA
agtaacataactatttgttatgattgcaaactgttacccacctgacgtagttgtgtcaccagaacattgtgctgtaatattacaacaataagctttactttattcttgataccacttgtatttaaatgaaggcttgtttttttaaactattattgattgcaattgagaggaaataattgtttgttgtaaagggttgtcaatcacactgtaagatatttagcagactcctgactcactagagtccagtgtatcctaatcttaactattccttgaaggacaaaattgcttttagccaagaaccattaatttaaatgagccagtaattatgcataaaaagggattagaacttttttttctaagtaatgagcttcaagatcagtttgtcttactgttcttaagcaaaattgcttaacttgtttatagtcacttaaagatcattggcagtaaatattttaaatattaaaacatttgattagacaaggttttaacacacaggtttggaggttacagattgaacgctggattctgcagaatgattgattaaatgagattagtcttaaaataactttaaacttttttttttttt

SEQ ID NO: 46824 - DNA, 603 bp, Mus musculus
  source 1..603: mol_type = other DNA
ttcaacttaaaaaagcatagggacagaggatttttaggtttttttttactaacctaagaacaatatctgaaagtttttggatacttttttttttttagagctgcagtcacgggctcgggggtcccctagggctgtaccgaattcggaacgctgccgagttcgtccccgccccgtgcacgttcccagccctcccggccccggggccccgcaccagacgcctcggcccgctcggcggcgcgcatgctccgtgctggtcttctccagagactcgggagagcgagcgcggggccgagccgagccgagccgccgctgcaggcaccgggcgctcggcggcggccggcggggctggaggggcggcggcggcggcggcggccagtgccgtgcacgccggacacgcgcgcccgctcggccccgagggccctctggaggtgactcgggcggacccggcggtggcggcggcggcggcggcggcggtagcggcggctgcgcggagggcgggggaggcgatgaggacgctgcgggccgccgctgtctgcccgccgcggccgtagcgggagtcggggcgggggcgaggccggcggtgccccgcgctgcgcacccaga

SEQ ID NO: 46825 - DNA, 448 bp, Mus musculus
  source 1..448: mol_type = other DNA
ttctttgcatgtacttagaattgtgaaaaataaccttgcttcaacctcagttaactgagctggcttagtcaggaactatggttaagactgttaactggtcttacctgagggcctcagcacccacatggcagctcagaatttccagttccctcgcataggcacctgagtcagtggttgaatgaaccaggaggtggcttagtccccagctcccgggccacagcgtcgccaaccgaccaggaggcgtggccgaaggagaggccgcaggagccaggggtcaccccgacatgcccagccttctctggcggaacagcgccggcgtccagtcaagcctgtgcgggcggaggtcccggagagtggaaccaccacccggtcccccgcctggccggctcattggccagcggagaccacgcccacgtcaggcaaacgcgcgtgtttcattggctctcgt

SEQ ID NO: 46826 - DNA, 449 bp, Mus musculus
  source 1..449: mol_type = other DNA
taacatgctttaaacgcgtcttgtatttgctttcctaggcagctcacagtaggcaactgagttgcttctagtgttaagaagctgcatacttattgcctagtcaccaggagccagattagctccggacctcaaaccctgcgggtcagcagctcctgggattcgagggagttggagatccctgagaacagcaagtgcaggccgccgcctctcacttacctggtgctggagcttctgcggccacccccgcacagtagcccgggcaccccggacgccggtccacttgcgcggaggaagcccccagccacgcagtaccggggccgcagacaccgcctacgtagcgcagggtcggccacatggcctgcgccaagggtgaagcgcgccgctctccacgagagccaatgaaacacgcgcgtttgcctgacgtgggcgtggtctccgctggccaatga

SEQ ID NO: 46827 - DNA, 376 bp, Mus musculus
  source 1..376: mol_type = other DNA
aatgctgcccgagggcagctgtccacctgcaatcccagtagccctagtgagacactgtatccattggctagtgttaacctttggcttccaaatgcacatttatgcgcgcacacatgaacacacatatacagatgcatatactcaaaaactctagcaaagtcgagttgttttaaattctgccgttctctgcgcacagactctgatttgtgccaaaggctgtgtgggaagagggcagagcctcagcccagagcaaaagatggccacttgagaacggattttcatatagtttttaaaggtcgtttatgaactgacctctccacccccacccagcaatgacatcgcggtcaaggctgggagtctacaggtggctgccatg

SEQ ID NO: 46828 - DNA, 560 bp, Mus musculus
  source 1..560: mol_type = other DNA
cctgccactgtcactgtactgaaacaggttcaataagaagggagggaaggccatcctgcctccagctgcagcaccgagcaattgctgtcctccggggttcacaggcgacctggtcaccctagcccgagcaggctgctaggacagcctgggagcaggcgttctccctgcaagacctgcagcgcggggtcagggacccggccaagtggctgcgggtacagcagggcggagggcggccccgcccaaccggcgcggttcccatggggatcgcagcagtcacccagccgagctgcaggctgctgtgctagagctgggccgagaggcgcctcaggagtcagggtgggaggtccccacagtccctgcagttcccgcagtccccacgggcccggttgcccagccggtgtcctcttccggagggaacccgaaactagaaccggggaagcccttcgccttcctggtgcgatcgtatgaaccataacgttaaaaagatagattatcttacatggcagccacctgtagactcccagccttgaccgcgatgtcattgctgggtgggggtggag

SEQ ID NO: 46829 - DNA, 375 bp, Mus musculus
  source 1..375: mol_type = other DNA
ctaaatgcaagatgtgtgtggctctcagatgtattctgtgaagaatctgactcaccgatattctgggcccctgccgccagcacacaagcacccctgccactgtcactgtactgaaacaggttcaataagaagggagggaaggccatcctgcctccagctgcagcaccgagcaattgctgtcctccggggttcacaggcgacctggtcaccctagcccgagcaggctgctaggacagcctgggagcaggcgttctccctgcaagacctgcagcgcggggtcagggacccggccaagtggctgcgggtacagcagggcggagggcggccccgcccaaccggcgcggttcccatggggatcgcagcagtcacccagcc

SEQ ID NO: 46830 - DNA, 482 bp, Mus musculus
  source 1..482: mol_type = other DNA
gtacagaccataaatatttatgcagatagaaatatgtaatgcctgcattcatccctgagaggaataacatacttttgtttctgccgggagcctcagaaccctgggatccagtgacttacacaaaattatggaatgtcgatgaccttcaaataaaaagagacagtataaaaatatttcacttgtattagttttctgccgttagtatataaaatcaacttaggaattttgctgttttgtctaagtactgtgtaattaaacagctaaaagccaaatgcccttttctatacaagacaatttaaattctaaaagaatttctggaattcataatatgattttagcaaccaaaaagatgtccctgctacctgcattgatgaagcaggataaataaatacatacatacatacatacatacaaataaatttaaaagaaagaaaagagaaagaattctattttcattactaataacaaacaggcttctttct

SEQ ID NO: 46831 - DNA, 536 bp, Mus musculus
  source 1..536: mol_type = other DNA
cccagcccactctggatcccaagttggagttaatgaggcaggtgctgggaatcaacctctgagctgcagccggtgctgcccttatctggttttccaactgaaaatctctgtaagactctagaagtaactttaccagtatacataaaattggcaacttcatttctacctataactcctgcccaatattttgggcattggttacattttaaagcctcttacattttacactcctctttacaatgctgtaaaaatggtttacaaacatttctagcagaatcagacaaaggtccctagctttgctttagggttttcaaaaatgctctgggaaacccctggtacgcagtcgggtgtgccggcatgttaaggcagcagaaggcagcgctccggaggcctgcggacagaccctcctcctctagtccgccggccactgggcgaatcctggccgaggctgggcgggtcagacgccgcacgaacgcctccggcgccccgcaagcagctgggaggcggggcgcggcggcgtccagggtgttgtgcac

SEQ ID NO: 46832 - DNA, 332 bp, Mus musculus
  source 1..332: mol_type = other DNA
gtatttttaaaaagtgttggctcatgtaaaatcttcagacagtctttgacatgttgcaattagacagaacctctagcatactttgatctaaattagcttaattttaacatctagtcttgctcagcatacatatacagcaatgcaaagtatcctctttttaaagtatgtcgttacttaacaaatgacgccctgaggagaatgcagagcactttaatttgtccaaatgttgctagcatgtattggaacagccagaatattttaaattctgtgaaaatgtacagtgttttctgttgaaaacaatgcagtatatagtctgtcactgtcttcacagt

SEQ ID NO: 46833 - DNA, 308 bp, Mus musculus
  source 1..308: mol_type = other DNA
taaaaactgatagagtgtcttagtcagggtttctattcttgtacatcgggttgagaaaatgccttacagctggatctcatggaggcatttcctcaagggattgagcttgtgtcaaattgacacataaaaaccagccatagtgaaattctctcaaaataaaagtattaatttttaaaaaaacactctggtattttatgcatatattctgttgtagcttaaaaataatggtgggttgtgactgtctcacatctcaatgggatgcactttgcttttcatgccacagtatgatcagttatgattagagagca

SEQ ID NO: 46834 - DNA, 392 bp, Mus musculus
  source 1..392: mol_type = other DNA
tgataagcttaaccaccagcacaggccgtgggcctgaaactgttctacattttaagatagtaggaacgctgcacgtcaagaccatgtacattacagttaggaaccatcactaggaattgaatccaactcctctgaagagccagtgttgagacctgagttcagatctatcaaatgcatccataatcttggggcaagcttggtggctagactagccaaactggtgagagactctgcctcatatataatgtggagaggcatgcacaccgtatacaaaaatgtatttgaaaagtatgacttcagcatgctgaattttatatagtactataagctaaaaaggaaatgatgcaggtgcatgaccgtttgtcagctaactatcaaagcttttgtttcca

SEQ ID NO: 46835 - DNA, 551 bp, Mus musculus
  source 1..551: mol_type = other DNA
aataaaatatttgttataggattatagggacctttaacaaggaaaaatgtctttaaaaaaaatatgaaagccttactttgatcaagaggagtgagtccaagttattctgtgtacctgagcgagttaaagagaacaaagtagaatctgatatattagatagaaaactcccagttctgaactctggtgctcaaaggcttcaaaattctaagacttaacatgtggttattaagaatacatattaaaatgatgaaataaatacactaacgtcaaatttatcttaggactcagttttacccgagggctgccttccctcagcaaccaggacacgcggctgcggttgcgggaaaggcgagagccgctcgccgcccagcgggctccggaccgcccggactccagctccccagcggcgggagccggcccgcgcagccgcactgagggccgcgatggtcgccacacccggcccgttagccgcccgcccgtcgcgagtcgccgcacgcagccgcgtccgcgcccggcgggggaggggcggcccgtgcgcgtcggctttccca

SEQ ID NO: 46836 - DNA, 304 bp, Mus musculus
  source 1..304: mol_type = other DNA
ctataagctggaggttagcgaacattttctttcagaatagatgtttaaaattcatttagtaattctgaatgaattaatccgctatgaagaaacctggtgtcaagtagacaccgtcttgactcactgagtgcgttctccattctgacagtataaattatgctgtggccaggactgggtagtcccagtgatttacttactgactattaagtttgtgagatctcagaaatgaggtaatttttccgttgcgttagccagaagcctgcggctgactatctccatgtttttaacctcaagttattgacat

SEQ ID NO: 46837 - DNA, 364 bp, Mus musculus
  source 1..364: mol_type = other DNA
aacttgtggatgtaataaaatcaagacatatcggatccacccagcaaccttgatggcagaaggaccgctactgatgcttctagaaagaggcttcttggggccctttcccatgaccttcaaagggctctctggagctagggaacccagggtcacctgcaggtgacagaggtacccgcccccgccaagaaccgcggggtggcagtgccagctggtacgctgaggcgacctctgggtgcaggactgacacgcggagccagggctggcgggggctcgcacccgccgactctcagccgctacccgctcctccctcggctgcggcgggaggaggagccgcgccctggccggcgtccccttgactcctccc

SEQ ID NO: 46838 - DNA, 405 bp, Mus musculus
  source 1..405: mol_type = other DNA
tcagggcatgatgcgctttgcctgcttgctcttaggagaaagcttcaggaatataacttgtaccaggtagcagctaggaaacaaaacatcaaaaagatcttcattttggatacatgaagtcattgtgtagctcatttacataaatcatatattatttcatgtttatgtccacaaagtattgcctgcaaaagcaatgagtgccttttttttcccagtctttcaactgtttcttaaacaaagggaaccaaagaaattcttgtgacatggcaggcagatcttataaagccgtgcctagaaaactactgtcaagattttaagagtttttaagaatgaaacaaatggatacatagttatatctatgtatcaatgcatttctattcattatgagaccaaccagggaggaag

SEQ ID NO: 46839 - DNA, 399 bp, Mus musculus
  source 1..399: mol_type = other DNA
gcatctgctgccaattgaccgctctggatcgatccctgtgtgcacatttgaggacacacgcggaaaaaaaaaattgacatcttaaaatgcctcatgtttacctttccaaagtttaaacaccatcacattcggatctggtataaagatcacacaccagtatgtctcctgaacacgggacataaatgggttagtccagcctgggcctaggagtcaagaaaccccatcagggttaaatcacactgaccctacaatgtcaccctggacgttctgggagcggccgaggggcggtgcccgcagccgcagcaccgccctggggctcccacgcccccctgggggggcgtcactctgggagccacgggtgggcgggaacccggagaggggcggatccccaactcccca

SEQ ID NO: 46840 - DNA, 499 bp, Mus musculus
  source 1..499: mol_type = other DNA
cggtctgggccctgggccgggacctcccccatctttgttgcacagctaagctaggcagccctgaggcctgggcagggtcactattagaggaactctaaacttcactaagcttgaccctctaaggctaggcttcggccccctggacctgagcggattgtcagggcccccggaacctggacggccaccagctggtctccgctcacaccacagtggagccctgaggatggcacaccgctgtggcctatgtcctgctgctggcctagacttcgagaccaggacagggagtggaggggtacggatccagcgccccaccaggtggtcgcgcactgtgtgcgcagaacggtctccgggctgcagtggggagttggggatccgcccctctccgggttcccgcccacccgtggctcccagagtgacgcccccccaggggggcgtgggagccccagggcggtgctgcggctgcgggcaccgcccctcggccgctcccagaacgtccagg

SEQ ID NO: 46841 - DNA, 405 bp, Mus musculus
  source 1..405: mol_type = other DNA
gggctatcactggatccctttatctgtaccatatcgttcacatagctagttaactttgctccaaggcgaggccttgagcctttaacaccagagatgcgggcgctccagctgcttctgaggcccaaaaggctcctgctggctctacgccgcgccaagcgctggcgacaggcagcagcagcccactcgcgaccgggaggggttctcacgccccctgctccggggtgactgcacccgagctcatggaggggggtaggaaaggatgaatcatcccgccccactagcagccagcaggcgatgccggggctccagctccgactcactctcacggccaccgtccgatgagcctccgctccctggcggggcggggctagcagtgggaagggggcggacccgggctggcgcgca

SEQ ID NO: 46842 - DNA, 294 bp, Mus musculus
  source 1..294: mol_type = other DNA
ccaaaatgtattaggtgagcacttcatgtaatattacagcttgtaatctctgagtcaacatctagaattacagaccctaaaaccctagtttccaagaagagatttttttaaagcctgtttgcctagggccagggtaaagggtctgagaaaactgtcatagtgaccttactccctctccatctcccgcaggaggaacagggcccggacatgcgcactgagttgctggcggggagtgggtggggctcgcgcgcctggctggctccttgtgcgcatgagcggagcggccgccagagc

SEQ ID NO: 46843 - DNA, 277 bp, Mus musculus
  source 1..277: mol_type = other DNA
ttgtaactgtgggtggcagtgcccccaccacacacacacacttagcacagtggacttcgcttctttaccaaaaggagcaaagaaccctccattcctcttgggatcttcaggcagcggctgtttcactgtccctttgggaaaggcagacccgcgtcccctggtccctgggcctccgcaggactgtcggggcggagcggggcggggcgggggggggcagcgctccacgtgcagccgcgatcaccccagcgggcggggcggggcctcgatctcgggcggg

SEQ ID NO: 46844 - DNA, 334 bp, Mus musculus
  source 1..334: mol_type = other DNA
ctgcagctccaggtccaggggatcaaacaaatctcacgtgtatttaataaaagtgacaatggataattttgcctcagagtaaattttggcagtgcccattagcattgtgggttgtcacaactgcaatgctgaattagtttattttctcattgttgtgacaaagggaagatttattctgcttccaaacaaccaggggtaggtgcagcctccacagggcttgccccaagtgcacctggaagaccctttgcacattcaagggccaaggctaagaaatgctggtcttgcgctctaagatctgcaagctcctagcctggcttgctctggagagaaagac

SEQ ID NO: 46845 - DNA, 399 bp, Mus musculus
  source 1..399: mol_type = other DNA
ctgctaaaataaccacgatattctccttattaaatttttatttatatgcaactattctatttctgggaagagacaacatgactaagacaactcttataaaaggaattgtgggctttttaaaccccaaaccaccacaaatactgctgtaattaaggagcatccaagttttgaatttagatcttaggatcctgaagccaatctcttctgagcagactctatcttgtgtgttcattgcgggagaaagcgatctcaacgccgcgcaggcgcccccggccgctgagcgagaggacccgggaggctccgcccctctaaggtgtccggcgcgcctgaccgcctcggcctccgcgacgtcaggcctctccttggccagcccgggtcctcggctttgtgaggaccccg

SEQ ID NO: 46846 - DNA, 444 bp, Mus musculus
  source 1..444: mol_type = other DNA
cttaagatcatagatagttgttagaaaatcttcctagtaggaatgaagatattctaaagaagctcttgtgctcctctttttgataaactctccagacatgctgggtgaaagaaggctgaagcctgcctggttccagccagagggacagctttctctcacacatagatttcacacacctcatgatggaaaaggtatccaaacgtcatgttcggactctgatgatgaacttggtctcctggctgtcctggaactcactttgtagaccaggctggcctcgaactcagaaatccgcctgccttgctgggcatgcacgcccgggtcctccttaggattattagctacttaggactattaggaactatttcagttgacacagtagcaacttctccagcgcagccaatgggcgagcctgttactagcctgcgccgtgtgcggcgtaggagc

SEQ ID NO: 46847 - DNA, 486 bp, Mus musculus
  source 1..486: mol_type = other DNA
gtgggaggggagcgagccgcaccgccgcagcggccgtctcctcccgcgcccgcctcaactttttgtacagcccggagaggcgcgggcaccccgatctccgcggtccagcagcgggtcctcgccaaagagagttgggggccggttctcccggcagcccgctcctcagcggcgcggccagccccacagccattttcccggggaggcggcggaggcggtcgtgcccgcagttgccgccgcgactccaggacccgatcgctgcccggcgccccgggcacagcccgccctgcgggaccccatcgcggcagcagctgctcccgccgctttgcccattcagcggcccccgctggcgggtgcagagcgctgtcagctctccagtctgccgccccactgatcgccgtgggtccccgtccgggcagcaccgctcccggccgcagcggcagttcctgcgccgggttctggcagatctaccgggggcggagccggctc

SEQ ID NO: 46848 - DNA, 529 bp, Mus musculus
  source 1..529: mol_type = other DNA
gtagatctgccagaacccggcgcaggaactgccgctgcggccgggagcggtgctgcccggacggggacccacggcgatcagtggggcggcagactggagagctgacagcgctctgcacccgccagcgggggccgctgaatgggcaaagcggcgggagcagctgctgccgcgatggggtcccgcagggcgggctgtgcccggggcgccgggcagcgatcgggtcctggagtcgcggcggcaactgcgggcacgaccgcctccgccgcctccccgggaaaatggctgtggggctggccgcgccgctgaggagcgggctgccgggagaaccggcccccaactctctttggcgaggacccgctgctggaccgcggagatcggggtgcccgcgcctctccgggctgtacaaaaagttgaggcgggcgcgggaggagacggccgctgcggcggtgcggctcgctcccctcccacccgccccgcgcctcccccgccgggtccccccgcgccggccgccgccgcaggccgccgcccc

SEQ ID NO: 46849 - DNA, 150 bp, Mus musculus
  source 1..150: mol_type = other DNA
gtgaaaataactggttttcaaaaagtacttggtgctctgagagctggcacagctaaaatgtgcagttttaggggttaaaatcatagaaaaaactgtagattgtgattttatctcaggctctgccttgaaacacctctgaaatcagaatgg

SEQ ID NO: 46850 - DNA, 347 bp, Mus musculus
  source 1..347: mol_type = other DNA
gagttccaggccagcctggtctacagagtgagctccaggacagccaggtgtacacatggttgttcacaactgtcagtaactcattgagcatgcccatcacacatggatatggaggcagaggctaggccagcctggtttacagaggtaatgccttctgtgtattcttttgttgtgtttgctgaataaaacaaacataaagggaaaagcaccggcaaaatgattttgtttgcttttctccagccggcgacccaaggacactgcatgccctggccacaggaaatggtcttgtcaggctggagaaggctcagaattcccgagtcctgggttcgggacccggggtttgctca

SEQ ID NO: 46851 - DNA, 490 bp, Mus musculus
  source 1..490: mol_type = other DNA
aaagctgtaaatttcgattttgacatttaatccagggctaaatacgactctgttaatgcatcgaagaaataaatttcttaaaatcgtgttttttaaaacaccaccctcataagagcttagtagattaaagcttcggttgttcgcgggtcaataccgtcttccccggcccttgagcgtcagcacgcatgcgcgcaatccaacccccccccccccgaccggaacgggagtgctctggtgctcttccattcgtgctccaggagatgtgactttttttttttaaaggcagaatatcgccgtactaagtattcctagaggaatggcgaattctcgattagcccataaacacttttgtttatcaagggttatttacagaaacctagtaggttaagcatattaggctttctagaaatttcgacagattccgttgataatcacaaaagttaattcttagatgatttttagaatttgtgaagccatgcttgacatcact

SEQ ID NO: 46852 - DNA, 531 bp, Mus musculus
  source 1..531: mol_type = other DNA
tcccggagagagataactatttaaagatttatgtgctggaccaccgcatatgtattatactcttagaatagactggtctgttagctccattttactattgggtaaatcagattcagacagtctggattcggagtctcataaagtctgggcttttatagaggaacgctggcctcacaacagcatccttctgtaacaaacaaaaagagttttagaacaacgtccttgcttgttttttttttttccttccagttacaaaatagagtttaaaacaaatggtgttctgagtcccgggagcccaaagccacggcgcccgcggaccggccctcggggctggctgttcggccctcacccgccaccgctgccggagatggagccgagccaatcggcgccgaggggaccgcggtgccgcaggaccggggggcgcggagccggggcggggccggggcggggcgcaggcggccccggcgcctgacaggagctgatcgccgcgagccggcggaggcggcggcgggcgggcgggcgagcaggcgg

SEQ ID NO: 46853 - DNA, 420 bp, Mus musculus
  source 1..420: mol_type = other DNA
gctccctatcaatttttaaaaagcaatcttataaatagatgtagatgtagatgtagatgaagatgaagatatagataaagatgataaagatatagataaagatatagataaagataaggataaggataaaggtatagatatagatatagatatagatatagatatagatatagatatagataaagataacaatgaactttaagtgatgaaacatagagttccaagtccaccttggcctttgaccctctgtaatggttaatattgattgtcacattgaccttctaagggttttgtaccaactgcctcgggctcctgcctaagccaggcttccaccaccgctagtcgatttattggggagcgacaggaaattccagagtcactgaaaatacaatatggaactctggatgcttcttatatgga

SEQ ID NO: 46854 - DNA, 260 bp, Mus musculus
  source 1..260: mol_type = other DNA
aaaggtcttaaaatttttatatttttgaaggattttaaaattttatatatgagtaattaactaaaactttgagatatgactgattcagtattcaacccagaacccctggagtggcttttatggacccttcccagatggcgggtgtgcgcgagttcaggacgccccttggtcctgcagcctacccgctggcaggatcagaggtcaagtcaaagggcacggccgctgggtgcctcgccgatgcacctcggctgtagctggag

SEQ ID NO: 46855 - DNA, 110 bp, Mus musculus
  source 1..110: mol_type = other DNA
aagtcttttcccaagggttgaaagagtttatccattgggcaccacatcttacggtgttaaacaacctcaggatctcagagctagcttctaggcctttgtccagtccatag

SEQ ID NO: 46856 - DNA, 389 bp, Mus musculus
  source 1..389: mol_type = other DNA
aatttcctattaaaataaaacactcatcttgtaatgtatttgtgttttcctaagacagctgctgccatccaatggtggtgagaaacctttaaatgtaacagaacacctgttcagaaacaggcttaagcgaaacaaatttgttccagcagtgattttccaaatgtggcccttggatcatcatcatcatcaatatgaactgagattagaacctagtgatcccctccccaccagggcatctgtgctggacaggaagctcagctgaatctccggcctgccggggtgccagaggtgaaccatgccttctctcagactaggtgggccggctctcctggggtacaccgctagcgtcccgccccgcgttgtaaataggcggttccctcggcaaccga

SEQ ID NO: 46857 - DNA, 450 bp, Mus musculus
  source 1..450: mol_type = other DNA
cccgggagaagtcagtgcctgggctcagcgcagccaagggccaggctgctcgctgcagcagagctgtcggcccgattcccctgagaagccggggatcagcgggtccgaacgcagcgcccgaacatccgggccaccgctagcctggcaagcacgctggacgccccaccaccgcttcccccgctaggggtgtcgggggtgcacgcggcggacttccaggcctaggattcccagaaacctagtttcctaatctaggcttggaagagtccgggtccagactcaggtctcgtcctctttgaaggggccctgaggtcccgcgctccgaggcgcctccgcagagtagtctctgtagtctccgaggccccgcccccgccgagcagtccagcctccgagccccgccccgctgctggagcaagttccgaagccgtgggagccacgcccccatttgggggg

SEQ ID NO: 46858 - DNA, 487 bp, Mus musculus
  source 1..487: mol_type = other DNA
tcggtcactgggcaccaggatggccccgtacatgtcccggtggccgcggggctcgaacacgagccgccgccggatgtagcgacgcttggccagcaacgtgggccctgccacctccggacacccggcgtgcacgatgcgcagaggctcgccgcctgtgtgcatgtccaccaccgacagtgctggcgtcgtttgggggcagccgggtcactgccagcgccgcctccattgtctgcgtccagggactgccgcacagcgcggtggtgctctctccaagcagggacggaatcttagactgggcgcgcccgccccccaaatgggggcgtggctcccacggcttcggaacttgctccagcagcggggcggggctcggaggctggactgctcggcgggggcggggcctcggagactacagagactactctgcggaggcgcctcggagcgcgggacctcagggccccttcaaagaggacgagacctgagtctggac

SEQ ID NO: 46859 - DNA, 364 bp, Mus musculus
  source 1..364: mol_type = other DNA
cttacctagatatcaatctataaacctatcccggatgagaaaagtctagtttcaagaacataataaccattgggtaattagatgataatgatattacaaccagcatgacttcagattcatctgatcatcacactcaacactgagactgatgatggagatgcaagaaaaaaattagtcatggcaggaaaccagttcaatggattctcttcgaaactcacttagtcactgaagtatcattaagactgtctttacaagtaactgtgctgatgatttcggaaagcataaagagctgctgtataaggaggttccaacctcaggtgggggccacaagcggacacttggagacgtcagcgtcgtcgttgcc

SEQ ID NO: 46860 - DNA, 507 bp, Mus musculus
  source 1..507: mol_type = other DNA
catgcagtgtcacagttggactgggactcctgaaatctctggctagctattcttagaaattatctgtaaatttcagtcccaaagggtaaccgtgttgacaggaaaccctttgctgctatgtgacacaggcttcaacctggaacttacaagtcccatcttctaatattctacaaacagtagagaattgtagtcttgggattacagtaagattccacccagtgactgtagtttggacaatggcaggatggtagccacaatcttcttcacaaggttttagataactgtggaatattccaaactagaaaacgtcctggacaacaggtttcatgtttctaagaaatttctagaatatgcaccagggacagctctcccaaggctgcccagcccgcgcccgccgcggtcgcatagagcagccgcagcagcatccacgcgcgcgcgccggcggctccgggaccgcgctgattcgctgtcgcgctctgcggcgctcgtgcccgcccgccccttgcg

SEQ ID NO: 46861 - DNA, 349 bp, Mus musculus
  source 1..349: mol_type = other DNA
gagtaggactaaccgataactgtactcatctactctgatgttagacttgagccaagacttaaccggtaagacggctttttactgttcatggcctgtcatttatatggcacagccaacttcaggatgaaggatttaacctccaggttgcaggagtcctaggactcctcaagctgcagccagtacctgctggtccttaaaacaagtgggtttggcacatcccctaatcagaggctgccattaacaggcccaagcaggccattttcacctgcgtaatacaagctgcctctggagcaggggaggagcgcgggcggcagccgccccggggccccggaggaagaccagaacagca

SEQ ID NO: 46862 - DNA, 266 bp, Mus musculus
  source 1..266: mol_type = other DNA
tgaattataaaaatgagtgcagtgctgtcaagagttttgtcaatttgatacaaaactagacactgaggaactgcccctatcagagagcccagcccactgtggacagtgcctctcctgagcaggtcgtcctggcttgtattgggctgactcccgctgaagtgtgatctgatcatcatggtgtttatttcttgcaatagacagcaaacaaccaagcaattataaattgtcctggtagcgtcgtttccagggcgcgcggtctggcgctt

SEQ ID NO: 46863 - DNA, 198 bp, Mus musculus
  source 1..198: mol_type = other DNA
atcttcatggtgtttatttcttgcaatagacagcaaacaaccaagcaattataaattgtcctggtagcgtcgtttccagggcgcgcggtctggcgcttgcccttgggggctcaccgggctcttggtggcctcagctgcgcagcagctgggaccgaggccatcagcggcggaactgctgacttcgaggctccaggtgtc

SEQ ID NO: 46864 - DNA, 541 bp, Mus musculus
  source 1..541: mol_type = other DNA
tttatattaaaatcaggcacacgcctttaatcccagcacgtcgaggtcaacctggtctacagagtgagttccaggatagccagggctacacagagaaacccattcaagaattcacttgaatggagatctcttgaaaagacaacctgtgtccctgggccctggctcgctgccacagacgatatagtttataatgtgcccaaagtactataatactatataaatataacaggcacatgttaccatttaaaaacattcccatccctgaggctgtttgaatggccttaggggtctgccaatcttggaaagcctaggctcccccgaggttgctcgtctgggcgtggccgcttaggccgctcaagaaccagagcaccagtgcggaagaagtctgggcgtctcccacaacactagcccgcccggccctgcgcggaggaaaccccgctgcgctgctgtgccgcacacatgaatccgcctccggcagaaccaggcggcagggggcgggacgagacgcacagccccgcctccgagcgcgcgtgcgcactga

SEQ ID NO: 46865 - DNA, 358 bp, Mus musculus
  source 1..358: mol_type = other DNA
actctaaagatgcaaaatatagacctttgtaaaccttttctcactgcaatgaaaaaagtgacaattcgagtttgaggccagcctggtcctttccatattcaaatgctgtcaaatgataatggcatcatttacaaacggtggcatcctggaacttagcaacggccatgatagccaacttttggccaaatatgagtatcatttgtaatgtttttctggtatgcttatctcagtccgcttgcccagcgcgaagaaggacctgggcacaattcccagcgtaaacagctgttaaaacagcagttcagatggagccccaccttcggggactcgctaggcggagccccgggttgtgacccgccgc

SEQ ID NO: 46866 - DNA, 540 bp, Mus musculus
  source 1..540: mol_type = other DNA
agctagctaaactggatcctttgaaaaacagccccactggaggtctttatcacgtgaccccgtaacgtgagggactcggggacaacccgcgagaagtttgcacacgcacgtctgcggtatggccgcggcactcgtgtgccaggctgagtcccctgtgccgggcgctaaccgagactgcacctggagaccggcgtccgtaggcaggtgtaagagtcgggtgcggacgacgacgacagccgggtttggagaggccctctgcgccctagcgcgaaggccgcgcgcctggctcgcacccaggacgtccacgctccctagggatcggcccgcggcagcgacctgaggagcagcgcagggcagtgacgtcaccgccgcccctcccccgccgggtctctccagcccatgggccgcgccgcagctgcagggccgggggtgggggaaacggcggcgcggggcggggcggggccgggcgaggggcagcggtgtcgagagcgcgcgtgcgcggggccgcgctagaggcggcggcggtggcggcgctagggg

SEQ ID NO: 46867 - DNA, 617 bp, Mus musculus
  source 1..617: mol_type = other DNA
tttctatgttacacactgtaaatatattcaaatttgtatctatatacaaattgtaaatatatacaaataaattgtaagttacactttggtaagaaaaaagaataaaatttctaaactcttatatcatcaaaacttattagccttgatggtttggtatcattaataccagtgagtaatataacgggttataataaaattgattgaaaaatgctggatgctttttttttaatttaattaatttatgacaacacttgttgagatgagttaggatgataatagtaccatttccattagaaacatagaactgagaaatggcatagctcaatcagttcgattaaaaaataaaaatagacccaatttagggaattttttttttccttctgtatgttcgctttggatacacaaagttcaaatacagtagttttaaaaagaaattttgtttttcttgtgacccctaaattcgaggccagcctggtctacagagtgagttccaggacagccagggctagaaaaagaacgccagccgtttcttctgctccacctgggggagcgccccccccccaccctcgcgagaactgtggcctaccacgtggtgcgcggggtctctcaaggcccca

SEQ ID NO: 46868 - DNA, 259 bp, Mus musculus
  source 1..259: mol_type = other DNA
agagaatcaaatctgtttttaaaggatctttgaagtaggcttttaagtccactgaactttagactccgtgattagcacctagaacagttccagggacctttgaagggagagtccaaactgacctctactacagatctgtcaatcctacctctctggtgggaagtctccccggcaaaccgtgggcgctgtcgattctggggaggtgctgaaacgaccggggcgctctagtcgcctgacagggggtctccatggcgcccgc

SEQ ID NO: 46869 - DNA, 314 bp, Mus musculus
  source 1..314: mol_type = other DNA
tccatgctttagtttggtgacccacatcagctgctgcagtcccaaggggacaccaggtgaggccggtaccactctcgaagcaggtgccgcgtgcgctgcgcttcgagccacagcgcctgcttccttagtaaacttatgattttccaggataggtagttgccaccgtggaaagccacgatggctcggcttcacaagctgctggggccacgggcagcgaccataggaagcgacctaggcgctccacgtcgccgctttcctcacataccccggctacgctggaacatcgaggctgcgcgggcgccccgggtgggaca

SEQ ID NO: 46870 - DNA, 304 bp, Mus musculus
  source 1..304: mol_type = other DNA
gccgccttgctcgacagactggcagccgggctggaggcgacgcccaacacctcaggcgttcgcgtagcacccgcccggggccctgcgacagaacctgctgctggagcttattcagaccttgacaagctggtcacccaaatgttgggagatttactggaggattcctttcaggatacgagattgggcctgagttgcaagctccaaaagctggcgaagacaggatagttgtcatgaggaaacacgtctttctgcctcttagaatctgagactctctgaaaactgaaacctttttcagatccatgct

SEQ ID NO: 46871 - DNA, 385 bp, Mus musculus
  source 1..385: mol_type = other DNA
gggcgcagttttatttaatttacacatggcaagtaaagcttagcaggggttgctttgaaaaatccctcttctagaggcactttgagaatgaaacctggaagaagccactttcagagttatctcattccataagctattcatcaatccattatttattcatcttaacattaaggtaattaaatatgagcgtgaggctccccttaggtgacaccaaagagggcgccgcaggtcctgacttggtcacctagcttcgccctccccacgcggggcggcagggtggcgcggctttgctgccgggccgggcggcgcgcaggctggccagcttcggataggcgccgctcgcagccaatcagcgtgtcggggacgctgcgcgctttaaggccgc

SEQ ID NO: 46872 - DNA, 209 bp, Mus musculus
  source 1..209: mol_type = other DNA
cattatatacccagtataaacatccaggtttattttctatatgctcattccttagtgctgttcttgttgaatacacatccttaataaagacagtattcccttggagcctttctttgaaagagctgtccccaatggggtggctcggccgggccggccgggcggccagtgccatatatagcagctatacctgatcggccagatccagccga

SEQ ID NO: 46873 - DNA, 494 bp, Mus musculus
  source 1..494: mol_type = other DNA
ctctgagtgtagccctggctgtctctgcagaccagactggctggaactcagcgatccacctgttcctgctttataaaataaccttttatttaacattttggaaaataaatgaggtctttgtacaattcagcttgcctggcagtctactagatattatttatagaagtattctgacatttagtaagaatttgtacaaagaattgcatttagataatttttatgaatgtaaacaatttatcttgttttttattgagacagtgtctccttaggtagcccaggctgtacagaatacttagcattattctaatcttcatatatgtgaatcaaattatgttctgattacacaactacagtacagactgtccaattttctaaaagagactactagtttgtgttattgaatctttgaaatcatgtggatgtttccaaacgaaacaagaatttatctttttgatatgatatggttccttgtaaaatgtaattaggcaaggccg

SEQ ID NO: 46874 - DNA, 395 bp, Mus musculus
  source 1..395: mol_type = other DNA
aggccagcctgggatgcatttgagacctacagtttagctagaagttacctatatcatagtgtactgccatatgccatgcctataactaaaagcttcagtattttgacaaggcactatgaaaacccctacccaagggctccggcctcggcttagcggccggtggacaaggtggcctttttgcgctcattgggcaagaaagatccagggccagcgtcacccgaggccggcttcggcgtcggaggctggtgacgtcatcactgctggccgcgaaggcagcgtagagtccgaccctgtggactcgcacctctcttccgggcccgcgatttgcacgagagcccgcaagcccgtagctccgcctctgaagccgctcagccggggcgcttggggttagggga

SEQ ID NO: 46875 - DNA, 446 bp, Mus musculus
  source 1..446: mol_type = other DNA
ttttgtttatatgcctaatgaattaagtcgattagcaggagttacagtccagggctaggcccaaggccctcctaggctggacattcaagaccgaagaggctccggggcccccgggcacacacagcccaatgtgcacatttgagtaacatcgtgtgatgttcttgcaagacctcacctggggtcagtggttcgggccccaccccagggtcagtcccctgtgcttagcatgcagtctggctgctgggcagagacgtaccagcctggctccgcttggatgctgtgccgggacgcggagccgcttcccctaaccccaagcgccccggctgagcggcttcagaggcggagctacgggcttgcgggctctcgtgcaaatcgcgggcccggaagagaggtgcgagtccacagggtcggactctacgctgccttcgcggccagcagtgatgacg

SEQ ID NO: 46876 - DNA, 440 bp, Mus musculus
  source 1..440: mol_type = other DNA
gctacttgctttattcaagcaacctacatctaacctatgtttagaatgctgtttgtggtgtgagccgtcacactctgcagctgtaccagccatgacgcggcctgcctacggcttgggacaagtcccaatgaatcatgtaaaggacttagtctagtgcttgagggcatacattctgtcccttggaaaggacagcagagactgtccccagccacctagcctaaggctctggggggctgcagagtccagggcaacagcaactccatgcagcagcctggatgctctgagaagcatgcctggcagccaagggtttgccagcacctcctgctgctggctgccacattcagcatggtgggtgtgtgacactgcccactcttcctccttgtcaccagcatatggcgagatgggatgttggctactgcagctagctagattgtgtggca

SEQ ID NO: 46877 - DNA, 459 bp, Mus musculus
  source 1..459: mol_type = other DNA
ccttggctgtggatatcagcgaggccctccagggccttgggtgaaaagaacatcacattcaggcccatttttttttctcattggtggttcctccagctagagaagacattcaaaggctcagtcattgattcttaataaatcattttatttttacagaacttcccccccttacataaaaaggggagaatatgtaagactcacccttttccttaaataacgaggattaacagccttaactgagcccatcactgtgtggtgaggagcctcgccctgctcacctgggaagggcgccatgcaggggcggagccagtcccaggtcacctgggcggtggcggaactgagcagtcccggggcagaggcagcgcgccccgcaatcggcctcacctgcgtggggggcggggctggcgcacctgcgcgggcgggcgggctgggggcggggccggggagcagccgtcgctg

SEQ ID NO: 46878 - DNA, 510 bp, Mus musculus
  source 1..510: mol_type = other DNA
catgaatgcatccatgtgtggagaccagaggttgacaccaggagtccatctatctatctatctatctatctatctatctatctatctatctatctatctacctacccatctatccatctatccatctatccatctatccatctatccatctatccatctatccatctatctatctatctatctatctatctatctatctatcatctatctatctatttacatttcctttccttctaggcttgctggccagagagactccaggaatccaaacttttgcttgaatggcaagcacttaacccactaagttagaggttgtcaaccttcctaatgcttcaaacctttaaaattattctcattgaaacttcatatctgtaagttttctactgttataaaatcataatgtaaatagcttttgaaaatagaggtgtgggggtcgcgacccacaggttgagaatcactacgcataaatttattattatcttgcctcactggcagtgcaagtgacttata

SEQ ID NO: 46879 - DNA, 456 bp, Mus musculus
  source 1..456: mol_type = other DNA
cccactctgacaataacaacctagagtgtttgttaatgcaggactaggtggaccagcaaaccgcctcttgcggcgccaggagtctaagctgaacctgggatgacccattccggtaaagattaggaaagggacctccccttccccatctgtcaccctccggcagggtctccaggggtgggaggtaggaactccctgctgcaacccggccaccgggagcagggatccgcgagcactcagggcgggaaccgcccctggggtgagtggggagtgcgggcccccttcaccgcgtaaccccggcacccacccctcaaggcggtgctgcccgcggtgcgccacgcccccggggtccggaaggcgtggcagcccgcaccgggcttctgagaacttggagcccggcggcgcgcggctctggccgggatgcggctgcggttgctgctgctgctgctgcttcctgcc

SEQ ID NO: 46880 - DNA, 413 bp, Mus musculus
  source 1..413: mol_type = other DNA
ctaaacagtgaactaaactcagtctgaaacaattcttgtttaagatgaagcaacatgaaagcaaaataagtctattcaatgccttttcctgtcttaacaccggagggaccccactctaacataggggggctggctgccagaacgcaaagagagccggggcggtgcgagccaggctcggacccaagcttggcagcccactcgacaagcacgtgagcggggcagctcgtcccagctggggctcagctgacctcctcctgattggctgagagcaactggccgccgggaacccgcctccgctcaggtgaggcgggcccgcgggcgcgcgcgttgggtgctgagcgggcgcgcgcacccctcggcttttccctcccctcgccgcgcgcccgagcgcgcctccgcccttgcccgccccc

SEQ ID NO: 46881 - DNA, 614 bp, Mus musculus
  source 1..614: mol_type = other DNA
ttaccttggccacttagttttaaaaatggatccttacttcctatgaagacataaatatcaggagtaatggttatgctgaaagaactttcttgtttttagcaaattttggctttgcacttcacagcaaattgcaaccgtaactctggtaagtttaccagagattaaatttaagaccttctcccaaacgattgtcaatggtgagcattcaatatacttaattagacatatcacaaaaccacttatccaaaataagctttaaggggctgtttaagcaactaaattatttccttactcccgcctcagcttctggagggctgagattgggacagtagtcaccctcggtttttttcttttctacattagataaagatttatttaaagtagcaaacagctgacagcttttgctggggacatcccaggccctgcaggccgcatggggaccgaggcgcggccaagccccgccagcctcgcacatgcactcgaacacgtaggcgggagccgcgggcggtcctgcgccccgcacacaggctggccgtagctgggcgctgagcccaggcacgtaccggggcggggccagcccgactcgggctgcgtttccacccgcagcaggtagc

SEQ ID NO: 46882 - DNA, 563 bp, Mus musculus
  source 1..563: mol_type = other DNA
tctggtaagtttaccagagattaaatttaagaccttctcccaaacgattgtcaatggtgagcattcaatatacttaattagacatatcacaaaaccacttatccaaaataagctttaaggggctgtttaagcaactaaattatttccttactcccgcctcagcttctggagggctgagattgggacagtagtcaccctcggtttttttcttttctacattagataaagatttatttaaagtagcaaacagctgacagcttttgctggggacatcccaggccctgcaggccgcatggggaccgaggcgcggccaagccccgccagcctcgcacatgcactcgaacacgtaggcgggagccgcgggcggtcctgcgccccgcacacaggctggccgtagctgggcgctgagcccaggcacgtaccggggcggggccagcccgactcgggctgcgtttccacccgcagcaggtagcaccgcgcccggagcgtccgcgggccagagacggtcaggctcgctctaccgctctcaggcttctctgcgttccggaatgcggccaagaccg

SEQ ID NO: 46883 - DNA, 276 bp, Mus musculus
  source 1..276: mol_type = other DNA
acagtatatcagacagtgtgctagataaacagcaactgctgcccagagtggttgcatattactgaggaagaaccacgggagttccttccgagtcactttaaagaagactttaggccagcctgatctacagaatgagtttcaggacagccagggatgtattgattaatagttagcaggcactactattgttttatctacctacttatctaatttgaaggtcttatttatttatttatttagagggtctctctatgtagacgccagcggggcttgcac

SEQ ID NO: 46884 - DNA, 328 bp, Mus musculus
  source 1..328: mol_type = other DNA
aaaaacccaatgccttcccgtgcttaggctttgagtgcaaggatctttcagtaattggtttatatcaaagtccatctaattagttaattggccatttattcactaactcattaattcacgcgttagagtcctccattaagtcgcttaatagagatctgatagcctactacacacaaggctctattttcaccttgttgagctagggctcagggtcgacccaggttgcgtgtggggacgctggcgggggcgacccagctggcagccaccacggggctcggggcggcgcgacgggggcgcgcggcgggagcgtctgtgcgcgtcgcggccc

SEQ ID NO: 46885 - DNA, 237 bp, Mus musculus
  source 1..237: mol_type = other DNA
cctaaaggtaccactaatgctgtcaaaagaaggggctgccaagctctttgggctcccccttttcccactccggtccaggtcctgaatgtagaggagggcggcctctgcattaaggtctctccagaggctgtgtcgcgcgccaaatccagcctggggcgcagggaaagctcccgtgtggaggcttcaggcgccagagcccggaggggggcggtagcagcgtcaggtggctgctccgcg

SEQ ID NO: 46886 - DNA, 303 bp, Mus musculus
  source 1..303: mol_type = other DNA
gaaagcaaagggttttttttactttaacccattcgtcaaaatcatttgctggctgctatgcgcctgtgtcactctctctcacttccaaaagtgtgagtcctgagctcattcctctgtttaaaaaaaaatcattgggatatttgagcattgtgctcaaattgcttgagattctcgtttgacgtcatatgttagcctgcaatccctttcccagccacaagccagcagcctggctagctagcaggggataaagcaggcagcttaatttcctgaaagcgaggggggggaaactccgtttaaaagccc

SEQ ID NO: 46887 - DNA, 484 bp, Mus musculus
  source 1..484: mol_type = other DNA
gcctggtaagtacttacatataataaataaataaataaataaatcttaaaaaaatatattttactttatgtatataagtattttgcctacatgtatgtatgtatgtatatgcaccacaacagtagtcagaatcaccatactttttgtggagaacagcatagccatatgctatgatgggcttttgaaatgatttccatatggtcaaatttcctcattcataaaacttacattttctattcatactgacattagaaattaaaaattttaatgcttataaaagaccagtaggccagcctggtctacaaagtccaggacagtcagggctatacagagaaaccctgaaaaaaaaaaaaaaaactttggatgattctaattaagattttgtttcaatattttatcattgaagatttctttttctttatgaattatgagaagaaacagtttcctggaactcactttgtagaccaggctggcctcaagctca

SEQ ID NO: 46888 - DNA, 301 bp, Mus musculus
  source 1..301: mol_type = other DNA
tggactgcatttgtggaaagtacccttttgaggtgcatttaaaaagatagattttatttgccttttatgcaatgtttgtgtgattattttttatagaacatttcatattaattgaagggtttattcttctcatttaggcccgcgacgctcccgccccagctctcctggaccaagtcagtgtgacccctggcgcccgagacctttgcttcgggcggtggaggggcgtcatcgcctcctagcaacgctcctagcaaccggataacatctgctccctttggtccaatgcgcgcctagaaaagcc

SEQ ID NO: 46889 - DNA, 555 bp, Mus musculus
  source 1..555: mol_type = other DNA
gatttccaaattttgagcagctggtaaattgattgatggtctaagaatattgcaaaaacatgtatgtattttcgtcctcgttctagatagaggtaagtcttctgtttaaactcagactcaaactatcaattattctgaatgggagactgcagagttgccatctgcattaactcccggagcgcgggcccccgccgagcctggcaggggcatcagagaggaccaggtgagagtccaaccggtggccaggcctcccacgagtccgcgtttacacagggctcagggggccgtgggttccgtgcggagtggggcttgcgggctgaaccgtgaggcaccaggacggccgccctgtggccttcggatacccggcgcggtccacagggttccgcctggcggaagctccagtctcgggcgcgcccgccgagctctcctcaggcctagcagatcaggcgccctggcggaaacggcggcccggtcgcccgagctcacggtagcatccgggtcccccgcgctctcagccgaacgtgctggcctgggagtgaaggcgcgcgccggcca

SEQ ID NO: 46890 - DNA, 173 bp, Mus musculus
  source 1..173: mol_type = other DNA
cgcttaaccaagtacgtattttctgaattgtttacagggccagatgtcatgtctccactacagttggaacatcagccctgtactaaagttatgtacctggggcgagtgtgggggcggaagctgggtcccagggagccccgcggctcccgcttcagaagagcccgggagggcgg

SEQ ID NO: 46891 - DNA, 403 bp, Mus musculus
  source 1..403: mol_type = other DNA
tttgccttgactgaaaataacttcctggaattaaaactttgaaatcttttaataaaatcggatccatctagaagttaaagtcaagtttgtgacttgcaagacaatcctgtactggcatggtgccccagtaaccccgagtcttggggggcttcgagcaatcttgctaagtgctagaatttattaaggaaattttacacctaaattcgcttaagagacgtatgtgagtacagtcagccacagctgtgtcagcgatcacatacccaggctctgtcctagaggcttgttcttcgcacagcaaccaggagcaccgggaggcggggcttcggcgacagctccgggctgcgcgcgcggcgcgggcctccgtgagcgcgccaggggaggggcgcgcggggcgcagggcgcg

SEQ ID NO: 46892 - DNA, 489 bp, Mus musculus
  source 1..489: mol_type = other DNA
tgtgtcacctcaatactcgcagagaggagagtgtggagtttcccggaaacatgaagttaaatttgattgcgatagaaactcaggccactgcctctttgtatttagacttcaagagtcttaatactataacagcgactcgaaacggtgatgtcatcctgagttcacagctgctctcctcagcccatcctgcaggctggcacgcgcggggcgggggggggaataagcacctccttatcttacctagaaggtcggctcgctgatttgtagatgttctaggagagtcggcctcccctttgtctccagctgcgggtaggcacggaggcggaggctcgtgaacctgcgttcggagttagttcctcactcccgccacctgcaagggtctgtaaggcggaggagttgcggtggccgcagggaggcggctccgcccccagtgcgctgctccgggcggcggcgagcgcgggactgggcgggccgggagggcgcggggcg

SEQ ID NO: 46893 - DNA, 375 bp, Mus musculus
  source 1..375: mol_type = other DNA
gtctcccactcaggagcagctcagcttgtggcagcgtaaaccaggtgccacgttttagggaaaaatgttgccaagcctgcacaccttgttccactggtatagaaggcttacaaagaaggatttccgtcttcctacattttagaaaacccagaagggagaagtactgcaaggtggagtccctcctgtcaaccgtcagtgggataagatgaactctggccttctcaggcagggagggaaacgtctcctcaggacacccccacctgaagctcgggcttcaggtttcactgctgcttgtaaacgtgacacggagaaattataaaccagaaatctcttttcaggagccaactggggtggtgccgctgccgcggccgatgg

SEQ ID NO: 46894 - DNA, 285 bp, Mus musculus
  source 1..285: mol_type = other DNA
tctactgtccttaaaaaaatttgaaatgattaagagcactgactgctcatgcctcttctggtgtgtctgaagacagctacagtgcattcatatacataaaataaataatctatctttaaaaaatttaaaacatatatacatacacatttaaattaaaaattacttattaaaaccatggcctttttgttgttgttttacacacacacacacacccctgggaaagactttccacattagcatgcctatgggttcctagatatggctattgtaaaatgaagtttcatt

SEQ ID NO: 46895 - DNA, 351 bp, Mus musculus
  source 1..351: mol_type = other DNA
aaaggctgccttaaagccagttgtttcctcaaagactataaggtatacttccaggcgggggcgccagagaccctctccgcccctgtaaaagcgcaggcagattttctccaggtgaattccaggaggttctttttcttttcttttttttttttaacgaaacaaaacaaaacaaaacaaaaaacaattctcggcttccatcgccagccgctgatagatgagcgttctcgttattactgctaatttcggtgctattaccctggcccattccagaatccctggggatctgggctggaggtccacatccagtggatctggttgcacggcgcgggcctgagatctcttttaaaagaa

SEQ ID NO: 46896 - DNA, 486 bp, Mus musculus
  source 1..486: mol_type = other DNA
ccagaccctgggctctgagaatctaataaaccaggttagtcaccatccttaataagtcgattaaacaagtaattttattcaatacgagagaagtcttatcttctgagttctaatatgaaactgaggtttaagtaaagagtcagacttgatatagagttgaacaaatctctttccccggaaacaaatttctactctggctggtggaaaagcaattccctggagtgcttcctcccagaggatagcctcataacagagagggctccaggtcagtagccggaatcagcttaaggcctccaaggactctgtcgccgcaacctaggtcacgcaaacgcgaggcgggaagctcccggctcatcagaggcgggctccacaccgccaaccagtctttggggcccaccggctcccgcagacgctcctgggcctcctctgtcagcgggtcacgcctgcgcaccttcgctgctgagcgcgacgcaggcgcactactcc

SEQ ID NO: 46897 - DNA, 534 bp, Mus musculus
  source 1..534: mol_type = other DNA
ctaagaattttatagagaaatttttttgtttatttggattaaacatctataccaggctggcctcaaattcagtggctctttattttttattgtacataactaaataaagacagtggacagtcattttcagccctaaatttatatttgaatggccttatagattcaaaaagatttatgcataggctcagaccctgggctgaggtcaggttataagtattatttgctatttattgtgttaatggctattcactattttggcatcaagactatgtatatacatatacccatacacacacacactgctacaaatgtattttcctagaataaatttttcgtgagacagatcatcttttccttagaaataatagatggaatcaccatttctatcctcttagggatcagaagttttatataaatgtagatatagatatgatagtatatatacacatatattgtgtgtgtgtgtgtgtgtgtatttgacaaacacgtttcttagggaaataaccaatctaactgtcaccttgacctagcaac

SEQ ID NO: 46898 - DNA, 388 bp, Mus musculus
  source 1..388: mol_type = other DNA
aggatcactcgtcctccagaccctgggctctgagaatctaataaaccaggttagtcaccatccttaataagtcgattaaacaagtaattttattcaatacgagagaagtcttatcttctgagttctaatatgaaactgaggtttaagtaaagagtcagacttgatatagagttgaacaaatctctttccccggaaacaaatttctactctggctggtggaaaagcaattccctggagtgcttcctcccagaggatagcctcataacagagagggctccaggtcagtagccggaatcagcttaaggcctccaaggactctgtcgccgcaacctaggtcacgcaaacgcgaggcgggaagctcccggctcatcagaggcgggctccacac

SEQ ID NO: 46899 - DNA, 307 bp, Mus musculus
  source 1..307: mol_type = other DNA
tgtgcacttcctgttccagagtgaggactgtaccagtacctgtttctcaccatatatatataattttcagtgagttcaataccaggctggttcacaggcctttaatcccgccagcctggtctacagagttggggatcgatcttaaaccccctatgcgtccggggcgggagcacggaggtctctcccaggccgctgggcagtcggctggcaggtggctggctgagttcaccccgcccccggccctagccccgccctgctccacgcgcattggcgcgaccagctgtctctctccgcgctggggaggggg

SEQ ID NO: 46900 - DNA, 751 bp, Mus musculus
  source 1..751: mol_type = other DNA
gcgtcgggccggggaggctggcactgcccgcagcgcgggcgcccgggcggcggcggctggagcagcactgtcgcccctctccccgggacgccactgggatcctcccgactcccccagggctggatgccgatcgcagcccctgtcccgcagggccccgcagttggacccgcccccgcgctccaccctggacgcctggaggggggggtgacactctcgtcccgtccagcctaaagcctgtccgctcggggtctccgtgcccagcctcggcccgccgcatgtggctgcctgccccgcgccctcgtccccctcccgcgccagacgccgcccgtccccacccagggccgagggggcaccccggggaaagttcccaggtcacgccaagacgtgtggggagccagtgacgctcggtccccacacttccgcctccagtcacgactggggaccgtggcagaggcgcgcccggagcgcggggccgacccccgccttggccactcgggcgggcaggcaggcgcgcgcgcacgcacgcacgcacgcaggcaggcacgcacactagccggggtgccgctcgcttcccggcagtccggtcacgtgggccgggcgcgggaagccgcgcgagagcagcccgccgggtgcgtgagcgggcgcagccgcgtggtgtgcgccgcgcgggagcccgcccctcccgcacagagaagcccgcccgccagtccgccgccgcggcggagtctgggtaagcaacgcggccctgccc

SEQ ID NO: 46901 - DNA, 730 bp, Mus musculus
  source 1..730: mol_type = other DNA
aacaaaggacttccgctgccgcacagccgcgcctgccgcaccgcactgagccggccccgcttacgcggcgactccgggtctgcccaccagttcgcggcggcgtgcccgcccacccactccgccgctggcggctaggggcacccgcggtcgcctgttggttgcaacaagtttctgcgtcgggccggggaggctggcactgcccgcagcgcgggcgcccgggcggcggcggctggagcagcactgtcgcccctctccccgggacgccactgggatcctcccgactcccccagggctggatgccgatcgcagcccctgtcccgcagggccccgcagttggacccgcccccgcgctccaccctggacgcctggaggggggggtgacactctcgtcccgtccagcctaaagcctgtccgctcggggtctccgtgcccagcctcggcccgccgcatgtggctgcctgccccgcgccctcgtccccctcccgcgccagacgccgcccgtccccacccagggccgagggggcaccccggggaaagttcccaggtcacgccaagacgtgtggggagccagtgacgctcggtccccacacttccgcctccagtcacgactggggaccgtggcagaggcgcgcccggagcgcggggccgacccccgccttggccactcgggcgggcaggcaggcgcgcgcgcacgcacgcacgcacgcaggcaggcacgcacactagccgg

SEQ ID NO: 46902 - DNA, 505 bp, Mus musculus
  source 1..505: mol_type = other DNA
gcgatgatctccaccttgccatgttggaatacccccacgatgccgatagccgggccgcgggcagaccaagccgggacctgagccaacggtcgcttctcacaccgagcgcgactagcgtctcccggagacctctacggggtccccgggcccgcccgctccaacccgtccggcgctcccacaggcttgcctggtcggagtgaccagccggtggtccaactgaaggggcggccgttatgcaaatgaagccccgcccagtgcctccagccgctttgggggcgttaagctcgcgccaggggagccagtgtgaaagccgggcggggcgcgcggttcggtgtcgggtgccgccactgactcggctcccggggcccgaattccagaacggctgggatcggttctcgccttccctgcccctgctgttcctgtagcggggactggggcaagttgggcgggtacgagtcagtacccctcccccttcccagcgcgcgcgaccggggaaggatgcggg

SEQ ID NO: 46903 - DNA, 384 bp, Mus musculus
  source 1..384: mol_type = other DNA
agggagtccttttacaggagcaagtgccaaagactctttggaggcggctcgcgagccgtagccgctcgcgctgcgcgggaagccacccgcctcccgggtaagcaccccgcatccttccccggtcgcgcgcgctgggaagggggaggggtactgactcgtacccgcccaacttgccccagtccccgctacaggaacagcaggggcagggaaggcgagaaccgatcccagccgttctggaattcgggccccgggagccgagtcagtggcggcacccgacaccgaaccgcgcgccccgcccggctttcacactggctcccctggcgcgagcttaacgcccccaaagcggctggaggcactgggcggggcttcatttgcataacggcc

SEQ ID NO: 46904 - DNA, 749 bp, Mus musculus
  source 1..749: mol_type = other DNA
gcccggcccacgtgaccggactgccgggaagcgagcggcaccccggctagtgtgcgtgcctgcctgcgtgcgtgcgtgcgtgcgcgcgcgcctgcctgcccgcccgagtggccaaggcgggggtcggccccgcgctccgggcgcgcctctgccacggtccccagtcgtgactggaggcggaagtgtggggaccgagcgtcactggctccccacacgtcttggcgtgacctgggaactttccccggggtgccccctcggccctgggtggggacgggcggcgtctggcgcgggagggggacgagggcgcggggcaggcagccacatgcggcgggccgaggctgggcacggagaccccgagcggacaggctttaggctggacgggacgagagtgtcacccccccctccaggcgtccagggtggagcgcgggggcgggtccaactgcggggccctgcgggacaggggctgcgatcggcatccagccctgggggagtcgggaggatcccagtggcgtcccggggagaggggcgacagtgctgctccagccgccgccgcccgggcgcccgcgctgcgggcagtgccagcctccccggcccgacgcagaaacttgttgcaaccaacaggcgaccgcgggtgcccctagccgccagcggcggagtgggtgggcgggcacgccgccgcgaactggtgggcagacccggagtcgccgcgtaagcggggccggctcagtgcggtgcggcaggcgcggctg

SEQ ID NO: 46905 - DNA, 750 bp, Mus musculus
  source 1..750: mol_type = other DNA
ttgcatctgtcccgcgacgggtgcagctgcagccgccgcccgggcggctcgcggcgggagggactgagcccggagcagcccacaggggcagggccgcgttgcttacccagactccgccgcggcggcggactggcgggcgggcttctctgtgcgggaggggcgggctcccgcgcggcgcacaccacgcggctgcgcccgctcacgcacccggcgggctgctctcgcgcggcttcccgcgcccggcccacgtgaccggactgccgggaagcgagcggcaccccggctagtgtgcgtgcctgcctgcgtgcgtgcgtgcgtgcgcgcgcgcctgcctgcccgcccgagtggccaaggcgggggtcggccccgcgctccgggcgcgcctctgccacggtccccagtcgtgactggaggcggaagtgtggggaccgagcgtcactggctccccacacgtcttggcgtgacctgggaactttccccggggtgccccctcggccctgggtggggacgggcggcgtctggcgcgggagggggacgagggcgcggggcaggcagccacatgcggcgggccgaggctgggcacggagaccccgagcggacaggctttaggctggacgggacgagagtgtcacccccccctccaggcgtccagggtggagcgcgggggcgggtccaactgcggggccctgcgggacaggggctgcgatcggcatccagccctgggggagtcgggaggatcccagtggcgtc

SEQ ID NO: 46906 - DNA, 433 bp, Mus musculus
  source 1..433: mol_type = other DNA
ggaggcggctcgcgagccgtagccgctcgcgctgcgcgggaagccacccgcctcccgggtaagcaccccgcatccttccccggtcgcgcgcgctgggaagggggaggggtactgactcgtacccgcccaacttgccccagtccccgctacaggaacagcaggggcagggaaggcgagaaccgatcccagccgttctggaattcgggccccgggagccgagtcagtggcggcacccgacaccgaaccgcgcgccccgcccggctttcacactggctcccctggcgcgagcttaacgcccccaaagcggctggaggcactgggcggggcttcatttgcataacggccgccccttcagttggaccaccggctggtcactccgaccaggcaagcctgtgggagcgccggacgggttggagcgggcgggcccggggac

SEQ ID NO: 46907 - DNA, 251 bp, Mus musculus
  source 1..251: mol_type = other DNA
agacacggggcatgcatttcacggggcatgcatttcctgctgtctgaaagatctcatgtctcataatcacctgtaatgagatctgacgccctcttctgatgtgtctgaaacagctagagtgtgcttatttataataaataaatctttggaaaaatttttttctctgcctattctccatagattcccatcttttgaactgagagtcttggaactggtcccagggaggcaaggtgctagatcccttcctgctc

SEQ ID NO: 46908 - DNA, 367 bp, Mus musculus
  source 1..367: mol_type = other DNA
gtcaacttgacacaagagacaagccggtatggctgtcctggaactcactttgtagaccaggctggcctccaactcagaatgaaaggcatgcccgcctggctgcattttcttattaatgaatgaagaaagtttgtttttcaagacaaggtttctcttcagtctgtagaccaggctgacctcaaactcagagatgtctacttctgcctctctggaattctcgtcactgtttaggcagtttggaacaggtctttcctacagaattgtgcgtcaagtccgggctggccgcgagcacagcaggggttgggacacccagagtgctcggggtcccccgtccggcgggagccccgcccctccggcgccagccgga

SEQ ID NO: 46909 - DNA, 189 bp, Mus musculus
  source 1..189: mol_type = other DNA
gacagctccagaagtagcccagtatggggcatggagtcccaagtgtggcacagttccatactcagtacaatccgctgcaaggcattgccaggggcaatcagaaagctgtatgtaactaaagagtgattctcagaaggtacctttcagagactttctagctagatctgacctgggtggagatcaagggca

SEQ ID NO: 46910 - DNA, 446 bp, Mus musculus
  source 1..446: mol_type = other DNA
agcactctgggggatcactcaaaagggtggcacacaaaagatttatgttcttgctcaaaaaaatggggtcactgagcgccgcgccccgccccgcagaaggtaagattttacaactgtaaagagacctgctccagtaggaccaggacgcccttgccacctagacctgcgcttctcctgggaaagtctaggtggctgggctccgagtcggcgtgatatcagggcggtggcactagagtaaccccaccacgtgcgccttgggatcccagagttccaggtggcaaggggaggcggccagcgggacccacacggcgggccacgcgcgttaatcattagccacggcggccgctgtctacagcgggagccacagctcgctcgcaccgccgcgaaggttcccccgggccccccagagccgccaatgctggatcgcagccgcgagcgcagtctcc

SEQ ID NO: 46911 - DNA, 493 bp, Mus musculus
  source 1..493: mol_type = other DNA
tgaccttgtattgttaaaaagtcaaggaaatagcctgccttgcagggtcttgcccggagacccgggctcaccgggttctccgggacagtaccttgcttacaagcaggagccgcggcctccagcccgcaggctgggggcgggggcctcggcccagtgcccaccccctgtgctcccagcgtctgctcctactaccagccggttgtagccggccgggagcgcgctttctaacgtaacccgcccgcgggaatttccttttcgccgccagcttgcggctccgggcacacaaataggccggaagagagtcgagtcctcttcccgtggcaaggggagagaggaccctggcgtcccaggtcccagcggcggcggcgctagcggctaggcaggtgcccccgggcgcgcagtcggaaggcgggcctggcgctgcgggaggctgcagccccgcctccccgcccccgccgcgggactatctggtcccggcagcagcgatgtcccg

SEQ ID NO: 46912 - DNA, 329 bp, Mus musculus
  source 1..329: mol_type = other DNA
attagtaatttttactgtccaaatacctactctcaaatgtttcctttgagcatcaaagttaaagatagtctgtgagagacgtatggagggccgcccctccctgaccttgtattgttaaaaagtcaaggaaatagcctgccttgcagggtcttgcccggagacccgggctcaccgggttctccgggacagtaccttgcttacaagcaggagccgcggcctccagcccgcaggctgggggcgggggcctcggcccagtgcccaccccctgtgctcccagcgtctgctcctactaccagccggttgtagccggccgggagcgcgctttctaa

SEQ ID NO: 46913 - DNA, 432 bp, Mus musculus
  source 1..432: mol_type = other DNA
gcaattcttataaattctggatatgtaaagatgtttcaatagaaactttgatactaagggttagattaaaaagttcttgtccaaagcagtgtcttttttaaaaaatttacttttattttatgcacaattgggtcctctggaagagcattcagtgttcctttgaattgatttttgtacaaggcgtatgataagaatctaatttaaataatttagtaggttcttgatctcttatctgttattatagcacaaaatggtatttaaactgtcatttcaggtttttgaggcaagaagaaacaattcccctttttgctgtacttcttaattcttttttaatcagaattcaagaaggcgcctattagaagttctttcaggcttgagtcctcagatcttttcaatacctgaagagcgacaaaatcgatatctcaactctcg

SEQ ID NO: 46914 - DNA, 550 bp, Mus musculus
  source 1..550: mol_type = other DNA
actagacttgctctcccctaatactagttctcaagagcaggcaattttctgaaccccagagaggattgattttcctctctggtgctaacacatttggcagcagtaaactgggtctctagagaggacaattcattcttgggtaccatttgtatacagaaataaatatttggtccaaataattttgcaacttggatttcatttttaatgataatttatctgtctttgtggggcggccaaatggcaatgacagttaagccttccaactaggggtgagcccaggtggacctgccactcataagctgggccaggccggggctgggtgggcgctcattccaactccgcctctccccttccgaaccctgcccgggtccgggcaccccagggcttgagagcagagctgggatcccgccccgggcggccgcggggaccccgacgctcccctcccccgctcccgctgcagcggcggtgcaggggacgggcggagggccgggcaggggcggcagccgcagctgtcccctcccacctcccgccagcgcgagcttccccgcga

SEQ ID NO: 46915 - DNA, 450 bp, Mus musculus
  source 1..450: mol_type = other DNA
cagctgctgagctcccaagagtgggctccgatgacagccctcagcaggccagagatcgcccatcatacatggctggctcgcagctgctttgccttcctgcatgtcacctcctgtgaggagaggggtctcagagactgaacctgtctgagagggagataggtctgatcactaagtcagcaaggactccatcctcatgactggcttgtcctaatgtaggacatgctacagtcctttggtctcagagactgatgctctaataaatgtgttgagacagatgtctgtgccaggcaaaatcaacttgctggggcaagcagaagtcaatcttgcatcggagtgaattattcacatctgctcacagatacaaattcaaacagttcacaggtgggtaccgaatgctcaaaggccctttgtgaagtcctttccttcccaccggtctaaaggacttaagga

SEQ ID NO: 46916 - DNA, 364 bp, Mus musculus
  source 1..364: mol_type = other DNA
acacttcatacctcgttgcattaagttaattaaagaggttttagagggcccgcgtgggcatctcgaccgcgccccctggtcgtgattccttcccgggagggttacgccccagggcgccccaatcccttgggccgggcgcccagagctcggaattgtggccggctccaggagcccagctccagcctctccgccgcctggggaggaaaatctcctgacaactcgcggtctgtggactacatctcccgggaggcaccgcgccacttctcgctgccaacacccggggcgcaggcgccctgagctctgcaagtctcagctaccccggcgcggtgagcccggtcacgtgttagggggccgatcgggcgtg

SEQ ID NO: 46917 - DNA, 341 bp, Mus musculus
  source 1..341: mol_type = other DNA
agttaattaaagaggttttagagggcccgcgtgggcatctcgaccgcgccccctggtcgtgattccttcccgggagggttacgccccagggcgccccaatcccttgggccgggcgcccagagctcggaattgtggccggctccaggagcccagctccagcctctccgccgcctggggaggaaaatctcctgacaactcgcggtctgtggactacatctcccgggaggcaccgcgccacttctcgctgccaacacccggggcgcaggcgccctgagctctgcaagtctcagctaccccggcgcggtgagcccggtcacgtgttagggggccgatcgggcgtg

SEQ ID NO: 46918 - DNA, 489 bp, Mus musculus
  source 1..489: mol_type = other DNA
ttcaaatatatacgtatgtatatatatatgaaacagtaacattaaaaacatgtgcacatgtgcattaagtctccaggtggctgcttggaatcctgtggcgctgcagcccctgctgagcctattttctgtcataccataattggaagctgtcaaatatttatgttcacttatttaattctgcctattcctcaaaaatgaaattcagatgtaatctaaggaaaagggcattgtaattttgttcacttctgcattcctgggctctggcacggaacaagtatccatgaatatttgttgatatttctttggactgccattgcactgtaacctccaaaggagaaaattacagtactacatttctctatctctgagtattgagacctgcaattctgctactattaatagccaagagagatgtcagaaatgcttttaaacgttgacgttttcttctccagaaagctgatctcctgcagcagctcatctgtccgtttt

SEQ ID NO: 46919 - DNA, 444 bp, Mus musculus
  source 1..444: mol_type = other DNA
ttcctcttttgaataaaagtgctttttaaatgctaaagtaaacattttacctggaaaaataattcagggttttgactgttgaaattttagcccttaatccatctaagtacagtataagcctaaattttgcttatttgatctacgcatttaataaatgactacagatttgttatcataattctgacttcaccagtgttttctcagagacttctcttttcctttttaaaaagcactgtcctttgcattttagaaacacagttcctgatatagaataaacattgggaatttgcatataaaagggtggccctgtttactcagagatacgtttccaaagtatttactagtatttatctgtgcaatatactcagtcacccggctgagtcctcaggcttgggatctggtccccaggctacagggaagaggctcaccccttcggcccgcgtg

SEQ ID NO: 46920 - DNA, 806 bp, Mus musculus
  source 1..806: mol_type = other DNA
ctggctgcgcggctgggtcctcccgcccagctcgccctcccggacggtctgtcggaggtagcccttcgagcctctccgcctccgaagggctgaggcagcagcggctgcgaacggccgggcttcgaactcgggctctgcggggttctttctcttcagatgaagacagagcccgcagggtagccggaccgcccggagccgaggtggcactgtgtgctggtgcctcagcggatgaccctattgagccccagcggggtgcgcctctgggtggtgggccaggccggccagggcgtggggagcgctgctcccctcagcctccgaccctcaggcggccttcgcctgtagagaccaaagccggagcccgcgcgcggccgctgtccggctggaactcgggtcccgccgtggcccggtggatgctgcagctccgctgtccacccgcacagagaggaaggggacggggcggagcctgtgcacatgccagggtcgctggaggaggccgcggccggcgcatgcgcgccctcccccagcaggctgggacgccgaggggcgcgcgcccctctccgcgcgcgcacgctcgctcgctcgctccctcgctcgcgccggccggcggcttccccgcctgcgctcccggtcggagccactccggcgcgtgcgcgcgtggtctcgggccgacccgagtggccgggttctctgggctccaggcccccgccgcccccttcctcacggaatggggccggcgctgctcggggtcgcgcgtcctggacccggctcgcgctcggtctcgcgctgtcagccgctgcctggctcgc

SEQ ID NO: 46921 - DNA, 423 bp, Mus musculus
  source 1..423: mol_type = other DNA
agttgtctacgacatgaggtgtgtccccctaagtaactcccaatcctctccggagaattctgtgacaactgcctggttttcagaaacacaaccgtctcttccaagggaatcggatttttctccgctagcggcttccgagtccgtctcagggaagcacggcgacccactcgggtgagtgcgcgcggccgagcccccgggaggcggggggggggaagagcggaccaatcagcgggccctctccccacgcgcgggattggacgatccgttccagcctctctccgggccgtgggcgggccgcgccaggaacggcctgggataggcgcgcccgctgcgccagcgtcccaggggcgcgtgcgcggtctcgcgtcagccgcgggggccggtctcgcgcggcctcgaggaggagttgctggcgacggcggc

SEQ ID NO: 46922 - DNA, 397 bp, Mus musculus
  source 1..397: mol_type = other DNA
acttgaatctagaacttagggacctgagtgaagtgaattcaccatcacttgtagcaagaaagtaccaaatctccagcacatgagcaaaacattaaagtacattcatccaacaacttactgggtgcccacttagcgtgtacaggctgacctcagacttactgtatagaatttcaggcacaacttgaagtttttttcttcaaatggctcaaaatgctttggaagtctccaaaatgattaatgtattttcaatttttattatatcttttatggcttttcactttaaaaaaaaaaaaaaagctctgttacttcatagagcctcagaacttccagctgcccctgtctgagcttctcaggaatgctggcagcagccatctatgtcagcacattgtgatgcagg

SEQ ID NO: 46923 - DNA, 579 bp, Mus musculus
  source 1..579: mol_type = other DNA
cgacgtctgtggtaggctgtcacctggggcggcacagggtaacctatctctgcccgagaggggactctcgtcacagcggccaccgtttcagaggaggtgagcccacctcgctgccgcacctggtccggagtggctccatcgcgggcagagccggccggcctgaggcggcggaaaactgacgaggctgccggctcggcgggggcccgccgaggctgcgttcgtgcctcgcgcgcacccgcaccgcgtccgccctactcgcgcgcccaggaacgttccttgggtcccactctaggctgggttgcacgcctcggggtgtagctccgcccctgcactccgcagagcctctgggtctcgccggccttgccccgccgcctccgcgaggccgccgccaccccgggatcgcttcctcccggccggactcggggtcgcgcggcccgactccgccccctccgcggacccgcgcgctcctggcgcggcctctccacgcaggccaccgggcgctcggccccctccttcccgctcgcctcgcgctccccgggcgccctcgctctcgcgctctccaaggcaagcgcgctcccg

SEQ ID NO: 46924 - DNA, 709 bp, Mus musculus
  source 1..709: mol_type = other DNA
ataaaagggtggccctgtttactcagagatacgtttccaaagtatttactagtatttatctgtgcaatatactcagtcacccggctgagtcctcaggcttgggatctggtccccaggctacagggaagaggctcaccccttcggcccgcgtgtgccctggctgcgcggctgggtcctcccgcccagctcgccctcccggacggtctgtcggaggtagcccttcgagcctctccgcctccgaagggctgaggcagcagcggctgcgaacggccgggcttcgaactcgggctctgcggggttctttctcttcagatgaagacagagcccgcagggtagccggaccgcccggagccgaggtggcactgtgtgctggtgcctcagcggatgaccctattgagccccagcggggtgcgcctctgggtggtgggccaggccggccagggcgtggggagcgctgctcccctcagcctccgaccctcaggcggccttcgcctgtagagaccaaagccggagcccgcgcgcggccgctgtccggctggaactcgggtcccgccgtggcccggtggatgctgcagctccgctgtccacccgcacagagaggaaggggacggggcggagcctgtgcacatgccagggtcgctggaggaggccgcggccggcgcatgcgcgccctcccccagcaggctgggacgccgaggggcgcgcgccc

SEQ ID NO: 46925 - DNA, 264 bp, Mus musculus
  source 1..264: mol_type = other DNA
catccactatcactaagttaaaggttttgtagtgaaaacatctgaaattgattgtctcagcaacttagaaatgtttaatactttattgtgcacgcattcactgtacaatttagtattatctcaaaagggatagcataatatttttgataccatgtttataaaacggcaaacttttttaagctaaatgctaatgtcagttatctgcggatttgaatcaggtccttagtatacaaattttagatcaatccctcaaaaaattattgt

SEQ ID NO: 46926 - DNA, 351 bp, Mus musculus
  source 1..351: mol_type = other DNA
agcaggcctcttctctcagaaacagcagggttacgcagcgaaggtgactcggctcgggccccccggcgagacaaccggttaccccagtgcccgcctccacgggagtcagctgaccgggtcacttgacaactgcgttgctaagaggcaaccaggaaaccggttcccacttccggttccgatgtggaagcgcgcacagtccggaattccgggtctctccaccgcccctccctccggcgagtcgccggcacccagcacgctctgagggatgggtcaggagaggatcacgctcctcctcttcctcgcaacgaaggatccttttctgtcggcgcctgcgcagtgagaggtggctcc

SEQ ID NO: 46927 - DNA, 249 bp, Mus musculus
  source 1..249: mol_type = other DNA
tctctctgagacagaatcctgagaattgacaagcttgagtaggcccggctctgcctgcatgttagctgctatgagggctccaggctgtatgaaccaccaaagagcctcatagtttctgcctcctacagtggtgtcatctcctaggataggatctcagcccatagcagatggccatcggctgctgcagcaccaggctgcagaagcaggatgtgggctgtggcttgccttggccccaggaaaaaggaagtg

SEQ ID NO: 46928 - DNA, 482 bp, Mus musculus
  source 1..482: mol_type = other DNA
ggagtcgagggttctccagaggcctccccaccacattaaggaggccagccacgtttctggctcgcaggagcagacaccggctggcgagagggcgcaggaaatcaccagcgggcggtggcgacggggtccagacacttcccgcggggaaagggggggtagcccggggcctagccgcacacgccgtgctgcttagtggcaacgaggagaccggacgccgaagctcctcagcgtgcgcttcgcccaacccagcgcgcatgcggagccacctctcactgcgcaggcgccgacagaaaaggatccttcgttgcgaggaagaggaggagcgtgatcctctcctgacccatccctcagagcgtgctgggtgccggcgactcgccggagggaggggcggtggagagacccggaattccggactgtgcgcgcttccacatcggaaccggaagtgggaaccggtttcctggttgcctcttagcaacgcagtt

SEQ ID NO: 46929 - DNA, 335 bp, Mus musculus
  source 1..335: mol_type = other DNA
tgaggagggagggccccatccagattcctggtcatcccatgaggttgctagagcctctggcagtgattagaaagctcagcagctgtccagcttttcaggcacacactccggggtgctggttggcaatcacacacacacacgtgcctgtgcctttcccaggaggcagtgatatactgcctctctcttggaataactctgtgacttgggaacctgcctctcactctagaacgagctaacaaggttgagtcggccttcttagggtggggccctggccaatcaccagaactccttgtgataaagtgattagaggggagcctctcaaagtataaagctct

SEQ ID NO: 46930 - DNA, 392 bp, Mus musculus
  source 1..392: mol_type = other DNA
tataattgcaaatatgtctttggatttaaaatctaggaagctgttacctggcaacacaacactgccagatctcttgctttacaggtgaatgtttgtcgggcagagcccagcatagacactaggggtgttccctctgctgagcaaagatatcagggattctatgcagatcaggcgttaatttttattttaaaatatcgtattacaatatgacttaccccagaattatctggaaaggctcagaactatagccgcgggccgtcgtgggaaggtcggagcagaagtcccgaccgggccagacttcctgcccgcagggcgggaggctctggcactggatgtgcgccagggggcgtctccgggagggagtggcttcctgggcgcgggcggcgtcggcg

SEQ ID NO: 46931 - DNA, 330 bp, Mus musculus
  source 1..330: mol_type = other DNA
atgcaagatgcatataaggatgtctgcattactaaacagggagactctggaagcccaggtgatgagactagcaagttcttgaaacctcaaaggttctggttttagccagcaggtacattgtgaccaggcacattgaaatgaggtgtcagaatacattaatgacatgtaggtataatgccagaagtttaaccatgtggtgggccattctgaaggcatggccttggggaagagccaggctgtgctgagcctggactcattgagtcacttgtccttcatgcaaatgacataaaagattactcagcttaattgcacacagtggggtattaaagg

SEQ ID NO: 46932 - DNA, 313 bp, Mus musculus
  source 1..313: mol_type = other DNA
atttatttttaaaatggacatccatacatgtccatgccagacctgtcagcaccagcactcatggttggtgcctgaaagggaaatttcattcctgtttcctgcaggacccacatctgaactttttctccatcttagaaatgagaataataacgacgtgcacacagtgggtgtgcaacatctctggtagcctgaaccttcacaatacccagccacctgagctgcggaggctgcgagcggagtcctggcagggctgaccccaggctggggacgtgggcggcgggggcagcgggcccggcggacacgcgggcgctga

SEQ ID NO: 46933 - DNA, 314 bp, Mus musculus
  source 1..314: mol_type = other DNA
tgcttcaaagggttatatagctaaaccttgtgtctcactttttaattggcgaagacctttaagacctttacttaaagctcaataacactacttaagttacgtctatttttttttttttttcctactaggaaagaagctatgtagagacagaaatcttcagtacctaaaatcccttcgcagggaaatgaatgaatgaataaatgagtcagtcaaatgacttgctgcaagtcccagccctgctctcagtgagcgactacggctgcgcggacaggcagggctcagccgcttccgggatggtcgggagccaacgagac

SEQ ID NO: 46934 - DNA, 416 bp, Mus musculus
  source 1..416: mol_type = other DNA
ctattaaaaccatgaaaagctccttgatatttttggatttgtttcagcctccttttaatttagaatgatcagaaccagtgctcttgttcattaagagcatctgtcctgggcaccatgaatgtctgtggtgcacaaacatatatacaggcaaaacactcatacacatttaaaaaaatctgaaaaggaaataaaattttgtttaaaaaaattaaaaaaaaaatctagaaagtaattgcttggtaaattctaaattctcgagtttttaaaaagtttaagctttgagacccgggtgcgggcaggccacggccagtgccaactcttcagccgagatagcgcctgggcaacctggcagggacgctgcttcccgggaaaccacacaggtgcccagccctggtgcgctcgcctagtgaagcatc

SEQ ID NO: 46935 - DNA, 302 bp, Mus musculus
  source 1..302: mol_type = other DNA
gaatgcctaaggaggtttgctccgtgggcaattccctcccacccccagattcagatttaaacctggggtggggcaaacccaggacctccttcatgagttccgccgaagaagcctcgctcccagtaaccaggtgggactttcctacaggtggctagacactcgctgggacctccttccgcggagggagggtccagtctggtgagcatcccgccggggatcccacgctgtctgggggtcgcagcgcgcagccagccctccaggcggccccggccgcgccccgcggtgggaggctgcggctgctg

SEQ ID NO: 46936 - DNA, 458 bp, Mus musculus
  source 1..458: mol_type = other DNA
tcggtaacacccttttatatatatatatatatatatatatatatatatatatatatatatatatatatatatatatttccatgtataaatattgaatcaccacgaaaacttttttgttggaaaccctgccaacagtatacacaggggtttatatctatgggacaaaattactttgatcaatatataactttggtttatcaaaatgtctattcttaacatgttgtgaatgagataccatccgagggtaggcaggcctctgcttgctagccagtctgcgcaacaccgcgggcactgcaggaccggcgggcccggatgaggcggccgaggcgccagtcccgcgggctccctcgggcccaggtcggagccaccggctcgtcttggcgcgagaccgcgcccctgtagtagctgagtgcgcccggcgcccgtgcagtgacaagcagggggagggcgtccggctc

SEQ ID NO: 46937 - DNA, 149 bp, Mus musculus
  source 1..149: mol_type = other DNA
aaatgctttttcttgccaggtcttttagagaagataaaaaatgccctggatgtgggcacggccagacgtcagaccccaggtggccttcggagtagaccctaattagcggcaggctacactgattggttctgagtaagtcaccaggagtg

SEQ ID NO: 46938 - DNA, 413 bp, Mus musculus
  source 1..413: mol_type = other DNA
ttactagataatccaatactaagaatttacagtacacttccaatgtcagacaatgacttttaaaacttgttaaacatgataactcatgtttatccccatgaggtacaccggagtttgccttttcccaaagaaatgttcctggccttagttcaagacgggattaaactctttgacaaagtgataaaaccaactaacattgtttccttgaagagtaatacatgatatagtcatccaagaaactattttattatcaaataacaaccaagggcttgggaaattatgaaggatactatcataccccatagggcaaaggtcatctctgaggaaggacatcttccaattaacctcagaatttgggctggctcaacgatcccacaggcctaggccctggaccactgaagaccattgctcca

SEQ ID NO: 46939 - DNA, 267 bp, Mus musculus
  source 1..267: mol_type = other DNA
atttatttttaacttttacttatttaattggttatatatacatgatcagcatgtgtggaggtcacagtgtcacttggagatgtgggacctgggaaccaaactcaggtcaagagaacaagttttcaaaagtcaggtcactcctccagtaggactactgtggttacagacggcagccagtcttgaactacagactcaagtgatcatctgcttcagcctggataatgtgtaacatattctatcttgaaaattacaactcccaggaggctg

SEQ ID NO: 46940 - DNA, 442 bp, Mus musculus
  source 1..442: mol_type = other DNA
tctcgaaggttaatctaattaaatttttcctttgtaaaccctgactggaaattcttttcctcagtgaatcgcattttaaagttatttcctgggccagagactgttcaacacatttagatggtgaaaatgtccccactcagtttagttgaaaaaataaaagaagtcaagtaggtttcgtatttaaaacagctgcgttaagaaaaactaataaacttaagaactgacttgattacatgatttgtgaaaagcctttgctcgatggatatataattatatatgatatacacacgatagaattagatagaagatccagaattcctgtacagatattcctggccccagctcccccgaataactgtgtcataattagggagagtcctcagtcctatcaggtggcatcacgtgattcaaacaaacacggcacttgattaagagtggcgct

SEQ ID NO: 46941 - DNA, 420 bp, Mus musculus
  source 1..420: mol_type = other DNA
cgtgtttgtttgaatcacgtgatgccacctgataggactgaggactctccctaattatgacacagttattcgggggagctggggccaggaatatctgtacaggaattctggatcttctatctaattctatcgtgtgtatatcatatataattatatatccatcgagcaaaggcttttcacaaatcatgtaatcaagtcagttcttaagtttattagtttttcttaacgcagctgttttaaatacgaaacctacttgacttcttttattttttcaactaaactgagtggggacattttcaccatctaaatgtgttgaacagtctctggcccaggaaataactttaaaatgcgattcactgaggaaaagaatttccagtcagggtttacaaaggaaaaatttaattagattaaccttcgaga

SEQ ID NO: 46942 - DNA, 296 bp, Mus musculus
  source 1..296: mol_type = other DNA
ccaggcagtggtgcccgggaaaacgcaggctgccggcccagcacgcgtggaccccgcgctgcgcgcaggctctcctggagaaaaagttttcaacatttggggtgctcctcgcccagctcattttgcgatgggcagccgacaaagggtgggcgcccctccccctctgccgggctcggcccaggggaggggcgcccccggagcccgcggactcgaaacttttcctctttaagaaaaaaaagttttgcgccgctccgagtgcttttttttttttacccaccaaatcttataaattgggc

SEQ ID NO: 46943 - DNA, 445 bp, Mus musculus
  source 1..445: mol_type = other DNA
cttaatattttcctctataagaacatggaaacttttccaaactgggcctggtaatccagtcttgaaaactgcctgatttaaataactatataaaatatatacacacatatacatatatgcatatatattttataagtgaattaaaactttttcttggctactccatctgtaattccagttcaggggatttaaaaagtcctctttaagatttaaaactttctcaagtgtcatcttagatttgtgaaattcatatggttgagagctccatcagggtcctctgtgctctgtctgcatactgtatactggtctgagttggagtccgaccaacaaaccctgtagaaagggtctcagtgcccggtggtccaggccccgcgtgtgccattcggcacactggccagtggagggcagtgttgccccggctggggaagaccggcggggcggccgc

SEQ ID NO: 46944 - DNA, 427 bp, Mus musculus
  source 1..427: mol_type = other DNA
aggtgtatgcatctgctaggtttatgatacaggttctccagaaggtagcttcagctgtgttagtccgatacctgccaaggaacctgggaagccggacagccaagcttgcacggaaccctagagaagtacccaaggatccttggcagcctggtcccgaagagaaaacgaaatatgccttgggtttccccgcgtgggaccgcaggaacaccggtgcgccggagttctgggccttcccgccggcagggaacgggaccaatccctcgggctccggagcacagtgccatttggtccccgagctctgggaggcgtccccaggctccactccgcagcttaaggtggagtgggcggtggcgtgcgcgcccggagggggccgcccagtccacctatatgcacagagacccgcccaggaattccgagggtcccgcag

SEQ ID NO: 46945 - DNA, 548 bp, Mus musculus
  source 1..548: mol_type = other DNA
ctgccaaggaacctgggaagccggacagccaagcttgcacggaaccctagagaagtacccaaggatccttggcagcctggtcccgaagagaaaacgaaatatgccttgggtttccccgcgtgggaccgcaggaacaccggtgcgccggagttctgggccttcccgccggcagggaacgggaccaatccctcgggctccggagcacagtgccatttggtccccgagctctgggaggcgtccccaggctccactccgcagcttaaggtggagtgggcggtggcgtgcgcgcccggagggggccgcccagtccacctatatgcacagagacccgcccaggaattccgagggtcccgcagcgcgagtgttcactgagagcagtgtggtccgagcgcgcgccccaggaaggcagtccgcgagctccagccgccgccggcagcagcagcctctgcgaacagagccgcggcggaagcgggcgcaggggagcgagcccggccccgccagcccagcccagcccagcccggcccagcccagcccagcccagccctgcc

SEQ ID NO: 46946 - DNA, 422 bp, Mus musculus
  source 1..422: mol_type = other DNA
actgtggctgctggttaacagctgtgcatctccagggtttcataatgtttcttgtggcttgcaaatgcatctggaaccaatggacagaggaccttctcaatttggaataattctgcctctgggcgccccaggaggcagcgagcagcgctgggcgagccgctgtccctccagggaaggagggtgagcccgcaggccggctgccactctgagtgcggcgtgccgggggtgccccgtcgccgccatcctgagccaaccgtggttcggcgcggtcagcggccgctgcaagccgccgcccgccatctccgggcagccgtccgcgggggaggggcagctggcgcccgcgttctccggcccggcggccggcggaagagccccgcaccgcggaagcgcgaccgcagctggggatcagctgctggaaagcc

SEQ ID NO: 46947 - DNA, 525 bp, Mus musculus
  source 1..525: mol_type = other DNA
aggttcaactcgcctaagattttttaggttgtttcccaaacatttttgagccataaatctgaaactccatatttatcatttattaattaattttttttatagacacacaaaatctgtttctggttttcaaaattggcattaatgccttttgatatctggtaaggtaaattttatgattatcttatattattgaaaggtctactttttaaaatatttacgtgtatgtgtgtgtgtgcacacatgtgtatatgtgcaggccctgagttaaaggcagttgtaagctgcctgacaggttctttaaactgcctctgggagagcagggagcactggctctgctgagtcagtttctttttcagatttaattttagaaccaatttttaaaaatagtattttaatggctttagtgcggtataatttatacgtcatgcaatttgttacccattgtatacaaattgatgatatttagtatagtagaatatatatcaggactgtattgcttaataaaagtctattctatgacatata

SEQ ID NO: 46948 - DNA, 148 bp, Mus musculus
  source 1..148: mol_type = other DNA
accctctgcttgcacacaaagaacagtagttaagatcttgggagtgcccagcactgtggcaagacagataggtattagactaatctgcctcctgtggcagttgcctgtgtactggatcctgggatccctccctgaagctctcgagctt

SEQ ID NO: 46949 - DNA, 472 bp, Mus musculus
  source 1..472: mol_type = other DNA
cactttgtcagaaaagtgtcagagggctcttagacagggttctgtccactcacggaacggtgatgacgcctcaggacagtccagcgatcgcatccctgtgctcaactccccaccccctcgggccaccgaggcggatggaaggttgaaccctgcgccagagctcagttctcagcgctgccgggaactgcagctaggcgactcgggccaaggccaggggtcgcgcgtcttcgctggcagagaccagctctggttcatcgccattccaccccgcgtctgtctcgctgagacccgggatgcgggaggaaggcccgcgccacttcccagcgggcgcgctctttagcgggtgcgcagcggccccggctgcccgcggcgtctggagcacagagccagctaggcgcgcgaatgaatgagcgcccggggccgcgcgcgctcggggctgaagggcattaggaccgtgaggatcgctctgcgc

SEQ ID NO: 46950 - DNA, 240 bp, Mus musculus
  source 1..240: mol_type = other DNA
taagaagcaagctccttctgctgactctagcaccagagagtgtcacgacgacccgctcctagacacctaggggtggcaccgcaggtgatacgcccccagggcgagtctagagtcgggcaagatgtcctgcaatattgccgccatttttttagaaaggcttaaaaaaaagacgactggtgttcctaaagcggagaaagagtctcttaccgacgacttccggcggcggctctcgcgggattg

SEQ ID NO: 46951 - DNA, 519 bp, Mus musculus
  source 1..519: mol_type = other DNA
actgaaaaaggaaaaatactttcttttttgaagttgctgaggcagcaaccccctaaggccgacctacggagaaccgtaaggtgacgggtgtgtcagtttcaggaaacgtctaacacgttcccacctccctcttccaggcagcgatcggcagggagggcatcgtctgcccaccgcatacctcgccccccaccatcaggcgggaggcgcgcagccgcagggaggaggatcaggtccggggcctacgggcaggccccgcggctcagcgccgggaaggggaagggtccacccgcgagccggggggaagggggcggggagcagctccctcgctcgcgctagaaggggggtggccctctaagttggggaccccggctgctgcagccgccgctaacacctctgctgccgcacacgagcaatcccgcgagagccgccgccggaagtcgtcggtaagagactctttctccgctttaggaacaccagtcgtcttttttttaagcctttctaaaaaaatggcggcaatat

SEQ ID NO: 46952 - DNA, 390 bp, Mus musculus
  source 1..390: mol_type = other DNA
atcactgagggccagtggctttccaaccttacccttcagcctttggagtgtctttccacttgcaactgcattgacagtttgagattgacactgagtgccaaatgccaatctggtccaggcagactggcccggtccttgggcacttaccgaagtcttagctgaccaccagcctaccccctaagaggtaggagagtctccgcggagtttggaatggcaagcgcagttccctaacaccactcccacgcccagaggcgagcaggtggcagcggagtgactcaggaccctgcagactcactgagctagttcctgcagtaggcgccaaccctgattggcgctcgctgccggcctgagccgctcgatgctgcgagcctgcggcggagctgccctccc

SEQ ID NO: 46953 - DNA, 270 bp, Mus musculus
  source 1..270: mol_type = other DNA
aacaaaacaaaaactttactttcccctcatggtttagctcaggctggtcttgaactcacagagctccaccatggcatcgatcaggatcagtctcatcgtatgaaactacggaagcagcatccgctggagcaaacaaggtaatggcaatttcataatgtggcatcatttccttaaataaataaaaatcatatgtccactattacgtatgtatgcatgcattcatttatatgcatacatgtgtagttactttgtcgtcctctaagcaaagaa

SEQ ID NO: 46954 - DNA, 526 bp, Mus musculus
  source 1..526: mol_type = other DNA
tcgaaataaataaataaataaataaataaataaataaatagaaaaaaaggctaacaggccttcttaatttatgagtcactgattttcaaggagtgcttcaacatttattgagcacctctaagacaggccaagtacctagtaccaagtacctaggcacaaagagatagttcctacagctgaccagtgctcaatttgctcacctaagacgcgcttgaaagcgctaggggccaagcctgcagctctaggttcctgccaggtgtttttgagtgcgcagaaatagcactcagggactaaagataataacctgctttcttaaacagtatacttccttgcaaatgacagtaagtgactgtctctttaaggttccctccccccgccgccaggggcgtgtcagacaaggtcagaggcgcgtgcgcgtgactcctcggggcggtcgcagcggcgcgacgcctgcgcttgttgcgtgcgtgcctgaccccgcccaggcctcgtccctgccctgccccctctgcggggcctcccccgc

SEQ ID NO: 46955 - DNA, 346 bp, Mus musculus
  source 1..346: mol_type = other DNA
ggccagcctggtctacaaaggaatcgacctggattccattcctggacatctcttcagccattcaaaaggatggatcttattttagtcaaataacaattggatcaagaacagttaaataataagttaatcagatattaaagctgagcaagggtgtcaaacaccttcagacaggttgaaatctgctatacagaaaagattggtctttaaacattaataaccaatgatgtcactcttgactgtgacctttctagtataaaaccacagtcacttagcaggtaaaagcatttccttctctttcagaggaacagagttcatgctggaagtcacaaccaggagtaacttcaga

SEQ ID NO: 46956 - DNA, 309 bp, Mus musculus
  source 1..309: mol_type = other DNA
ttatttcaccacgtgaaatctctcctttagtagaaaaacttgagcctcaggtgtagaccaggctgtcctggaactcactctgtagaccaggctggccttgatcgctgagctcaaggctagccagaaatgaatttttaaaagaaacaggtgatttttgaaaagcctgggtttcttggtaagggacctaagaaaaagtttaaatacatcttttcgtatccaacaggggtcgcggcagctccaagtgggcggtccccgagcttctggcaccgccccggaagtgacgccaggacgtcccttccattttgtgca

SEQ ID NO: 46957 - DNA, 365 bp, Mus musculus
  source 1..365: mol_type = other DNA
tctcagggcacttagctgaaacatttcaggaactggttctgacctttaatatttaatagagcttgctttatatatggccaaaaaatagtggaattatttttcaggcaccagctagttactctccacagctggagtttctcgtgagctgggctttggataatctccaggcttccaagagcagaaagttttttcccctctggagataagtaactctggcctttgccacttagatgaggaaggcaaaggcagaaacagtctctttctctcgggaacaaatggtgactcactgaggcaccttttcccagtgctcagcagggtaaagaatgaaccctgtgctgggtacgagctcaccacaaccgtggttc

SEQ ID NO: 46958 - DNA, 409 bp, Mus musculus
  source 1..409: mol_type = other DNA
tgataggcctgcttagagctgacctatacaatcctctgtgctcacaggaccaggattcgagaagctgaccgcaggtcacatggaccatagggccatcgggggacccaccttaggtcgcctccgggagattttttttttctttttgaaataaatgaatacctcttcactctgtgggccgcacctggtggttccccaggtcgggaaacatttctcaaggactttgggtcatacacgataagtgtgtaaggctttcccagcgaggacttgctgagaaaaagttactctttatcccagcctctgctggagcccactgtggccgggaagggggtgggggtggggtggggtactgaccacgaaccgcccctctcacctgccggagggtcggctgctacaggcctctcgacccgtc

SEQ ID NO: 46959 - DNA, 346 bp, Mus musculus
  source 1..346: mol_type = other DNA
gagcttctctctgagtgaacttaagaaaattcaaaagccctactatgctcttatcattaatcctaaaaaaccattaaagagatatcttttctttctggaagacaaattgtatactttttagggtgtacatgtatatacatccatatgaaggttcagcattgttactattattactattattatcattatcattattattgttctgagacacgctgaccaatgagccccagggatgctcctggatccatctgttcccatgccaggctttggatccacaagccgggggtctgaccacagcccatcttgccagcccaactgttctgtcatgccaggatcttgcccgctg

SEQ ID NO: 46960 - DNA, 236 bp, Mus musculus
  source 1..236: mol_type = other DNA
gtgatgttaacactactgtgaccaattaagcaagcatcttctgggttctggagactacagcctcactgttgtcaacagcagcagctgaatagaaatcatggagtttatttggctttcaagttgctcttgggatctgcttcaaaagcccaacagaactgtctctatagtagagggaaggtgaaaacttcagctaacgtcaccgaagcatcctctatttggatgcttctagctgttac

SEQ ID NO: 46961 - DNA, 344 bp, Mus musculus
  source 1..344: mol_type = other DNA
gctgaggacacgatgctgcatcaaaggaccatctctgccttggtctccagatttgaaaggcagcccccttttatttttagctttaaaaatcaccaaagccgagagaaaaaggagtcgtcgttgtcccctcccctaggcctgggtggacccgaggacaagagtcttgcctgctgccgggacttcaggactaccaactcccgggaatccaggtcaggactccttgcagctgcagccagctccaatgctcctgggactctgcatgctaggtccgtgcttggtgtcccaggcccgctgagaagcgctgtggaaaactcccctccgctcccgaggtgggcaaagctcta

SEQ ID NO: 46962 - DNA, 601 bp, Mus musculus
  source 1..601: mol_type = other DNA
acatgtgtacatgcccaaatatatttctataaacaataattctcacataattaaatggctaatcctttcctttataatatatgatttatactgatatatatatatatgtgtgtgtatatatatatatcatataacatatatgatatatattctacatatgatatataggttataagatatacatcttatattatatattatggtgtatgatatatgtaaacacacatatattgtcttaaaattcaaaatgaagataaaaaatgctcaaattatttctatatataatatttcttcccacatgatctctgatagaggaacatccaatgttttactaatatttgtttttgatatagttaaatggtcaattctttcctcataaagtatatactgtactatatatagcatatattatgtacatgttgtctattatatgctacattatgtcttatgatattgtttatatatgtatgtatctatgaatataaaatataattgtcctaaaaccccaagtcagatatgagctctattaactcaaatatatactagggtctccagatcgctgagcacacaatgcttggatgagcagagcattgttatgtaa

SEQ ID NO: 46963 - DNA, 325 bp, Mus musculus
  source 1..325: mol_type = other DNA
gtgtaggaatttcataaattcattctttttaataacaggatagtactccattgtgtaaatataccaacatcttctggatatatacccaggactgccaggacttccagagttgttgtacaagcttgcaatcccaccatatatatattggatattagtcccctatctgatttaggatacttttagaattaatctttttcatatatgtctttaattttttattttatttatgacctaagaaaatttattgtactatcttttctttgtatagtgaaggtaacattaccagaacataattaaatttaggattaattttatccacatataa

SEQ ID NO: 46964 - DNA, 377 bp, Mus musculus
  source 1..377: mol_type = other DNA
actgaaatttttactcatgtcaactaatgaaactcgtagaaaggagtactcagccactaatcagtgagcaattagtttcttttctagtgagttccaggccagcctggtctacaaagtgagttccaggacagccaggactacacagagaatccaagaagaagaacatattatttaatagtttaaaacaaacctacttttcacagctagccctgttacattaatacaggaataccagaatttgggtcctctgaatatttcccatgttatatatatgtacatatatatttatatttcatctagctttgatcacagttgtgatcacagtacctgtagtactaagcaataggtacttttgaactttgttcataatgacttat

SEQ ID NO: 46965 - DNA, 363 bp, Mus musculus
  source 1..363: mol_type = other DNA
acttttctcaaaaattttaatccaaaattgctcttgtctaaagaaaatataggaaaggccatcagagactgcctgccaagaagtgcttgttgcaaggagcttgatatagggatttgcaaccccataggtagggacctatggctccaggtgcatttcattggaggagaggcccttggtcctctgaaggcctgatgctccatttgaattgtaaataaataaaataataaaaaattttaaaaagttcagttacaactgatgagccacgacttaaaatgtgtcaagatccagaatatgcgaattacagattttccaaatcgaaaaaccctgaggtcacggaaccagagctcagaagcctcgacttcc

SEQ ID NO: 46966 - DNA, 318 bp, Mus musculus
  source 1..318: mol_type = other DNA
aatcattttgtgaaaaggacatttcacctccttacaatgtatatgtgtacacatttcttaagttagataggcctattattaaatgcaagccagggatatatacatctatttaaaagttaagtaagagtctttgcagatgtaaatatcagggaaatgccttgctttaagcagtgaacatttggatacattttattaactaacacgctgtattgctttgaggctcattttgtagatattttgagatttttatttaaaatgtcaaacgtatcaatgtaattctatctcatggtgggctcagagaaccaccatccttttccg

SEQ ID NO: 46967 - DNA, 396 bp, Mus musculus
  source 1..396: mol_type = other DNA
aaatgggaattttcctgtcagaatcacatgaagtgtttgtttcaagaattgtttgatccacaagactagaaaacaacattttcatttcaatattttgctaaaaagtaaaaaattccagttgatatggtaaactgtttttacctgggctttttcctggtcttggctattgccaccaacagcaagaaaaatccgactggattatgtgggtccgttatctagctaacaaaagatgccaatggactctttgctccgtgcccgatagcgttctgggaagccgctcggtcggggcctgcctgctctccagccaggtaaacccggctccgctctccggccggaaaccccgggtcagcgggtggccagagttacagtttcctcagcggtcagaccggaaaagga

SEQ ID NO: 46968 - DNA, 382 bp, Mus musculus
  source 1..382: mol_type = other DNA
aattttatttattgatttatttatttattgatttatttatttatttatttatttatttatttatttatttatttatttatttattttgagacagggtttctctgtatagccctggctgtcctggaactcactttgtagaccaggctgggattaaaggcattgaaatttagtcataaaatgctacaggtttttaactggtttaggtttttagttggttcaataacaggaataacaaagtctcttgattttctctgcttgagataaggtgaaaaacggagctcctaagtctaacagtttgtttttatactcatgaggtttttaaaaatactgtctgtaaatgaaattactttcccgtacggccggcagcctccgcttccgtcgc

SEQ ID NO: 46969 - DNA, 303 bp, Mus musculus
  source 1..303: mol_type = other DNA
ggggggtcttcaaatgttattaccctgtaaggaattccctgtgtgtggctcagccaatctcctgcatacagctgacactctcactgacagagggaaagcaggaagggtgcgtaactgtccagtaatggaaactgggcagacgtgcacccggtgtcctgggcgcccgggagacacacctcaagcagtggcacctggaatgggaaccagggggccctctttgtcgctaatgcccgttgtcccctgcaccacggccaggctcgcacagggtccggtagcccgcggggacagggagctgcctcgggc

SEQ ID NO: 46970 - DNA, 465 bp, Mus musculus
  source 1..465: mol_type = other DNA
tgactcttgttacacaaatcacatcaaccatggctgaaatatggaagccattgctatgacaggcttaaaaatttggaaactgggtatccagtcaccagggtcctagatagcaagcgcaaactagctggttccgcatgacttcccgagcctgcggaagccccactaggagacctcccctttcggaattctaacaatggccaggaacttcttcttacaaagatgaacacagtcttgaaagagttcttccatcgctagccgggctccgcagcccgctcggactgtccgaacgcacgctgggtctcaccttcgggagccacccaatgaggtctcagccaccctcaggagacggacagccgcggcggtggctgtggaggcgggcccatcctggaggccccgcccccgggtccgcagggctggggcggagccaggctcgcgtcaggtggtcccgggcgtgcgggaggcggg

SEQ ID NO: 46971 - DNA, 381 bp, Mus musculus
  source 1..381: mol_type = other DNA
tatctggaagagcagctagtgctctttgtaattaggtataaaggtatagtctgaggattcataatttaagctatggtgaatctggtttttgcaaagagaaaaggtttcacagagtaaaatacttaactgacataattcgtactctttacatgctcaaggagccgctggcttctaaagccccagagcctctctggcccaggtctacggaagccctacgtcctcccagcctccccttccccaccgctaggcttggggcagcggaggaggcaggttgctcccggctgtcgagtcgttgggctctaatctcgcgagacttgcctgcgcgcagaaccccgccgcggtgatctcacggagaagggccagtgcagcgccgccaccgcc

SEQ ID NO: 46972 - DNA, 432 bp, Mus musculus
  source 1..432: mol_type = other DNA
gcgatgggttttaaccacttcttaaaattttcctcattaattatagcaactttaatctgggaaaacagagtacgtttattgctacaattgattcccattgataaaaatggttactagttgcaccacatgaaaaaagttgtggtgcaagcataacttggtcatgtcatactttggaagcagtaaagctgcttcgggtccaaaaaagggtaacacagttcttttcaactctgctttaattcttccagtcctgcagtgtcaaactcagacagttcgaattctggaagtctggaagtccgctcgactttaaacagtgccatccgggttgcaaactcggacccgaccggctgcaggcttctcccaacaggaggcgcccgtgcgacccaggcgctgcgcgtacccgtggggaccgctccgcgggtggagggagcagga

SEQ ID NO: 46973 - DNA, 299 bp, Mus musculus
  source 1..299: mol_type = other DNA
aggccatgaggtgccttctagttacctaaaaccaaaggagaccttcatgtcagtacttactctagtgtgactttacaaaaggtcaatttatgtcagctcccaaaggaactaactattttaagtctgttttcttgaaaacaaacaaaccccacagccatagctaacagtttccctattgatccacacagtgctggggagccctgcaggagccatttcccgggattgtcactgtgattcacatagtagctttcattatttataaatcttgactaaatgaacatcataatggaaacttctgg

SEQ ID NO: 46974 - DNA, 461 bp, Mus musculus
  source 1..461: mol_type = other DNA
ttatttttttctgtgattaatacactaaagtataaattactgatttattattggtgttggtaacattgacatacatacacaactggtaactatttataaaataatttgagacaggccttcatgtagtccagtgtgactcacggactccctaaccattcaagttacccttgttcatttgaatgagatagtatcaaccacaaagcgctcccaacgctgtgtggtgtaaacgttctcattttaatttagagggcgccgttttctaggtagctgctcggttgcctggaatcctgcacagggcctgatccgtaccccgggcggcgccgggacaggtgagcctggcggcggcgacctaagaacgtgctcaggtgtcagggtcccgctcatagcgcgtggctcaggccaggtgcgggcgcccaggtgcgcggcgcgaggctgcagctgctctgggtccccgacagcgg

SEQ ID NO: 46975 - DNA, 288 bp, Mus musculus
  source 1..288: mol_type = other DNA
catgagagagagatgtcattgtctctctcttctttccgtgcaggaaataatgcctgacacacagctggtgctcaaaatatttgttcagtgaatgtggcaagcaaactatatttatttatgatgtcactttgagtgaaagataagacccattactttttttttcagaccaggctggcaagaaaaatcagtccctggtgagtgtaggataccagaatgcaaccccaaggtcccattggtgtgactttcagcatctgcttgaaggttccttttcataggccttttaaaaag

SEQ ID NO: 46976 - DNA, 271 bp, Mus musculus
  source 1..271: mol_type = other DNA
tcccagaggggactcaggcaactcaggcctaacaatttttgcatagttatcacttcgctcccaagctggccatgtcagatgaccacccgtgacgtggctgtttgcaactttttgcactgcaacacggtggtgtacaaggagctcgggggttaaaaaccgtgatttacaaagcccagagagcaaagtagggactccaactaagcgagaatgctctccgtactgccccgcccacttggcgaccagccgcgccgattggccggtaggccggtat

SEQ ID NO: 46977 - DNA, 233 bp, Mus musculus
  source 1..233: mol_type = other DNA
tgcgatcactaatagctagcttctagcggtccagcatcaaccaaggcacacgtgtaccattctagaaatattacctgtacaaactttgggctgttgacaatatttgttcaactgttaactcgggcctgtgtaccagctccaagccgagagaaatttctcgggatatgaagagagtaccagggactctgaggaggcggtaggcgtgccaagcccgggcacgctcgaccagcggc

SEQ ID NO: 46978 - DNA, 477 bp, Mus musculus
  source 1..477: mol_type = other DNA
accttggcaagtaacctaaccttagttttctctctcaggttaaccattatcaagataaaaatcatatgttaagattggcaattacacagcaaaattcctttattttatggaagaacctatgtagtgtattttctctcaatattgtctcaagaaataaatgagaaaaaatataaagctattattaaaaaaatcagacaatagtattacagacactgttatcttaaattttattggagtgtgtactgtaactattctgcacaatataaaaattagaagttatgatgtctatattaacagttgattaactttgaagaatatcctctcaatgtttactggtatttttccactttgagcatttctgaaggaagatgtacaataaggttatatagaacatcatatcttttgtttaatttacggccgagactctaagtcccgaaatgctttcaggcttgtctgggctgtagggcagaacgacaa

SEQ ID NO: 46979 - DNA, 383 bp, Mus musculus
  source 1..383: mol_type = other DNA
tccataagtcatcaataaattcctttactatttagaaattatccataagttctgtaatacactaaccaaccaaggtttgctatttgttatcaggacatataatgcagcagatactgcttataaattccataatttggataacccagtaatttgtgagtattcattttcgcggaaacattaaatattcttacaggtttctgaagataccaagcatctagatatagtgtgtgtacgcacaaaaaagttatttcttggtgtgagcagtactttgcgaagaacaaatgacatctgggcttatttacagctcgagcctctctaggtcccactagacttaatgagtcagaggcgacggcggagactatctaggcatcgcctcctggcgc

SEQ ID NO: 46980 - DNA, 483 bp, Mus musculus
  source 1..483: mol_type = other DNA
tctctgtgaatgtcctggaactcaggccgggattaaaggatacttaaactgggtatggtagtatacaccagtcagtaatctcagtacttgcaattaaataggatggtcaagtgttaacaattgtcattagttctgtgagatagttgtctttgaagaactagctaacactgagtcattaaatactgttaaagtttagttttcaaagatctattgggttaaaaatgaatgtatcagaacacttaaaattagctaccctcctggattctgagtttgttttaaaagattcattgatgtttggcatttaatttttgatattaactgaacctcaaaatttttttcttcctgtacattttgggaacttattttagaaaagatctaagttttaaaaaattctcaatggtctttgccaactctaagaaaactttagaattttgcagatactctaaaaatgaaaggtgtcaaataaaatgatttgtcatttct

SEQ ID NO: 46981 - DNA, 424 bp, Mus musculus
  source 1..424: mol_type = other DNA
ttttcttgacttccatatatgacatacatgcacaagcatatataaactcacataaatcaataattataattaaagaaaatcctaaatactttgcaaagatgaaattaaatatccaagaatgttcggtattgcaactggtgtttctatattatcgtttactgagttacaaagataactgtagtatgtatgagtatattataataaagcacaaaatactaaatatttgtaattgtcttataaccctggtactcaaaggctaaggatattgcagtgttttaaactgaaaactatttttgaggtagggtctcatagccaggctagcctcaaacccaacattgtattgcttcatagcaatctggcttgtttgaaaaatatgttcaacaacagtggtttcctgcttagttaaaaaacaaaaaacaaaaca

SEQ ID NO: 46982 - DNA, 233 bp, Mus musculus
  source 1..233: mol_type = other DNA
aggagccccgcttctttctgtgacctccacaggcccggggccaaggcccttttcaactctgttttctgaaaaggaatcagggctgtggctacagtaaattcatagtgatggggaatctctctctctctctctctgtctgtctgtctgtctgtctgtctgtctgtctgtcttggctcagacccaagagggtacccggggcctctcggtgggggcaccgtgctccttcaggccaa

SEQ ID NO: 46983 - DNA, 418 bp, Mus musculus
  source 1..418: mol_type = other DNA
ctatttatcttagtttgacctgtaatttgctaggaatcccagtccgatttcaacttttcagatacaacaccatcccgatgtatttgtctctgttgggagtagaatctagttcctccaagataggaaacattctttgctttctagaagcttgccatctgggaagactttcagactcggaacctagactaataggatattgagagtacaaacagtaaattttatccgttttgaggaactgttcaaataaaggaagtgttggatttaaaatgtcactttcctggtatgtttgatacggcctcagtcctccagcccccagccctcgtggcctgcgcgcgccaccggaagctccgtcccctcccgggtctaggggccaacgtcgccgaggccggaagttgcgacaccggtgcctctagggcgg

SEQ ID NO: 46984 - DNA, 378 bp, Mus musculus
  source 1..378: mol_type = other DNA
gaccttcggaagagcagtcgggtgctaacacaagtgtttgaatagctctagctgtcctgaaactcactcagaccaggctgaccttgaactcagaaatctgcctgcccctttggggatattgagttacttaattaaagtgattaaaacttaatcatactaagagtgcatttaccttactagtaatttttgggctaatatgttgtgattttatgagtcaacagattttatgagtcaacagattttaaaaatattgtttttggttagtcttggctgccctgggatccctcagtagaccagggtagcctcagactcaagaggctacctgcagttaggcgtagtactatttaagtggtaattcttaaatttctttttaagaaa

SEQ ID NO: 46985 - DNA, 320 bp, Mus musculus
  source 1..320: mol_type = other DNA
gactaattggtatctgccagatagctagtaatactatttaagagctccaaaacttaaaagccatttccaaatcactatagaatacgacaggtacaattataaatataatttcttggcgatatttataaatgcaatgggagcccgactgctgcttaataaacagccgcgctcttttcctcccggtaacctcggacgcgtggcccttgccagttaaggtaacagacactatcagtagcatgatctaggccggtccaggtccgggcgggggcgaagactcggggccgccgcccctccacccaatggataagttggaagtgtgg

SEQ ID NO: 46986 - DNA, 463 bp, Mus musculus
  source 1..463: mol_type = other DNA
cctcccgcagtgggctagcataggccaatatgatacaggcattgccccaagtgaggatccctgccaggtgtttctagtttgggtcaagtaaacaaaatctaacacagggaacagagacaaatacaacttatatagtctcaggtttctgtaataataaagatgtgcaataatccttgtaaggtttaaggccttgcttatataatgtaaactatgacatcatttgactatttttaccatgagacattaaggccattggacatggacattaatgtgtatcatgatgcacgtttttgaagaacagtcctaagattagtaacgagtttcttgaccagcccacttttcatggggtaaagagcacctgaaaaacagtggagtcttaacgcacagacgccttagtcaaagcgtcactactacttctgtgatcctcccagctcagcaagcagactgcaggcaggcagctggc

SEQ ID NO: 46987 - DNA, 213 bp, Mus musculus
  source 1..213: mol_type = other DNA
tctgcaacaaatactgtttttgttagaactcagatctacagaggggactggagaggaccggacactcctccctaaacaccagaaaattgtgtgcttttgtaaaagtcgtcaatgggaaattcttggtcaaagcaacgaggaaacattcttcctttcaattgcgaaaccaggatttgcacaaagaagtctcacaactcttaggaggtgtctgtc

SEQ ID NO: 46988 - DNA, 306 bp, Mus musculus
  source 1..306: mol_type = other DNA
agagtgtttacgactctatccaaggatcagagagagatttcacaaactttttaaaaagtcagaagcttgtcatattaacttccttttcagaggcatacctggcaaggcttacagaaatctctgtgagttcaaagtaagttctaggactatatagctacggcttctgtagaaagattctgtcccagaaaagcaaaaaagaggaatgaagttgttttcttttgatagagaatttgccttgccagtgcatactaccgcggttttaaaaggtgggtaggcttggcctacccagggaatgccgaaggacac

SEQ ID NO: 46989 - DNA, 436 bp, Mus musculus
  source 1..436: mol_type = other DNA
tatacgtaagtacactgtagctgtcttcaaacgcagcagaagagggcatcggcattacggatggttgcgagccaccatgtggcagtgcttctcagagaactttctatggttgacacctgctcggcccctagaacgttcaagccgcccttaaaaacggggtctcaatttacagtcaactaaaccccccctaagtccagatcatttggccctaaatccagatcatttggccctaaatctgggccacacaaaaggattcatatttagagaaccctaacttaacacagttgcctttctcaatttatatcttaagactaaagtggtataaagttgtaatttattacaaagttcttttataaagctgctgaatccacggaaggatcgtactttgccttgattcattcacttggtgcaatcactttcacaacaccacgtggga

SEQ ID NO: 46990 - DNA, 438 bp, Mus musculus
  source 1..438: mol_type = other DNA
gctctgctctgccacaggtgtcctgtaatggtgttctgtctgaccacagacccagggcaataaagccgagctgctgtagactggggcctctgaagccaggagctaagtgtcacaaacctgattcttacatctcccttaaagagttgtgtgagggcttttaaagagccatctgaacctctattttttgaaaaaatttttacagctacacaaatttccaatgaccatgggatatatttgatatatttgatatattgaccatgggctatatttgaactttgggagaatgtttcttcaagagagaatgaaattcactgacaacgcttgaggaataattttattactacaggtaagaaaatcaaattctttgagcttatctagggcactgaggtagattatctgagtatgggctcaaaagctgtttatgcttgcctggttagg

SEQ ID NO: 46991 - DNA, 186 bp, Mus musculus
  source 1..186: mol_type = other DNA
cttttgtaacacgtctatttacgaaacctttccaaaaaacccagtttgagcgaaaccttttcagttaaggacaaatggaggccctgattcccaacatttggaaggtggggaggtcaacttgagtagaatgacagttcccctttttaaacacgatttcaacacaagacaagattaatcattatgcat

SEQ ID NO: 46992 - DNA, 612 bp, Mus musculus
  source 1..612: mol_type = other DNA
tgcctatgaggcctgtaataataacttcccacggaagagagactttttattatggaaaacttcttgatttctttgcttgttgctatttaaatatgtaaacaagcaaacgcattaaagcattttaaagtttttaattgcaaaactaaattttacctattctataagtactactttcttactaaactgccatttctgttggcattttaaagggatatgaaacagttgactgagataagctgtggctcttttaccctgggaaagagtcagattccagattctgagcggtggcgccaaagccctgcaaatcataaagccagtgcttgcgctggaagggctgttcttgagcaacagatgttggtcctaaactcctgcggtgaccttcattcacttcaggacacgagtccttaaggcttttccagggagccccctgaaaagtgtgggagaagaaggggcccttgcgctgcacccctgaagcatcccgggctgcaagcacaggagggctgggggcaggaagagcgtggcgcgcacccggccctcgcgcaccggcacgcgccgaaccccgggggccatgaagtgacgctcgtgcaccgcccgcgccagccgctgcccgcc

SEQ ID NO: 46993 - DNA, 184 bp, Mus musculus
  source 1..184: mol_type = other DNA
cacaccaaaaaccttctggaggggttatggcagctgcttgcatagctagctctgcaaggcaatcttcgcttcattaagagaggcaagtagacaacactactgaactggactttgctccaaagaacaatttctaaatagtgagtcatgatttcacctggaaaacgtaattactactattgcttag

SEQ ID NO: 46994 - DNA, 402 bp, Mus musculus
  source 1..402: mol_type = other DNA
ctccatatgtagaaaaaaacaaacaaacaaaaaaatgtgactggtttttttttttttttttttttttttttaatctgacttcttagggaaggaaaaaaatatcttggttgcaaaataatcaacactttgtaatacttagaataaggaaatgagaagttcctagtttaattctggatattaaattacctttctcgtcatttttccagggaaggactttttaaaaaagttcttttatatcagaaatgcaaatgttattgggtagttgagggctcatcttcacctctgcaccagctcagcagagaggttggggggggggggggggggggggggggcgccagccgtcccacaatgctccgctagcaagaggattgctccagaggcgcgcctgcgcactgaccccgg

SEQ ID NO: 46995 - DNA, 495 bp, Mus musculus
  source 1..495: mol_type = other DNA
attccttttattttgaaacaaaatggtcagacactgctggcactctttttaaaaaagactgttacatattaaaatagtgtacatatatatatatatataaatataaatattacctctttgtgtacagttccagactgaaaattttattttttgtgtgctttttataaaaaaaaaattaatacactaaagagaattgattgtaatgtacctatgtaacttatttacttttgaatgttctgtatcttaagaccttttattaaataaggttttaaaaaaaattcattgttgaataccacattcttatatttgctatcttgtatactcagtaaggataagaaggcaatatgttgcctggctacaaataagtagtcacggggttttgtgtacacacacacacacgtagatggaattctcaccgccagatcctctggagcccgcgtatctcgcgtcgtcatggacacagttgtcacggtgacactgggggagacaagcgga

SEQ ID NO: 46996 - DNA, 369 bp, Mus musculus
  source 1..369: mol_type = other DNA
aagaagaccttgagtcaaagtcgcccaactttggcctagattgtgggtttctctataacctaccggcagggtggcggctagaaatcctaactcaggaaggctctttcatccaaagtcacagctttctttgtagaggaacttcgccatggcgggggcgcgcgcacacaggcaggctggatgggcaaggaacaagccgcgtggcctgttgattagctggaaatccccagcccgggcagccgccccgaggtttaaaggaagtgggcggcgcggagcctgcaggcagagaggccgcctggttcctgctcgccgccgccgtgctgcgcgcgccggccagccactgggcgcttggagctcccaggctcgagtttg

SEQ ID NO: 46997 - DNA, 373 bp, Mus musculus
  source 1..373: mol_type = other DNA
gtcacccactccctagagactcctgctgcccttggtcttctgagaggaagggctgcacctttttccttcaaaggaaagctttctgactcatctaagaagaccttgagtcaaagtcgcccaactttggcctagattgtgggtttctctataacctaccggcagggtggcggctagaaatcctaactcaggaaggctctttcatccaaagtcacagctttctttgtagaggaacttcgccatggcgggggcgcgcgcacacaggcaggctggatgggcaaggaacaagccgcgtggcctgttgattagctggaaatccccagcccgggcagccgccccgaggtttaaaggaagtgggcggcgcggagcctgcagg

SEQ ID NO: 46998 - DNA, 305 bp, Mus musculus
  source 1..305: mol_type = other DNA
aaatgttcagatgttctgttacccgggcctccagtccatctgatggctagctccgcgattagcccttgctggaattgcagttcctggagatcccaagataacaattatgaagtagcaatgaaaataattttatggttgagaaccgctcagtgaatctaacatgaatcaagttctgtcagggcgtctgcctagaccaggggacggggtcggccacggagccctaaagactagcaatgtgattctcaccaaccttggggaccaaagggcttagtcctgcgcctagggctaaggtccgctgaccttcg

SEQ ID NO: 46999 - DNA, 337 bp, Mus musculus
  source 1..337: mol_type = other DNA
aaacgtttctgttaggaaaacgttttaatacgccgagaaaatttattttgggcagtgataaacttcaaaattactattacaaatgaaatgtgcgcgcgcgtgcgtctagggtcccagcccctaggctccaacgccaccttttagactcaagggagtccgatcgcactttccccaagagcagagtgagggtagggacgaagcttccacagccgctgcagcaccgggaaccgagggtctggctgggggccgcgcggaggcgcgcggagccggggcgcgggcggggcaggaggctgcagagccctgcgcgccgccgcgcgagctgctgggtcacagccgg

SEQ ID NO: 47000 - DNA, 452 bp, Mus musculus
  source 1..452: mol_type = other DNA
aattagcagccactaaatcaaattttgaatcctttcttaaattttaggattttagctccttgaggccagttgtccttgtcatggccagatcagacaaactgtatcgaggaaatgttttctcccggaacattttgtaccaaacctcgttcaccgggaactcctggagtactgggattgctggagttacaggcgtgtgccactgcagcttaagttagtcaaactcgaaagtttcaacaagaactattatccagcttggaacttagttatagatctctggagaattcttaaatgtttaggggcaatgcaaggcttgatttccaggtccctctttgggccatgaacatttcggagctgtcacaggtcctcagctccggagcagccgccgcggcccctgctgaacagctccgctcagcgggaaggcagtgacgtcacggctagactgcactgacctg

SEQ ID NO: 47001 - DNA, 506 bp, Mus musculus
  source 1..506: mol_type = other DNA
acaaactgtatcgaggaaatgttttctcccggaacattttgtaccaaacctcgttcaccgggaactcctggagtactgggattgctggagttacaggcgtgtgccactgcagcttaagttagtcaaactcgaaagtttcaacaagaactattatccagcttggaacttagttatagatctctggagaattcttaaatgtttaggggcaatgcaaggcttgatttccaggtccctctttgggccatgaacatttcggagctgtcacaggtcctcagctccggagcagccgccgcggcccctgctgaacagctccgctcagcgggaaggcagtgacgtcacggctagactgcactgacctggtttcattcgcggacctgagaaccctgaagggcgctgcggttcctcggccgggagggaaccgaaggatcgctctcaagcagcggcccaagagtcagcgcctcctcctgagaaacacccgcgggcggtcccgctctggagctgcttcc

SEQ ID NO: 47002 - DNA, 520 bp, Mus musculus
  source 1..520: mol_type = other DNA
aatgaattccaagtcttttttatttttttgctttttggttttttataaagtaaggaaacggtaataaaacttattgtaggtactgaatacgcaaaaatactaaaaacctttaagtgggagcacttataactagatgaatgttatcttaataaagcagctttaagaccaggagtgggggcgcgggccttaatcccagcactcatgatctctgtgatttcaatccgatctaccagggcgaggactcccctggggcacgttaggtgtctggacagcgtcccgacctaccacgtcgtacacggtgtctgccgaggagcccgcccatcgctggctggcaactagcgggcctcctctggctgcgagctgcgcggaactccaccagcgaacgcagagcaagcctgccatggagccaatgcgggccgccataatgactcctgcctgcgcccgcgcccgggacttctcctcctgggtcttcaaaaccaaataaaatgctaaagccgtggctagcagtacctaaccgccg

SEQ ID NO: 47003 - DNA, 282 bp, Mus musculus
  source 1..282: mol_type = other DNA
aacccatctcttttcttttctagaaaatgggtttgagaggatacaacacattaaacacattcagtttaatgaattttaatatatttgaagagtaaaacgacaacaaaaaccttggaagcttttagattctggataatcatattaagatagagatcgcttttaagattttcaaggtgattcctgatatcagagcctgacaaccgtgacagcggcgccggcggttaggtactgctagccacggctttagcattttatttggttttgaagacccaggaggagaag

SEQ ID NO: 47004 - DNA, 376 bp, Mus musculus
  source 1..376: mol_type = other DNA
atttacccctctagaatttaatttaatttttaaaaaaaatgtacttacgggggtgtgtctgaagacagctacagtgtacttacatataataaataaataaatctttaaaaaaaaaatgtacttactcatttcgtgtatgtgagtaccctgtccactgtcatcagacacacctggaagagcagtcagtgcttttaaccgctatttaattcttaatggacttctaccctatgggctattggtgctgcacacctttaatccccagaccagcttggtctacaaagaaacttctgcccaatggacaataattctgttggttaggatttagcaattctaaaagtaaacaacctcagttataacaaggcttgtttcaggacca

SEQ ID NO: 47005 - DNA, 365 bp, Mus musculus
  source 1..365: mol_type = other DNA
acagcatacagtgtatgcatataaataaaaataaacaaatcttttttaaaaagaaagttactctcttaagttactttgctggagatggtacctagacttgtttttaaagacgaggtctcggctgtgatcctgcctcaaacttgtctccagagaattcacatcaacaattcctagggaccatccatggggttagcgctatttgatcccaagaggattcctgaatgacccaaggagagctctcagatcttacggggagcctctgctggtgtcctggtggccgccacctgggccgactaccaccacgccgaagggctaacgtcctccgcgccgttgagggcacgcggagggcgcacgcgcgtgacgtg

SEQ ID NO: 47006 - DNA, 616 bp, Mus musculus
  source 1..616: mol_type = other DNA
atgactcactcacgctcagtgaatgaagacagtagcaagtgcttgcaactttatgcaacttgcagcaatgcaggaacctggcggtcggctggagccaagcacctgccacctagatccaccgctccaggcaggggagccagagtctgagcaccggagcccgcggaccctcggaggctgacagcctcatgggatgtccccgggtgcactgtcctccagggagcccgcggggcgccgccaccagggatgcgggcaggaccgccacggtggccgcgccagaggcttgcgcccgcccgactggaagcgcttcaagcctcactggcgccgctccgatgcgcgcggggcggtcggagagccgccggccatggagcctcagggggcgccgtgggaggctaagacgccgcagccccgcgcccgacacccgcccctgccgagctcccggcctcccgcccggctccaaccccgggagcgccgccgaggctcgtgcacactcaccgcgcgcgccgccctggcgcggacgcccgccgcctcggagcgatctccgccccgcccctcgccgcggtcacgtcacgcgcgtgcgccctccgcgtgccctcaacggcgcggaggacgttagccc

SEQ ID NO: 47007 - DNA, 535 bp, Mus musculus
  source 1..535: mol_type = other DNA
aggccagaatcctctggagactggatcctctggccatcctaattttattttgaggagggtctcctgtagcccactggaattttctcagctgtaaacagcatattgtttagacagtttagtgtgtaagttaaatttacccatatcgagttataatcttttataacacgtttacccaaattggatattcatgtaactttgaagtcttctttattgttcagaatatctcttttattatcaataaatagcggatagatctttatctattaaattttctcctagcatttaaaggcttacatcatttaatgcatgggatttggtacagaacacatctaccttctccctaatagactaaattatttgaggcgggagttttgtattcgttgcaattcaagaatcacagcaatacttgattggagatctaggttcatctttaaaaaaaagctagctggcgcatgcgcatgcgccgtgacggtctcgggctccgcggctgacacctcgcagctccgcagtgacgtagccgcgctgcttagcagtg

SEQ ID NO: 47008 - DNA, 181 bp, Mus musculus
  source 1..181: mol_type = other DNA
gcttgagctgttcaaaaagacttggagacctggtactagcggctcttaccgtctgtgggagacgccatcttccagcccatgtcacgtgacgtaaccaacaaattcttcaaggaccttatttactttcctattcccaggggtgggaatgatgggtggaggaagtggcccttccctccaatgg

SEQ ID NO: 47009 - DNA, 211 bp, Mus musculus
  source 1..211: mol_type = other DNA
tgaatctcggggccaggcggtacagagtgacagccctgacgcacgggtgacccattctgcaggatccgggaccgcattgctgccgctgccgccactgccgccgccatggctcctgcgtctcggctgccgccattggagggaagggccacttcctccacccatcattcccacccctgggaataggaaagtaaataaggtccttgaagaattt

SEQ ID NO: 47010 - DNA, 175 bp, Mus musculus
  source 1..175: mol_type = other DNA
agaacctcaggcttcaacatttattgaacagctcttctgaaatgaacataatgtcccgtgctggggagatagggccgggcaccctgcagagcccaccacacttgggcctgctgcgccctggcccctcgataccggtggcggcgggagctgccagctttttggaattcctacgggc

SEQ ID NO: 47011 - DNA, 336 bp, Mus musculus
  source 1..336: mol_type = other DNA
tggtgtgtctgaagacagctacagtgtacttacatataataaatacatctttaatcgaggccagcctggtctacaaagtgagttccaggacaggcactggctgctctttcagaagccctgggtctgtaactagagttccagggactccaatgccctcctatacataaaatacattttcaagaaaatcttgtaaatcgtgctgccagctcggctcctcggggaacacacacatagctcactaaataaatatgtattttttaaattaattaattttttaaaaaacagatcacgctgtcttctctgggagaaaggaaaggctgcgcttccgggaacggc

SEQ ID NO: 47012 - DNA, 275 bp, Mus musculus
  source 1..275: mol_type = other DNA
gggaaaaaggctgccactccccccccccgctgaagactagacaggcggttggggggattatttaaaacccctaggtgcaccgcagggagggattaaagcctgctgggacccctgcaccccccagctcctgccagatgcagtttaggcaagctttgggagcggattttaggggtttggaaaacaccaaaatcttaggaaatctttcaattttcttttaagtctgtttcagaactaggtcaattcctggggggagtggcttaaaccacttcccccac

SEQ ID NO: 47013 - DNA, 389 bp, Mus musculus
  source 1..389: mol_type = other DNA
ctgaacttggggtaacccagtagcatctaaagacatgcctagttgggtctccaggacacaggggaggatggctggcagtcccttggtcatgcagcctgggcagccaagccggtgtgccccggtccaggttggttgtggtagatcaaactctactaaccacgtggcccacatacttgtgggtgcagtagattactccagagagcactggattccagtcgggttccttggagcccaaaatacgggggctggaggctggaacccggctctgaagctccatctatttgcaaatggggcctcccctccaacttgaagtttgtatcgcgggggtaactctggccctgagtgcctttcatgaagggcacctttaaccaaagcgccgcagctgaact

SEQ ID NO: 47014 - DNA, 262 bp, Mus musculus
  source 1..262: mol_type = other DNA
gctgtataaagtcatgactcctggctgcaaccacccaccagtgacttttccacaataaacctaagctcaatattttttttctgatttagaattgtaaatagtaaatttacattcattgtagatggataatagatcagatagatagatagatagatagatagatagatagatagatagatattatggacctgttcaaaggcctttcaccaatgggttgttgtaaaaatcatctctccatcccttctggggggaggagagggcg

SEQ ID NO: 47015 - DNA, 516 bp, Mus musculus
  source 1..516: mol_type = other DNA
ctgactgttcttctgaagatcctgagtctggatgccaatgtgtcacatatatgtccttatatgaccccctcatcctctgggtcacacagtgtttggaacaaactatcaccaaaactcatgggctatagaacctatatacaactgaagtctccaaatcccgatatttaagctgtgttgacctcagcacaactcattaaatgagatcactctggctaaataaataaataacctggcgtggtttatttagtaggcattcaataaatatttttgtttgttgaactcagagcttgggagcctcagagctcaactcaagggtcgcgcgcgcatcgcttctggggtgcgcgagaggtggctccaggaagcagaaaagccggttccagctgcgcgcccctcgcgccgccgccgcctcctccgccgccccgcccctcccctcccgggagctgggtccggagtgcctggtcaggcggtggcggcgggaggcggggaccctcctcgccgctcccccaagtcggcgcg

SEQ ID NO: 47016 - DNA, 367 bp, Mus musculus
  source 1..367: mol_type = other DNA
gcctctgaggaattctgacccttcggtgatttccagaagcctctgaaattcaggagactaggaagtcttctagagccctcctaaggcggaagcctctggatggaagatgttgtttcccagcgggtcaaaacctctatggacacctcgtacccaaatctggggccgagcgcctaggaatgacagccctgaccgcctcggcagttagggacaaggccctggagaaatccccgcctagcctgggcttccggaggaggggagaagggggcggggctgcatcgagcctccgcccccaagcgtgcgtgcgagctgcaggccaggcggccccggagcccagggcggggcgcgggcgggccttcgctggttactg

SEQ ID NO: 47017 - DNA, 170 bp, Mus musculus
  source 1..170: mol_type = other DNA
gcaccttgcccagtctggcattgccaggctcctgtgccttgagacacctgggtactcaggagagcccggactggcgcccggagccagttagatagtagatttattttccccaaaataactttttgaaagctggtccgagccccggtttcggaacctcggagcggtttctc

SEQ ID NO: 47018 - DNA, 360 bp, Mus musculus
  source 1..360: mol_type = other DNA
ttttcagacagggttcaataaatccaggctagtctgaaatctcaaagcccttgagcgctgcaattgtgagtgttttagattatcccaaaaagactagtaccttcggtcgcccaatccacccccgggggtctcctcgagtgggctcagggctcaccgcagtccttgaagtgcaggggctccgcctggctggcagcgaccagcgccagcagcaggatcgtggcggccagtaaccagcgaaggcccgcccgcgccccgccctgggctccggggccgcctggcctgcagctcgcacgcacgcttgggggcggaggctcgatgcagccccgcccccttctcccctcctccggaagcccaggctag

SEQ ID NO: 47019 - DNA, 413 bp, Mus musculus
  source 1..413: mol_type = other DNA
cttttaggcggtgggaggcaacggacatccctgtccccttcaatacagcagggctcaaaggctcatgcagccccttggggaaatgactgtgggccagaggccactagcctttcaagaggctggtggccaagggtgtgaccagctccaccagggggcgcgcgccccaagttgcccttccccataggcaaccggctcttgggagctgccccagggacacgaggtaagcaacgagaccaggcgcgcatgcctcgggctcggtccccattactctgggaggcccgagaagcagttcatctgggtccgttttgcccaggacaggaaaaaggcagctcaggtgcgctggtccaggcagacgccatctgtctttccagtccccgggccgtaataagggggccgagctgtccctccaagga

SEQ ID NO: 47020 - DNA, 548 bp, Mus musculus
  source 1..548: mol_type = other DNA
tttaaaatttcatacagtgatttttataggattagattccaattagagtcaaggtctgaatttctttgagacacatgattttgaaatatccatccctggattgaattgcaaagagcttactggtcattaaattgagtcaaatttagactagtgttcctttttttttttttaaaaagatttatttttatttatatgtgcacacgagtacacaggtgtgttatgtatgtgtatgcatacgagagcagcagatcaactgacatggcagcgccatctctgcaaagaactttatttttatgtatgacttttacctgcatatatgtatgtgtatcaaggtgtgtcagacacacttgactgcccttaaggctgaatcatctctccagccataggcctgcctggtcttcatagttcccaagacagccagggttatatagagagaccttctctcaaaacagaacaggaaaactctagaaaataactttgatttttgagttgctgcttaaataatatcttcttttgacccacagtaagttactcaacaacaacaacaa

SEQ ID NO: 47021 - DNA, 197 bp, Mus musculus
  source 1..197: mol_type = other DNA
atgggaatatcatactagcatgttcgaagtgaattcttacaacttataaaatgggactatctagaaaacatcaaatgtttctagcaggacttctgtagttctgatcagtttaagaaaccacttccccttgaaacagaagttttcgagttaaaaagagctgaaaacatcttttaaagttctcttctatctcgcagcgc

SEQ ID NO: 47022 - DNA, 311 bp, Mus musculus
  source 1..311: mol_type = other DNA
attggctcaatgagtttggtttgcccaggatctggttagaaaacaagccggggagtagtgggcttgtccactccagcaccggagggtcaatctagcaaaaaccggaggtgttttctaaaaagtgaacaagcagcttcctctggcttctgctctgatgcacctgcacgctcgtgctcgtacacacacacgggacattggggggggatgtcctccatcgctatttcggctgggctctgcctccggctgcggcgtgaatgcaacgtggccaagtcctagttctggggtccgaggaagcagcggcctcatccggc

SEQ ID NO: 47023 - DNA, 279 bp, Mus musculus
  source 1..279: mol_type = other DNA
agcactggctgtcctggaactcactttgtaggccaggctagcctcgaaatcaggcgggatccaacaggttcaaggccagcctggtaattcctttgggttgactgagttaaatcagtttaacttggaagaactgtcatttttacaaagctccctcttttgagttcaagttttaatgtctagaaaggcggcaacagcgagtacctgcgccaaggttctgcgcatgcgtagttgcctcagcacggtccccgccttcccgaccgcgggcccagctccgtagcg

SEQ ID NO: 47024 - DNA, 303 bp, Mus musculus
  source 1..303: mol_type = other DNA
tggctcacaaccaccttgttggtgtactcacatacataaataaatctttaacttttttaattaaaaatatttttgagacagggtcttacttgtagctcctgggtaacctggaactcactctctttattttaataatttacaaatgtcttattcaaactgaaagcagagcgccgcacctgtaactcactgattcagctagactggccagccaggccctccactgggacctcttcagccccttctggttcaagaggagcaaacagagggattctggtaactaggagctgctcttgatttacttgt

SEQ ID NO: 47025 - DNA, 343 bp, Mus musculus
  source 1..343: mol_type = other DNA
gttcatttattgacattaatttgatatttattcagctgagctcatggaatactataggaagcctacaagcgtttctacaacctctgaggtcctttaataaagattattttgttgctacttcataactgtaaatttgctactgtttgctagatatctgatatgcctgagatctaagttcctagccatttccctctcttcctagaataacccaagttggccttctcttgacagcgccacagatgccccgcgctgggaccgctaaggatgcgagcccggctcacaccgcccggcacccagcacggttagtggttcgctccgaacacccctcgccgcttggccgcgg

SEQ ID NO: 47026 - DNA, 252 bp, Mus musculus
  source 1..252: mol_type = other DNA
cccttaagatgctttagggatgatgagatataaaaataaataactcaaaaattaaaaggttgttttattttaataaagagataaatcccccattcggagcccaggaagccctgggcagattgatctgtgctctaccctaagccctagggcggtctaaggcagccacatccctggccttgcaaactctagggctttaagttagccaatggctggcaggcacccggctagacgccccacccccgcccccaggca

SEQ ID NO: 47027 - DNA, 551 bp, Mus musculus
  source 1..551: mol_type = other DNA
gagacccagatctgcgacacacagtgtaactgggctttccctacctctaataggctggcctgacctgacgtggacctaggtctagccaggtgccccgaggtgtttcctgtgtacagcccacagctgggctgccctgtgcctgcctaccaggtcagatagtacatggaatatgtctctgccagatccctgtctacgcaggcagatgcccgcgggcacacatacactttcctagtgtgaatatgaacattgttcagcatctgcagctgtcacctctccggccacagcaagatgctgccttcttagtactgcactccctgcagaggtcacgtccgcacctggaggctccagaagagccaggtgcaaccttggctgtcgctgcgggctgaccctggggcacctagctccgaggggccaggagatctgcgccggcagcgccccttcagcgccctgcggggtcacgcgcggcaccgccaaccggctctcagcgctcccgggctgctcctggggcctcgagatagaagtgggcgggcaggctgcagccccgccccata

SEQ ID NO: 47028 - DNA, 353 bp, Mus musculus
  source 1..353: mol_type = other DNA
acagcactcaatacctagtaagtgtcgggtcaatggcttattacattgcatgtaccaaattgcaggacagcattctcagggtttctctgaatagccctggctgtccaatggtggtaccacttgcctagctacgttcaattccttgcaccgagcggggaaaagaaaggtgaacatgttcaacccgggcgtctcgagccctggactcgcactcatagggcgggagagccgctcgctgttcccatagcaaccagactggccagcgtcctccgggcctcccggctcggcgcgcagactcccaaggggaccctcgtcacttcccggcggtgcgcccagctccgccctaacacgagcag

SEQ ID NO: 47029 - DNA, 249 bp, Mus musculus
  source 1..249: mol_type = other DNA
atgaaatacataaatcttttttaaaaagtttctgggaggaggattgcctaataattctcaaaatattcgaccctgatgtcctgatttgcaaattgttttggcttctcagccctttccagcttcgtaaagctttaattttcaagaatccaaaggaatgctctgcattcattccctgatacatagtttacaatctagcttggccaccttagcgcctgcgcactgagacgtcgtgcagacgccgtctggcgg

SEQ ID NO: 47030 - DNA, 347 bp, Mus musculus
  source 1..347: mol_type = other DNA
tggtgtaatgatagatttccatagctaccactgctaactatctcaccttgccaagtctgccagcctgacatattaccacatggggcccggtgttaggaaatttgtacaaatcaaatctcattttagcagtcctcatctctctaaaagcaaatgcatgcaatttggttattttgctcagatttattgattcattcctgagccatgaataacattacaagtccaaattatgcatgtctattagtcactgactgtgccctaggcacccagtagggtgagtggacatctttacccacggggaaatgactcattgtgaagccccacccttgggcgggttcttgaacaaggag

SEQ ID NO: 47031 - DNA, 437 bp, Mus musculus
  source 1..437: mol_type = other DNA
tttttgtagcgcataaaagctgacatctgatctgttgtattaacgatcttctgtgtagttacaagaaaaaaactctcttctgttgtcaaaaagttacagaggaccatttaatgttgaaatcaagttatgttcattacagtaacggtcacgtgatgaaacgttataatagcaaaatgatttagtgaaataatagtaaagctaatataagagcgcagtagccgagcgcactcagaagggtgatcagcagtcccactcccgctagctggacagactcccgaatcctggggcgggatgattccgcagcccatctaggggctccacccttctccagacaagggcacaccctaaggtctgagcttcattctcggagaaatccaagttcttctttgatgtagctgcgcctgcgcacatctggagctaaagaggcggtgctctgg

SEQ ID NO: 47032 - DNA, 200 bp, Mus musculus
  source 1..200: mol_type = other DNA
taaacattgttttcatggcgctctgagtagtcctgcaactttatagacttaatgaagaaggaatccattatctttgctacactatcgctacaaaaaaaaaagtggaccacctccaaaatgtgacgcagtctgctgcaaacccgctcactcttccgcttccacgacactcgcgggtgtgaaggccagcgacgcccaaggtg

SEQ ID NO: 47033 - DNA, 278 bp, Mus musculus
  source 1..278: mol_type = other DNA
ccagcctcgtcctggtaaaataatattttatgctcatcactgactggaccaaaacaaaaatttaaatgttggtttgagtggactattgatgtgtcttaaataaataagtgcgttggacccaacttactaaaagccaaattaaaattttctcttatgtttttgccttagccccgagtctacgcagctggtgggcattttaaaaactcgcatgaaccgcttccgggggcttccaaaatggcgcggacggcctcgccagggcagaggcgcgtcacgtgggt

SEQ ID NO: 47034 - DNA, 410 bp, Mus musculus
  source 1..410: mol_type = other DNA
ctttaaaacacgaatttatgaatgaacccagtactgtagttaaatcaggttattgtacacttattaggcaaggagctggagagaggggctgagaagctgaccccccctttttcttctctttaggaacagaggcttcgagcctttaaggctgcgtacaatgacccgggtctcatcccttgaccctgggaaccgggtccacattgaatcaggtgcgaaccggccgcggccccggttccccccctgcgctgcaccctcagagttggctgcagccggcgagcttaggacagtcagcaggtttccacggccggtgttgttctgggggggggaccatctccgaaatcctacacgcggaaggtctaggagcgacagagcgcccgcagagggccttggggcgcgcttccccccccggc

SEQ ID NO: 47035 - DNA, 368 bp, Mus musculus
  source 1..368: mol_type = other DNA
agaccgattcctccctgcaggcaggcacgcacgtggagacctgcttgtccgtctctctgagaaggaggccgaaggtcactgagtgtcaacattgccactcctttctgatttaagaggaaagagggcgggggtctgcccccccccccaagggcaggtaggctcactgctgcgtcctgtcgccctggctcaaactgggccagccactgacaacaacggtggcctcagggtggcttcaggacgtcaggagggtagggattaaggcttccaaacgccttctgcgcggaaccctcgctctggatttgggggagagcgctctgctcatccggccgccgccttcgcgtcgctgcctgggggtggcggccgcaagg

SEQ ID NO: 47036 - DNA, 302 bp, Mus musculus
  source 1..302: mol_type = other DNA
gttcgtgtcatgggacagcatgctttacagagtgggggacatttgtcatccctctggattctcatcatatcgatctgactccaagtccgtcactgacttctgaagactcaaggtcaaccttgaactcctgaaggagcccctccacagaaggtaggtatcctttctctagggagaatacttctttagcatcgattccagagactccccgagactctcagctagaacccatgtatttagatttaaaaatcaaggcgctctctgccatgttgacagcagagaacttgagaacttccagcttgaat

SEQ ID NO: 47037 - DNA, 473 bp, Mus musculus
  source 1..473: mol_type = other DNA
caggtaggctcactgctgcgtcctgtcgccctggctcaaactgggccagccactgacaacaacggtggcctcagggtggcttcaggacgtcaggagggtagggattaaggcttccaaacgccttctgcgcggaaccctcgctctggatttgggggagagcgctctgctcatccggccgccgccttcgcgtcgctgcctgggggtggcggccgcaaggccgtgtcctgctgcctcgcgctctcgggagccgcgggcggggcgcgccgccggaccgcaatgctgccgggaccagcgcggcggggcccgggccggccccgcaggcggaggagcgcgagcatcggcgggaggagggcgccggcggtcagtgggtgtgaagcgggcgatccacaccccctcctccctgtggagctggcagctcggccggttccgcattcccgacccctccccgccactcagggcccgctatatagccg

SEQ ID NO: 47038 - DNA, 345 bp, Mus musculus
  source 1..345: mol_type = other DNA
acattttgcaaaagctaaaccggaatccaacctaaattttgggttctttatcactgtcttctctgaaagccttgcttccaggctagcctcactcccagagcctgcgcagagactttggctcgcggggttccctagtgggagacctcagggaccctctttgttgggaggtctctgagaaaagcaagcattcctttcaagggactccgagcctcggtgcacgcccgctggccccgagtttggcgccttgcgagccccgctcaaggaggcgccgggcaggccggggggcggggcggtcacgtgcgcccgagggggcgaggccccagcctgcccgggagcaaaccgagc

SEQ ID NO: 47039 - DNA, 440 bp, Mus musculus
  source 1..440: mol_type = other DNA
aacctcaatgattcttttcgggtgattcctaaaggaacttctcgaccttacccaaaaatgcttgagagtcttttaagttaaaaccttcagggatccgcaggcaaggacgcggcgactctgccgcagcgcttctgcccagcacgcccggcagctgctccggagctcggagggaagcgcagcggcgcccgcctaaccctggagcgcacctccccggagcgcgccggcgcaggcgttcggctcggggccggcaggcggggaccacgctctgcagccgccgaaggctggagccactgcgcaggcgcccgccagcggcgcgaacaacgctcggctgcgggcgctgacggatggcgtcaccacggcgcgctcagacacggcgtagcaggaagaggctcaggcggcggcaactgctgattggcagcaaaggagttcactccctatcg

SEQ ID NO: 47040 - DNA, 227 bp, Mus musculus
  source 1..227: mol_type = other DNA
tgatcttcacagacattgggttatttaaaaatccctttcacagatcttagaaatcccatcagctcatatctgaggggttcagacaagccagtgagactctagagactcggttttctcatccgtaaaatggggatataagcctctatctcgagggttaccctccagtactactgcagcagtatcagcaagctccggtcccaagtccacctgggccaccgatagggagt

SEQ ID NO: 47041 - DNA, 299 bp, Mus musculus
  source 1..299: mol_type = other DNA
agatcttagaaattcagctcatatctgaggggttcagacaagccagtgagactctagagactcggttttctcatccgtaaaatggggatataagcctctatctcgagggttaccctccagtactactgcagcagtatcagcaagctccggtcccaagtccacctgggccaccgatagggagtgaactcctttgctgccaatcagcagttgccgccgcctgagcctcttcctgctacgccgtgtctgagcgcgccgtggtgacgccatccgtcagcgcccgcagccgagcgttgttcgcg

SEQ ID NO: 47042 - DNA, 367 bp, Mus musculus
  source 1..367: mol_type = other DNA
cctctatctcgagggttactccagtactactgcagcagtatcagcaagctccggtcccaagtccacctgggccaccgatagggagtgaactcctttgctgccaatcagcagttgccgccgcctgagcctcttcctgctacgccgtgtctgagcgcgccgtggtgacgccatccgtcagcgcccgcagccgagcgttgttcgcgccgctggcgggcgcctgcgcagtggctccagccttcggcggctgcagagcgtggtccccgcctgccggccccgagccgaacgcctgcgccggcgcgctccggggaggtgcgctccagggttaggcgggcgccgctgcgcttccctccgagctccggagcagctg

SEQ ID NO: 47043 - DNA, 489 bp, Mus musculus
  source 1..489: mol_type = other DNA
cccacatgcagtgtggccttgaaaaaaaaaaaaacaactattctcagtttctccagttgtaaaataatacattaacatcttttcaattgagaccagaaccaggcctcttagaaagggtccaggagacttgggtctggcctaacttaagctactcaagcggcccttgctctggtccccagccctgtcactggcggccctgcttcgccagagggcaccctcggccttccagctcggaccgctgccaggatcgcggccgagccgggttccaccctggggcctggaatgagagtggcccgatcgcccggccctggcgtgtgtccccggtctgtccgggggagatacagctggccccagctcagaggggccgggttttcaaatctcggcttttcctgtgcctgtttaaaacattaaaaccgtgcagcgagagaggcgtgtgcgctggtccctccctccctcccccaccccaggccgatacgtcatgggagggag

SEQ ID NO: 47044 - DNA, 286 bp, Mus musculus
  source 1..286: mol_type = other DNA
tctctgtatagccctggctgtctggcctcatttcttttgaaaaggagtcctactatgttgccaaaactgaagtccagtgtaggcataggctaaagtgattgaagattgaatactttaatctggcctctatataaactttgttttcaaagacagcgtttcatgtaataaggatgatataataaacttcttgaatgcattgtaaattttataaactatttattaccttagattgtgaatgtgattttgttttctccgaagtcaagcaaagttggtcggcggagacgcc

SEQ ID NO: 47045 - DNA, 357 bp, Mus musculus
  source 1..357: mol_type = other DNA
ggacattggaagaaggaagacttactcttcttcacttctaaactctgtagacccggctggccagcttctcctgaactgcattagtcagcaggaagctgcagagaggaaaccagttgtgctccaaggcagcctatgtcttctaggggaaatgtatctcttttccacttactgaatatggaatgccaatagccactcaatattgaattaatacttttaggctttgagttataatgtagtagcaccctaagggagaagtcttgtctcactcaggcctatcccgggggccccgcctaccgtggagcggaagtgggcgcgcaggagggcggaagtgcagggcgggcgctcgtcctttcttgt

SEQ ID NO: 47046 - DNA, 334 bp, Mus musculus
  source 1..334: mol_type = other DNA
tatccctgtggcaggtatatccccaaggtgaaaagccccacaagaagagttgagacttgacttatggctcattcagtggcggcccatggtacagtggcggcccatagtgtcaacctgtgatttcccaagcagacagggatttatgcctatttgccaatgggcaaaggggaaggttagagcctgcgaatttctaagccactggcgtttttaatttagagaacaaaccagttcgcgggcttggtgagtatgttagcaccctcccttccgtttttcagctgcaaaagcaagaacacaagctttaggactcaaagccttcctactccacaggaggtgg

SEQ ID NO: 47047 - DNA, 413 bp, Mus musculus
  source 1..413: mol_type = other DNA
tgtttaatctctaaaagaaaaaaactggtgtcatgccaggcttgcagaggcaggcagatctctgtgagtctgagcctagcctggtctacatagtcagttctaggccagccagggctacacagagcgactctgtaaagttacacggtggtttgttcctggctgagccagatcccccctccccggggcaggggcagagactgggggatctctgagtttgaggccactctgttctacagagcaagatcttggtggaactttgtgaagtcctattggcaaatcccaagcttggacttcacttaggagggacagctaacatcttgccatccttaggccagcaatttgcaaaagacagggtctctgatttgaagtttacgaattcaaagtttcttagaactctgaagtcgcagactttt

SEQ ID NO: 47048 - DNA, 276 bp, Mus musculus
  source 1..276: mol_type = other DNA
tgcagaggtgtgcatccggaatcccagcatccctacggcagtggggacaagaaaattggcttgtttcatgaaccagccagcctagggtacattgtagtatatacaacatatttgtgtaactattttccaaacccagatttctagaatttcatcttggggttctacacctcaagtgaacttcaaccaagtctaggcttagaccaagggtgggagacccgctgttgccgggtccaccctcgtggatctcatgatgttgctcttatgtcacaaagtcat

SEQ ID NO: 47049 - DNA, 257 bp, Mus musculus
  source 1..257: mol_type = other DNA
tcctccttaaaaagcagtggtggtgcacctccaggacagccagggctacacagaggagggctgagttcatccagtgtgatctcccatctagaactcgggtctgtactttcaggaaattttccgcgctaggaatccgtccagggcatccctgcaataacttgtagggcaggacgacgacccggtgcgaaagcgctggccctttaagggggggacggagcgcatgcgcggcgcggcgcggcgcggaccggtgtcgagcc

SEQ ID NO: 47050 - DNA, 343 bp, Mus musculus
  source 1..343: mol_type = other DNA
aactaccacactgatttagtattctttttccccatagcccatttggaacaggtgaagtaagtaaaaatcgtatgtacttgacctagttagtggcaaaattgggaataaaacagtggtctcttaatgatactttagagactcctacgagccccttaatatttttattatatctttaatctttatatttattatttatatctttgaacttttaaagttagcatagagtttcatgctactgttctgttgccatagaaaccggtgccttctaacgcagcccgtgtacgccagcctggggggcctgggcggtgaggaggcggagcctaggcggctcaaggcagagcct

SEQ ID NO: 47051 - DNA, 296 bp, Mus musculus
  source 1..296: mol_type = other DNA
acacacagaaggaactttgaaaactgtctatgctttatttgtattcagaaggtctctgagtgctcatagcttctttagacattcggtcaaaatatctcattgcagattaaataggtaatacctttatatgaaattcaaagtgaaactcgtcgaacagggcatttaatttctggacttgcagctttagctcccggggcctcagctgtggtacacagcatgctgccgcgcatgcgtctttcgcgagcaacaagtgggcatggcggtgacgtcagcgctccgcccgggcggcatcccgc

SEQ ID NO: 47052 - DNA, 459 bp, Mus musculus
  source 1..459: mol_type = other DNA
ggtggccactgagttcttgtaaatacgtctggaaaacgggcagctccaggctgaggggcaagctgggcatgggacatgcccgcacgaaatcatctcattaaaatattcaattgcttcagccgccgggacaccgcgcccggctgccagtccgcgcgagtcctcccatgccggacgccgcagccgggcgggtccaggtccggtccccacccctaacggcgtcaaggggacacaccccgagagcggcttcccctcagtgagtcccaactcctgccgtgtggctacaagccactacccacgcatcgctgtggggagagcgtcgccctctcctcggtgctccgcggccttcccgctagagcggcgaggtgaggcgggcctccaagtgcccttctaggagcacagcgtgcagtctccatggtgctggggcggccgagccgggccgaggcctcggggatagctcga

SEQ ID NO: 47053 - DNA, 256 bp, Mus musculus
  source 1..256: mol_type = other DNA
acaacatcaaatgctggtggttgaatatgcaaatgggtaataatttaatgtgtattttctgactgcattaatatatactttaaaattagaccacaaatttctttctgtactctatttccacaaggttataaaacaaaggaatttctgctccatggagttgaggggggtttctttatctacaattaaatatcacacacccacatttagtggcacgatcccatgactgactgggagtcaaagggagagccctctctga

SEQ ID NO: 47054 - DNA, 353 bp, Mus musculus
  source 1..353: mol_type = other DNA
gcaggaagacatagatatcttcttccctgttaacagctctgacaatatcccaccattataaaacattattcagtagtggctccataataaaatgtttactaaaactcgagcctggcgtggtggtgcacgccgcagatttctgagttcgaggccagcctggtctacaaagtgaattccaggacagccagggctatacagagaaaccctgtctctgagccatgccatctaggaggcctcaggcagctgccaccagggagcggcagccttgtgcattcgcccccacaggtcagagcagcgttgggcggggccaaggttgactcctactgggaggagccgggatgccgctcccgcgg

SEQ ID NO: 47055 - DNA, 320 bp, Mus musculus
  source 1..320: mol_type = other DNA
cttgtgcttttagataaattgaacagctactttttaatatcaagtagaatgtccgtttaatatgtttccaactcaaacatgcattctggcgactttaaatttgcagtttttataccatttcttacatgattaaaatcctgaaaaatcacatctgtatgtggaaaatctatattaaccggatgcaatagagactcaattttaagtctcttataaaacacactgccacagcctggaatcccagcacttggaaggctgggctgcacaggcgggcgccgaggtgcacgccgggagtcgttgtggcgccacgcgaagaagcgagc

SEQ ID NO: 47056 - DNA, 508 bp, Mus musculus
  source 1..508: mol_type = other DNA
cttactctataggaatctttttctttgaaaatcacgctttgggaaaattatgttctacgaatttactaatttctccgagtgtgggacccccaccagggcaaacctattctccgaggtttgacacaccggaaagcccaatcagagggtggcgtcactccctcttgagcaggctggtccagccggtgaaagcggccaccctgccgcctggaagcgccgcgagctccaagcaggccggctgcagccgctctggcagcctgcggcacacagcggcccctacggggacgcagctcggagcccgctaggccaccgcctatggccggcggcatcctccccttccgaaggatcaccctccgggccggaggcacgccgggtcttgtccgctgccccgtcaaggggtcataagaaggcgtctcgaggtgccatggccctccgtttgccgcggagcgccgggccccgggctctgggcggggcggaaagtgtggtggccgcccgggcagctaagaggcgc

SEQ ID NO: 47057 - DNA, 281 bp, Mus musculus
  source 1..281: mol_type = other DNA
tacaattaatttttttctagtgatgaaactattttcaaagcaggcattgaatatgtgggtgctgggaaccaagctccactcctggaagggggaaggaccaaaattcaaaatttgaagtacagtttttaaaccaaatgcatatcactttctcttcattataaagttgaaaagttgttaattagaacactgaaatgggcatacctgccatttgtttgtctctggtcacaaaaggcagctgcttcctgtctcaggtctggacccagtgccacaagttgaaaaag

SEQ ID NO: 47058 - DNA, 149 bp, Mus musculus
  source 1..149: mol_type = other DNA
cggtctgggaacttaggtttaggtcctttgaacacacctactgaaacgtcctgtcgttgtaggttagagcttacctcaaacaagtaggctgcagactcagactctcatcggagtcagaattataatctcctgagacttcagacatgtca

SEQ ID NO: 47059 - DNA, 379 bp, Mus musculus
  source 1..379: mol_type = other DNA
cctcccactctcaaggatgcaagggacgggcctacgcgcgggcgccccagcagacgccggcagggagccggactgccaagccgggtgctcctcgagcgcagccgcgggccccgtgacggtggggaccccggtcgcccgaggtgcgcggccccgagcccagaggcacccacccttgcagcgcccggggccttgcgtacctgaggcggccgcctggctctcctccactccccgtcggtccccgacgccgcccgccgaccctcggcgagctgcggggctccagaaggccggcccctcagctgcctgccggtccgacatctgcagcccgcgccgggagcggctccgcagccagcggcttgcggctccggaaacagccgaaggc

SEQ ID NO: 47060 - DNA, 282 bp, Mus musculus
  source 1..282: mol_type = other DNA
agggttagacgttggtggcgtccgcccgctcctccacgatccacagccacagcctgaggaccgctcggtcccagccgcctggcagcgcctggaaactactagaagcagcacagcacctcctcagctcgccgagccgtaggttccgtaaaagctcttaagtctaggccctcaagatccctaaaccgaccttgctgagcctgatgggaccttccgattagcactatgcgctagtatttctgggaatgctagtccagaagcctcgcggcccgcaggacaacttcc

SEQ ID NO: 47061 - DNA, 303 bp, Mus musculus
  source 1..303: mol_type = other DNA
tccttgcctcagggtactgtagaaaccagctactgtttgagaacaaagacctctgctttgaggcttgctggaaagccccatctcggagctcccaagaaggggctggacagcgccaggctcagccgctggaccagcctttctggaagttgtcctgcgggccgcgaggcttctggactagcattcccagaaatactagcgcatagtgctaatcggaaggtcccatcaggctcagcaaggtcggtttagggatcttgagggcctagacttaagagcttttacggaacctacggctcggcgagctga

SEQ ID NO: 47062 - DNA, 481 bp, Mus musculus
  source 1..481: mol_type = other DNA
ggtcgccgttcagtgagtggctggctgggctgtcctaaggacaccacagcacacccgctgttctgggactgtggcttgtggaccgcaatgtggcggcgggctcctcacgccgccggtcagtcgcgcgtccctgcctgtgaggcccgggctagtttgggaggctgtcgcccgcgctgtcgaggagcgctcctgtggcgccgcagccttcgccgcgacggcgacagtggcggggactgagggcggggtggccgccagataggagccgccccgcggagcccggacgagtccccgagcgccgaggggccccttggggagggcgtggggccactgacctcgctcgcagacccctgctcaccggcggcgcgcacccgagcgcgcgctcccgccgctcctcgcgaggtccccgcgcgactggacggagcctgcgccgcagcccgcgctcccgccccaggaggaggcgaggcggggcgcgaacgcgctc

SEQ ID NO: 47063 - DNA, 485 bp, Mus musculus
  source 1..485: mol_type = other DNA
atccccctgagcagaggaacatagccaggattcaaacctagactgagtcatactcttaattatgacattgatttttttttttatgggtaacaaaaatgtagatcaatttcttttgctactgatttgaagcaggaagaattttaaaagaacttggctcctaaaggagttaattcctcaagtttcagtttcagttatcacaagatctggaaacagatcaagtctcctgactttcaaggaaagtcttcaaaggaaattgccctaggattcgcgtagttcacaaagaacctgagaacctcgaaccgggaacaggctctggaaataggctcagcccctgtttctttctccttctcaacctggaccagtaggcggcaaagtcagttctcgagttcctctgaagaagtcccctattggtcaatagccgccgggcttcggcgagccccgtcttctcgggtggccccgccctcgcgtgacggccggaccgggaa

SEQ ID NO: 47064 - DNA, 322 bp, Mus musculus
  source 1..322: mol_type = other DNA
cttcattattcggattatacaactattaaagtttgctgtcggttttactttaaaaactaagtgattttccgaatgactgactacaacccgaagcaaaattttatgcgcaagaatttactcaagagcaaaccacttgtgttcttttcaaaagagtagctccttaaaaaataattaataaataaataaataaataaatgaaattaaaaattaaattctttacatttacgcgttacttaaaattttctgacaaacgcaataggccgaccagtactggaacgcagtgcgcggaagaacctgccagagccggaatttcgagttctgc

SEQ ID NO: 47065 - DNA, 549 bp, Mus musculus
  source 1..549: mol_type = other DNA
ctacgagtgctctcctgtggagctcaagagagggtgtccacgtggctgcaaggaaccaaatctacttggtgttcttgggaacaccagtaggtaaataggaaaaaaacctgctaattttacctttactttccgatcgagtctcaccacgaagatgttcttctgagctttacacaaaatatcgtattagtattaaacagatagttaaggaggcacaagccgtggcccgcgacaggcccagcaggggcttccctccaaagccggcccggaggcggcccagtctcgggtggcccagtcggccgctaggctggcacgcacgccgggcttcgggctccgagccaagtgcgcctctgagaatgacggctcccaggtccgctgtccccggccggctctgccggtagaagcggaaaagcttccggaaagcatcctctctgggctctgcagccagcgtggctaatgaagccacagcagccgccatcttccccatctcgaggctgccaacagtttggcccggaagcagaactcgaaattccggctctggcaggttcttcc

SEQ ID NO: 47066 - DNA, 376 bp, Mus musculus
  source 1..376: mol_type = other DNA
ttcctttataaaagttgcctcagtcatgaactcacagtgatctacctctgggattaatttgatcctaacacttaggaggcagtgtcaagctttctcagaaagaaataattgtctttcttatacgctcattgatactgttttttaaataattcattcgtgaagcaaaatttaaagtagatgactgtacaatccaaaataaggctttatatcatattttgtattatcactactgacatgttaaacactgtagcctgtaaaatctacagaagtaaggaatttcgtatgctaaggtagttgttgctacagactggctgtcacaagtctctccaaggcccagagggccgttcggtcagagcttcccgggcaagactcgccc

SEQ ID NO: 47067 - DNA, 226 bp, Mus musculus
  source 1..226: mol_type = other DNA
aacaggtccaagacagtaatgatactctttatcatagtctgaaaagccagaatgagactaagattcagaaattcagattaattagattggcaatggaggtctcagaaaggaatatgcctgagttcaaggatattaaattgaattaaggagtttttaccttgtggcaagatgtgacacagtcaatcttgaagagtattcaactatagaaaaaaagaatatatattca

SEQ ID NO: 47068 - DNA, 298 bp, Mus musculus
  source 1..298: mol_type = other DNA
tataaccatagtcctatgaggacaatgggggatcatcatgatacaagcatcccatatgatatggctttagaaagcatagccatctcatgccttagacagggtttctctgtataaccctggtgctgtcagaacattttttttttaaagattaattaattcatttattttatgtatatgagtacactgtagttttgttatatctaattatactggaactgtcttcagatgcaccacaatgaagtgtcagaactatttatggatggggattaaaggcgtggtggacatgtatatatactca

SEQ ID NO: 47069 - DNA, 270 bp, Mus musculus
  source 1..270: mol_type = other DNA
taaccatagtcctatgaggacaatgagggatcatcatgatacaagcatcccatatgatatggcttagaaaacagccatctacagggtttctctgtatacaggctggtctccaactcagaaatttttttttttaaagattaattaattcatttattttatgtatatgagtacactgtagtttattgttatatctaattatactggaactgtctttagaaacacgtggctgtgggattaaaggcgtgggctacacgcctgtatatatactca

SEQ ID NO: 47070 - DNA, 345 bp, Mus musculus
  source 1..345: mol_type = other DNA
agaccaggctggactcaaactcagatatctgcctgcctctgcctccccctttttttaaaaaattaattaattcatttattttatgtatatgagtttgttatgtcaaattacattgtaactgtcttcagatgtgtcacaaggtagcgtcagatgtatttatagatgttttaactcaggaccttcatttgtttttcattaccatagaaaaccagtaggcagtaagaagtgtacttttttctttgtataccaggctggcctcgaactcagtaatctacctgcctctgcttccagagtactgggattaaaggcgtgggccaccacgcccagctaatgtatatatactca

SEQ ID NO: 47071 - DNA, 344 bp, Mus musculus
  source 1..344: mol_type = other DNA
ctggactcaaactcagaaatctgcctagtggactcccctttttttaaaaaaattaattaattcatttattttatgtatatgagtacactgtagttttgttatgtcaaattacattgtaactgtcttcagatgtgtcacaaggtagcgtcagatgtatttatagatgttttaactcaggaccttcatttgtttttcattaccatagaaaaccagtaggcagtaagaagtgtacttttttctttgtataccaggctggcctcgaactcagtaatccacctgcctctgcttccagagtactgggattaaaggcgtgggccaccacgcccagctaatatatatactca

SEQ ID NO: 47072 - DNA, 410 bp, Mus musculus
  source 1..410: mol_type = other DNA
ggactccagggataatttggcgggaatgggccccttcccctgcttcctaacctttctaagatgccttccagactagatcccagacatgagccgctggctggctgcaacaagaatgtagcagacactgtagactggatgatcctgaaaatgaagaccatcttttcccttgtagtgaacgttcttcattttggtttggatgtacatacaattagaagagatgatgaccattatcttagactctcctcaagtttactgtgtagctgaaggtgaaattaagctgatctgtttggcatcctcccacttcagtcttctcaagttagcacagctgaggactgacaaataacttggctttagtaaatcaattcttgaccagatctggtctaatttgcagacactatttaaatctgaaa

SEQ ID NO: 47073 - DNA, 504 bp, Mus musculus
  source 1..504: mol_type = other DNA
actgttaaaagccagggactttaacagatgcagtattgtgcccactactaatagtaatgccactgtgttctagtgacagcttaagagatcaacaaaggagtgttggtcttggaaagtccaccaataatggcaattttcacagaaatctcactcattagaattctaattagaatctaatgcctacttaaaatctacagatgaattacatcatccattaaacatggatctatactttgactccttaaattattctcagtatgattctttgtcggtatcttagcagacaaggaaaacacagctgtggcctctagtcgcaggcctcgcggcaccggcttctgtaggcgctaatttgggttccgggctgcgcggcgcagcttccctaccctctggtgagtagcacccgcgcacctggcagatgtgctccgcgacgtttgagctcaggctctgccgcccagacgaagctgggagagctggcgaaaccacgtggttcaggtgactcgcagt

SEQ ID NO: 47074 - DNA, 410 bp, Mus musculus
  source 1..410: mol_type = other DNA
gtcccaaccaccttatcaggattagatgtttattgttgttgttcaaaaccttttccaccaaatctaaactgttaaaagccagggactttaacagatgcagtattgtgcccactactaatagtaatgccactgtgttctagtgacagcttaagagatcaacaaaggagtgttggtcttggaaagtccaccaataatggcaattttcacagaaatctcactcattagaattctaattagaatctaatgcctacttaaaatctacagatgaattacatcatccattaaacatggatctatactttgactccttaaattattctcagtatgattctttgtcggtatcttagcagacaaggaaaacacagctgtggcctctagtcgcaggcctcgcggcaccggcttctgtaggc

SEQ ID NO: 47075 - DNA, 283 bp, Mus musculus
  source 1..283: mol_type = other DNA
ccaaggtctgacactgagcaaaacctctgtgattcaaattggtgacagatctctgagggacctgtgctctgggtacaagtcttgagtctaaatggaacatctagatccagcatttgcaaaggaaagtgactattcagagaaatcttgctccagttctggagaggaactcttctctcaggctggggtgagggcgaatgatactcactcacagagagctcgcttatatcttctcagctgtttgtaaaacacccagggaggaagccaggcagcctagctgtctctt

SEQ ID NO: 47076 - DNA, 488 bp, Mus musculus
  source 1..488: mol_type = other DNA
catgatcacttgcaatgcatgtcacataaaatatgaccctaaataaaaattcatatactagaatttgacacaaagcttattaaatatttaattagggcaggtttaaggtcatggctgacatgatatctcacctgtacaattagagagacatcataattcacccgaatgatccctgtgagtcttacagatggcaggctggaagacctaagattaggcgttctcatctctataatagaagagaaaagccacttttgttttcttgcagaaccaagataaagttaatatgagagctatgtaattaccattgtagctctcttaaccacttgctaagagtatatgtatctattttgtgagaatacgggcctcaaagagaatctacactcaaggttcagtcacagtctgtcatagtccagcatctgccagaggttttttccatttggtgcatattcacataataactctcacggtgcttaccatgtgcattgtta

SEQ ID NO: 47077 - DNA, 295 bp, Mus musculus
  source 1..295: mol_type = other DNA
tggcccctcctggagttttctggtagcctctggatcccgaattccacgccggtgctgcgagaacagccgggcgcctaccacaggcagtctggaggtatattcctgccaaaagcttcaatccccggggccctgagcagaggagggctgtgggtctcctaggcgcactctggctggtgcccgggtgtgtacaagcagccgcgagctagcgtacacttgaatggggagggccgggattcctggaggctccacccctccctcctcctcggcagagcacaccggctgtactgatttgctt

SEQ ID NO: 47078 - DNA, 390 bp, Mus musculus
  source 1..390: mol_type = other DNA
cccagtgtttcaaaagctgatgggaaggtcacctctctaggcctgacataggaattctttgtatgggaatttatttgtagattcggtctcacacacaaagtctgggtttctgacaacactgacacttagtaacgaggagtccacacattccaactaagtaggtggtcatgctcagcttgctttcatttgttcttaactccctaacagccatcgtcatcatcattatcatcatcaccaccaccgactcctaagtcaccaagagtccccgtggtgtgcaacaggtgtcccaagtggcactgagactccgtggaacatagtcactggaggagaagctcagtggctgcagctctctccgcgagtggacttggagcggctcagaagcaacgccac

SEQ ID NO: 47079 - DNA, 459 bp, Mus musculus
  source 1..459: mol_type = other DNA
atagccccttactacctatatagcccctaactaaatattaaaggctgaatttaagagattctcataaataatcaatttctcagtctcctgggatctaaatgccaatgatatttgttgttgttgtaatatcgaagctttagtaaaaccaaaaataatacttgaattcagtttgggaataatctttaaagatataccatggtggtctcaaatagtttataaaatttccaactcaaaattcactttctattccctctgataagatcattactgaaaatatattcaccacacgggagcattatgcctgccaggaagctttcttgccaaaattcctaagttaataaaaatgataatcagaggaaagtgttaacatattagtctacaaattactttaaattttttctttctctccctttaaagcacaaagcttttaaaaaattctcaatgacgtcaagatctttt

SEQ ID NO: 47080 - DNA, 650 bp, Mus musculus
  source 1..650: mol_type = other DNA
aataagttaacagttgtcttgacagaattaaaagtttccttcttttgaggtaattcacaattattttgatgatgtaaataatttgggtagcctgtttttatgaggaataaaaaattcaaaatatattaaaatctcaaatgggttatggctacttagatatttatctagtactgtctactgtgtaagaaataattgggcataaataacagataaatatgaataatataaaaacttcaaacatgttaaatttgaatgctatataaagtttggtgtcttcaaagtctacatagcactacattgtactttttttcaaagaccttttaagaaattgagaagaacaattaacaataccttaactgaagaatggtaaaactagttaatcaagaaaacttattttgttcaaagccagcctggttgagttccaggactgccatggctacacagaaagaaagaaaaaaaaccttatttttctaaagaattatgtataaattctcttgcacaattctctaaaattcaaaatgagccaatcatgaattgactaataactttttaaaatgtatatattttcattgtatagatgtatacaatgtattggtctaataattgactgtgaacaacagtagatggaaaatttatttgtaccatctgtg

SEQ ID NO: 47081 - DNA, 370 bp, Mus musculus
  source 1..370: mol_type = other DNA
tggcttccataggtagacatgtatgcaacatgctcagccatgttgctaagatgatgactaagaaatgtcattacatggacatatttggtttcaggagatatttggaaatgtactctgtagttgggaaaccaacttattatttttaacttgctacttttattggctatttgaaagtttcacattaaaagaagagggggaaaaaaaacctaagttcaatttgtattgcctatatacttagtaaagaatagtctttctttcttcctaagtggtagggttagagaaagaggttgtcacagaaggcttctatgtctctccatgacactgaaaaagaagtttctgtgccctttatagtaaacagcagcacggccat

SEQ ID NO: 47082 - DNA, 666 bp, Mus musculus
  source 1..666: mol_type = other DNA
acctttatgtttattagcaaaaaactaaacaccgagctaattatactataggacaatttagatattaacatcagtccttaaggtataaactataaatgttattttagaaactgttgtcttttgtataattttaatatgaagaattaacccaaatagttatgcatctacaacaagagtaaatggatttaaagtttaatttaaaaactagatgttttcactcagattcaaattatactgaatatatatatatatatatatatatatatatatatatatatatatatatgataaacacctgaaacttgctaatatgaaaactagtttgttagagtaggagttttaagataagcaatcatagcaacacgctaaattgaaagcacatattatcatgttcatttgtaacttcattaaaacaagtttgttattatgttatcataaagaaaaatactaagatattatatattgtgaacaatgttctttaaatctaattataaaagtacttaataaatataaaatgtgacagaaacgttcagtttctggtcatctgccattgtcaacgtccccatgaatatgttctcagatgatgtgacaaaatttatcatctcacgttccttagctcagaaaagttctgaggtcataatcactcgttctagaataaattatctc

SEQ ID NO: 47083 - DNA, 369 bp, Mus musculus
  source 1..369: mol_type = other DNA
tagtggaagactaacttccaggtagctagggtgagggttttaaacccatccttgtacagctggtctgggaccaaagataccatgggccagtaactcttggaaacattttcaaataaaatcctttatcatctttcagcaaggtataaagaagatattatcacctgttacaattattacatttattgaatgctagataacaatccatacttaccccctgtcttagatagggtttctattgctgggataaagaggaaacattttattcagccatgtaggaggatgcttactggtttgtggatggcactgcccacaatgggctaggccctcctccattgatgagtatattagcctcagactctgatgatcact

SEQ ID NO: 47084 - DNA, 337 bp, Mus musculus
  source 1..337: mol_type = other DNA
agtgatcatcagagtctgaggctaatatactcatcaatggaggagggcctagcccattgtgggcagtgccatccacaaaccagtaagcatcctcctacatggctgaataaaatgtttcctctttatcccagcaatagaaaccctatctaagacagggggtaagtatggattgttatctagcattcaataaatgtaataattgtaacaggtgataatatcttctttataccttgctgaaagatgataaaggattttatttgaaaatgtttccaagagttactggcccatggtatctttggtcccagaccagctgtacaaggatgggtttaaaaccctc

SEQ ID NO: 47085 - DNA, 446 bp, Mus musculus
  source 1..446: mol_type = other DNA
tttgctcctagaggaacgacaagaagaaaattgacacaatctagtttacatttgtagaggtggcacttaagtgttctcttcatttgagatgaaaagtgtctaggattctaagcagattcgtaaccagactgttaccgtgcaggcaagggaacctgtgtgcatggccccagagcccagcgcctgacttcacggagctgctgggtttggtgagagcagcatctccagatggcgcctccaagctggatggctgttccagctagacagcatggaggattgtctcgcccggagtgactcgtccacgggacactgagagtcccacaacagtcccctccgtggagacattagacggagcccatttgggtgggtccccggtcggcggaagcggagcacttgagagcctctccttccccctcgtgctccagcgatgaggtcacagcccctcggag

SEQ ID NO: 47086 - DNA, 481 bp, Mus musculus
  source 1..481: mol_type = other DNA
aaacatatatttccaatggtgttaattgccacttcaaaactgtaattttgctatggaaccatcagaaatatgtactcacaggttaagaagcattgataactgttttttaggcttcaggaaaaccttcatagatcagataaaatttaattctagcctctctctctctctctctttgacagagtagaaggaaaagaaaggtgcctaattatttttcacttcttactttcattttcttgtgaggacataacaagctagtaaggaacatactacctcatcaggcagagagtgtttcacttgataaacttgttaagccattagaataggacgttaaagcgattttaaaatctcactgttggcctaataagtaaaattacactcagtgtcgcgagacatttgaattcactttcgagcaccctgctcagagcatgctgggactgatggacctcccagagggccaggcggcggcggcgcgtcttgtgct

SEQ ID NO: 47087 - DNA, 589 bp, Mus musculus
  source 1..589: mol_type = other DNA
cccaagccccagcgcgcgggagccggaagccgcgccacgtgacccgccgtccctccgcagccatcctccggggaagccctccgctccaccggagcggctgcgcgtccacccgacgcagcgcttcctccggaggacgcctcccggtccaaccggtcgccaccaccaccggaccgcttccgccagggtgcggaccacgtgatcgcgcgagccataggggggtggggaaaaggccgcggcgcgcgccttctttactccaggcccgcggccccgcccacccggccacccagccggggcgggggggaggggggggaacctggcgacgccccgggcgcgcgtgcgcacgcggttctcgcggtgtctcgcgctcggccccgcccctccctccgccctgtctctcggcggcggcggcggcggcggctcgcgcagctcgtaagcaggcggaccggacggctggagctgcagccggtggcggcagcggtggcgcggggagcggtgaccggtgttggtttccctcctcggcgccgagtggggagcgggtgacgccccctaaccccctaaggggtcggcgggaggagtgcccccctcctcc

SEQ ID NO: 47088 - DNA, 576 bp, Mus musculus
  source 1..576: mol_type = other DNA
tgtgctggccagtgtgcaaatcacagcactctggtaacattaaaaacagagcagtaagaagtcatctaaagtacttttgagttttagccaaaccacctaatagtttgaaacacctacaggcgtcctttgtttgcaagaggcgcgacccaagccccagcgcgcgggagccggaagccgcgccacgtgacccgccgtccctccgcagccatcctccggggaagccctccgctccaccggagcggctgcgcgtccacccgacgcagcgcttcctccggaggacgcctcccggtccaaccggtcgccaccaccaccggaccgcttccgccagggtgcggaccacgtgatcgcgcgagccataggggggtggggaaaaggccgcggcgcgcgccttctttactccaggcccgcggccccgcccacccggccacccagccggggcgggggggaggggggggaacctggcgacgccccgggcgcgcgtgcgcacgcggttctcgcggtgtctcgcgctcggccccgcccctccctccgccctgtctctcggcggcggcggcggcggcggctcgcgcagctcgt

SEQ ID NO: 47089 - DNA, 282 bp, Mus musculus
  source 1..282: mol_type = other DNA
taagaagtcttagccagcaggagcccatctgggaaggaagatgtacctccccactaagagcatcttagtagagagagactgggctccctagagttcctttttgtttctgcacacccacaagctgtctgagaaacaataatgtgcatcttatacaaaatatagtccataggctgtgtttctctaaaattgagcctacagattatttgtctaaagtttatgcttgagcatgcctgggaaggccagtgagtaacctgcacttcccacccagtcaagaggactgag

SEQ ID NO: 47090 - DNA, 353 bp, Mus musculus
  source 1..353: mol_type = other DNA
gaatttcaggattataaaagcagatgtgaaattcttggaataatgcctgtcaaataatatacaccatgttaatattagggtaattattatgttatgaatcagcttcatctctccacctaggtattaagccagtacaatattcttagtatattgatggtagggttcatgaacactatttgtcaccggttccagtccccgggagctgcttggctaaccccattgggtgcacagggcaccggaaccggtttcaatgttctcctggccccaggtgcggtgggaaccaaggccagggcaactacgtctcttgcacaagccgcgcccaatcaggagcgccgagagctgcgccctgagcc

SEQ ID NO: 47091 - DNA, 351 bp, Mus musculus
  source 1..351: mol_type = other DNA
gctgcccatctaatcccttttctggtcaaggaaaaagagagcattgcaatattatttaatatataaggagctgaactaatctccactggtaggaatttcttcccttttgttttaggaaatgctttttttttttaagacttaagtattttttttaactaaatatttaaaattttcagttcaggtataagttcaagttctcaaaataattaaaaagaaatacttagcaaccttgcaagttcttaaccgtttgatatcttaattattctggttcaaacgcaagagtccagtgaatcattttcttgaaacggccgcgccacgctgattcaggtggcggctgcgctctgggccagg

SEQ ID NO: 47092 - DNA, 241 bp, Mus musculus
  source 1..241: mol_type = other DNA
agaagagaacagttttctcaggcctgagtttctattaactttctggaagttctgaatgtattgttcattatattgatgtcatttagttctccttgcatggcaggagtgggaactctgttaagagttagagcttgatcagagatttctaagaaaacgaaagcgcgccactggcaccttgccacccaagtgcctttgcccggaaagtctgtagggtgaacacagggttaagccagttccctcc

SEQ ID NO: 47093 - DNA, 219 bp, Mus musculus
  source 1..219: mol_type = other DNA
cgctaggcgttagtattccgccggtctccagactagttaaggccaccatccccttgccaaaagggggtgggggtggtcccatttcttagattacccagtgagaaagctgtatcaattggacgtcctagccacactctaatttctacagttaaagtttatggaagaaagcttgggtgcagcacaaagcggggtgcacttaactctctccagggaggacag

SEQ ID NO: 47094 - DNA, 340 bp, Mus musculus
  source 1..340: mol_type = other DNA
tatagccaaccaatgattagattgaagtttgtgatgtaaatgatttaaaaaaccgcaaaaatgtcagttttgaacgccaaatttacctggtaggaagatattcattcatgaatatattctttttgttccatttatgcgtatacaatgatacttcaatacttttggtagaatgtggaattaaatttggaaggaataatatgccaaaatagtctgtatccagacactattgtcttcaggatctcgagtgatcttcaccctagtgcctgctcccatcaggcagcaaggtgctttgtgatgtcatagcagctcctaagccactattagctgagaaggaccttgc

SEQ ID NO: 47095 - DNA, 378 bp, Mus musculus
  source 1..378: mol_type = other DNA
agacttcacacttgaggtctgcacagttgactattttaatcataaaaagtcacagaatgtcttgagttaagtatcacctgccagggtatttaacttcataagtgattttcatagtcattttttattcaagaaacagaataaaggtccgagtattctgaacctattgtattttttaggtctcgcaattcaaattactatatagcaacattttggacgagtaatcatattaactcttttaaggctaaaagaacaaactttgtcagctagcatttgctaagtgtatataagtgcacaattatgtaattacacgcagagaccggtcccgcctctttgacacagaagtgacacggctgcgcggacagctcctcagggaggcga

SEQ ID NO: 47096 - DNA, 263 bp, Mus musculus
  source 1..263: mol_type = other DNA
agccctctcttacatggggctatgctcatttcctgtgtagatgcctgcacagtcaatctaacggcagcactggagcttgctagccaccagtccagttccaggagtgcatactggtgacacagctgcatacacatgtgtgcatacatcagacacatacatatgcatgaaataggcatacatataagtattcatttataattaagatacaaaaagaatgggttatcaaagtaagccttctcattaaaaggctgcttcctcattgg

SEQ ID NO: 47097 - DNA, 547 bp, Mus musculus
  source 1..547: mol_type = other DNA
gagtccagctacaggtagctgggctaggcgcgcgatgagatcgcagccagcgccaagcgactcaggcgccgtggggacctgggttcgggactcagcggggtgggagcggtgaaaggaggtcaccccccccaggccgaggtctgcggtggggccgcggcaggcaggccctttcctccgcctcctgcagagccttccaggcagcaccgagcacgctgcggccgcgtcagtaagtagcagccgcgccctctgctcgctgtctccgcgcagcccggggaaggacaggtccgccaccgcccagcgacgagcccgggtgtccggggtccacgcgcgcccggcgttctcccgcagtggcgcggcacctgcagcgcgccacggggagggtcgccttagccgcgagctccccggggcgccgcgccatcctccggggcgtcgcccgggggcgaggagccgcggctggctctgtgctcagacgagcgaggctgacgtgtccgcccgagcgcgcggcccggtgtgcgcgcgcctgtgtaacacgcctttggggacccga

SEQ ID NO: 47098 - DNA, 510 bp, Mus musculus
  source 1..510: mol_type = other DNA
ttaccataaacccacctagggacctgagagcacagctgagggctgaagtcttccgagtccagctacaggtagctgggctaggcgcgcgatgagatcgcagccagcgccaagcgactcaggcgccgtggggacctgggttcgggactcagcggggtgggagcggtgaaaggaggtcaccccccccaggccgaggtctgcggtggggccgcggcaggcaggccctttcctccgcctcctgcagagccttccaggcagcaccgagcacgctgcggccgcgtcagtaagtagcagccgcgccctctgctcgctgtctccgcgcagcccggggaaggacaggtccgccaccgcccagcgacgagcccgggtgtccggggtccacgcgcgcccggcgttctcccgcagtggcgcggcacctgcagcgcgccacggggagggtcgccttagccgcgagctccccggggcgccgcgccatcctccggggcgtcgcccgggggcgaggagccgcggctg

SEQ ID NO: 47099 - DNA, 313 bp, Mus musculus
  source 1..313: mol_type = other DNA
gaaatccggaaagctctggaggttctagttgcaattgggcagagcccaggaatcaagaacgagcgggacagaatgctttctgcactccttcaaaatgaaccgatctttgtggctttaaagataaagttgcaatgcgcttgctgcaagcttggggacttgagttcgaatcacaggcatccaagttaaagactctttccggacagttcactctggataactgccaggatcccatcccgccggctgctggcactttcggtaagcaggagtgcctgggggcctaggagcacaggtccctgtgttgtgacgtcataat

SEQ ID NO: 47100 - DNA, 434 bp, Mus musculus
  source 1..434: mol_type = other DNA
ccatgtacatgtggaagtcaggcgctaggctagctagccagcaaacctctagccagttacctgtctatgcctcccatctcagcagagcagtgctgctggccttgcatgggatctgagctcaggtccttatgcttgctctaaaaccattttattttttttaatttactcattttaattagcacataaattatacctatctatgaagtactacacaagctttactttctagctaagactcgtagcagcagggcatatgtagcctgaagttgccacctcctgggtgcagggatattcaacccaaaatttgttctgcatacaaaaagtgtaggccaactaatgactggcccaatcctatgcttgcagacaggagcctagtcctctgagaggctccacccagcagctgattgaaacaggagtcaattagcctggactct

SEQ ID NO: 47101 - DNA, 334 bp, Mus musculus
  source 1..334: mol_type = other DNA
ttactatcaataagcatggttaaaaaaataatgtgttttgcgcgcccaccaccctcctccgatcacaggggccggtcctttccgagcacgtccgcccggaaacgtccgcggccgcaggcggagggttccggggcttcgactggccaggcaattctcctagaggaggggactcggagaagcgtgaacggcggccccccgctgcccttattcacagatctgtgtctcttgctgtgcacatgacaaacacaggaaaactagcaagatgaccagtattgtagttagcacttggtgatagaataaggggtggggtccgaccctcggccccacccccagc

SEQ ID NO: 47102 - DNA, 356 bp, Mus musculus
  source 1..356: mol_type = other DNA
gcagtcagcagttactaacatactgctgtagaagtttttaaaacttgtctttctggaaagaagggggagctctcactagagagctccattttacttgattatagaagcctgcaatctccttaaggagggaatcccaagacgttacgtttggcaatctacacaggctggggtgctgatgacctctgtggctgagtctcagacggtgagtctttgtaaaattgttaaggagaaaacatttctagttttactatcaataagcatggttaaaaaaataatgtgttttgcgcgcccaccaccctcctccgatcacaggggccggtcctttccgagcacgtccgcccggaaacgtccgcggc

SEQ ID NO: 47103 - DNA, 404 bp, Mus musculus
  source 1..404: mol_type = other DNA
atcttttttgttttgtttttaagcaaggtcaataaaacaatttggtgaagcaagaatagtctttaacagtcttttacgttggggtctttccaacttatcgatatcatttaagacttttagggggataataagtatacatatgtgacctttagtttagaaacttgtgtttcaaaggaaattgccatctgagatgcactcagtgcttttgtatcaaacccaaggcagcatgcactagtttttcctcttttaaaactgacaccattctgattggaattccagggcagtactgtcatctactgataccatcaatatgaagctccaaaattacccaacacatgaagtaaattccttgggtgtctgatcagccaatcagaagtcaggattattttgtatgtaataataga

SEQ ID NO: 47104 - DNA, 440 bp, Mus musculus
  source 1..440: mol_type = other DNA
tcacaagaattgtggagtgtgccaggcatctgactgagagctgtatcgctgctgagaaatcccagtacctaggaagctgagactgagattagtgttgtaacactagagggtgacacttgccagtcttgctacctgcagctggcagccctcaggaggcaggtgtaataatagtacatcttctagaaaataatctcctttttgtcatttgataatatatatctcaatcccatagtgatacttggggttagatttgaactcgatcagggctcataatgttgagctatactttcatcctgattacctgtaaccccgtaggccatcagagcacaggttccggaccccgcccccctgcccgggacacacacgcgcgcgcgattgcgcgcatgcgtgtgtgctcagacgcatgcgcgttggctcccacttgcacgggggcgccagca

SEQ ID NO: 47105 - DNA, 275 bp, Mus musculus
  source 1..275: mol_type = other DNA
ggaggctgcactgcagattagcctaggctgcatggcaagataacaagtgaagcaaataatttctctttttggtttccgcatttatgtttctagagtcagaaatatgacacccgtaagcaaccggatggttgctattttaaaggctgtggcttttcaaagttaatgcaatctattgtcattaaaagaacacttttttgccagcaattctttgcaaactctctggctgaggtcggctctcagagctgcggacacctccttagccaggccccgccgtt

SEQ ID NO: 47106 - DNA, 508 bp, Mus musculus
  source 1..508: mol_type = other DNA
taaaacattgtgttgaaaaaaaaactgtacagagagaaattcttattctacctcataaaaattatatgtagctagtgattaatatttcacgatgtacggcaacaaatatttaattttttctaagcatacatagatgttacatagtcaacatctcttccaggagtagtctatttaggccatctgatttcacaattactttaaaacatgcccttcttcattttaatcaagagataattgctgctatccaaaacagcagctgaacaacagtagtaacaaatccaggactatttattaggacagtgtatctaatgtgtcaaaagcacatttgagaataaagtgaacattctattctggtgttattgggattccccagagattcctgtgagcagggagctctctgattccgctctactccgggaggggcggggccacctgagaggtggggctagcgcaggggaggggcggggccgcgcggctccgccctcccgccactcagctgggctcggga

SEQ ID NO: 47107 - DNA, 393 bp, Mus musculus
  source 1..393: mol_type = other DNA
aacagtgctgcagttttaggtctaaggctcattagcccgagtaaatgttataattaggaagttttcagtgtgttagaaactcttctctatgcctgacaagcaattcattgcttcttaagtgagaaagcagaaagtcctgatgcccactgactgtcagctatgggatcccagccacctcaatttatctaattcagaaaattgcgtgatcctgtcacgttgatcaccaacctgaagagcactgctgggtctagacagcctcttatatgctctgaagggaggcacagaagtttagggcctggagccagcactgagtcctaccttacatgacctgtttgctcaggagtctgcacacgaatcattccagggcttctgactctagaccaaggctgtgtg

SEQ ID NO: 47108 - DNA, 349 bp, Mus musculus
  source 1..349: mol_type = other DNA
agctgggtttcagcccagttcacagatagcagggtgtcctaggcagccggctggtgagccttgagcagtgggtggccctccgaagccaaggcaacctaggctggggatcagggagagaagtggagtcttctctcttcacttgtaaggcaggcggccggggtaaaagcgctgcggcgacacgttgccagctgcgcagcaccgcccgtgtggcctgaagcaggggagagggccggccacgcgccacctgcccggctcccctgggtccctgggtgccgcacgggagcccgggaacccagcctggccaaagggcctccctgcggacccgcgccgcagctcggggtcgcccagc

SEQ ID NO: 47109 - DNA, 269 bp, Mus musculus
  source 1..269: mol_type = other DNA
cactctctgctagtttcctgttgaaagaagagagaaacagaaagagctctcaatcagactagaacctcctttgaaggtttcctttgaaacggtcagcctcacgtcaggcatataaacattcaaaaaaacgggacattccgtttaattgtcctagacaacttgcagtttaaaaatgaatctttcagaataatcaaaaagagtttattgtaaattgcggggccaaggtctgggagcgggccttgaggccccgccccatcgttaaagtccca

SEQ ID NO: 47110 - DNA, 343 bp, Mus musculus
  source 1..343: mol_type = other DNA
cgagtcagtctttggttggagtactttacagacagggacatctgcaaattatcagggatgcatcctttatgttaaatgaattaactaacctctatatcataagatttttatttaaaagaattagatgacatacagaaagtgctttgcacatctcctggaacagaggtgtttcctcgtggacctcacacgtgagaccgcgccgcggaggcggacgcccgctgcaggtctcctagcaacgcccgccccgccccgccgggcttggagcgccggcgcccgagagcggggaccggcaggccatggttgccatggcagcgcagccgccgcgcctgatgctggcggcttc

SEQ ID NO: 47111 - DNA, 323 bp, Mus musculus
  source 1..323: mol_type = other DNA
taacgatggggcggggcctcaaggcccgctcccagaccttggccccgcaatttacaataaactctttttgattattctgaaagattcatttttaaactgcaagttgtctaggacaattaaacggaatgtcccgtttttttgaatgtttatatgcctgacgtgaggctgaccgtttcaaaggaaaccttcaaaggaggttctagtctgattgagagctctttctgtttctctcttctttcaacaggaaactagcagagagtgggaaggggaagcggctggctagctaggcggcggcgccggcgagtttgaactgcgcgcatgcg

SEQ ID NO: 47112 - DNA, 307 bp, Mus musculus
  source 1..307: mol_type = other DNA
ctggttcttatgaatacagagaataagggagggaggccaccattgtttggctcccaaagtcctaatggtacaatgacatgtcattgcatgcaaattttaccgtctacaaccattcagatgtacttgagatgtttcttaaactagtaaaggtaattgggttactcaccctgggtgtgaactcaataccctctatgtcaccaaaatcatttgcatctattcaacagaactgcaagcttctctggtggctaaactgctgggaaccaggtgtgtctggagggcacgcagcgccctcttctggcctgagagg

SEQ ID NO: 47113 - DNA, 451 bp, Mus musculus
  source 1..451: mol_type = other DNA
gccggttctccgggagatgggctggcagggccggcacgtgaggctccctgggaggatgcttccggtccgccctcgtgctgccgtggagcctgtgtgcccagcagagatccgagccggctgatctgcctcttcgcactccagccatcacagcttggaaagcaatgctccgaggaacccggaccttgttctagggagtttgccttgaaggcacgccacgccccctccccaatctgagccgaattaggagctcgggtgaacccgggtcgcccgcacccgccttaaggcgtggggagctggctacacaggaaccaccgaggaggcggcggcggccgggagatccacgccgccttggggaacgcgcggcgggcatgggcgagcccgcacgcagagcaggctaaggtcggcagagcacatcctccccggggcgtgggcacaagtccgcgggcagcaa

SEQ ID NO: 47114 - DNA, 376 bp, Mus musculus
  source 1..376: mol_type = other DNA
ggagtactcaaaatatttgactaaccagttcttttgttcaaagtagctgttaattagggagtcagatttcctatccctcaaactcttacttaggaataaagctaaagaatttatcgttaacattaataacactaattaataacaatgtgtaacacctgcctggggccccaagccccagtttgtgtaagtttgcacatcacgtgcttacaggtgccctgaatttagatctctttcggcaaagaactattttcaagagagcttcccaattataattttgcatccttttaaatttctaaaattttcatattttccccgatcattgtcttaagttactgacaaaagcccatgctcaacttcgcccgtgaggaagttggtc

SEQ ID NO: 47115 - DNA, 268 bp, Mus musculus
  source 1..268: mol_type = other DNA
gaatctcaaaaatactttataggtaagtatatgcatttattgtcaaagatttaaaatgacaacttaacactctaatgtagatgggacttaaaaggggtttgcccccacacccagtttaaagccaccttttaaatgcttcttatgggtgaaacaattgcaatttgtacatgtatatgtgtacgtatacatacactcacacacacaatcaatgaatcttacagaatttgattactttgatccagtttaaaaggcgcccaggagttaagcc

SEQ ID NO: 47116 - DNA, 465 bp, Mus musculus
  source 1..465: mol_type = other DNA
tttgcccctatctctggagcagagaaatagtttgcagctcgagcaagatgatcgaatcctgtcccgggtgcccagcccaggcaaaccaagcagctttattagggcgctatcaaaacccctcctcccccgtgaccaattctgcccggggcgccagcctcgcagagcctttttcgactggtcaaagccgtggaaaaacctgagccccggcctgcgcgccataggcggagccgctccctccggaaatccgccggttacccggccaaccaggggagccctccacgcccgccgcggcttgacgcattgcaggtgcggagcggccaatcaggctggcctatcagagagtccttgctagcgagtgcgttcggaggggtgtgtggccacagccgtgtgctcctccgcggactcgcccgcgccccgcccggaccccgcccgtcagagttgcggggtgtgagtgaccaaaaatac

SEQ ID NO: 47117 - DNA, 443 bp, Mus musculus
  source 1..443: mol_type = other DNA
agtaaatttaaaggttaaaacattatttaaggactataattaagattgtaattaagatagtggagcaccctactagaatcaattcacatatatcaatttatgaatttccaggaccaggacttcaagcatctttaaaattttagtaggtatgtaaaaacacgaaaactagactctccaggtcctcccctgtgggggacccaggattggtggctctgcaacctcgaagccaccaggagtgcggacacgcgcctggaagcccgggacggccccccagatttcgctagaggactcttgcccccagtgacccctgcccgcgtaatgggcccgccgcgccgggcgcgcctggggggcggagccttgcggtgaggtccggctgccgcagcgccgccctgcgcgaggcggtactgccgcggcggagggataccgcgcaccgtatatatatc

SEQ ID NO: 47118 - DNA, 519 bp, Mus musculus
  source 1..519: mol_type = other DNA
tctaattctggagaaagttatacaaataacaaagaatcatagatacagattatttattttagatttgaaatatgatgtaattgcttatggttgttttaataactcatttcagttggaaaattcagtgtatacttatggggtagaatataatgttcccatttatttatacattgtacagagatttactgaaggtaatagtctaacgtgtttatcacttcactgacttttctgtagtaaagatgaaaagtagcaatattgaaataaacagtacattattatttatttttttcttttcgaccaggctggcctcgaactcagaaatccgcctgccttgctggggcggcccggctatactgcttacttttctctgagctcaaggctagcctggcctacatattccaggacagccagagctacatagatttgacacacatacatatgtacatgcaggcagaatactcatagacatatttttaaaaacacaaaacatgctatcagggtttggcacatgcctataat

SEQ ID NO: 47119 - DNA, 399 bp, Mus musculus
  source 1..399: mol_type = other DNA
tgcgaattccagcactgggaggtggtgctagacgtaccagggggtgctacctgtatttaatttttaaacgtaatttagttatgcccttaattaaagcttgtgtggagggtatttaaacacaaaattcatttaatttatttagtgctacagagaatagtatcattcgtttgtgggaggaccctcagacgcgcgcgagcgcaaacacgtgggtgacatggcggaccaagcggtccaagaggtccggagcgcctcctgactactagatactgtttactaacagaaggcctgcctgcgcgtgcgcaacaattcgagcagcggggcggggcggctcctgaaacgtcagggaacgggcgctggcagacgcgcgcgcgctgcgcccaatagcgctggtggctcagg

SEQ ID NO: 47120 - DNA, 434 bp, Mus musculus
  source 1..434: mol_type = other DNA
atatagtaaagccgaggcctttgctctctactttattttgcttaattaattcatttccatgaatgggctatgaactttatacccactttgaagcaaagttgtactagttactgaataactcagttacaaggtcaaggcctggaaatgccacttatgcacttaaggaacttcgggcaggttctggaggagcatgaatctccactgcttctggccacatggcaggccagcacaagcaacctgcgatggcagggccagccgaggcaggctcgcccttcacgccctcccggcctttggagccccagagcatcctcggggtggctgccctggcctgagcgtccggcctccgccccggcccgctgcggctccggccctggccggcaggggccgctcctcgcggcgcccggggccccgccgcgcccgccgccgcccgctcc

SEQ ID NO: 47121 - DNA, 374 bp, Mus musculus
  source 1..374: mol_type = other DNA
tctctgtcttataacaaagggcaaggctcctccaggaggaagagaaagcagaacctgctcttcctcagaacaggcctgcccgtgtctttcaagcatagtctgagtgctagagactatctgcaagagcctgactctcgcccagtgcagtctgacatttggacagcacagacagcaatcccagtctgaattaccagggtagttgtgaaactcctcagggcttacgtgagttcctaggtctggtcatgcttccttgctgcccggggaaagcaagaaactcccgcaaagggaagtaaccttagagggctctgtgaggactggcatcctgccatggaagtctccaccccagtacaggccttgagagcattggctgcagg

SEQ ID NO: 47122 - DNA, 321 bp, Mus musculus
  source 1..321: mol_type = other DNA
cccctgacatcagcctcagacttcagtcacagctggagaaccttctacagtttagccagtgtagtaagctggcagggctctgcgcttggagctttaaggttcaacttgcactggcagaacactgatgtccggacaaatacattaaaaaaaaaaaaaggctccaagtgttttcttacagaggttaggaatgccaacagtcagttttcctgtctccaggaggtgctagctaaaatttgggtactcaacttttgctgagcacctgtcttaagtcaagatcctcccgctggcgggttcctcagcaaaatggagagcttccagctg

SEQ ID NO: 47123 - DNA, 396 bp, Mus musculus
  source 1..396: mol_type = other DNA
aagcatgggtctcgcagacaggcaactgcatgccagcaatcctaccaggcagagacccacaggagcccatcttttctctccattataaatgggaaaaatacgtagagttaatcaaatcaacacgtttaggtgcgtatagttttccttgatgtttccataaaaccagagaagatacccgctggctctgggacagggtctgggatccagaggctaagccccaagcttcagaaaggctctctaccttcctctgggtttcagcgtccctgggagcgcctgtggctgaagaagtcccctagtgcttcagcagcttggcttcttccgcagagccagtcttgggggtgctgcacctccgggaccggcgagcgctcaggccacctcggcccttctagcaggcgc

SEQ ID NO: 47124 - DNA, 406 bp, Mus musculus
  source 1..406: mol_type = other DNA
taaggcatagttcacccttctgccctcaggagccagaatgggccatcgccacctctgaggagtggggctcctgcagctgactcagtatcttgtgatacaggtgacacagtggactctggcaggtcattccaaacttagctgccctgagacatgtgtctgcctgacccgggggcccctccaaggagcacagcgggggaccgggaggggaacccagcttggcactggtgctctgcctggtctccactgtcactgttgagggggggagatggctggcctagtgacctatcccacccacgccgctgtgaagactgtactctcctcaggccactgcggggcggtgaggggagagctggccagcgccgccccacgtggggcctgcgctcactcaggtccggtcggtgcgggt

SEQ ID NO: 47125 - DNA, 522 bp, Mus musculus
  source 1..522: mol_type = other DNA
ttgccagtatactgggggctacagtctatttattaacatgtcatcagcagatgtcacagccaaagggtagtcattgagatttggtgagaacgtggggctgcaggcctccaagcacacagcccccgccagcagggggcacggcgtccatcgcgctgggagcccaggctcaaagctgccgctgcgcactgcggccgggacgggctctcccgcacggcgtgctatggggggcgcacacgcgtggggcggccacaccgccagcatccatcctgaaggaacttcaggaagtctgtcgggcccaggtctgcgcgcgcaggctgcacctgcccgcgcactcgggccgccacgtgctgaggccccgccccacccccgctcccccaacgcgcacccggcccggtgcggctcctctccgctaggctgcgcagggcaccgggcgaccgaggagggaccgcgtcgcccctccctccccctcctcgcccccacctctcgctctccccgggcgggcggggccgcagccgcgcaccg

SEQ ID NO: 47126 - DNA, 367 bp, Mus musculus
  source 1..367: mol_type = other DNA
aaaaaatctttgaaataaatttgcaatatttcagacatgaaacagctacaaatagttctcaactgtccaaaaacaatttgaagttttggccaatatgtattttcttccaagagtgaaattcagagaaaatattttaaaacgtgaaaccgttatttcaaacaaccttatctttgaacactgaagactgtttcaataggaagacctacaaagtctttctttcttagcaagctttgagttcaaggctagcctggtctatagagcaagctccattttctctgtctggtggaactgccagatttatagaccttattgcagaccctaaaatctgaaagatatggtgactttctcaaagtgtgcaacagctatg

SEQ ID NO: 47127 - DNA, 411 bp, Mus musculus
  source 1..411: mol_type = other DNA
aatgattttatagtgagggccttttatagagggccatactgctaaccactccatctagatgcttgaaaggattgcattctggtatttagaaacagcaactgctttgtttcagccagtcagagcaacattgtgaggctgtgtttcaaaaaaaacaaaaaaacaaagaatttcatcttattcataaagatgtgttttgttattttgtttaaaaaaacaaacaaaccagccttgagtgctcagaatgatcccggggagcagtgccacgcgtgaacaccgcggggggaggacgaggaggacgccagcagcccgcgcccccagggccgactgcaaaggtcggatcagagtccagtctggctccagaagccctccacaccccttccccgcccggagccgaggtggacggacgcacac

SEQ ID NO: 47128 - DNA, 473 bp, Mus musculus
  source 1..473: mol_type = other DNA
aaatctaataggttcagaaacttgtgggacaacatcttgccttccataatttgtataattcaattcctaagaagaaaattattcagggctttcaacatttggcagacacaaatatggagctttaaatttaaagccaacttcctatctagaaacgatggtgtcaagtgactttaatggtatatctgacaaaactgtctttcaaaacttaggtgactaataaaattgttagaagtcacaatatgtttagaaaagttgtaaaaagaaaaacaaaatgtgtaccgttgatgactgcatggaatttttggcagaaattgatgtctcatggttatcagttggaaagcctatgttataaaaatggtagtgttaaccaactttatttgcagtgtgatcacagtccaagcagactattttgtagtcatatgggtatcactagtatagttttcaacagagagttgctggagtgtactccaaac

SEQ ID NO: 47129 - DNA, 456 bp, Mus musculus
  source 1..456: mol_type = other DNA
tgaactgaatctgaaaaattttagtttatgttattaatttacatgcatcacagaggccagaatcccctgcaactggagttatagataattgtcccgtctcctcccccccccccccgggggcgctgggaatcaaatcccagttgtctttaagaaaaccactgaaaggtcttttcagtttataattaaacgttttataaagcattaaaagtcacaaaaaaaccctctgttttgaaaaagactgagttttaggggagccaacaggtcttcaagctaggtcctgcttagaaaccaagacagctggagcactattgttctaggttgagtgagtgagtgagtgagtgagtgagtgagtgagtgagtgagtgaatgaacccggcttccccaaggagggccggggctgtcctggagaccggtacctctcctgagcgagccggggcccacagggccgtgaggggc

SEQ ID NO: 47130 - DNA, 275 bp, Mus musculus
  source 1..275: mol_type = other DNA
taaaacagtgttagacagagactcgctggcatctctgagagcctttcaatgggggggggggggactctgcccctttgctttctgaactgtaggtcgggcagtgcccgtgatttaagcctcgggttgccccctcgcacgcgccccgctccgccctggggaggccgggcgccccccagccccgcgctctgacgggctcccctcccagcgccgagcacttggtttaacatacttagaaaatgaagtgttcatttttaacattcctcctccaattgggt

SEQ ID NO: 47131 - DNA, 364 bp, Mus musculus
  source 1..364: mol_type = other DNA
caaaaaaaataatttaataggacgtaagtactcttcgattagtcacccagtatccgcattctgtggctcacagagaggagtctccagtttttttctttgaagtaaagcatgattataaaattgggttaactagtatcatagcaatactacttgtcagtgagtctgcacacggaaattctgtgcacatacagttcttcccacctatttttctttcgagacagatatgaagctcgttttccttaagtactcaataagcatcctaacactctacagtagatattatattaagacttataggcttggtaaagtactgcataactttccacagaaaatctctgatactttagagtcagttggaaattcc

SEQ ID NO: 47132 - DNA, 367 bp, Mus musculus
  source 1..367: mol_type = other DNA
taatcctaaaggagatgaacctaaatgtagtttattcttagccatttcatacgcccatagtaaataaatcaggtcagttgacctctgagcttcagatcaacagcagtctggctgctctagttcagtctaacgagattttagagtaagagtccgtttccttaaaacagtgttagaaacagagactcgctggcatctctgagagcctttcaatgggggggggggggactctgcccctttgctttctgaactgtaggtcgggcagtgcccgtgatttaagcctcgggttgccccctcgcacgcgccccgctccgccctggggaggccgggcgccccccagccccgcgctctgacgggctcccctcccagc

SEQ ID NO: 47133 - DNA, 263 bp, Mus musculus
  source 1..263: mol_type = other DNA
gtagacatgttaaatcatttgacgactatatatactacacttaaaaaccaaaatcaagctgaagtccaattccttgttctgggacacggaaatagatatctggtgaaaattattcacatgggatcccagctgcgcaggtgggaagagccaccgccgccgccactgccttttcggtctccacctaaagttccgcaggttacgcggaagtcacggatctggctggccctgacggtccttcgcgcccgggacgcctctggcagcgg

SEQ ID NO: 47134 - DNA, 418 bp, Mus musculus
  source 1..418: mol_type = other DNA
ttaaaaatctttaaccctcctatgtaaccctggctacaggctggcatagagcagctgtcttgaagaacctaaaatggttccaccatacagccaactatgttggacagtgtgctatttctttatttgtataatattacaaaagacacacacacatttaaattgcgcttacaactggactattctaagtcagtcctaactaaacattagctatagtttttacacaaatattaggtatgtggagaagtcttcagtggggctgcgaggattctcttctagaaccctagaattcctccgcacagcaggcggcgccgcagcatcacgcttgccgcggggaggaccaacgccgcccaggtcacgtgtcccgtgctcccgggttcgcgtgcctcgtgacgtgcgccctgctggagggggctgctcc

SEQ ID NO: 47135 - DNA, 393 bp, Mus musculus
  source 1..393: mol_type = other DNA
gacagtctttaaagccctggctgccctgcagttctttataattattagcagaaagccttgtttttaaaaggcaaatggctacgtgcgacgaggagacagacgcctgggcgaccgcgccccgcttctggatagcctagtcggatccagcgcgcaggggtcaccgaaggcgaccctgtttccccgcatcaccaccacgggtggcgccggggtccccagacccaccttcagcctggtgacaaggcgaccaaggacagccgcagggagctaggccactggcgccggcggaagccgtgacctaaggagctgccactcgccgcgccagccctgatgagagggggtggcgtcggcaaaccggcgcttctcagatggtgtcgcccgggtcgtccccgcctc

SEQ ID NO: 47136 - DNA, 413 bp, Mus musculus
  source 1..413: mol_type = other DNA
tcgaagccagaagcccaatcttccttcggcctgagtttacactcttgttaatattttaagttcttgttaagtgaatatttacacttatactataagtaattggaactggtgagatactttaaaaatgtcaattctcagcaaccacatggtggctcacaaccatctaaaacagtatctgatgccctcttttgcatgcaggcatacatgtaactcatacataaataaatatgtttttaaaaatataaaagaaatgtaaatacattttacagtaataagtatttattataataaaaaggggcagtttaggagattgttctgatctatccattacccaacaaaaaaactcctgttttatttatatgacaaacaactaggaatgtgtgttcttgcacaaatagttgacaggactgccc

SEQ ID NO: 47137 - DNA, 433 bp, Mus musculus
  source 1..433: mol_type = other DNA
gaggaactgccaaggctgcttcccaaatcagctctttcctctcacttccacaggctgatttggaggaaatagggtgtgtggacactctagcactcctcagcagtctaaataatgcccaggcgggtctcactagaggagacatttttgagtgtctgtactcagcacaggtgccttagatgtcaggcttcatggacgatatctgctttgttaaacagtgatcttatcaacagaggccccgccctcccccgggatgaaggaggtcccatttgggccgtgggcaggctccgggcggccacagtccgtgctgtcctcgaccccggcaccgcccgccgccaggcccggccctaggggcgcggcccggcttccgcgcgccccagggggctccctgctacgagcagccacggccgcctcttcctgcgagccccgcgcgctg

SEQ ID NO: 47138 - DNA, 369 bp, Mus musculus
  source 1..369: mol_type = other DNA
accagttagttcgcgcgacttctcactcactgtcgggtccgaacgcacactgggaaaatcaggctgcgcaggtagcccgggctcagcgatctgtgttgccgcagctcaatcacagcggggcggactctagaggtggctgctctgagtctgcgcgacgcccggaattcccacggttctgcagtcaccgcggcgatcacccgcccaggtaatcggggaccccggggaggacccgcgcctgatgtttttaacttgaatcagtaccccaaatattcctggcgagagctagtgggtttcagggaggctcacatgctccttgatagtgaaagctagcctttgtggtccctggccccatagggttaggagacccta

SEQ ID NO: 47139 - DNA, 343 bp, Mus musculus
  source 1..343: mol_type = other DNA
ctaagctggcagatgcggctatgatcttatgattcactggccagcagtctagcttgaccagtaagccccaggccaaatgagttggccctgtttcctggtatactcgggcaagactggaacttgcatatagagtacctctccagctcactgtgacaccgaacacttgggcctgaaaaaaattaagctccttgattgtgatcataggccaaggcagaccaaaaaaaaccccaaaacaacagtcctttgttgtgggtggaccagttagttcgcgcgacttctcactcactgtcgggtccgaacgcacactgggaaaatcaggctgcgcaggtagcccgggctcagc

SEQ ID NO: 47140 - DNA, 413 bp, Mus musculus
  source 1..413: mol_type = other DNA
aaaaattgtattcttttattttttattttatgtacaattctttttttcttttaaagatttatttcatttatatgagtacattgtttacatttcaaatgtttttaaaattaggtatttttctcaagtccaatggggtgctttgtgaatgaactcagaactcagaactcaggccgttagtcctggctatcagggattagacagttccagtctctgcctcgaaatcctcacgtgtaaaacttttgaaagggagcagaggcctgggccggctcatgccccgcccagtttggcttgggcccgcccctgtggtgctcgggaccctgccccccgttgtgggcgtgctccgcaatgttgtggaggccgcgtgccggcggcgttacgtcacacgcacgctggcgcggcacccggttcggcgg

SEQ ID NO: 47141 - DNA, 438 bp, Mus musculus
  source 1..438: mol_type = other DNA
ttgtttacatttcaaatgtttttaaaattaggtatttttctcaagtccaatggggtgctttgtgaatgaactcagaactcagaactcaggccgttagtcctggctatcagggattagacagttccagtctctgcctcgaaatcctcacgtgtaaaacttttgaaagggagcagaggcctgggccggctcatgccccgcccagtttggcttgggcccgcccctgtggtgctcgggaccctgccccccgttgtgggcgtgctccgcaatgttgtggaggccgcgtgccggcggcgttacgtcacacgcacgctggcgcggcacccggttcggcggcagacggaagggggcgtggcctggcgctagggccccgcggccgccggcgccgccgcctgagtgacctgctaggcggccggcggcgctcagcttccggccactcag

SEQ ID NO: 47142 - DNA, 262 bp, Mus musculus
  source 1..262: mol_type = other DNA
atgccagtcagtgccaaactgtcatccagataccaggttcactgtggccctaggcccaggctgcacggggcttcccatgtggtctgcccagggtgagagagcctaggacccacccatgtgtgggttggaccttcagtccacacactgaacgtgtgtgcagggctctcggcactgagttcaagaggcttctgtgggacccgctggatgttccagggagttctctctggcaggtggagtttcagctgtgccaccttctgaagcc

SEQ ID NO: 47143 - DNA, 589 bp, Mus musculus
  source 1..589: mol_type = other DNA
caaaaattgtctttatttccaaagccagataaaatgtctttctttacacacgggaagcatctaagtggacaattgcaacgaattgcctctgggggcaatccccgctgtgctgccaaggagcaacgaagcccagtgtagcggcggcgcctttaagactcattggcgccccctggcggtaaccggcgcttcctcctccgggagctctgccccaggccccgcgtgtgcgtggcgtgtgcgcgggcgctggggcaggaagggcgggggacacggcggcgcgctccccgagggggtccccgcgcgtccgagaggcacgcgcgggcgaaccctcgccgcgggagggcgtgctccagctcgggctcgaggctcgggtgcggtctcgggcggcggcccgggatccctagagtcctcgagcggcgcacggtgctgcggggcgcacgtccctgcgcgggcgagccccgcggggcggagggggcggggcggcggcggggcgcgcccacccgcggggcccagccagtggcgcggcgcgctgagcctccgccccccagccgccgccccgccccggcccgccccgcccgccgccccgcccggt

SEQ ID NO: 47144 - DNA, 599 bp, Mus musculus
  source 1..599: mol_type = other DNA
aatgcaaacacagaaaaattattgttaaggtctaataatgttgccatggcaactattccaagtgcacatgatttaaattcaagagttctgaaaagcacgagcattttaagatttaacagctgtaaacagcttacaggtggttttatataacagttgtaagcacataaaaatactggtttcagtgtctactgagaatgaatcagagtcgttaaaccaacgtcgggtaactctttcaaacacttacagtggtcccggtcaggtgcctttgaggtgagcgcggcgctcagcgtgactacggctggtcacgcggcggcggcgggccccgtcgccctccggagccccaggcggggggaaccacctggagatgccgggcccgccccccactgcacccgccgccgagctgagctgggcagtggcgccaggcttggcctgcagaggcccgagctcggctcccggccggacgccgggccagcctgacagccaagccgagcagccccgggtctcaccttctgagtggcgctcgcagtcccggataccgccgcattcagagcttccgtctagggccggaaacgcgcgccggcctctcatgacgtcaggct

SEQ ID NO: 47145 - DNA, 430 bp, Mus musculus
  source 1..430: mol_type = other DNA
cctcagatactgcagggtagggatcattattgggtatcaggaggcttaaagatcactctccagacacctccttttgcatttccttggggaccagggcactgccagtagccctaagggagcaaggccagcctgcagggcctcctctatgtctgccactccgcaggtcggagggatgccggcaaccaatagtgctaccagtcttctagaagtctcagtgtcatggtgctcagagtatttaaattctaattcgaccagggcgccgccgccgccgccgccgcttacagtgatgtgcgtgctcgtctctttaacacgcagcggggtttaggagagacccgggctccccgcgcccgcctcccggccgagggcagaagaactctggaggcggcgcgaagctgacagcctgacgtcatgagaggccggcgcgcgtttc

SEQ ID NO: 47146 - DNA, 360 bp, Mus musculus
  source 1..360: mol_type = other DNA
aaatgtacagtatctggaggaccggagcctgcagtgccgccgtgagtgggcccggccgcggccagcgggaaacagacaggacggcgggagcagccgggccgcgcgcacctgcgagtaggagcacttctccgagtcgctgccgttcctcgagcacgtccaccagcgacaccacgggctccagctccgcctggcactcggtggggctctcgaactgtcaccgggctccgctgcgtgggcccaggaggaggcgggaaaagtggccgccgccaggggcgtcgcgagaaggcggggccccgtgaggaggcggagcccgaggcgggccaatttcgggaaaccgcccgccccggccgcaggctggct

SEQ ID NO: 47147 - DNA, 295 bp, Mus musculus
  source 1..295: mol_type = other DNA
tgaatgcattaatacatgaatgaaacgatcaattaatttaagaataccaaaaagctaaactaaaaagaactcttttactttcgattgcaagggagtcaaccagtgtcccccggcgccggaccacgcccgccgacaggctctggagagggtccgcgtctcccgacgcctcacaggacactcgtagccgctgcggctccgccacccggaagcggaagccagcctgcggccggggcgggcggtttcccgaaattggcccgcctcgggctccgcctcctcacggggccccgccttctcg

SEQ ID NO: 47148 - DNA, 240 bp, Mus musculus
  source 1..240: mol_type = other DNA
tcctgggtatatatccagaagatgttcgtggtacatttatacaatggagtactactcagctattaaaaagaatgaatttatgaaattcactgaccaaagtgtggacactttgccccttcttagaattggtgctgaaggacccagatatagctgtctcttgtgaggctatgccggggcctagcaaacaccgtgtctctagctgcatatgcaatgggccccatgtaaatgaaataaatacct

SEQ ID NO: 47149 - DNA, 432 bp, Mus musculus
  source 1..432: mol_type = other DNA
atctgtgggcacccatgtggcgcacatacgtgttttgtttgttactgcctcgctgtaattatggcaaaatcacaaacaaggttatggaagagatctggctctcccatggggaaacttttcagtatcttttttttctcaaatactaggtaactagcaaagtactacatataaaagtaccaagaaaaatagttttagaaattcttaccaggaaggaattttcctccggatcgccggtgggtggcggctgccttattccatttactgtgcaggatgctgcaaccctccctcgggcaggcagagccagaagaatgcgcgcgcactcgcctcttggcctgagcccctcctccccaagccggcgcgccgacgtcgggtcacgtgacgtgggcgagccgacagcgggggcgggcggggccgtccggctccgcagagcgg

SEQ ID NO: 47150 - DNA, 257 bp, Mus musculus
  source 1..257: mol_type = other DNA
attgaaggcgtgcactatcactcctcaggttaaagctggcctcctgctctaaccttagcctagcatgcagggctggaattattgttaagaattagtttacagaagcaaggctaaaatagacgcacatttactttgcaaaaaaataccaggaacacgatctatggaaattttaatttatattctagagcagtgtaaaaatggtatgatatctgctatatagctatatggcttgagtggatggtgcgcatgctcaaacc

SEQ ID NO: 47151 - DNA, 296 bp, Mus musculus
  source 1..296: mol_type = other DNA
gtacctcaaattgttcccagtgttttgtttttaatagtcaaagatctggataattagtacttttctcagggaatttactagtatttcctacatatcattcttcctgagatggaagaacattgattttcttcatattaaaaatagctcatcaagaacagagtctgggatctggttctcctaaaccggactctccaggagtcttcctattaatgagaggggcttctcccaggcgcccagcctggactgcttgcgaggagcacacctgggacctcccatcgctgctcagcagcaggaga

SEQ ID NO: 47152 - DNA, 634 bp, Mus musculus
  source 1..634: mol_type = other DNA
ggctttccctgggctagccagcaccatcctagctgcgccgctatgatagtgtggggtccccacttcccgcagcctggggggaagcaggttgccactgtcactgggggtgaataaataaattattaagcgcccaatcactgcagcggcgctggcggccgcggcagcggggagcgcgggcgggagtgcagcccgggagggaggcgggcgaggctctggctccgctcacgtcctccgcccgcggccctgctgccggagcgggtgctccgggccggcgcctctcgcccgctgcctcccgcgggccccgggcaccctgcgccccgggcagccgctcggcgccaccaggaagggcggggaccggggcggcgcagggacccgtggctgggctgaaggaggactcctgcggcccgctcgcggaggacccgaggacactgcctgggctgcccgacctcggaagtggccgcctttcccggcccgcgcgcggccaagcggagcctggagctccgtgcgagtgcgccgcgccccggtctcccagatcagctgccctggaggccccccgcgctcgtcctctgcaagtgaagcccccgagcgcgcgcgcagccgccagggtgagcttagaggccccgcctagagggcg

SEQ ID NO: 47153 - DNA, 349 bp, Mus musculus
  source 1..349: mol_type = other DNA
tgtcccaaacagaatccacaatggggctggtccttttgactatctgagatgagacaggtgtcaactatctcattcagttcccctccttggtggtggccccttcaaggctcatccctgccggccgcagggactcccctgtagaagcatctgcaggtgaaggccagggccccccgccaacgtggccggcaggttccccaccgagacccccgcaagcctgacgagctggcgtgcagtgagctccgtgcaggctgagaagccacagcccttggtgggctgacggagctggggggccctcaggccaatcaggagcgccacattctttgccgtcacaaattgtcaccatggggac

SEQ ID NO: 47154 - DNA, 299 bp, Mus musculus
  source 1..299: mol_type = other DNA
ctgagcggccctgcttgcagccctgccggcgttggcacggtgacagtagccaagtgtgcaaacttgtgccattgtccctgggccagggggagactagctaatatgacacaggaaaatgtttgctgatggcaacaaacgcaaggggaccgtgcaacgccacccttttgtccggccgcactgaatgggcaattcaggctttgtcccagggggacccttaaaccaggttagtccccatggtgacaatttgtgacggcaaagaatgtggcgctcctgattggcctgagggccccccagctccg

SEQ ID NO: 47155 - DNA, 213 bp, Mus musculus
  source 1..213: mol_type = other DNA
acaaatgcatctgcatgttacctggtcttcacagatcagtccaatcgaattgagattctctttccaactgattccaggctgagtcaaattgacaattaagtggatctggatttgaggaacactgtgcttctcttcctactacacaggtaggagaagtaaaatcaccctctagactactgggtccccagagggctatggggtacacaatgtcac

SEQ ID NO: 47156 - DNA, 273 bp, Mus musculus
  source 1..273: mol_type = other DNA
ggagaagggcccacttctaaacaggtccttgcactaactttggatggagaagagggaacagactcttctcttggatcgcctagtccagaaatggagatactctttcccagacctggggtaaccccagagcatccagttctagaaacacccatatatgggctccatgtcaaggatgatgacatgggagcctgtctcccgtgccctcggaggagtggagggcggaatcacggcttccttagtgcgatcttcagaaggatcttgcttcaaaggaga

SEQ ID NO: 47157 - DNA, 205 bp, Mus musculus
  source 1..205: mol_type = other DNA
gtgtgtggcaccacacctggcccggagaagggcccacttctaaacaggtccttgcactaactttggatggagaagagggaacagactcttctcttggatcgcctagtccagaaatggagatactctttcccagacctggggtaaccccagagcatccagttctagaaacacccatatatgggctccatgtcaaggatgatgacat

SEQ ID NO: 47158 - DNA, 373 bp, Mus musculus
  source 1..373: mol_type = other DNA
tacaaatgcctaagtttacctctggctttgacatatgatgaaaaatgcattatgcatgcatcaccccacttggacgttttagcagaacctgctaaaatagttatgtagtaatatttcctgtttgatgtccagtaataatgagcatgtacacagggtcctgtctgattcatgagttagtaacttaatgtcactggatacatgtttcctaagcacatgtcctctgatcttgacagaaatatacttaagtgaactcgttgattaattaatcagggccatctaaccttccagatgactttagtttgcattttagttaaaagttaaaagcactctgtgtctttaaaaggagggaggcctcctgggcgagtgcagtccc

SEQ ID NO: 47159 - DNA, 346 bp, Mus musculus
  source 1..346: mol_type = other DNA
gaactgaacacagatccctcggaagagcagtctgtgcttgtaaaagcatttttgttttcataaaaatttcatgcatccttgccaatgacaacactctgttatctaattcagtgttaggtgtgtatctcataatgctgaaactgatctaagttaagatataaaagaatacattttcatccatatgcattatttttttaatttatatgagtacattgcagctgtcttcagacacactagaagaatacattggatcctattagagtgctctactggcgcttgcgctccctagcgtcagacgcttccgcacagaggcggaacttccttccttagcgcgcacgcgtgcccg

SEQ ID NO: 47160 - DNA, 387 bp, Mus musculus
  source 1..387: mol_type = other DNA
cccagggtacactttgaatatttaaccagagacagcaaaggtattgccggaattatttttaatttcatgcaacccaggtctatcttgcctgcatgcagaattcagcctttcttaatttgggttcattcttggtgaacaattcaatcatggtacaaaattttattttctacagtgtataagaaacccagtgatatttcactttcattcctttcatattattccagtttgtgtaatttaatattaaattcgacttcgtgcaacttaatattttctaagtgacattattaataaatgtttacaacctcaattttattacttcgttaaaaaaaccactggcaaacgtgttatattttacaatactttgtaaaccgattagtgaatttttct

SEQ ID NO: 47161 - DNA, 348 bp, Mus musculus
  source 1..348: mol_type = other DNA
cctgagaggaggctgcagctcacgcccccacccgaactcccctgcgctgcatggcagagggattcaccagctagctgataaaacctcttgcagtttgcatcaggtgtgctgtccagctcatcccggggactcggtcttacatatacatatatatttggatttttatgtatgaatataccttgatttatgactgtcttcattctgctataagaaaaaccttatcaaaatttttactgtgttcatagcaaacacaggttctctctctctctctctctgtgtgtgtgtgtgtgtgtgtgtgggtggaggactggtttcaaaccctcccccagattgttttcaaactaaagg

SEQ ID NO: 47162 - DNA, 285 bp, Mus musculus
  source 1..285: mol_type = other DNA
caaagtgtggacactttgccctttcttagaattctagcaagattttgctgaaaggtatagctgtctcttgtaagcctataacaggtcctagcatacacacagggccccccctggagcttgtgtctctagctgcatatatatatcagaagatggcctagtcatccatcatgtaaatgaaataaatacctaatttaaaaaaagagtaatgacttttgtgccaacaggaagctgactcatttaaaggaatggacttgaccctatttgttcacaagcaagagtctctct

SEQ ID NO: 47163 - DNA, 433 bp, Mus musculus
  source 1..433: mol_type = other DNA
tccctacagtagcgctaggtatagaaactgtgtcttctggaagaggagccagtgtttttaacaaaatgtaagcgagttgaatcaatgtgctcccctagagcaagagcaaggtagtgctccaccgaggtcttacacctctcttagtaaatccttattgatttttcaggattcaaagaactgcagaactgtattcgaccagcttgatttggccactcgagggtcctttcccgcccccggcccgcctcctggccgcctggggacgcggagagctctgcgcacgcgccgaggggcggggctcgccccataagggtggggcgggggcccagggagccgcgtcgttgcgcggcagttgcgtcctacctcgcgcgcagaccccgggcgggggcggggccgaggcggccgctgaggcggctccctgttctggtcccgcccc

SEQ ID NO: 47164 - DNA, 388 bp, Mus musculus
  source 1..388: mol_type = other DNA
tctgccagcacagatatcgaacactgtacttaaactggaacactttttttaatttgagaaatccttttaaccacaccccatcgctggtttgttgttgctgctgctgctgctgcttgtctcacttcaaggctagaaagacaacctagtaggtctgaaaagctgtacctcacagggtgctttccagctcaggctctgagtacttgagaggttcagcctcaagagacagggaatccagtctccattactggactgacagttccttacggacaagacagtgggtctttatggtccaccccaatgagggtgagactcgaataccagaagttctttggttttctggaaatgcaatcattggaataacaaatatttactgaaggctttgggctgc

SEQ ID NO: 47165 - DNA, 391 bp, Mus musculus
  source 1..391: mol_type = other DNA
aggccatacatacgtacgtacgtacatacatacatacacacattctggagaccctgcagcctttccactccttggaagtccttaaaggaaaacaaagaaacacaaatagtatttctttgatgtgtggagggaattggctgcagggcagttcattccatctccagcccctcagtttccttctttaaagaagagacattgctaaggtacagagctcagtggcagagcccttgaccagcatgcataaggtcttgggttcaaccggtgccaaggcacctggctcctctgccatggcgaaatgagtcccctgccagatggcacagggcaacctgatattaaaaataagggggtgggggccaccaaatggtgaaggccactgccccatttagtgggg

SEQ ID NO: 47166 - DNA, 218 bp, Mus musculus
  source 1..218: mol_type = other DNA
aagttctattcaagtacaagttctattcaagtattctattcgaatgaactggtttttggtaccagtgcatattcaccatcttatacgtatcatttaaatcgtatgcatatgggaagaaatagagacttcaagctacagtttgggttaggtgacatagtggtaagagacatctaccttctcccttttcaatgcctagccattgacaggtaaaaggaagt

SEQ ID NO: 47167 - DNA, 260 bp, Mus musculus
  source 1..260: mol_type = other DNA
ttcactaagtcagttcatgtggggctgggcagaggagaacaaagaccttgttctgggatcatctgagcacacagaataccggagacacctctcttaaaggagaaaaatgggctgcttcttcttctttttttttttgtaaaaaaaaaaaagctgctaccctttctatggacagcccaggaccctaggcctgcctgccccagggtcatctgcccttgatcacctgggaagaacttctgatctacaagggaagatatgctcat

SEQ ID NO: 47168 - DNA, 306 bp, Mus musculus
  source 1..306: mol_type = other DNA
ggtctctcctttatcgcagaaggaatgagaggtatgttcacactcctgctcaggacatccaaaggaatattgtccatttgttttcaagaccctcgcaggcctgccagacacagtatggtaagagaggcaggaagtgctgcttgcatgaagggattttatcctctctgtcctgaaggcaaagccaattctccttgacctctagacctcgtctgaagcccagtctgtcctagacaaccaggcttgaatgcaatgcagcacaggtaccaaggcttggcatatgtatgttcactaagtcagttcatgtgg

SEQ ID NO: 47169 - DNA, 339 bp, Mus musculus
  source 1..339: mol_type = other DNA
cgtgtcccggagaagagggactgctccttccctaaggaaagtccccatctagaaggaaagtcccttagcaaccatgatggctagtagagaggtcctttatttcctgtcagtcacagttacacgcgcaaggagtcgtcaggtgggcacataacctactctagcccctggtggaggcagtgaatcttctgccccaggcatctggaggcagatggctcagtaaatattgactttgcttacatgttacaccagacgcacttccagagagagagctgagctctgtcccgaacagtgtgggtggtacctcagtgtccgtggtgacattggttaatattcactagc

SEQ ID NO: 47170 - DNA, 344 bp, Mus musculus
  source 1..344: mol_type = other DNA
ctctccgtgtcccggagcagagggactgcttaaggaaagtccccatatagaaggcaaccatgatggctaccaatctgtctctggttcagagaggtcaattaaccgcaggaatttcctgtcagtcagaacaaagaattcatatctacactcgcaaggatcgtcaggtgggcacataacctacaatcttcagccccaggcatctggaagcagatggctcagtaaatattgactttgcttacatgcaagcaacccagcagactcaggacaccagacacactttggacataggaccagagagagctgagctctgtcccgaacagtgtgtgacattggttaatattcac

SEQ ID NO: 47171 - DNA, 210 bp, Mus musculus
  source 1..210: mol_type = other DNA
ttgaacaagtttaaccatgcctgtgttttaaatcagattgaagcattatagactctaaggtcaggtcctaacactgggtctcaggctcttctatggaacaagtgtctttctgaacagacacccctgaaatcacagcattggatagctttgcttgttaaggaagactcccttgctcctagcacagggcaaggccccttgctgccctagctc

SEQ ID NO: 47172 - DNA, 426 bp, Mus musculus
  source 1..426: mol_type = other DNA
tctccgtgtcccggagcagcgagactgctctaaggaaagtccccatatagaaggaagactgagacaaacgacttatgttttacgaatctaccaatctgccattctggaaatgtctctggttcagagaggtcaattaacctgtctaagggcagcccagctcttcctctgccccgtagcctgtcccctggccactgtgcacgcctgtcaggaatttcctgtcagtcagagaaacaaagaattcatatctacaattgcaaggagcaatctcgcacataagaatcttcagccccaggcatctggaagcagatggctcagtaaatattgactttgcttacatgtgagctgactcaggacaccagacgcaccttggagcagagagagctgagctctgtcccgaacaggtggtgacattggttaatattcact

SEQ ID NO: 47173 - DNA, 438 bp, Mus musculus
  source 1..438: mol_type = other DNA
ggcagcccagctcttcaggaatttcctgtcagtcagaacaaagaattcatatctacactcgcaaggacatttgtcaggtgggcacataacctactctgagcccctggtggaggcagtgaatcttctgccccaggcatctggaagcagatggctcagtaaatattgactttgcttacatgtgagcaggaccagccagccatgttgtgtcttcctagaggcaatgtgactcaggacaccagacacaccttggacaccggatgttgtgtttgtttaggaccagagagagctgagctctgtcccgaacagttgtggtgacattggttaatattcactagcatttttcccaggggaaatattggaggggccccttctgcacttcccaagaggcagcccttctgggacttgttgccatgggaactgcccagtagatagctagta

SEQ ID NO: 47174 - DNA, 487 bp, Mus musculus
  source 1..487: mol_type = other DNA
tgtcccggagcagagagacgaacccatctagaaggaatgagacaaaagacttacaatgcgcatgttttattcaagcttgtacccttagcaaccatgatggctaccaatctgctctgtctctggttcagagaggtcaattaacctttctaagggcagcccagctcttcaggaatttcctgtcagtcagaacaaagaattcatatctacactcgcaaggacatttgtcaggtgggcacataacctactctgagcccctggtggaggcagtgaatcttctgccccaggcatctggaagcagatggctcagtaaatattgactttgcttacatgtgagcaggaccagccagccatgttgtgtcttcctagaggcaatgtgactcaggacaccagacacaccttggacaccggatgttgtgtttgtttaggaccagagagagctgagctctgtcccgaacagttgtggtgacattggttaatattcactagc

SEQ ID NO: 47175 - DNA, 305 bp, Mus musculus
  source 1..305: mol_type = other DNA
aggtcagattcccagagtgcacgtgcttgcaatatcactggggaagcagcaatccctggggttttctgggccgccatcagtgaaccttagggcctagtgtgagaccctagggtcttgtgtgagaccctgcctcataaaacaagtgaggaatagatctcctggagctggagttacaggcagtacgtgtttttgacttgagagcaagtcacttggtgtcgtggtcacttgcttgtttgtggtaccagcagccaggacatacactttaaaaaaaaagtcccatttgtcctatttgttccaggaactga

SEQ ID NO: 47176 - DNA, 256 bp, Mus musculus
  source 1..256: mol_type = other DNA
atcacaatagtggtaattgttttgccaacatcaaagacagcttccttgaggcagtgagactatcgtaaaatagaattctcaagattcaagaggcccgacagtcaaccttaacttgaggtaatcctgaggctcagtctgcaacggaagccgactgggaaaagttgattccagtttggtctactatgaaaaatgctcatcatttgcattgtttcataatgggtgagagctgccagccagatgctgaggcctgctggct

SEQ ID NO: 47177 - DNA, 355 bp, Mus musculus
  source 1..355: mol_type = other DNA
tcagttagactgatagactgatagactgttagactttcctgttagactttgtctctgacaacagtctgagaggcagctgcttccgaaacgggaagatgaacactggagcctcgttcagtctctcctttccttcagtctaggacctcagtccactaaaggcttatggtccacacttgacatcgacttgacagtcaagggttcgtcaccaacaggaacgatggacgggctgagttcgaggccagcctggtctacaaagtgagttcgaggacagcaatatcatcaaaggcgggtccccctgttgactctcccaatctccaggaggtagctcccgcccagggggcgtggtctgcacata

SEQ ID NO: 47178 - DNA, 323 bp, Mus musculus
  source 1..323: mol_type = other DNA
agacagagttctcaccagagaactctgaggacctcatccctgtcctgagaattggtcttgccaacttcagaagagaagaagtctagttccagagttaaagatttgagttcctggaccaggaggctagttctatccccacccttgtgctagagtcccatgtgtgacatctcgggagttctagcctcagaaaccacagagtttaggactggaacgaaagtgttcccacttggcacataaaggtattacctcctcacagtcagatttctctgcatgcccatggtcctttaatcaggagtgggatgtcagacagctctatatttttg

SEQ ID NO: 47179 - DNA, 377 bp, Mus musculus
  source 1..377: mol_type = other DNA
ccaagcaggctgtttgtttgaccatgttctggcgagtatatggacaacacaaactggacttgttttttgggatacattgtcaaattcccaaataaccaatagcaatattatgttaagaagacaactttacttttaatttttaaatttctatcaggaagtccagctttcacatgctggatcttataccaagcaagcttcttttaaaagtacagtatcttatataccaagtctccttaacaagttcaaggctccagcctcgggctctggctggcattgccaagcacattcttagacaaagaaacagaagtacatttattctgtccttttatcggggaccctacgaaaatcttagatcaacccagctcccaatgaagcag

SEQ ID NO: 47180 - DNA, 211 bp, Mus musculus
  source 1..211: mol_type = other DNA
ctgagactattcacaggtctagggtgggccctctgacatcctgcgtgtactgccaagaaaccaggattagaaataaaccctgtctcccagcacttgggaatactgtgagaaagtgattccttcacaatctaggacatgagctgcgcctgagcccagcctgatcccgcccgctgcctggcgcctgacttcggcccccatgttttataaagaa

SEQ ID NO: 47181 - DNA, 356 bp, Mus musculus
  source 1..356: mol_type = other DNA
ttgaagtccttgtccttcaggacaaaaccttttatattatttggggttattgtaaaaaatgttgtttttctaattgggaagccacatgtgccattgcagggtggcgctggctactatcttaaccaatcagatgagagacatgttaaccaatcagatgtgagacatgcaaatgaggtggtaagcattacccatgcataaccaatgggtgtgagacacgcctctcctaggcctatagaaggatcctgttgcagcgttgttcttgctggcgagtccggctcacgcaagattttcagtgttcatttttaaaatgacttagacaattgaagacaaatcccagtacagcagtgggcagtctg

SEQ ID NO: 47182 - DNA, 411 bp, Mus musculus
  source 1..411: mol_type = other DNA
atgtggaagcagtttcacaaaaactttattataactttacaaaagacagcggcatcaacctggggaaagcctctctctaggctcaagatctgtctgctagtagattcaattgtcacaggcatcagtgatacacatggaggcaatacatgcatgtctataattctcaccagcgagtaagtctctgcagacacagactcctattagagttcctgctgacataggcagcttcccttcagaaatctgtggagagcaggtctctacttagaatgtgccattcctggcaacatcgagacaagtgattattaatctttggttttccataaagaatcaaggatcatggacactttttgaaaagcccaggacaaaggacagatgtacctgtctcttagtggttttgccaccaggagctgg

SEQ ID NO: 47183 - DNA, 395 bp, Mus musculus
  source 1..395: mol_type = other DNA
agtttgcatgacaattgtcagagaacacagattttcatcactcaaattccttgttccaatgaggaatcatctctaaggcagctgcatcagcactgttcgctagctggttgctaagttatcctattgtcacagatggcagttctgacacacaggcaggcaatgcatggctctagaggccagtcagtctctgcagacaaagactcttttcagattccactgtcagacacaggcagctgtattatgtacccattctagcatgacaggacacttatatagaagcaggctaaagcctgtcagcattgcagaatgtccagcaaaagcccaggataagtgttagctttaactctcctggggtgattttgcaagctaaaacctatcagttctatttcctagaa

SEQ ID NO: 47184 - DNA, 312 bp, Mus musculus
  source 1..312: mol_type = other DNA
aatcattatggctttactctagactcaagacatcgccttggggtgcagctagctggttgctaagattgtcacaggtgtcagttctgacacacaggcaggcaatgcataacagaactgaagttcctatcagctaagtcattctctgcaggcaaagccaaacaatacaaagcatatctctgtttttttatgtaccacattgaggaatgtgtttattaatgtgcaatcttccctatgcccagcacaagtagacatccccgtggtatgttaaggaaatggttttgaaagttaaaacctataagttatagttcccag

SEQ ID NO: 47185 - DNA, 337 bp, Mus musculus
  source 1..337: mol_type = other DNA
atcatgggacacaagatgtccggagagtacctccctgtggacttaccttcccccagggaactctctacagaactgaaattgccaacagccagtcagtctctgcagacaaagactcctccactgccagtgatgtctctattatttatatagaagcaggctaaagcctgtcagcattttggaattttattaattacaagcttccctatagatgatatttctctttgaagtgacttagacagtccaagacaatggtctgtgcaggcaagctataaagcagggaatagttctgccagataaaagctgtcagttcttgttctcaggaaacacccagtctgtt

SEQ ID NO: 47186 - DNA, 316 bp, Mus musculus
  source 1..316: mol_type = other DNA
aatcattatgacttggaaagcttctctctagactcaagtcatcatctgcttccatgctgctcctgggttgcagctagctggttgctctattgtcacaggtgtcatttctgacacacaggcaggtaaattatcacaagataaggtgataatgagcctctgtcagctctgtcaacagccagtcagtctctgcagacaaagacacacttatatagtcaacattgaggaatgtgtttattaatgtgcaagcttccctataaaaatgttttctttttgaagtgaattagaaacaccagacaagtcagggaatggctctgca

SEQ ID NO: 47187 - DNA, 333 bp, Mus musculus
  source 1..333: mol_type = other DNA
ctgtgagtcaaaccaaacctttgctttgctcaatgggttttaatgggaatttcactgaatctgtagaatgcttttgttataatatccatttttactaggctaatcctaccaatccatgagcatggatatcttgccatatttcttgtccttgcttggttagaattaaaccaagaacctaataaaaaaaaagaattaaaccaagatatttagtattatctgtggttatttagttagttagttagatagtatttttaaatgacttagattatgcatttataaacaaaagcagaaatcttcctgtctgacgagttgtaaactgaccacagagcacag

SEQ ID NO: 47188 - DNA, 313 bp, Mus musculus
  source 1..313: mol_type = other DNA
tggttaaacacactcactgctcttccatgggtggctcacaaccatcatgggatctgatgccctcttctgctgtttctgaaaacagctgcagtgtactcatataaataaaataaatctttttataaagaagattcctaagtctctatttaggatatggccattcctgacaggacagatatagatgtagacagcttctgtcagcattttccctagagaaactggaaggacagacagagttgctctgttctttcctaaatgatttagacagtccaaaacgacttgtccagtacagcagtgggcttgtaatccagtc

SEQ ID NO: 47189 - DNA, 323 bp, Mus musculus
  source 1..323: mol_type = other DNA
ggaagcctctggaagcatcgcttcagagcgctcctctacttgtacgaaggcggacgcgtttctactttcatggtttttgctctgagaaaatttggctttcgcaaaaacaaaagattttggggtattaataagattaacaggccgcccgcccagcaaggccggggccgcgccggggctgccgaatggaaaagattaggttaatttcattaattgaaaagaaaaggaccaaatctggttctgtttgtcatctgcatatggtcggagctgcgtcctacccgcgggttgagttcagctaggcgggcggggaggggcgcgagttgcgc

SEQ ID NO: 47190 - DNA, 410 bp, Mus musculus
  source 1..410: mol_type = other DNA
ctctggggattaaaggcgtgccccaccacgcccggcgtggcacaaaaattgaaacaaatgacactagtatttattcaaataaacaaatcacttgcacttattaaagattagccttaatttggagagagaagcccggggctagaagcgtccatccccccaaagagatcagttctttggaccaaaagatgggactgcgtagccccagcggcgcgttcaggattccggccggccggcaggctggctgactgcgttgcagacattgggcctccgacgcggcctcggcccgagtctgctgtctcccggcttctgagtggctggggggccggggttaacctttcacctccgcgctccgtccaatccaggacggctttcatgcggccgcggggcgagcgagcgagggggcgcggagc

SEQ ID NO: 47191 - DNA, 289 bp, Mus musculus
  source 1..289: mol_type = other DNA
caaactcccagattttctgttggctaaccgataaaggagttgggggaaccggcctgttctgtctcaggtatcccaggatgaccttaaactcatccaggtggctgtgaatgacctaggcttcctgcgtgcgaggcaagcagggaaccacctgagccattgcccagatttcttgtggccaagaggagagctgtttctcccaacagctggagagaaggctgggatgatccaggcataggaggagttcctactcaacacccaccctgcgggtgggggcttccctcccgcccgg

SEQ ID NO: 47192 - DNA, 424 bp, Mus musculus
  source 1..424: mol_type = other DNA
gtttcctcatttgagggaaagatacaaagtttccctttaatataaatgtttgaggcaggcttgcagggcccctggcaaccctgccccatgctggggagactgagcacgtgcaggtccgggcatgtcctgtgtacaggggccgacaccctgaaggaaacctcacctcaggtgctgaggacccaggacactccagggagctataaatttggtgacgatattacaagaccgggtagaaccctgtgggttcccaggactgaacatggttcagtccagccacaatggtctgaagcaggtctcagtgctgtgactgctatttgctcatttgctcagcaaatacccagctctttccgaacaatgcccttgcagggccctgcgggagattacatcgctgacagggattaatttaatcatcgcctttaccctg

SEQ ID NO: 47193 - DNA, 351 bp, Mus musculus
  source 1..351: mol_type = other DNA
ctgccgcccgcggcacgccgggaaggagtcacgtccagacgccttccggccttccatgcctcaccggctgaggccagccgcgaacctggcgtgtcctggtctgcccggggctccagcctccgacccgccatgcacatgaggttttttttttttttagcataaaactataagtattgtgtatggcatgcatcttcagaagacgacttttaaaagggttgcgttgaactcaggagttctaaataagcccgagtcagcccggggacagtaataaaagagagtattctcttagtgaattccgtagaacagagccccgggtgtggtcagttctcccgccggcctggccagcaggcc

SEQ ID NO: 47194 - DNA, 407 bp, Mus musculus
  source 1..407: mol_type = other DNA
gcttagaactcctgagttcaacgcaacccttttaaaagtcgtcttctgaagatgcatgccatacacaatacttatagttttatgctaaaaaaaaaaaaaacctcatgtgcatggcgggtcggaggctggagccccgggcagaccaggacacgccaggttcgcggctggcctcagccggtgaggcatggaaggccggaaggcgtctggacgtgactccttcccggcgtgccgcgggcggcagaagccccgcctcgcgcctgcccgtatccggccaggcctcgaacgcccgcacgaggaaagccggcttccagcctgtaggacgcggctcccagggaaggcccaccctgtccaatcggactcttgtccaatgagagcctctggtgggccggccggacaccacgggctct

SEQ ID NO: 47195 - DNA, 426 bp, Mus musculus
  source 1..426: mol_type = other DNA
acaggtgttccacacatttgtaacaaacacaacctggctcttggttttcaaaagtaaaggggagtatatttcttgagaagaaacctcctgtagcctcagcaaagcagagttcaggacttggcccaggacacttgggtgctcagagtctggggcagagaacaagggtaatcaaaagcccctgtgtttattcaggagaagaaattaagcccgctttgttctgaacctgtgggtcacagaatatttacattataattcatagcagtaacaaaattacggttgagcacaactgtgctagatccagtcagctgacaggagagctccttgcagtgggcaagtctgagattctcagggcaccgagctttgcagagggcaagcctgaaactctcagggcacctggtgagttgagcttctggcccaggtgctaga

SEQ ID NO: 47196 - DNA, 340 bp, Mus musculus
  source 1..340: mol_type = other DNA
ctcagcccatcttggcacatctggcagatttgaccagatgtccacaccctccactggtcctcagtgacgagctgcagggctgtttgaagcaacccgcctggattaattgccttaatggacacgagttactgtaaaataaagagaggttgtttttccttattgagactttccaaacccatttgatgcgttcactgcaaacccatgttttaaagtaggtttcgcaaagaaaaacaagatcttctgggggccttgaagaaccctaggtttgatggggtcaggtctgcaagcctagacctcacgttgttgtccgttccgccctgcctcgctccagggggcacag

SEQ ID NO: 47197 - DNA, 558 bp, Mus musculus
  source 1..558: mol_type = other DNA
atgcctgggcctgaggcccagtctggcctgagaggccgcaggtctttgacctcctgaaactagacacctggtcactggtcgggcacagccatcctctggttccccgagaggtaggaggagctcggccaggaaaggggtggcgcctctctcacccaggttccttccttgtgggtgggggcgtctcacacacacccacacgcccaggcctccaacctgctgctgtcccaggagccggttccaaatcctcgggaccaggcagaggccacgtcttccccggcccactccccagcagcgacgtggaggtagagggaggagcttttgccggcaacgccagcttcccctgcccagcgcgtcagcgtgggcttcccggagcgagtcgctaggtaacagggctagctccgcagacccgggccagggaagcccgcgcgcgtcgtcagcatctgcgccgaggggcggggaacgcactgacactcccctatcggagcctggccttaagggtggctattgccaccgcggagttgcccctcccctgcggggaccccgacgtcgccgccccct

SEQ ID NO: 47198 - DNA, 627 bp, Mus musculus
  source 1..627: mol_type = other DNA
aaggggtggcgcctctctcacccaggttcctccttgtgggtgggggcgtctcacacacacccacacgcccaggcctccaacctgctgctgtcccaggagccggttccaaatcctcgggaccaggcagaggccacgtcttccccggcccactccccagcagcgacgtggaggtagagggaggagcttttgccggcaacgccagcttcccctgcccagcgcgtcagcgtgggcttcccggagcgagtcgctaggtaacagggctagctccgcagacccgggccagggaagcccgcgcgcgtcgtcagcatctgcgccgaggggcggggaacgcactgacactcccctatcggagcctggccttaagggtggctattgccaccgcggagttgcccctcccctgcggggaccccgacgtcgccgccccctccgcaccgccaggtaggcgaccctccgctgcggttgcggtggctgctggtctacgccactagcggggcggctcgggccacagcggccggcggaccggccatgtgggggctcggctgcccggcgggtgcgcggcgcggggcgcagagcgcggtgggtggggcgcgcggtgctgcccgcccccagccccgcggggcgcagctc

SEQ ID NO: 47199 - DNA, 383 bp, Mus musculus
  source 1..383: mol_type = other DNA
tcgcatatcagatatcctgcatatcagatatttacatattacagtcgtgaagtagcaacgaaaataattttatgttcacgctgctgtagcccggtgggaaccagtggggttccggggggcctcccagagagcaacaggcccctctgggtacctctgtggctcctctggtaactgaaccacaggcactgtttgcaggttatggtctccactaagggctacaaaaatgctagactttccgctttgttctgctcagtaagagccaagccttcagaagtgtatggggctggagtcaagtgccctgggaagggcacccatcgccccagactttccccatttggccagggtagagagaggagtcacgtggaggggcgccgcgcccgggg

SEQ ID NO: 47200 - DNA, 417 bp, Mus musculus
  source 1..417: mol_type = other DNA
ggaccagaggtcccatggaagctccctgtggtcctcatttcagtcagtctgaagccaagacagggttggtctgccgctgccccatccctatttggtcagggacagggggacagctgctggagctcctctcatctggagaggaaagaactgcttcgctcactcaaggacttggccagcagtgcagcccactgtttgcacctaatcacggtaaacagtgttgtgttaaacacacgtggtctccgtggctgttcgagctgcaggggaaacatttaccagcctaggctccgggacccgaccatggtctgcacccacgggggacaacctgtggccatcctgatttggcctccgcagctaggaggtccaaaagcaccaccgctaagaactgctgctgatcccggagggatgacatcaccggcc

SEQ ID NO: 47201 - DNA, 244 bp, Mus musculus
  source 1..244: mol_type = other DNA
aggaaagctgcaactccctctgagacagctgtcccacacgcgtgagagggacagggtctctctgtatagccctggctgtcttgctcactttgtagaccaggctggcctcgaactcagcaaaagcgcggctgttgatctccacactgaagtgtaataaaaaaattaaggaaatttcaacttaaaaaaaataaaagatctgtttccttatatttgcagcagcccagtcagcctgagttgaaacccc

SEQ ID NO: 47202 - DNA, 385 bp, Mus musculus
  source 1..385: mol_type = other DNA
agaattccttaattcggtctcctcaatccaggagtcaacccaggacactttaggggctgccctcctaaggactgcgcagagcctgcggagagcaagccttcctggtcgtcggcgtggcgctctgcaaacggcacagaaacgccgggtctccagtcctcgccctgcggacagcccaggccggacccgcccccagacctccgtcagccctagtccgggcgtccgccggcgcccaccacccggccgcgactgcaaggtgaggctccacgggccgcagccagcccgcccacgagactgctggggccaggatcgcggcgccggcaccacccccgcccccgcagttgccccgcccggaaatgctccggcccggaccgtctgggtctcgcga

SEQ ID NO: 47203 - DNA, 576 bp, Mus musculus
  source 1..576: mol_type = other DNA
tcgctcaggtctcgccctggggagagccagttcctacgacagcagcccatttgtccaaggggacctgggcaagggacccggtgccctggtacagatccaggctcagctgctccaggctcagcttctcctgcaggaagtggcccaggtacctctgtaggacctggctcgagggagccggggctgcacgcggcggcgactcgggggatccgacctgggctccaggcagcggcagcgcctcagggtcggcccggcggcgtccccaagccgcggtggggatctaggttcgcggtggccgctgcatgtcggttcggcgccgccgtccctcagggcaaccccatggcccgcgtcgcgacgctcgcactaggcccggcggggactgggcgctgagcagaaccgggcgccccaagccgggagcttccgaagcgctccgtcggtagggaggcgagacaagactccgacgcggcgcgacggcgcgctcccgcctgagacacgctcctggcgcgttcgcgagacccagacggtccgggccggagcatttccgggcggggcaactgcgggggcgggggtggtgccggc

SEQ ID NO: 47204 - DNA, 297 bp, Mus musculus
  source 1..297: mol_type = other DNA
gtctcttggaacctccaccaaatccccaggcagggtggtaaggggggctccataagaatggcttacaggcatgtgtatggggcattttcttcattgatagaagacccagatcaccgtgagcatcctgcccttgatcctgagctggtactctcacagcacaccaagcagctactgggcagtacaggctgctgcttttctttacagtagagaaattgtttccgaaggcagttagacagttctccaggccagacccgctccgagagtccgagcctcgcctcagggagcctgaccctttcg

SEQ ID NO: 47205 - DNA, 363 bp, Mus musculus
  source 1..363: mol_type = other DNA
ctttctaatgattactcagaacaggatgaacccagcatactaggaatggctcctttttctgggttactgtcaattttattaaattattgcacatttggcatgagaagcacaggtctgggcaacacagagtgcaactggcaccgaacagctctcggttccaggcatcccccgcgcttgggctgccccgcacgtggcgcccgcttgggccgcgcccccttcgccaggacggcgtcgccaagcgaatgaaccccacgctctaccacgaaagcgtgagatcaccgggagaagcgccgcttcacgccgagaactccgtcaggtcttgcggcgtcgcgcagcgcgcgcgcaggcgcgcgctcggtgtgc

SEQ ID NO: 47206 - DNA, 451 bp, Mus musculus
  source 1..451: mol_type = other DNA
ggttactgtcaattttattaaattattgcacatttggcatgagaagcacaggtctgggcaacacagagtgcaactggcaccgaacagctctcggttccaggcatcccccgcgcttgggctgccccgcacgtggcgcccgcttgggccgcgcccccttcgccaggacggcgtcgccaagcgaatgaaccccacgctctaccacgaaagcgtgagatcaccgggagaagcgccgcttcacgccgagaactccgtcaggtcttgcggcgtcgcgcagcgcgcgcgcaggcgcgcgctcggtgtgcgtggcggcgtcagcgcactgggttggccccggggctgaggtaggctgccgtccttcccgcctcggtggatcatgcccaggacggcagcggtcgcggggggtgccggcgccgaggcgcacgccggccgggccccgggggtggcggagggg

SEQ ID NO: 47207 - DNA, 425 bp, Mus musculus
  source 1..425: mol_type = other DNA
gatcaatgctgaactgcacacaacatgtaaggctagtctggtctacaaagtagttccagaacagccagggctacacagagaaaccctgtcaggagtgttggtcacatttttaactcagctgttgttagtaaaccaaaaattaaaaaaattctagggcttcagaagctgcagatccaaagtgcagcttgaagctcattcttccaacctctaggaaggagatgacaccgagacgcgcttcggatatttgaaatgagtctctttgtctaaccgtttaataaatcaagcaacagtgagtactatttatttcggttcttaaggctttgagagccacagtagcccttgtgctcatgtccggagaggtgacagggaagcgcggtcttcctctttccccgcctcccccgccgttcgcagccaacgggaaggct

SEQ ID NO: 47208 - DNA, 208 bp, Mus musculus
  source 1..208: mol_type = other DNA
catggtgctttgtttctgctactccattgcttagaggtttagaatctaaagccattcttattatccattacagcatggccaatggcacctatcttttctatatggagaaccaggtttctaaaacggtgatttgagtgagaactgtcccccatcatcttgggggcatttaaaagtctgtcagagagttgccattgtgtcatcatcatga

SEQ ID NO: 47209 - DNA, 249 bp, Mus musculus
  source 1..249: mol_type = other DNA
gtgtttgctcgcgttggaacacagatgattgaaatttgcatttaaatggaaatgtgtttagagaaatgagagtatccatttttctgaaagaaatatgtttaggagtggccgggcgctctcttctactttgcaatggtagttaagtgctgaagtcagctgtcagcacacagctggatcacacggggtgtggctgcaccctaaccaggagtaccacatggtttcagtgattttctgttgctgtgataaaca

SEQ ID NO: 47210 - DNA, 555 bp, Mus musculus
  source 1..555: mol_type = other DNA
gaccgggtcggtctgaggcagggtctgtaggagggattccaaggagggcggtggaatccgggaagccggactcttccgtagaatcctcggaccaccaggagcgcagacggtgggcggcgctgcccgcggccagctagactctccttcctgacagcagccatcttggaggtggaatgtcggggaactacgtcatttccctgcgtctcgggacgttaagaagcggccgctccgcctaccctgcggccttgtggactgcggcccgtagggggaggggaaacactcacacaccctcccatcgccccacccccttggcgaaagggagttcgggaggcccggaggcggagccagggctcccgtcgttcaatcacagcgcgagatctaaccaagctccgccccggttgctgatgtccaatggctgatcagcaccctggctggcgggcggatgggcggcggggcggagccgcgccgaggcgtgttaggtgcgggccaatgaacggcggcggcggcccgtgggcggggcccaggggcgggcggagccgggttgggcctaggcgg

SEQ ID NO: 47211 - DNA, 416 bp, Mus musculus
  source 1..416: mol_type = other DNA
taccaaggtcttagagctcctgcaccaagatggagtcaacttcgagttggaagtagactgtagtagacaccactaaagcccatacggatggcacctgtggggttggctgcacccgaagtgggaagacctagctccttcagcaatgacttagggctttcctgaaggttgctgtccacagcaaggttcccatgcgctcccctgcagtgtttttgcaaaaacactactcaaaggctcagtttctgtttctcagaaaacctgcctttgacaatgccatggtggtttctggaagtggcctcccattgtgagggctgccgtggctcccattgtgagggctgccgtggctcccattgtgagggctgccgtggctcccattgtgagggctgccgtggctcccattgtgagggctgccatctttc

SEQ ID NO: 47212 - DNA, 831 bp, Mus musculus
  source 1..831: mol_type = other DNA
agcccgccgcacgcagtcccagcgccccgcgcgcactccgggccccggccgtacccgagggcggcgcccaggccgcgcccaggccgcgccctgaacctgccgcctgcccccgtcccggtggaagagggaagctgcagacgctcgccagtcccctcagggaccgggcctgccgggcctcggagcccacagcctcccaggccctgagaactcggtcgcggccgagcaccggacctcggagtccgcacgctcggcctcacctccttaaggagcggtggaaccccgtcccctcagcccgcgggccgcacgcgggtgcttgccgtccgcactcacctgcccgcttcgtcttcgcgcagcggcggcgccacactccggccgggaaccgtccgcctcaaccaacccccaggcggcggcggcggcggtggcggcggcggccggacgggaggggctggacggcagccagagacagccccgccgcctaggcccaacccggctccgcccgcccctgggccccgcccacgggccgccgccgccgttcattggcccgcacctaacacgcctcggcgcggctccgccccgccgcccatccgcccgccagccagggtgctgatcagccattggacatcagcaaccggggcggagcttggttagatctcgcgctgtgattgaacgacgggagccctggctccgcctccgggcctcccgaactccctttcgccaagggggtggggcgatgggagggtgtgtgagtgtttcccctccccctacgggccgcagtccacaaggccgcagggtaggcggagcggccgcttcttaacgtcccgagacgcaggg

SEQ ID NO: 47213 - DNA, 496 bp, Mus musculus
  source 1..496: mol_type = other DNA
tgcggtcgctgagtacctatggaccccagctatctggccagggtgatcccagggatttgctcggagaactgctctgggaaaagggcaggtcctcggctcccaccacgtggtcggtggcccggaaagggacaaagaccagccctgactgtaccgaactctggtgcccccgagagggaggggggacgcgtaaattcgcgcgtcgcctttaagggaagccctgcccttgtagtcctgggattggcccaggccgcgtcctccgggcgaagggaagataccatcttttcaggcgcgaacctggccaatcagacctgtgggagggcgggaccgtggctcgagcgcgcctctggcagggcgcccggcgggccggcgcaccgcgtagggggacctcgggggcctgccactcctctgaccgcctccctttcggaggcgtggcccaacggcggcgccccgccccctctccgcccggggtgggcggggcagctggggctccgggagc

SEQ ID NO: 47214 - DNA, 182 bp, Mus musculus
  source 1..182: mol_type = other DNA
cagctgcagcggttgagcaactgtggcagactgactgatgagcccatgggacccacagaaccccacgggttctcggccaggggaggacagaagccctggcagggccaagtctggctcactgggcaaccggggcttcccagacgccaggtttggaaaggctgggctgcccgcagaggggagct

SEQ ID NO: 47215 - DNA, 357 bp, Mus musculus
  source 1..357: mol_type = other DNA
ggtctcggagagcactttgcgcttccaccgggtgagagccatcacccatactcaggattatggttttcccgggcccaggaactcctgtgtcctccgcctccgggcggacgctggcacacagcgggcgcaaggcttgcaccgacctgcaatgaaggcgcagcggggcggagccagcggacgggatttgcgccgccgcctgggcagcttgcgcccaggaagcgaggttgccaggacaacgcgttctggcctcaaagagggtggttggcgggtccgcgtgcccggggcggggtcgagccagcgggggcggagccgagcggcgggggcggtgctggtgagcgcggggcctggggccgaggc

SEQ ID NO: 47216 - DNA, 444 bp, Mus musculus
  source 1..444: mol_type = other DNA
ccggagaggtctgaaagttttcttgataactttctagtccattattattatgtgactattgtattcaaggtctggaagttaataccgaaaacttcagaattttatagccatggggagtaaggctcagatcgttaacctagctacaatttagtctaaagtgacagcgtcatacggaaggggaatgagataatctctttgctgatagcaagcgccaccgtggtccaagttggtccgggaacgggctgtaagggaggggaccagggcggggacccaggctcgcccagctctgcgccccgcccgcccatgccaccgaggccgccccctcgcgggcagcgcgggtgccgggtgctcgttttcggcggcggcggcggcagcggcggcggcgggcccgggttgccatggtgaccggcggcagccacagcagggccggccccagcgccagcg

SEQ ID NO: 47217 - DNA, 456 bp, Mus musculus
  source 1..456: mol_type = other DNA
agacataaaataaataaataaatctttaaagaagaaagaaagcattctccctctctctgattgagactcacaactggaatgatccctggtcccaggggcggggggataagacactggggtgatacccctgggagccatggcagcaagcacatactaaatgcttgtactgtgtgagcacagaagttactcacttcctgctgggagctccttcacacagctccccaacatggggctaaacaaaggcaaagcttcctatgcctcggagacagacagcctggctccagttcccttcagggtcacttaaccctgtctgtgacatggacctggtgtgcctcttggaaccagcacacacttctccaggctttccagagactggtccagcacccaggggtgcagtagcttctcctgcccagcccaacatgggggggtggccaggctggcgaggcaggacactgc

SEQ ID NO: 47218 - DNA, 230 bp, Mus musculus
  source 1..230: mol_type = other DNA
cctggggacacctggaataccttcaggtgacctgaggcctgagtattttcataactcttaggatgtgacaaggctcttctgtaacaaagagacaggcattgcttcagcctgaatgcactggaaagccggttcagtagggctccacgtgcctccggtcttgcccccaggcccggttgcccacctcacgccccgccctcttagaggcgcggaccacggagccccgcgccttt

SEQ ID NO: 47219 - DNA, 388 bp, Mus musculus
  source 1..388: mol_type = other DNA
gacaaggctcttctgtaacaaagagacaggcattgcttcagcctgaatgcactggaaagccggttcagtagggctccacgtgcctccggtcttgcccccaggcccggttgcccacctcacgccccgccctcttagaggcgcggaccacggagccccgcgcctttcgctgcggcgcgcgctcattccctccgcggccgccgaccgaggggcgtcggcgcgcgcagtctcctcggcgggcggaggggtcctccgccccgcgtgcaccccgcaccccggaccccatcctccggccgccgccccgagtctcaggcggacgcgcgcgctcgctcccgcccgcgagaccccgccgctcgccccctcccccggcccgtcggcgggcggtcgggac

SEQ ID NO: 47220 - DNA, 429 bp, Mus musculus
  source 1..429: mol_type = other DNA
ttagtcttacagacatgttaaaataaggtggcatcaaaatcagatttgtgctcaactgatttttttttttttttgtaaaaagttgagtgactcacaagtttttatttgagatttttctcccatattttataaagatttgcaatccaaataacttttattttgaaagtattacagcatttttatacttcaaggaattgacattatacacgtagtaaatgaatagtcaagtaagactgctaatcatggctcatactagccgtcaacgtgtgaacctgcgctagtttgacctggctgtccttgaaaggtagcccagccaccccagcactctgcacaaattgtggaggtgggatgtcctaagcgcaccctgggttcgacttctctagactaatccagctccactgcattaatcaggcttgctggaatgatcac

SEQ ID NO: 47221 - DNA, 394 bp, Mus musculus
  source 1..394: mol_type = other DNA
aaatgctaattttaccctaggttcaaatatagagtctgttccaggtgtacacaccatccaggcccttggtctgagaaccagccaggaccttctgagtctaacagccctctcctaggatcctgaaactgggtctagatcctgaggtgcttctgacctagcctagttcatgggaccaactggtggagccagcaccacagcctggttggccaactttgtggtcctacaagtattaggtctcaaacctgtttaacatatcaaagcagacactatatcacagaccctcaccttgggttctccagcccaggggttgggctccccttctattcaacaggaaactgtgaggttgccagtctcgggcctaggcagcagatctcagccacccacactggtgggg

SEQ ID NO: 47222 - DNA, 442 bp, Mus musculus
  source 1..442: mol_type = other DNA
tatacatggagggctctgtataaggcccttggccgcatttgaaatgtaaataaataataaataaaatatccaattaaggatgcccgaggcgccttacttcttaactacttgtcctacaagatccagtgcagaagctgctccaagaccaatctgcgccatggcacaggctggggcctgcctgtcccaagctccagatagcgtgaactgcgctccacgataaggcaaccctggcgcggagacaggtgtgcaccggagcgccacaccgccaggaatccaagattactggcggcccctgcaggactgccagggtgcaggagtgaccgcatctcccaacccaggccacttgggttccaggggaccaccgcgacccgcccctaggtccgcccacgaggagacttagcgccccttgcccccggccccgcccgggtccctaggtccccgc

SEQ ID NO: 47223 - DNA, 198 bp, Mus musculus
  source 1..198: mol_type = other DNA
caggcccaagtcccaggagaactctatctcattaagggccaggcatccatccagcctggctgccagtgctgtttacgtcaatgacctgcacagtggattcactccagatgctcagagaacctggatccttcccaggactcttacatgcagtgcatccatttgccatctgtgaaaatgggctggtcaatggaattgtct

SEQ ID NO: 47224 - DNA, 487 bp, Mus musculus
  source 1..487: mol_type = other DNA
ggagtctgttactccactctgcccggtaagtgatggctgtatccatgctgttgtagatattaccagcaactggccagagctgcagtcagatgcccgcgcccctgatctggcctgctggcggctcccaggaacacgtcgggcttggcggggtcctcagtactccgaagatccggggcctcagaggcccctccaagtgggcggtcgtgtccacgtgtgcactcgccactgtgtcctcttgacacagcgccgcccttcggaccgtgcggttgggaggggctccagtgtgcagtgtgcccaccgcactgccccttccttgcgccgtgcgggcgggcccgagaagcacagtttgtctactgagccgggaggcacccccgcccgccgcgcccgaggccacaccttccaggcgcgcccagccaatgagacttggcggcggcacccggagcacggggtgtgtccgtgccgctctgcccccgcgggggctgaggcc

SEQ ID NO: 47225 - DNA, 723 bp, Mus musculus
  source 1..723: mol_type = other DNA
ttgccgcggtcgccttcgcgcgccgcccaccggcacgcgaccaaagagcccgtggcagcacacggtcggctacgccgtccgtgccgctacattgcggccacgcggccgccggtcgcacgccccgccggcagcacgccagccccaggcgcgcgcccccctctcgttaccgtgcgcctgggtcgcgcggaaagttcgccggctcccgaggcgtaaggcgcagcgccgacgccccactcctgtcagcgactggggccccggagcggcacttttgtcactgttgcaccgcggacgccggggttcgcgcgacgccgagcgccgtaaggcgacggcggcgcggagctgacgtcacgcgccgggggggccagccagcgcgcgtgcgggccgccacgccccctaccccagcgggggcccccccaatcgggaggaccctggttgggagtaggcggggccccggcgcctcgaggggccctgcgatgggacggggcggggccgagagccccgcggaagtctcgcgaggccgagccggagcagagtgtggcggcggcggcggcggcgagatctgggggggcagcgtaacgccggcccggagggcgggaggaggcgcggccacagccagggcaggcagccgagcggccgagcgagcgagcgagccagcgcggggcgcaccgatctcgggaggcggggaagccccgcggccgccgcgcccgccccttcccccgccgc

SEQ ID NO: 47226 - DNA, 405 bp, Mus musculus
  source 1..405: mol_type = other DNA
gcccgcccgcacggcgcaaggaaggggcagtgcggtgggcacactgcacactggagcccctcccaaccgcacggtccgaagggcggcgctgtgtcaagaggacacagtggcgagtgcacacgtggacacgaccgcccacttggaggggcctctgaggccccggatcttcggagtactgaggaccccgccaagcccgacgtgttcctgggagccgccagcaggccagatcaggggcgcgggcatctgactgcagctctggccagttgctggtaatatctacaacagcatggatacagccatcacttaccgggcagagtggagtaacagactccctaaactgggcgcggagttgtgggatggcagactgggcagctctgagaccagggacccctagtccagtgggcc

SEQ ID NO: 47227 - DNA, 408 bp, Mus musculus
  source 1..408: mol_type = other DNA
gcaggaacccagctggagcttgctctgtgtgtgcacagattttgtgggtgcacacaaagccagatggcagtgtcaacttccaaccagatgctgagccatgcccctgcacaggccaggatggacatcgaggttggccttggacactctgccgtggcagccagcactgacgaaaacaggtggacacgtggcctcctgatgccctgccctgagggtcattcagacagaactgcagaatgaaggccccctgtagggctgcagcctgcggcagccgtagccatagagacaaggctgcactttctgcatcggctggccgccatcaaatagattggtcttaggtagtgcctgcctcaggcaagtccccttaatctgagtctggggatagaggcagacttaggtctgggattggcc

SEQ ID NO: 47228 - DNA, 284 bp, Mus musculus
  source 1..284: mol_type = other DNA
cgagggatgccgaggtggcgccggggccttcggttgacgccccggcgccgcgccccgaggatccagctcggaaccgggctgtctgttctctgggcacctgtaccacgagggaccgggaggctgcggcggcgccgcccacccagcctgtctgtacgaagtgtttgtaaagccgctgcagtgcacaacttcagagcaaggcaattctagccagtggctgggcaaatggctcaaatgcttttgggaacctgagtgatttctaggaaacccctcagattaaagacctc

SEQ ID NO: 47229 - DNA, 183 bp, Mus musculus
  source 1..183: mol_type = other DNA
tgagacaggtctcagggtgtcctgtgtgcttagctcacttaaagacagaattttcccgtgctgagagttcagagcaccgagaagcatgcggccgccacatcccggcccccggtccggccagcactcgggccgcccagggtctctgccctcctctgcctggacagccaatagcggcatgccagc

SEQ ID NO: 47230 - DNA, 330 bp, Mus musculus
  source 1..330: mol_type = other DNA
ctgaggggtttcctagaaatcactcaggttcccaaaagcatttgagccatttgcccagccactggctagaattgccttgctctgaagttgtgcactgcagcggctttacaaacacttcgtacagacaggctgggtgggcggcgccgccgcagcctcccggtccctcgtggtacaggtgcccagagaacagacagcccggttccgagctggatcctcggggcgcggcgccggggcgtcaaccgaaggccccggcgccacctcggcatccctcggctggcatgccgctattggctgtccaggcagaggagggcagagaccctgggcggcccg

SEQ ID NO: 47231 - DNA, 373 bp, Mus musculus
  source 1..373: mol_type = other DNA
ttgggtgattccacaaatctgagacagagtgcttttatgtttcagaatgataagctcctgtgtttacaggcggagcagatcagtcctgctgccctggtctgtgacctgtgccccagggacaggcagggcaagtgcatctgcaccttgcgctaagcgggcctgtgtgagcgccgccgcctccgcctccagccgcgtgctgtcctgtgtgcggaccgcgtgcccatcgtgcgcagtgcggccgcgtgctcgagccgcttccgggcgccgcggcgctggggggcggccccgccagggggtgggtcaccgggactggccggcgcctgccccgtgcgcgcgaggcgtgggcgtgggcgggggccgcgggggaaaaggc

SEQ ID NO: 47232 - DNA, 435 bp, Mus musculus
  source 1..435: mol_type = other DNA
gacatgtatgtggctgctcccggggcagaacctgaagtcatgattccttttggattacctccactattatggagctcccagacagagatttacaggccagtcttggtgaagggcagagcagtggactacacccttggaagtcactgtcctgtctgtaaactgcaaggtccctgagggcagggacctgtctctcactgccaagtcagtccctggggacctgagtggccggtacacagcaggtacctactaaatgctggtacccgggcccggcattcatgcccgccgccattcatgcgcgcgggactcattcaccccgcgcgccgccattccgcgccctgtgcgccccgcgcccaccacgtgcgccctgcccggcgcggcgcggggaagcgccggagcagccgcggctgcgcggggccggggctggcggggagccgg

SEQ ID NO: 47233 - DNA, 296 bp, Mus musculus
  source 1..296: mol_type = other DNA
gcagcagcagctacgcaccatagcgcccttcaaagtgtggggaatcagcccgatttggctaattaagtacttttttagtgctgggtacccctgtaacgggcgtacgcagcctcgctaacatttgggaatcaattattttatctgggatttttattaaaaatttccagtgcaattaggaaaaaactgatgttctgagaaaccccctgagaacaatcaccagttggggttatttccccccaggccaatcacttttagagaaatgagcgcattgcagcagaatgcgctgacgtcaaaga

SEQ ID NO: 47234 - DNA, 234 bp, Mus musculus
  source 1..234: mol_type = other DNA
ccttctggaatgagcacgtggctgacccccctaggactgcagcagcctgaggcagggctgggcagagacctcagcacatgtttgttgaaagcccagggctctccttgcgccaggctcactcatgagattgaactagagaaggggtcaaagttggacacgggtgccaacaatgggaaatcctagcttcccaaggggagatcacctcttagggatggtgtgaccttaaacaagtcg

SEQ ID NO: 47235 - DNA, 253 bp, Mus musculus
  source 1..253: mol_type = other DNA
tgctcttgagtgtgacttacaccagggtgctgagatcaagctcagctcagagagtggacccctgcctaggctcccacacatgatcctaggtcccagactggagagttgtttattctagtgtccccgtgttgtatgcttgtgtttgaccattaaaaaaaaaaaaaaagtcacagccctccttgatttctcaattccctacgcttctagcttcaaggttgcaccacgtgtctgggccacgtgagcaacgccacgt

SEQ ID NO: 47236 - DNA, 304 bp, Mus musculus
  source 1..304: mol_type = other DNA
gagttcagggtcagatgaggtgtcaatggagccggacctgtcccaggatgcacaggtggccgcctgccactcagggggtggctggggcccggacctgttccctggctggggaaggcagcgccattctggaggccatggccaggaatcgtgtgagggcctgggccacctgatctctgctaagcagggacctctgggtccaaaagatttggtcgccaaacaggtcctcttgcacgtcgttgtcctgcgcgtcctgcgaggtgtcttgcaggccgtcatgcaggccacactgacggtaacgttgcag

SEQ ID NO: 47237 - DNA, 520 bp, Mus musculus
  source 1..520: mol_type = other DNA
atcacttaactccgggtttgaatcatagcttgactccttttgtgaaccatcgctggactcctggtttgaaccaccgcttgactccaggttggaaacatcgctcgactctgggtttgaaccaaagctcgactcatggtttgaaccattacttaattcgtggtttgaaccatcactcgactcctggttcactggatggctcctccacttcccgcactggatggctcctccacttcccgcactggatggctcctccacttcccgcactggatggctcctccacttcccggccactggatggctcctccacttcttggagtagatcagtgggccactggatggctcctccacttcttggagtagattagtgggcgctgggccactatctgagcccgcctgggcctcaacctgggcctcaacctgggcttcagcctgagcctccgcctgggcctccacctgggtctccgcctgggcctccgcctgggcccctgcctgggcccccgcctgggctccacggctcatc

SEQ ID NO: 47238 - DNA, 282 bp, Mus musculus
  source 1..282: mol_type = other DNA
atgatggaggctttttatccagactacagctgcagactccagtggcactatggcttagcccatccagcaagctgtgaaaaacaaaataagtaaataacataatttgtgtcccttattgtccaaaaaaaaagagtctttattctgaggaaacttagttctataggcctgaaggcttaagcaccacttaagtgccaccgaggtatagcaaagaaggtctttgagagccatggctgcctttttaaaatcagatttcctttactgtacagggaaaggtattcgctg

SEQ ID NO: 47239 - DNA, 465 bp, Mus musculus
  source 1..465: mol_type = other DNA
taattataactgctcaagtatttggacagcagtgggtcctgagcatggccatacccttgccactgaccaggtaagcccctctccactgggcagaggccagcatgggacctctacccggatgctggtgagaaatcatacacttgagtcttgctttttaaaattgccacattggagaggaggaccatgaggcttggggtcatgccaccacctttggtgtgcctgacacactcagtgtgccttctcttcatgagggagccctttaagtctccataatgacctcttttggtcagcaaatgttgttcaagcacacagtaggtctactggtagcagtgaggcttgctcagggagacaggggactcctgactctaggtaacccagagataagatgctttctcccaggaagggagcatggaatgttctcttaccttctaaaatattaatttagagaacttgcaaatttgcaga

SEQ ID NO: 47240 - DNA, 407 bp, Mus musculus
  source 1..407: mol_type = other DNA
ctgttcttccagcagcccaggggagggcgtggtgctccccttaggggagggggggcagctgctcccttcaccagttgctagggagaagcctctgaatctgcctggccagctccgttcctgcagaagtgggagctacaagagcagctgcagtagagccagggggctctcaagctgcacagctaagcttgactctccctctggtgaaatgcctccaccagacactttataaacgctcgtggagtcgccacagtctggcttttcaaagctgcagagcccacatctgcatttactagcatttgcatggtttataacaagcatttgggtttataaagcagagagacacatacagagatattccttccctgtctctcccttgaagtgacagctaagataaggaggcagtggcc

SEQ ID NO: 47241 - DNA, 518 bp, Mus musculus
  source 1..518: mol_type = other DNA
catgctattgcctactaaaaagcaagtgtgcttgttaattccaagtaacataggatagagtctgcaaccctctttcatattgagtatattagtagctgtacttaatagagttgcttgggtgtttgttggtcattaagaaaagcaaagacccatgtgttaactatccacctgcttgacagatggaagacttacacattgaaaatcagaactttgatattaactctaaactttattattacatagttctgatcattttcaaaatcagaaaatcatgtttaatccaagttgccctaatagacatgattttaaaccaacaatataaatgctagctcacgagtctatgatggagccaaatttgacatctggatgaattaacaaaaattagatgtggattggatccaaaacagagacactagtgtgccttgggtggtctggatatcccgagaagagagccccaacccaaagatcttgttttagggactgtgtattgttaactgtgaatcaatcagtcaatgaat

SEQ ID NO: 47242 - DNA, 616 bp, Mus musculus
  source 1..616: mol_type = other DNA
gatactagtggcagagtctaggaatagtcttcctttataattagacaagaacattaacagaagtaagtttgtaagtcactttctaaccttactgttcttgtagaagacccactggtctctttaccacatacatgtgtcacaaatacaaaatgcagattaaaaaaatcattaaatagataaaaataaaataaatatttgagaaaataattccacatgagttattaaaattagttataccatcattatattaaaaaatacagtaatttatgaaaaaagaaccttcttagtatggttcagagctatatgtctagtgttttacatcataatagaacatatagtagtgtcacacatacagatgtttggatcatctgaacaaaggaacaaaataccaattttcttttgttgatctcttctagctggatcaggagccccctaataagctgcttcagattgtaatatagacacagtgtaagtacagtccatattctgcatttaaaggccatttactgtattgataaggttgacgcacaaggtttaatgaagttgtttcaaattaaggatatgtattgaaaactgcttcataactcaaaaagaaactgaggaactctgaagttta

SEQ ID NO: 47243 - DNA, 635 bp, Mus musculus
  source 1..635: mol_type = other DNA
ttttgttttatttataatgtgtaataaaaggggcactagcatatacttaaggatcttgtccctagatctttgtgagttataattatctcagttgtactcatagttaatgtctcataagtcaaataagtctgggaagctgatattcacatccttaaatactgaatatatacccatcattctagtgacaagctgagtagtttacttttataataaaaagtattagtgactactaataaattatatttagataaattagaaaaaaatataaaaattggaatttatgttttaatcaagtatagtaaatgtatacatttactatacttacattacaaacagtaattcatttgaatttgatatatgagaatttcatactacatccaaaagactataggcaatggtcttcagtgccatgctttctttttaaaaagagcacactgtagagtaggcacaaagtgaatatcagtctttttattttctcttctgctatttagaatggatacccctaagctgatgtatatacagtgggccaagtggtaagtgtttaacgagatttttgccatgtaggcaacatataattaaaccattactataggataaaagatgatcacttgataacgatatagatattaaaagag

SEQ ID NO: 47244 - DNA, 264 bp, Mus musculus
  source 1..264: mol_type = other DNA
tagcatggtgtctctttgctctgactgcatgccctgcagatgtttcatggtcaagatggaacccatggaaatagcaatgatgctccaaaacaccacatggggtttagaattgactcacaggagagacttaagtctcatagttattaaggtaccatcatttgaccaagactaagatcaaaatggttagaatatagtcagcacagtggtaatgtactacctgaggggggaggtgccgcctctcctttctgggtggtttgacctatg

SEQ ID NO: 47245 - DNA, 260 bp, Mus musculus
  source 1..260: mol_type = other DNA
aggaagagaatcggttcatcctcaccgctatggctgatattgggcccccagtgagccctctaggagacttttgggagcttgagtcctaggacccgaagacatggtctttccatgtgaaatgcatgagatgtctatgggacatctccaaaccagccagctctggaggctttgtgctctgagcattgaggaaatgctaacatctaccaggcagggcttccaatgccctgatcgcatgatgcatgcttatggcccagagggct

SEQ ID NO: 47246 - DNA, 283 bp, Mus musculus
  source 1..283: mol_type = other DNA
acagccagggctatacagagaaaccctgctgtggggttccaggtagaacacaattctcatctgcaaatcatgagcccttttcataggcatttcatatcagatatctacattatgatttataacagtagcaaaatcacagttatgaagtaacattgaaaataattttacagttggggattacccacactcgaccagggggtggaactgcctgcccctgctgtggactgtcaaattgcttctgggcacctggcactttccagcactaaggtgtccgtgttgtctt

SEQ ID NO: 47247 - DNA, 214 bp, Mus musculus
  source 1..214: mol_type = other DNA
ccttactatgagaggatgtcaatgagtgtaactggcattcggtaggtagttggtaccaagttgtaaccttccagtaacggtaacacacactaatcaatgcgttttgtttcagcttcagaagaggatcctggaactgagagaggagattctgtcttcccaggtcttcctgagatcctgatgagtactgagcccgcttttatttgtgacgaaacaa

SEQ ID NO: 47248 - DNA, 225 bp, Mus musculus
  source 1..225: mol_type = other DNA
agatgagccaagcagcaagcctcttcctggataatcatagaggaacatccactttttcagtatcaactgctcactctgcccagtgatcctggatcgagttgttctttgatatttaaaaggtagattctccttctatgagtacaatattaatgactaatcgtgaggacatgacatcttcaccgaagaaagcgtgctatcgtaacctccaaatgtttgctttacgcg

SEQ ID NO: 47249 - DNA, 307 bp, Mus musculus
  source 1..307: mol_type = other DNA
cagcctgtgctttccacagctaaaagtatgtttatgctttttgtgattaaacatagaggaaattggcctgagctgaagccaccaccagggcagtgacaggacaggtgcacgtcagtggtccacagagcatgtcctcaggtgcccaagggccaatgagcaagataggactgtcctattggaagagtttaagtctgatatctaaaaggtagatttcatgtgcttcctgggtgacatgatccaccagggagatgaggctgggcgcagtgcccgtgttcatgtcatgtggagccagcttggcacagaggcc

SEQ ID NO: 47250 - DNA, 308 bp, Mus musculus
  source 1..308: mol_type = other DNA
tcctctgtgtgcagtgtacagccaggtagtcctaaccagggtttacctacagaaagcaaaaatctgagttctgtatttcctgagagagtgaaaatctcaatctgttgtaacatctgccagtaatatcagcccaagctccttggatggagactgaccagtgggcacacatctggcaggtggtgtttgccatgtaattggctgattccgaatccctttgtatattcggtttattgacatggaatatacaagggccacactcagaacgcttcatgggcgcaagatgccaaagcatgctgagcctgggtccc

SEQ ID NO: 47251 - DNA, 318 bp, Mus musculus
  source 1..318: mol_type = other DNA
aaatgcggccacggacagtgtgcttgagctagctgtaagtcacctggtcgggttacctgagcaggtgaggcagctcatcttccggaagagatgttggtgccagcaccatccagaggggcgtgcactctgttcaccctgtgggccacctatcctaccaagtttgggtttacataagatgccatgaggcatccgtggtagctgctgcatcacaatgttgacttcagatgtggacatgatgttgacttcccatgagggacctgaagtcccaatatcctgtctctacaggagagtctgtgagatgataccacctctagaagc

SEQ ID NO: 47252 - DNA, 312 bp, Mus musculus
  source 1..312: mol_type = other DNA
ggccacggacagtgtgcttgagctagctgtaagtcacctggtcgggttacctgagcaggtgaggcagctcatcttccggaagagatgttggtgccagcaccatccagaggggcgtgcactctgttcaccctgtgggccacctatcctaccaagtttgggtttacataagatgccatgaggcatccgtggtagctgctgcatcacaatgttgacttcagatgtggacatgatgttgacttcccatgagggacctgaagtcccaatatcctgtctctacaggagagtctgtgagatgataccacctctagaagc

SEQ ID NO: 47253 - DNA, 288 bp, Mus musculus
  source 1..288: mol_type = other DNA
ggtgaggcagctcatcttccggaagagatgttggtgccagcaccatccagaggggcgtgcactctgttcaccctgtgggccacctatcctaccaagtttgggtttacataagatgccatgaggcatccgtggtagctgctgcatcacaatgttgacttcagatgtggacatgatgttgacttcccatgagggacctgaagtcccaatatcctgtctctacaggagagtctgtgagatgataccacctctagaagcggaagcagctgaattcgattcatctaaacgagt

SEQ ID NO: 47254 - DNA, 235 bp, Mus musculus
  source 1..235: mol_type = other DNA
tcagcatctccctatctccagcttacaaaggagagatagagtaagcgaggggctccaggatggttcttctggaaactcagccatcggttgagcatccgagcctctccgtggtactcggagagaggttgcatccctccagggaggccacctcagggaatcggtgcccgctgcagcctgcgcccaggatgtcacagggtgattccagctccaggttcgctttattaatgacgaatat

SEQ ID NO: 47255 - DNA, 251 bp, Mus musculus
  source 1..251: mol_type = other DNA
aaagatccaatcatgaatttatttgattaaaggtatcatgcaaatctggacccaccatgcccactgtcgtcaggtagctatgtgaacttactgtcaaccaagcaagttctttgttgtctcattttcagtggatcataagctaaaaagtatgagtgtcagcttttcagagtatccttggcagtggtgccaagactagataaccgccttctcacttcctggaggaagccagcttcagagaagttcgtgacgaa

SEQ ID NO: 47256 - DNA, 826 bp, Mus musculus
  source 1..826: mol_type = other DNA
cgctgccccgcgccccgcgcccgcagcgccccgcgcccagggcgtcccggagccggccgagggcgaggcccggcgtcgcttgccgcgactctccgggtctcccgagctgggcgccagcccacccgcgggccctgccctcggcacctccgggctggagccgaggggcagctgacccgggaaccgcggcgtccggcgggagcgagatgggacggggcgggcgcggcgcggactggggcggcgcgcggcaagctcgggcagcggcggggggcgcggagcgcggtgtgcgtggccgaggcgcgagtgtgagcgcgcgcgggaggcgggcggacgggctgcggcagtcgagcggcgcccgcgggcgagcggggaaggcggcgggaacccaaagttgcctcctcgcgggcccgcgtccccggcggggctgcagccgggggccggccgagcggcggccgcagacctggactcccgcggtacctgggcagcgaccccgcacgagcagcagcagcgtgggcggcgttggcggcggcgcgcgggaagcgaaccggagctccggcgcggcgctgcggccgccggggaactcagctcaggtgcgcggcgaagagggcgcgggctgggacccgcccgctgggacctaggaggtgcgaggcgcttgcgagtcgggctcctagtccctggacacagcggcttcggggtcccccgcccctgagagcgggctgcgggactcaggcccgcccctgccagccccgggacgcaccgccccaagatttctggggcatcaagttgcaagggggcgggccccggtcggaggtggagtctcccgccaatt

SEQ ID NO: 47257 - DNA, 398 bp, Mus musculus
  source 1..398: mol_type = other DNA
cctctctcggcctaagtctacacttggaccgccgtgggcagagtctgctggcggggctgaggcgagccccgcctctgaggcgtgcggtgggcggagcgtaccccggagccagcagcggggggcccaaggaaaccgccgctcgcgcggtcccgggtctcctccgcacaacacacgagccggtccgcaccgagggggtggggacaggccgcgcagtgggcggggcgacgctgcggagcgttagggcacgtggggccgtgtcggcccagcgtggggccggcgcggggcggggcctggggcgggggcggggcctgccgggagaggggcggagagacgccgccgccgctgccgccgccgccgccgccgccgcggctgccgcagcctctgggagcctggaaaag

SEQ ID NO: 47258 - DNA, 427 bp, Mus musculus
  source 1..427: mol_type = other DNA
ttgattcctgggaccaagggtggaaagaaagaactgtttcccacaggttgtcctctgacctccacatgagctgtggagacacacacacacacacctgacattgtgttctgactattaactattaagcagctcctccacgacttttagtatttaaatagataaccccttgcttcctggaaactggggtgccagcatgctctgctcaggctggaagtctagccagaggtttgcctagtgagcaccaggccctaggctcaccccctagttctgttttaaaaaaaaggagacggggctgcggcccccggtgccaccctctaagagctttcttacctaaaagttagcaaacagaacgctctttccgcttgcactggccaatcagcgagctccatgcctagtgacatcacgaagcagccagctccagctgcag

SEQ ID NO: 47259 - DNA, 187 bp, Mus musculus
  source 1..187: mol_type = other DNA
gactcagaaattgggattcaaagtccccagaggcacaagacagtcctcgaagtcttggtggcctctctggtcttaagtgcaccccagcagagtgccttgcacccaagagtgcacactcccagtcacagccccaggagcagtcacactgggttgccatggagatacctgtgacatcatgcaggcctaa

SEQ ID NO: 47260 - DNA, 398 bp, Mus musculus
  source 1..398: mol_type = other DNA
attatatttttaaagatcattttgattgaacaggcaagttatgacctgaactttcaaaggccagttactaaccctaagaaagtaagcaaagagattctgcccttcttgtcctccgaggagcaatctgagcccctgcccccgaacccacagagcggtgggtgctgcaggtaacactgtgaagcaggtatctaataacgactgggcagttgggactccagactcctgtcaattctcgtcaatgcatccttaaaacactattttttgcgcagccacgcggcgccgcacatagccccgcctccagtcgcatgcgtaacgtcgcgacgccgaccgcgagcgggcgccggtggctgcagccagcgggcggggcggggccggcgggagcggcggcctttagggcg

SEQ ID NO: 47261 - DNA, 549 bp, Mus musculus
  source 1..549: mol_type = other DNA
acttattttcacactgtgcgagtgtgtgtgtggctttttttcccacgctcaaaattacagtaaattaaggtagcacaaatttgattgagggtcatagctttcagtaagcccactaaggcttcagacggggtcagccctgacgggaggcgccccacccatcaaggtggaagccagggggggggcgggactcgcctcctgcggggtccgcgttcccaaagggagcccgaagggggacctttcgcgcgcgttcccatggggacgtcccttttacagagcgcggcttcaggcgcatgcgctggccggcccgtccgcgcgcgcgcgtgcggcccgggaaggcgcccggcccgccgagcgttccggactgcgcatgtgcagagcacctggctccgcgcgggttcggcgcgctccaggtggaggggcggggcccgtccattgcgcaggcgcgggcgcgcggccgaggcgacggttggggagggttcttccggaaggttccggaggcttctggaaagaagcgccgcgcgctgggcgggcccgcctctatataaggcc

SEQ ID NO: 47262 - DNA, 436 bp, Mus musculus
  source 1..436: mol_type = other DNA
gtctgggttcagtgatccaccaggaggctccaacaacaggatatatggtttctattgcccaagtcagaacacttctcccatctgcctgtttaactgggtcaaagggtaaagtttgtttaaaatcaggcttgcccctagacagataagagtgacagaccctgtcaagccttagtctttattgaatttaaatgcagtttatttttagacaaccctttttgaatttaaatgcatggggtgagaatttttcaacctcactttacaaacactacttttagcaaagtaaatgtttgttgaattaagcagtaaaacttacaaattacacagggtaaaattatacttaaatttaggctgcaccgcgcatgcgtgaacgggccagcggtttttaaaccctctcctttgcgcatgcgtatacgcatgtctccggcctcctaagggt

SEQ ID NO: 47263 - DNA, 537 bp, Mus musculus
  source 1..537: mol_type = other DNA
cgaagcatcaaatggtgactgttaggtcctactttaatgtgtgcgcttgccttcacctaatactttgtacaggatattcagcacaactcgatggttctcctttgaggctttaagaaaatcaattagcttaacctttattccgacagaacctactttctcggtttcaggtgagacttgaaaacggtaccccgcacccaagcggaccgtcggagtcctccctagcttcccagggaggatcgctgccgggaccaccagctggccaaggccaacgcggtggcgtctcttagggatcgggtccctcagcgaagctgcagagcgagacaggagccccgcaccaacgctcagcgcgctcgcttcgacccgcaccaggagggcggcacccaggggaggagcttgcgcacgcccctccgggtggagcgcgccaggtgagcgcgcgtgcgcagttggcttcggcccgccttcgtgggggctggctcgccagtgggcggggccgcggaggccgaggacggcgcctgcgcggtgggcgtgatccgggca

SEQ ID NO: 47264 - DNA, 444 bp, Mus musculus
  source 1..444: mol_type = other DNA
gacttattttttaaatgttatgtcatttatggtacatagaaattactgcactgcaattaaaatgtagtgtcaatttgatattgtaactacagagaacacaatctaatctagagctaaaaggatgctttcagtttaactcagagtaagataggcggcagcgtccctctcgaacgcggtttaagccgccgtcccgcaggggcggggagccaccgtgtgagcgctcagagccgacggagtgcgatccgacacccgctgcctagccccgggtacctgcggcgccgccccgcaggccccggggaccctcagcccttcgaacgcggatgacgccgtcagcccctggacggcctcgaggaccttcgtggtctgtcgccttagcaaccgccagacccttaggaggccggagacatgcgtatacgcatgcgcaaaggagagggtttaaaaacc

SEQ ID NO: 47265 - DNA, 466 bp, Mus musculus
  source 1..466: mol_type = other DNA
ctcatgccataattgacaattactgagaaggttgccaacataaagagaatattccatctatatagaaatgcttaagataataatgttaacagagggagttctaggacactctgtgcagggttacacggagaaacgtgaataatgttaagacaacaataaattatgtatatattacctatttcttttctcaggtataaacttgcaattttctaggaacctcacgagactacactttatatatgtgaggattataaattataatgtgacctgtagttttatctgaccagactgcagtctgtgaaaggatcctctagagtcaccctgagcagccctctaaactcatactgcagaggggaaaaggtttcctccagcaacccttgtaactgtatgtctgactgactgctcagacgtttaaactggactcgggaactccgaagacctccactgaggatctgccgggcacgcg

SEQ ID NO: 47266 - DNA, 400 bp, Mus musculus
  source 1..400: mol_type = other DNA
ctgatcatattcagtcagaccctggacggtcggctgtgcatgcatgcactcccaagataaaaacttatcattttacggatgaccccgagtctgacccagggtccgcctcgggggccacaccgggaggcattgcctggagccgagccgggacgccagggcggcccggggcggtgtgcgaacgctgcgacgcccggtgctctgcacagactccggctgacagatgcgccgcgtgcggcggctgccagggggacggcgacgcggcgggcggcgtcggggacgtcggaggcgtccggcacccgcccgcgcgctcccgaacacacctcagccccgccaacccggaggaggcgggatggactccgggccgcaggggctgctgggagcctgttgcctaggcaagggc

SEQ ID NO: 47267 - DNA, 379 bp, Mus musculus
  source 1..379: mol_type = other DNA
aaaactaacttaaatgaatctctgcttttgtaattttccatcctgtccttcccccatgtgggtccgtgggttctgaggtgctgagagtaaacccagggcctagctttctgtgcttatttaaaaataacaaaagtgattttaatcttcacaaaccctgtgagatttgtaaattatcatatacatctgtcagatactttgtgaaagccctaccttgaactgtctgtcgtaagtaaggtagagctgggactgggctacagagtgagaccctctctctctctctctctctctcaagatttatttatttatttaatgtaagtacactgtagctgtcttcagacactccagaagaggagtcacagaagaacagtcagtgctctta

SEQ ID NO: 47268 - DNA, 247 bp, Mus musculus
  source 1..247: mol_type = other DNA
taggggtccctaagggtgaggatcacggctgactaagtttgcctgacttaggcacagcagtttagctgcttacctcttgtaagctacagggatgctctgagcgtcacaccactcgaggtccaggcgcgccctgcatgtcacgtcgcgcgcggactaggtactgaggaagtgacgtcacttccgtccttgggcccttgcctaggcaacaggctcccagcagcccctgcggcccggagtccatcccgcc

SEQ ID NO: 47269 - DNA, 641 bp, Mus musculus
  source 1..641: mol_type = other DNA
gggggacactgccacctgagagcctcgtccccaggttcccttctcgatcgcccctgggcgacgcgggggcgcaattagtttcttcaattagtttcccctctttgtatagaacgtgcgcgtactcctccgcgcgagggggaaagtagtcccgaccttgcccgcgattgggaagccgatgggacgctcggcgggatccccgggggaggtggcgcggggcccacagggtgcgacgtgatcccgcccccgtggcctgacggacgcgcccggatcccgtgagagccaatggaagctcgcaggggcggagcttgcgagcgacgggttaggctgtgcgcggccctcctcccccccaggccccgcccgcggctcccggagtagttaggggcggcgatgagagccaaagttgcgctccgttcggcatcgggggcgaggcggctcgttgctcctcccgccagcggatcccgcgcgctcgcccgcccggcccggcgcccacctgcgccccctgcccgcggcccgccgcccgcgcctcgcgagccggggtccccgtcactttggcccggccccgggccccgccgatgccggccatggtggagaagggccccaagcggcgagggaggaacacggcggcctccgcagcctcggcc

SEQ ID NO: 47270 - DNA, 491 bp, Mus musculus
  source 1..491: mol_type = other DNA
tgtgtgagcttccagatgacttgccatggcagtagtgtccacacagggcagatccacttcgggtgggtatgtaggggtcagatggtaccagacccgcctgtgagcatagagacctgcccgcctgcctgtgaactctgcctggcgcccgtcgaggtggcaaggcgaggaaccttccttgcttcccctccgctccccggaaagaccgggacgcgggcggggcgcgagggcgcgcgcgcgcgcgcggaggggccagggccctgagggcctggggcgcgcgccgccgttgctaaggccggcggcgagcgcggggccgagggtccctagcaacgggcgcgggcgcgcgccagccgaaggggcggggaggcgcgcgcgggcggcgggggcgggcgcgctggggcgcgcgcccaggcggcccgcggggatttccagcgcgcgagaggaaccagcgcgagggtgcgtgaggcggcgcggccggcggccgccgcgtgcgc

SEQ ID NO: 47271 - DNA, 353 bp, Mus musculus
  source 1..353: mol_type = other DNA
ggttcattctcagagcctctcagcagggacttagaagctgagatgtgcgcagtgctcacaggcagaaatacctctagaagtttataacatttcttaaagatccaaaggcagctgcctctgctgaggagtctgtctccagaagactgcaatgcagcgcttagcaaagcccccttcaggctgctgctgctgccgcctatgagctgaaggaggagcaggcaattctgtgaatgccttggctagcacaggcttgtcctgcagcagctgagtttctggtgcatgtgaaactgaagatgcctttgcagttctttaacaatcatgaatttttatatttaaagtatttatgaatatcccaa

SEQ ID NO: 47272 - DNA, 459 bp, Mus musculus
  source 1..459: mol_type = other DNA
ttaaagtctggcttcgaccttgctggcaatgtcgatcctccaagtcgcctctacagctcacctcagccacgttaaggttcccgggcccagtgcgtgcccggaccatgcgccaccggcctcgggagctgcactcagcgctgcaggaggcgactcggacccagcttgtaaccctggctcggaaccccgctctcggggcgtggttagcgcggtgacacacccgcacctctggagctccgggactcaggcgcccgggctcttctccgtggacgccgagcgcgtgccctgcagctacgacgacgtcccgcgtggcgcttggcccaggccccaacccggtgcacgttcgcagcgtctcggcagtgggccaggtgagcaggcacgggagggctggggtcccatcccctgtgcgcgtccccgcggcaccctgcagctgcgcgcgtgggcccgcgcactcagactctc

SEQ ID NO: 47273 - DNA, 288 bp, Mus musculus
  source 1..288: mol_type = other DNA
accaggttggctatacacgcatgcatccatgcctttgaggctagccatgccagggcgttggcagggcctatccagctccaggagcctgccgggactcgccgtgcccggagttttccgcgggtccctctgagagtcccgccccctggcccgtgacgcaacaatggtgcagcgcgacgaccaatgggtagcggcgggggccggcggcgtgagccaatggcggcggcggcccgtcccgcggtcctgcccggccccggccgcactgcgccgcccgccgccctcccctcggcg

SEQ ID NO: 47274 - DNA, 758 bp, Mus musculus
  source 1..758: mol_type = other DNA
accacccattcttttgaagcaaccttggggtccacaaagggctcctcctctgcggaggttggggatgtcataagggatgttttacatcaacctcgactcgcctggagacaacagtctactcgacagggcactgcgcatccccagcggcgcgtgcccagtggggagcgcgcgtccagcggaccccggagcctcccggcaggtgccccgcccgcgtctcccgtgcgcactgggacccagagcactgtcggttcacagatgacccgggggtcgcgccggacagctgcctcgctaggccacgagggtcggtcccgaggatcgggaacagagccgaactatgggacccagggcgcacacagcgcggctgggcgccccgcccgcgctcctgtgcgcgtgcgccacccgcaatctcggtttcgcactgggtaccccgccccacaccgtccctacggcgaaccgcgaggcccaaagagcggaggatcgccgcgggccgagggcggggcgtcgcgctgaggtcagcgcggcggcgatcggccccgcggtggttggctgcgccgcgctggccgcgccctggttggcttgcaggtcgcgggctgggcggctggccgggctgaggtcggggctcgggcgccggccgggtgtacgcggtgctgggctccgccgcggtccgggtcggtgacggcgcgcgcgagggcgcggccaggcgccgagggcggggacggcgtgcgggcggcgcctaggggaggagaccggcccatgga

SEQ ID NO: 47275 - DNA, 192 bp, Mus musculus
  source 1..192: mol_type = other DNA
gaacacctgttgggtgtttggccaccctagtggccggttgttcaccaaacccggaatgtgggacaatcctccaacctgccccacttcccaacatttcctccttgggtagtttggggaaaatcctctttttaccatatctggccacacctcatattctaacctggagactgggagagtccttccggaggccct

SEQ ID NO: 47276 - DNA, 196 bp, Mus musculus
  source 1..196: mol_type = other DNA
tgccttggcgctgtgttctcacagcccagtactgagtactcagtactgagtactgtaaccagagcatcatcaggggacttgtgaaagcagaaggcctgagttctccggagcagtgtatggctcacacctggtgccccaggcattacagaatagactggcctggagctgcagcccttggctggagagcactagagga

SEQ ID NO: 47277 - DNA, 670 bp, Mus musculus
  source 1..670: mol_type = other DNA
tttgcctgcgtcttaaaaactaagttagatacacacacatactgccagcaggcagggactcttcagtcgcttcctgctggaaccacccattcttttgaagcaaccttggggtccacaaagggctcctcctctgcggaggttggggatgtcataagggatgttttacatcaacctcgactcgcctggagacaacagtctactcgacagggcactgcgcatccccagcggcgcgtgcccagtggggagcgcgcgtccagcggaccccggagcctcccggcaggtgccccgcccgcgtctcccgtgcgcactgggacccagagcactgtcggttcacagatgacccgggggtcgcgccggacagctgcctcgctaggccacgagggtcggtcccgaggatcgggaacagagccgaactatgggacccagggcgcacacagcgcggctgggcgccccgcccgcgctcctgtgcgcgtgcgccacccgcaatctcggtttcgcactgggtaccccgccccacaccgtccctacggcgaaccgcgaggcccaaagagcggaggatcgccgcgggccgagggcggggcgtcgcgctgaggtcagcgcggcggcgatcggccccgcggtggttggctgcgccgcgctggccgcgccctggttggcttgcaggtcgcgg

SEQ ID NO: 47278 - DNA, 226 bp, Mus musculus
  source 1..226: mol_type = other DNA
tgtggctgcagccagaggggcggacaggcctggcttgatatgcttgagatttcacgtgtggtcctcacagagaaagaacttttttgggggtgacatctcttcaccacaccttagatgaaggagctggccagagactgccatttaatgtcagctgcagggtccctgaacctgggtggcaggccagatgatgacctgtggtcagggtggggctgataaggccccaatg

SEQ ID NO: 47279 - DNA, 302 bp, Mus musculus
  source 1..302: mol_type = other DNA
ggtttccaggtctttcctcaaagctctgtgcttagacaggcagggacagagggcagaaattcccctttcagggagtgctgaggatcacccccagccccatcctaacctcaggataatgatgaagatgggccccatctggtgatgagaggttgagaggtcccactaccagaggacgacaacagctctccgctaagcggaactcgtggctcggcccggccccgcccccaacactggactcgccgggccgaggcgtccgccagcggatgcagagtctgggcggagcctgcgactattttaggagg

SEQ ID NO: 47280 - DNA, 325 bp, Mus musculus
  source 1..325: mol_type = other DNA
tgttctctggcctccaagctcaagctagtgaccacaagattattttaagctaaataacatacaccccatttgggtagtgtgggttccacactcaagctgctgtgtgacttcagaatttgctcacgagtacagttcctcttgtggtcccaggacaacagctgttttgcttgtggtagatttctgtgatcccaaaactactgtgaactcttagacctctccgcccccagagtctggtggagtcagagaaggtgcagaggctgcccctcaacctggaagctctggagcctccagtctcttccttggtgtttttactggagaaaacaga

SEQ ID NO: 47281 - DNA, 375 bp, Mus musculus
  source 1..375: mol_type = other DNA
agcagggcaggcagcctaggcagctggttcccccacctcccccgggaggcagcatgggacccaggctttctcctctgcagccggcgaaggagccaggagtgttgcactgtacaaagttccagagcgtggggtcttcccagcctggcggggccagcggtagggagcagaggccgtgagcgggcacgtatccaaactcataggatagccagctcaggactgactgaggggccccagctgcggtgggatccggagcagcgcgctcggctaggcgaagagactcgtggggccgagacccagggaccctgggcggcgacggggcctctcctctcgggcgccacggggacgcgcgcgtgccctccgcctcgcgccccgccc

SEQ ID NO: 47282 - DNA, 550 bp, Mus musculus
  source 1..550: mol_type = other DNA
catgttaattagcaagttggaacttaagccaccctggctgtatttcagtttccctgtaattttaacacggtgctttagttaactataatggaatgtcttgtctttatacagatcccaccaaatattttggttgtgagctgggagcacatacattgtcaatggatctcatggattcattaaaaaatttgttcagaatcctgaaacagatctgtgccttttaggttttttttcaagactatcatgaagaaaattgggttaaattagtactttagatgtcttctggcacttttataatgtaacaaaatgtttttactttccttaatagcatgtcaatccaaagaagcaaacttgacctcaaaaacccacctggtaagtctttttaataaattgactagtagaataaaagaagatttttttttctgttgttgctatataagaatacactatgagctcataagtgaattttatttctggctatcccagacctctgaatcaggtaagacattggaaagatgtctgttgttaagagtcaaggcttatctattaagct

SEQ ID NO: 47283 - DNA, 722 bp, Mus musculus
  source 1..722: mol_type = other DNA
tgcacctaggtctgactggcaggctcagaccctgcccgacaaccgcgcactggccgcagcagcgcacggacgggtaatgctcagccgaccgtaaggacagcgcgcaggccgcacgcgcgccgcaggacagggctgcgccttgacccctgcctggagcatctgggctggatccccctgagggtctgcgctttgattccgcacaacgcccgcccagctttgggcggccggcgagcagcggccgcgagcctccgggccctgccctccctggccggagtctagatctccggcctggcccgggccgtgcgcccgcgggccccggggctcattctcccccagcgccggcggccgcactggaagcgggccggctggccgccgccgcaagcctcagggcacctcacgggcctcgcgggccccgcgcctcctcgccgctcgcagccgcagcgccgcggagctcagccccgggggctcgacacggcgcggccggcagcccctgaagaggcagcaagacaggccgccgcggcctgcaggcgccgaccatggagggagccgcggaggaggcgcccacgcccggctgctttcccttccccggcctcgccctgccggctgccaccgccgctcccggcacctcaggagccctccgctgcctccggctgccggaagtgacgctacggccgcctggagttccgccaatcagcgcggtcggagctagctgccggctgctg

SEQ ID NO: 47284 - DNA, 494 bp, Mus musculus
  source 1..494: mol_type = other DNA
gctgctgactaagccaggctgctgctctcagaactctgggatgatttcaactctcagtcgaaacttttaccaaaaaaagaagttttttttttcttttaaataatggaagagtgtctaggaaagaaaaaacctaccagcctggcctttacagaccgggctgggctggacggggtggccctacgtggcgactgagccccgaggcggggggatggccaaacctcgaggcacagccggacctgactggggtcgagaccaccctaagttgcgcggggacccaagcagagccacaaccgcggagtctcggctcggcggcggcttggctccccgagctcagggagaggcagagcctcctggcgtcacgcgtggcccagtggacatagccggcccggccccgccccgagagaggactaggcagggagccgggctatcgcgagaccgcgaaggcctcggctgcccggtacaaggggcgggctccggggccgagggtagcttga

SEQ ID NO: 47285 - DNA, 660 bp, Mus musculus
  source 1..660: mol_type = other DNA
agccggcccggccccgccccgagagaggactaggcagggagccgggctatcgcgagaccgcgaaggcctcggctgcccggtacaaggggcgggctccggggccgagggtagcttgagcgcggcggcggcggtgagtccgcggggggcggtggcccgcgcccctgccctgcgctcccgcccctccaccccgcgggccgccggcgggggcaggcgccgcccgccgctcactgccttgtccccgccaggtcgccaggctcggcgctgctggtgtggacgcggacgtcgctgggacagtccctcccgctgctcggcggcggcacctgcccagccgcccctccgctcgccgccggccccgccgctccggacccggtttccagcgcctgcgggcggcgggccatggcggcggcaagatggcggcgcggccgcgtgacccgccgcgcgtgtggcgcagtttggggggggccgggccgtgcgggagcgcgcccgcgcgcgcgccgtggctgagtcaggcccggggcgcgtttgtgactcagggaggccgcacctctgccccgccggccgccggaagggggaggccgggcgacgggctgcgaccgtcgcgtagccatggggacgagggcgaaggtcggccgtgcgccgagggagcgaggggagggagcc

SEQ ID NO: 47286 - DNA, 279 bp, Mus musculus
  source 1..279: mol_type = other DNA
tggactattagtaacagtttgtcttttctctccttagaagacagccttctatttatataagcccctaccggcatttaggatctgatcctgggggcgtctacgtgatctcatcaattgagccgacgaagcaggagcctggctcctttgctggctgctggagctcaaaagtcaatttttgcaaacagtaggcgcagcagccggcagctagctccgaccgcgctgattggcggaactccaggcggccgtagcgtcacttccggcagccggaggcagcggagg

SEQ ID NO: 47287 - DNA, 433 bp, Mus musculus
  source 1..433: mol_type = other DNA
gagcaatttaaaaattttttaacaaatactgccaaattactttccagaaaaagatgaagctgctggcagctgcagcaggcaagtcaaaaacagtctctaggaactaaatgtcttgaatccttggcggtgttccttagagcccgcccaaggtcagaacaccctgggtgcttccgggcgggacctcagccagactgcgcctctggtgatgcccgcaggcaccttgaggggagacagggaaggcaggagcctcaagtgccatctggcttcccagactcagtttcctgcccccggcaggcaccaccggggtggccaaactgcgcagcggggtcgagacttggggaccgctagggtgggccgctgggggtgtcaagggctgctgcctcggacaaagcggcggcaccaccaggccggcgacgcgccccttaagagctca

SEQ ID NO: 47288 - DNA, 655 bp, Mus musculus
  source 1..655: mol_type = other DNA
acactgccattctacagtttggagacagctagctaactttctacttttctgaaagaggatagagcaccacgctctcagggcgggcaggccacagaactcagtccccgggagggtccaagcccggccctcgcagagcttttaccccgggaggtctgggcggcggcggtcttggctgccgcggggggctgcgcccttcacggggagcggcaccgcagcggtgcccccagcggcatcccccctcgcccttcccggctaggtctgacccgggcagccggtgaaggggccggcggaggcggcggcagctactggccgcggcggccgctcccgggtctcggcccggccggacgcgccgccgcctgacctcacaatgggcgcgcggcgggcgcgggcctgcgcagcgagggcggcggagcgcccgaggccgggagaacggagctcgcgccctcgccccacgctcacctgggccgcacgcgccatcgcgccgcagcgttgtcgccgtcctcgcagagcgggcccgtcagcagtgagcccggggaaaacttcctctcctcgtcccgcgcgggccccgccgcccggcgtccgtcccagggaatgcgcacggtcggcctcgccgcgcgtcggctcgggctttgcgacgccgccgtaacgccaacct

SEQ ID NO: 47289 - DNA, 606 bp, Mus musculus
  source 1..606: mol_type = other DNA
cctttgtgggaaagaaatgggctcgacacccaacatctgtgtgctggggcaagtgaagcctgcagtaaagactgaacccacagcctctccttaggccaacatgggctgctgcgctccccacgggagctgcccctttggccagcctttgaattttctaggaggtcaaagtaactggatctgcttgttaagatcaaaagcacctgcctccctgattcccaaggtggggaggctgtgggcattcgcaacccctccccgtctaaaggcacctggagggttcccaagccggtggcaggcaagctcggccttgccactgactcagcgtcccctccaacccgggctcaggagcaacctgagctggcaagcctgccctttgggccaggctggaggtcgagcgagagctgcggccaggagcgagccgcagagggtgggtcctggccgcctggcgatcttcccgtcctccacgggtggaggcgcggcgagggaagcctcccggtctgaggccactcctggagagctccgggctgcggaccccagcctcagtttcccctgagccccgcccggcggcgcgagggcgggtgacgtcacggcgcacagcattgtggggcg

SEQ ID NO: 47290 - DNA, 526 bp, Mus musculus
  source 1..526: mol_type = other DNA
gcgtgggccaccacgcctggcaacctaggccttccttaagcaaagcattctgttgcaaagacagtgtacttacatataataaataaataaatcttaaaaaacaactgactaaaaaaaaaaagctttatttagttttatatatgtgacaattgtttttttgaaaaaggacctgcactgtggatctctgacatgcacggagctgtgttaatacaagctcgcgctctccacagcggatcccgggcagtgatcatcagtccgtcggagaggtgcaggcggcgtgggtttgctcggcggccttcctccctgccagcgcccccggcgtcccgcttacccggctggacgccgcatccctgtgatccgtagggcgctcacgggccaacctaacgccgccgccgccggagaaggaccggcagagaagccggcgaagcgctctgcttccgggccgcaaagccgccatggcccgcgcgtacggcaggatcgcgacaggttggcgttacggcggcgtcgcaaagcccgagccgacgcg

SEQ ID NO: 47291 - DNA, 607 bp, Mus musculus
  source 1..607: mol_type = other DNA
aagaaaagttgtttcaaagtttatcaaagtcgggtgtcttttaaagatatttaatttgctttgaaataaaatcgcatggaatgcgtcccaagtggccaagctttgcagagtttagaacttcgaagattgcaaaccctttgccgtgggcaggtggaggcggactccctcaccctcgcccaactcgcgcacggctcacgggtgagccgctccaccgctccccctcgggcctccccggggctccgcaccgcgcagccaatgggaacgcccggaggggagccgcggccgagcgtccctaggacggaggcgggagacgccccggctcgggttggggacccgggggctaggacgcacctccttgtccggaacccactgcggctcctccaagccgaaagggcttccgaaggcgcggtgctccggcaccatgcgcaggccacttggcgagcgcacaagcttcttggcgtcgcgacgcgcggccacccccgaggacatgtctccgcctgacccctacggctggccaccaatcggcggtgaagaccggaggggcaccctcgcccctctagggagttggccaattagtcagccacgtaggcgcctcctctggcctctc

SEQ ID NO: 47292 - DNA, 317 bp, Mus musculus
  source 1..317: mol_type = other DNA
gtctgtccttccagggcctgaagtcaggcacctgagtttctagggcaaggacatcacaggttggcctagcctggccccagaggatccctataggctggcgcagccttaagctggtagaatcttccttcacttcataggctctcaagatgccagggatcctggaaagggcccctcaggcaggacctggcctagggccactactcggcccagccctagccaaagtctttgagcttcgtgcaccgggcagccctaaaaggccgcgcgcggacaggccgcgggcgagcaggggactctctgggactgcgttggtttgacgt

SEQ ID NO: 47293 - DNA, 382 bp, Mus musculus
  source 1..382: mol_type = other DNA
tcactgagctcaacactgagaacctgtgtctcagacaaaagcacagagctccatgctccacttggccgcctgccttccggagaagtagggctgggtagctgatttggccaattacccaacgcgcggtggctcacacctgaggcaggactgctgaatccaaggccagcctaggctacaaagcaggtcccgcgctcagttcgattccttcaaaccccgctacgggcttgaaggggtgccccgctggggaagctcgttcttgactggggcgcgcgcgctgagaggccagaggaggcgcctacgtggctgactaattggccaactccctagaggggcgagggtgcccctccggtcttcaccgccgattggtggccagccgtagggg

SEQ ID NO: 47294 - DNA, 620 bp, Mus musculus
  source 1..620: mol_type = other DNA
gttgtgtctcatctgtcagagttcaggcaaatggcacaattgcctgcccacccggcagcctctgctgagggtctgctctgggctctgtcactcaggctccctagaccctgaaggtacagattggactctgccctgggacgttccagctggatctccaaggatggaaggcttcaatggctcagcccgcggtggaagcgggggcagagtcccaggtctctggggcccgggacactgagcggtaagacacatcggggacaccctgtgcccgcctgataggatccagttggtctgtggccagctcgccactggcctctcggacctgagaggttcgagtctccaccggtcgcgactgtgggccggacccaacacaaggttcggaggtccctgggcgccccaacgccccctttgctggtatgcaggaggaggggcggggtcggcgtccgcagcgcgcccctcccccgccgccgagagcgcagacgcgcacgagcgcgctctcacctggccgcggcggagaagccccgcctacccccaccggaccaatcataggtggcgtaggcgggtgggggagcgacgcgtggggcggggcctccgcagcctgcggggtgagccgagtgggtggc

SEQ ID NO: 47295 - DNA, 309 bp, Mus musculus
  source 1..309: mol_type = other DNA
gggatgaaagacccgagccacggtttaggttattaaagccataaaccatgtaaaaggggctttatttacttatttacttaaggacaatttgtccttcagcactgaaagtcccgggcgaccactgggggcgctgtggtgcgcaggcgcggaaggccgggcagccggcgtctggtgtctccgcccagcaggccctgcgcggcgccggtaagagcggaccgctgaccttgggtcagcccctgcgccgcacaggggggtccaccgggttccccgcgactgtgacggagagagtgcccggctgagtcatccaga

SEQ ID NO: 47296 - DNA, 277 bp, Mus musculus
  source 1..277: mol_type = other DNA
agcttcaactttaatttggaaggacaccttgtctactgcaggcagtgttattcttggtttattgggaagaaaagcaacgcaggggttataatgtttcatctgcacatttgagacttgagcagattgctggaatgtagtactaccacctgactttatgtagtatagtcacactgattatcagctagtgtctagcatgtccacctgctccagtgcgaaagctcacttgccccacacatatagtcaagtcttggttatttttagagctctacaggcataa

SEQ ID NO: 47297 - DNA, 422 bp, Mus musculus
  source 1..422: mol_type = other DNA
tacagttgtgaactatcataagctatctgaagacaaagtttctaaccaggaaatcaacaaacttttaatttaatctcatctaaaatttcaaaatgttacaggtttgaagcacctaatgttgcattttgaatttaaaatgtgggcaaaacttatgttagctgtttgcaacctcaagctgctagcttacgagccttttaagaattgcctgatcgtccttgtgggactctaggccaagctggcgcagggatgcagtaaatattttcttaaagtattttttgttaactttctctcagatcctcctcctttcagaaaaggggaaacctcccagctggtctccataaacacgtgcctgtccaggtgcatgctccagaaggcacgaggctcccacgtgcatgcagggcctggccccactctcttgcgtg

SEQ ID NO: 47298 - DNA, 275 bp, Mus musculus
  source 1..275: mol_type = other DNA
gagcaaaaatttttgtaggcaatccctgagtgtgaggccagcctgggagtgtgagagtctcactaagtagcccaggcgggatgaaagacccgagccacggtttaggttattaaagccataaaccatgtaaaaggggctttatttacttatttacttaaggacaatttgtccttcagcactgaaagtcccgggcgaccactgggggcgctgtggtgcgcaggcgcggaaggccgggcagccggcgtctggtgtctccgcccagcaggccctgcgcg

SEQ ID NO: 47299 - DNA, 254 bp, Mus musculus
  source 1..254: mol_type = other DNA
agttctagacctcagcagagttactgtgacttgcgttacagaatagaggcagggatttgataaacactgccaccaattattattattagtagtagtagtagtgatcatcacttagatggctgaaggtgtgagcgcaggtcttaccccgtctctcattcagatgttcgatgacctggacatgaaagagaaacactgagctgtagccactcaaagctgtgaacacctttgcagcagtcacggacttctgctaacgg

SEQ ID NO: 47300 - DNA, 160 bp, Mus musculus
  source 1..160: mol_type = other DNA
gctgggatatcagcagagatggctctgggcctgagcgtaatcagggcaggggatcgctgcccaccatcccttgaccctcagagactcactgggactggagagtggccctgactgggcattctggaggtccctggcctgagttaggtaaggcaaacccaga

SEQ ID NO: 47301 - DNA, 242 bp, Mus musculus
  source 1..242: mol_type = other DNA
ctccagggctccctggaactgtggtctgtggccttgctcaggccaaggtcttcacagagcgatacctggtgccacctttaggatgccactctgaggctggctgggagtgtccccaggctcaggctggcctgattgtactccacagctgataggacctgcctggaggagtctgggcagggcccattctgaggtcttcagcccgaaaacaaggtcagacctactacaggagcttcgggtggcgg

SEQ ID NO: 47302 - DNA, 594 bp, Mus musculus
  source 1..594: mol_type = other DNA
tggcttctctctgaggccctgctgccttggcccagtctgtggcaccccggaaaagaacagccttctggtcctcaggggctcacactggaagggaacccttaagggggcagggcgcctgcaggtgcggagcagacagggccctttggactgcgggcaaggtccctggtacatggcacaaggacccaggacccaggactgggctcgccccgccccctccgagcgccgagaggcccaggtctgggaagcagcccacggagttctctttgaagagagtccgcggtgcgggcgtgtccgttcccgcccccgcgccgcccgtggggctcggtgcgtgccccgccggcgtggccccttggcgagcattgcaaagccggctctcgggcttccagcgggcgcggcccctgcgtcgaccccggccaggtgcgccaagctgggcgccgggtgcggccggtgactcagggccacccccgcgcgagcacgcggagcagctcccggggcctcgggccgacccgccgcgcgacccgcgggcctggaaaaaccggtcaggccagcgcggctggcgcgttccggcgccgagcggggcgacctagacgggcg

SEQ ID NO: 47303 - DNA, 461 bp, Mus musculus
  source 1..461: mol_type = other DNA
tcagcctcaagcggaaagctctgcgctcagaacgcgtggttcactacggccggcaggtggcgcttgtgtcacggggagccacgccgcagatcccgcctggctcctatctggggtttcgggtagcttgggccggagtcccccgcgaccaattaattccggagctaactccccatctgccaggccggcagacaacaggtccggcagcgccgcaggcggctcagtgtctcatccatgagagacgttctggggaagccgttggcccgggtccagccctgagagtgttgggtgcctcccaggaggcgcactccatcctcgctcaggagagacagaggcgcatgcgtgcgcgtaacttgtgcagtaggcggggccgcaaggaggagcgggacccccgcccacttggctctgctcaggatgggggcggcgctctggcgtcccgcccccttccctccttggcccgcccc

SEQ ID NO: 47304 - DNA, 399 bp, Mus musculus
  source 1..399: mol_type = other DNA
tgttcactgtgtgtccagagaggctgtgactagagagccccacggactgcctgtggccatacgaaatctttatcctgcatgaggccagtgactcagactgagcctgagcctcctcatccttagcaggatcctggcccacagcggaatgcatcccgctctaggcagaccgtccgagtcacagtgtccctggagctttatctctcctggtagagaccagttgcaagacgaccatcatcggcttgaacttgggccctgtgctcccagggcaggacaccatataaagcctgaggccttgggcacccaagagcttctcagctctgaagctggcctggtatgcaagcctactgtcccctggggccctggaagttgtccaaagggggaggcagccacagctaaccc

SEQ ID NO: 47305 - DNA, 429 bp, Mus musculus
  source 1..429: mol_type = other DNA
acacaggcatagtatgaaacatttttgaaaattgtgtgtaagaaacttggtgtctttgtatcacacatattcctcattgtaattaaaaaaaaaaacaagcccatattactttggcaataaaacaaaaggaatttttagtgcctgaagccaaaaataatgctaaactagaaaagtcattaattctattaattaatgcactttaaagacaaaggccctggcaaaggagtctgaaacagagtcgggtttccccaagctgacttagtaatgctcacgacccctgccaggtttccatggcacgtgcagccgcgggaactgtccgcggtactgaccgcaggcgcgccccacgctcggcctgtgcgcacgcgtctgcgcgcaacgcgagagacccgcgggcgccgtcattgcgcagcctcccacgcggctcgggac

SEQ ID NO: 47306 - DNA, 421 bp, Mus musculus
  source 1..421: mol_type = other DNA
ccaggctgggcagtgtccaagagccagtcagcacctgccttggcggtgcacaccaagcactttggggccatcccaacactggctagctatcaaagggtgtagcttggaagattcaaggctcaagtaagtggagaccctttattcacgttcataaaccttttaaaggtacaacttcaagctgtggaaatagctacctccagtgaacctacagcagggctcccgtgtgggaggaacctgaccaactcgtgagtccaattcccagcaggtctctagagagtcccggaccgcccccgcagagatgccagacccgggtgggcagggcttccttggagaccccaccccgccccgccccgggcagcaccgccccccacgtggccgccgccgggtggggccgcacctccccttcctccctccagccccg

SEQ ID NO: 47307 - DNA, 507 bp, Mus musculus
  source 1..507: mol_type = other DNA
gggcttggctatctagggccagggcctctgcttgggtcaacccaatgatggccggggcagcggcactggtaccacatgggttgtcctggggaagcggttctgatgcaggtcccgggagagagctctgtggcctggtaaggagggttcagtagactgaatcttcctggcccctcagtctcagttattgaatgcagcagctgtcatctcagggtgacaggaccaggggtgccatttaatgtctcatagcatgtctcggtggtcattcatcaccagggctttagtgaagtgagagctgtcccagcacctggagcctgctggccgctcaggccaactgctctgggaggccctggaaaacctggtgaaccgggctgtgctcctggcctgggaggactgaggcgtgccacagggcacaacccgtcgtgaagaccccggggaggtggccaccctcttcctgcagcccaggcttgcaccctggaggaggtggttgaacgactgctgtccggcggc

SEQ ID NO: 47308 - DNA, 507 bp, Mus musculus
  source 1..507: mol_type = other DNA
tagcagcagtgtggctgaggctgactgggaatagcctctcttccccaagctgggggagggggggtgtcagtcccccagagggtgtgtctcactggtcttgtgacagtcctgcgaactgcccccaggacaactaggagcctgactgctctgtgaacctgtcccaggggtcagttagcacaccctgaccagtggggggctggggggagcatgccacacaggcctcccagctccagtctggactgtgcaggctagtagctagctacagccacccaagagctgcatatcctgggccagcagaaccgttcctggtcctggactcgaggttcaagacgggaaaacaggtgatccccaggcaggaaaaagcagcctcctcgggcaggggtagagtccgggtcgtgcagcactggcaccagcgacagcggcagggacagggagctgtggccgcaggtcaccgaggtgcgtcaccgcgtgcgcaggacccgcccccggcccgcccccctctctgga

SEQ ID NO: 47309 - DNA, 216 bp, Mus musculus
  source 1..216: mol_type = other DNA
acaaaagtttttatttgtagattctggaagacagaagacactttgatcagagacttccattctacaaagttttgcctgttcaacatgtcgtgcgagcgacactccggcctatcccgcgcagcggggcccgtttgaggcgagcccccggcctattgggcgccgcgccctcgtcggctcgggcctccgccgcggtccgagggcgccgtgacgtgtgct

SEQ ID NO: 47310 - DNA, 463 bp, Mus musculus
  source 1..463: mol_type = other DNA
ccccatccccatccccgtctgaagggtatggggcgtgtgcttcccaggtcagccccaggagcccgagaaggagctccggccctgcgcaggcagcaaggtcttggctgactgagtccctgtcacctaggacaccggtgaccggtctctcccggctcccaagatggggacagttgggcctcttgagagtcaaactgattcacttcccacgctggcctccctccttggggtctggagagctaggcaggaaacccagaccagagctggagctctggatctgcggcggggctccgttacccgcgtggccctggctcggggccacccgagggcggcgcctgcggggccgcgctcgcgctcacggggtgcctcgccctggccgcgggccgcgccgggggcgcccggggcggcggaggcggatgtgggcgggcggcgcgggcgcggggcggggagaaggcgggccggcggc

SEQ ID NO: 47311 - DNA, 448 bp, Mus musculus
  source 1..448: mol_type = other DNA
acgggcctagccccataggaactctgagaggagccattggtgtagcccatgccaaggggcctcgactcctctaaaccccctgattcccctggaacactgtgcccagggtgccggccctggttgactgtcagcccagggtctgcagagggcggtaattctctctctgagataactgaattcaagagaaatcttcatagggcgaagtgaatttctttttccatctgaaggaccgtcttccaacgggtccgaggccattgtcccgtagtccacggagaagcaactgcccctttgtccaccagggcagtcgggaccccatggaggacgcgagagggtcccgcaccccctcccgtcacagagtgcggcgggctagcttcgaggtgacctcagcggttcggccgctccgggaagtcgcccggtccgccccctccagctccagccgggagtttcg

SEQ ID NO: 47312 - DNA, 507 bp, Mus musculus
  source 1..507: mol_type = other DNA
ctctcgagttgtgtagaaccccttccacctccttctacagggcagggatgggcaactgtgcccagctcctgtacctaggcctggagtggaatgcactctgaacagagagggacacctgatacctccattgttgcaccaggcaccagccagcggccggtgaggaactgggagagcctccggagttccccgcggcctatcctgcaacgtcgagggcgcaggactgcacccctccactgggctgaaaggccaaaggttgggcgccctttctcgcaaccctgggatggcggagatgcgccgccccaggctgggccggggacaaaggtgatcgcccgttcctggttgcccgatccggtgcgccgggacgggtggacggaacgggaggggccgcgcgtaacctctggggcggcgctgcggagtccagctcacctgctgaggctggcccgccctaacctggtttccggggggcggggcgtcgcggggcggggcatcacgggggcggggcgcgcc

SEQ ID NO: 47313 - DNA, 721 bp, Mus musculus
  source 1..721: mol_type = other DNA
gtccagctcacctgctgaggctggcccgccctaacctggtttccggggggcggggcgtcgcggggcggggcatcacgggggcggggcgcgccggggcggagcgtgtcgcggcagacgtcaggggacccgccgcgcgaggccgcggtccggcgctctgcccgtgggctcggccggggctgccgccagcgtgcgggccgcgccgggcatgtcctaggcggcggccccgcccagcgctcggccgggcgggcagagggccgggctgggccgggcagcgtccgggcgggcgagccgcgggcctggcgggagcacaggtaggacgcaggaggggccgcgccagccctgcgcccacggcggcagggcctccagcagggcacctgcgtgcctccaggccacaccggggcgggcggggctggacggaaggggctgggcgagggcccggcacacctggcccggccagcgcttgccgatgctgcccatgtctgcgcgcgcccgggaggggcctcctggcaccggcgacaaggcctggccccgcgcatgtctacgcggcctgccgagctggtagacctgggcgcccggtccccgcccgggcagggccagcgctgattcagggggcctggcgcgcctgcccgcctcccggcctcctcccgggtgcccggtgggctgtccgcggccaggaggggacctcctcctgtctgctcctttcagccacggggctgctccc

SEQ ID NO: 47314 - DNA, 305 bp, Mus musculus
  source 1..305: mol_type = other DNA
gcttcccttgcagctaggtatggcccattgtagctaatatagataaatggaagttccctttccatagggctgtgtgtgactgtgtcactgataacttctccagaaactggttgcatcactatgacgcagacctgaaccattccggctatcattgcacaatttgttaattagctcatgatgcaacttcaataaaattgagaagttaagtcagtttgaggctctcttaaacttaattccaacattttttctccagaggtgaaagttctcagctccgccccctagagacccgatctgtcttgacgtgg

SEQ ID NO: 47315 - DNA, 372 bp, Mus musculus
  source 1..372: mol_type = other DNA
ctaggccaggcaggccagtgacagtgacagtgactaggctgccaggaacctcagagacccctcctagccagatgtctgtcctgcagcccaggggccatggccaggtccccagctgggctgcaggatggctccagctctggtcctaccatcctgcaaactagtggcttctgaggagttcaggtccctggattcctggtgcagggatctggtcacaggggcctgggtcctacggggcggggccgtcagggggcggggccaaggctgcagcaaccaatgggctgaatgagaccggcagcgccgctcgcgtcgcccttgcggagtggtcagcacgggctgggcgggccagggcggggccggagccaaggtctggag

SEQ ID NO: 47316 - DNA, 357 bp, Mus musculus
  source 1..357: mol_type = other DNA
ctcatcttgtcacttttaaatcaaattttctgcaggcctgacccacctcttatcagggccctgcaggggcctgtgagtctctgcctgtccatgaccaagactgaccctgctccgccttgggtccggctggtgacccggcccagactgtgagcacacgaggcagggcagtggctctcctactctgcaggcagtagacgctcattcttgcaaagggaactgaactaaatcaggtacagtaccgtggcagtggccttactccagggccaggtatgcgactctgggacccactgcagagctgccggcgctgttggccacgccacacggtggcgtgctgacgacgcacgccggaagcctgct

SEQ ID NO: 47317 - DNA, 458 bp, Mus musculus
  source 1..458: mol_type = other DNA
ttgttgtaggctttgatggcatgcctttccatcaaataaagggcaagtatgcccaggaatgggaatgcattcttggtgtaagatcttgtgcactaccaggaccttactcgaaccaggacctgttcagggatgccaccaccgagcctcgttcaacccttctatgtctcagagaaggtgtagacatcggccatgcccagggctggcattaaccgccccgctgtgacgggcaccggcgcgagggggcgcggcaagcaccctgggggcggggccaggcgcaaggagacctgggaactggggcggtggccaggcgcgcggaaccctgggagcggagcgcgcggaaccctgggaacgggtcgagccgtcgaaacgggggcggggcggcccagcgcgcgagcctaacggctgaggccgaagcgcgggagacgcggccggcgaggctccgccttgcgtgggtttaa

SEQ ID NO: 47318 - DNA, 598 bp, Mus musculus
  source 1..598: mol_type = other DNA
tgggagctgtcagggatggggccaacacccccaagcctagagccagcctttgggctgagtgcagcagtggccacctgcctttttccagagaaaacaggttacacccagggccactagaagctgctgtgcccatcatcctgagcagccctcagcggtggggctgccacagtaatgccaagtacttactgtatgtggcacagtacttactgtatgtggcacagtacttactgtactgtggcacagtacttactgtactgtggcacagtacttactgtatgtggcacagtacttactgtatgtggcacagtacttactgtatgtggcacagtacttactgtatgtggcacagtacttactgtatgtggcacagtacttactgtatgtggcacagtacttactgtatgtggctctcacaagcaaaaccggtggaggtgtgcccccgagggctctgcctccaggaagagatcggccgggtccagcaccaggcctggatctgctgcctgactcgggatcaggtgggggccagtcctcccggagctgcaaggtcagacaggtctggagctgtttttattgtcatcacagtgatgtaagcctgacg

SEQ ID NO: 47319 - DNA, 387 bp, Mus musculus
  source 1..387: mol_type = other DNA
agctagtatctgggcttggttcaggccgagcaagctcctgggcccgggaggatgccggcttcttcctggggatgcattgccctggctgccctgtggacagagtttgcaaatcagaccccaggttatggcaatgcaccgtgatcaggatgaaccccgagtcctggcgatgtcgccaaggaaaacgcaaagcccagggcactgggtgcccagttgggcctgtccccaaacagcagtggtgggtgctgtgcagcccgctcaggtagcctgcttcagtgccccatgggacagtccatcctggggtcaagcatcctgctttggggccctggacagtgtccgctccgcccctggctcctgcagggctggcagccttcctctgcctggctgccc

SEQ ID NO: 47320 - DNA, 410 bp, Mus musculus
  source 1..410: mol_type = other DNA
aggcccagtgagcacagcccccggccagtgacactggggttatagcagtgagaactctgtgactggtccctattgtctacacacactctagggagaaagtctgccaggaggcctctgaataaaggaagacacctgagggcagtcactctgacctccaggacactaggtggccaggccaaagcctggactctgtgaaccatgtgtcccatatagtgaagtccttgaatctagagtggcctggaactttggatgcatctgaacagtgaagaacagagacaggaagtcgcactttctctcaaacagtgggggccctggctccccagacttgggaagggggtgagtttgttgctaaccccggccgcgcgcagcactcccctccgccccgccccccggcccgccccgcgtgtgaa

SEQ ID NO: 47321 - DNA, 688 bp, Mus musculus
  source 1..688: mol_type = other DNA
gggagtagcgccccctgtaggcaccaggagttgggctcactcaagtctcagtgccccacccgctctgcgtgggggcaaaatcctgatgtgtgcagcaggcagtatctcccttagagctgcgcccaaggcagtgacctcagggggcgccccactcactcccaggctgttaacccgggcgagaattctggagagcctgggcgcaggagaagccacagctcggtggccccgcgccccgccgccccgcgcatagggccccgccccctcatgcatatgcaggtgcgcgggtgacgaatgggcgagcgagctgtcagtctcgtcccgaacttgttggctgcggtgccgggagcgcgggcgcgcagagccgaggccaggacccgccgccgccgtcgccgccgccgccgggtgggagccgggccggccgccggagagcggctgcagtaagccggagccgccgcctcccctgcacgcccgccgcgcagcccgcgcgcactgctcgaccccgcccgcgccgcctgtgcggccgccgccgcctgtgcgccgccgggctcggagggcgggcgggcgttggaggccggcgcggcggctatagcgggcgcgggcggcggcggcggcggcggggccgcgggcggggtcgaggcggcgatgcgggcacgcggctggggacgcctgcctcggcggctgctgctgc

SEQ ID NO: 47322 - DNA, 188 bp, Mus musculus
  source 1..188: mol_type = other DNA
gtggtgcttctcctggcctttgcaaacacaatcaagagctaccattttatccaatcatctcacttgttgatatatacagaaaagcaggtgatttttcaaagcctgagctgttggaaaaaaaaacctgggcacccgggcggagcttcaacacctcccccaggggcggggccctggaacgaggagtcgcg

SEQ ID NO: 47323 - DNA, 389 bp, Mus musculus
  source 1..389: mol_type = other DNA
gtggtgcttctcctggcctttgcaaacacaatcaagagctaccattttatccaatcatctcacttgttgatatatacagaaaagcaggtgatttttcaaagcctgagctgttggaaaaaaaaacctgggcacccgggcggagcttcaacacctcccccaggggcggggccctggaacgaggagtcgcgtcttgacgcacagtgacgagagacgccggcgccgcagcagtgggtacgggcgggacggcgccccctgcggccgagccgcgggctcggtgaggggtgggtagcgggcagggccggcgtggccccatgctgctgccgctcgcctgcctgcatgggcgggtggcgcagtgcctaacctccctgctggtgctcgcagagccgttt

SEQ ID NO: 47324 - DNA, 276 bp, Mus musculus
  source 1..276: mol_type = other DNA
ataaaacagagtctgatcagaagtctgcatatttaacctgtagtagtgcacaagatttgctaaacttcccaaggactgacaggtatggctgagattgtgagcgcctgcggatgcagagggttctgtgtatgctctactttacccagaccaactgtggtcccagagactcagtgcaggctccacgggccgggccttggccgcacacaaagcttcgtggctcctcccacggcccgagtcgggtcccgggctgcgctcctcgccccgccccgccccgcc

SEQ ID NO: 47325 - DNA, 538 bp, Mus musculus
  source 1..538: mol_type = other DNA
gagttagaattgtttcaataagcttactacagaaaagcttttccctaaatttgttgactttgaccaaagacagcggccttctccaggccatgcctggaatcccctgcctactgggccctgcagtctgaattggcccaagtgcgagcaagggtttgagatgctcttgagaaaaactctcacccacgtccctaggcccgcggtccgccgcagggagcgtgaggggttcgtagacctggtcactcccgcagccacctgagtccctgagaggggcacagcctgtgcgccgccgcgcgcgctcgctcccgcggctgggcgccggagacgccctggggcgcgcgcctcacttccggtgggcggtgattgggtgcgccgcgcgagccctgccccgtcgaccaataggcggcgcggtgcggcagggggcggggcgcgggcgcagcctggacaccgcccgcgggcctgccggactcccgccgcccgccggcgccatgtgaccgcgccgccgccctccgcgcgcccggcccgcccgcccgccgcgctc

SEQ ID NO: 47326 - DNA, 324 bp, Mus musculus
  source 1..324: mol_type = other DNA
taggctgacaggcagtgcagtggctctgaggcatcaccctcagagcctgagcaacaccagttgccattgctcattgctgtcagttgggggccctgcctctaccttcaagttggaaggtaccagttcagccctgaagcaatggcttgccctagccccagggccagggtactcccttcagagactctctgtcctggaagggggccagcagaagctgacagccttgcgtgaggttttgtttttgtttttttaataaaaagcaggattcatgtaaatagctttttgtcgctcaggacgctgcgcacgcgtgcgcgcggggtctgtagg

SEQ ID NO: 47327 - DNA, 443 bp, Mus musculus
  source 1..443: mol_type = other DNA
gcaacaccagttgccattgctcattgctgtcagttgggggccctgcctctaccttcaagttggaaggtaccagttcagccctgaagcaatggcttgccctagccccagggccagggtactcccttcagagactctctgtcctggaagggggccagcagaagctgacagccttgcgtgaggttttgtttttgtttttttaataaaaagcaggattcatgtaaatagctttttgtcgctcaggacgctgcgcacgcgtgcgcgcggggtctgtaggacggaagctccgtccctcttccctagcagctttctcaggctggtgctgaaggtcctaagtcagcctcaccagacccttctgagcctgggctcaccggctgatccattgtcaaccggagctacagagcccttcccagagccctctgggcgagctctgcatccgcgtggga

SEQ ID NO: 47328 - DNA, 415 bp, Mus musculus
  source 1..415: mol_type = other DNA
ggaaaggatccctacacaggggtgcagggaaaccttgtgagaaactcccaaggagccagtcctaggagggctcaccttcccgagcctcccaggtaagctgaaagaccaggtgccgaggtccaggcgggcgtgggcctggagagtgccactggaccagccagtgcgtcccagggacgcagggtgtgggcctgccgaggaggaccacctggggatgccaagggccactccagcagtggcttcgaaggacctccaagggatgagcagctgacccagggacacgaaagcgtggggctccggatggccacccggggatgtcagaagggccactcggccaggggcacgcgggccggcgcggcgcggggtcgggtaacggcccgcgcggtgggcggcggcgcccgaggcccctccccgccgc

SEQ ID NO: 47329 - DNA, 398 bp, Mus musculus
  source 1..398: mol_type = other DNA
gggcgggcgatgcacccaggatgcatcctggatgggctgcctgcatgcccatccctgtgtcccctgactgccggtcggctgagggctgatttagcctgtagccaggccttggttatggctcaggcttcctctggcctcaggctggcggatgaacccccctgttgagccctacattgcagggttccagggcacctgtggaggcctgcccagagctcctgagccacctaggcagggaagtgaccctgctgggcttggtgccccgcacgagggagagctaacttgggagctggggctgccaggtaccatcttcagagatgtctgacggggcctctttgtcctctaggggaagtggaagcatcagctgcggcatcgagaactgttccggcaggtgaggtaag

SEQ ID NO: 47330 - DNA, 427 bp, Mus musculus
  source 1..427: mol_type = other DNA
gaagggtctgtccaggaaggcttccttgcctgcctctcaccttggctggcatgtgtccacaggtgccagggggagctggtctggctggtcagtatgcctggtacctgggaccacttggctcccagtccatgggctggacacagaaatcccaggcccaaggctcaggttgggtcaagaggctgtctgctgctctacagaatgctttggggccagcattgtgggagtcagagactcttagtctgaggaagagccttcctccaaggataaaagtgccttagaggcaagtgcacctgcggccccgtcagagcctgctctggctgacgccacccaagtggtggcgcttacaagtgagcctccaggaccgcggcgccccgcccggaatccgatgctgtgcttctgtcggcgccgggaggcgcgaggggcgggg

SEQ ID NO: 47331 - DNA, 424 bp, Mus musculus
  source 1..424: mol_type = other DNA
cagcctcctccttagctgggcagtggacttggaccgctgagctctgggcacttctcccagagataaggactactcatcaattgtgcctcgaggcaccagggaaacagcctggctctccaacctcaggttgttaggtcctcaagcttagagtctcagggtgttcacatgcggctagccagagtgtgtgttcacatgcgcacgtgtgttttgaaacagggaccggagacttgccctgccccaggcagggggcggggcctgggtccgcaggagccgctgggcttagagggtcccgggaagactccgcacccctgcaggccggccagtcggcctggatcagcgttcccaggggtccaagtcccggactgagggggtggggcgggggcggggccttaaagggcagggccacggggtccctgaaaagcgc

SEQ ID NO: 47332 - DNA, 568 bp, Mus musculus
  source 1..568: mol_type = other DNA
cccaggcccaaggctcaggttgggtcaagaggctgtctgctgctctacagaatgctttggggccagcattgtgggagtcagagactcttagtctgaggaagagccttcctccaaggataaaagtgccttagaggcaagtgcacctgcggccccgtcagagcctgctctggctgacgccacccaagtggtggcgcttacaagtgagcctccaggaccgcggcgccccgcccggaatccgatgctgtgcttctgtcggcgccgggaggcgcgaggggcgggggcgcgtcccgcgggcttctcgtgcccccttctacccaggcccggacctcgagacctaaagctggggatcccaagtccgttctacagctagagatcactatgtggccatggaatcctcgggcgatccctgtggacgccacctcactccggggtagggggcgctaggccgggcccttccgaccctggcaggtgcgccccgcctgcagcgcgcccagctgctggcgtctagggggcgggctccagaggccccgcccaggtctcggagccaatcgacgtccgggggcgggcg

SEQ ID NO: 47333 - DNA, 281 bp, Mus musculus
  source 1..281: mol_type = other DNA
ccaccccctactaggagggtgacccagtatggcctgatattctagcttcccagggtcaatgcattcagagctggctgtgctgacaggagtgcagagcgaagctgcagctctgggaagaagggttttccccatagagtataacactccagtgttgggatctaggccctaacgaggtataactgcggctagctagcggggcacttagtcccacccaggaccacagtggggtccgggcgtccagggggcgcggggcggagcctcggccggaggcggtgcccgcg

SEQ ID NO: 47334 - DNA, 440 bp, Mus musculus
  source 1..440: mol_type = other DNA
atttttggtggcgacatcgagggcacaaagcttagtttgtgtccgctcgacctaggttgtagccacgtagtaggaatccttgcgggattctcaaagcttaccgttcaaccttaaaagagagggccgcacccttttatgaagtggagaattttccttaaaaactgctcagagacttctggcgacgtggcccccggacttcgcagggctcagctgcttctcgcggaggcctggcgacccctggcggcgggttccttccagggcggcttcgcagagacactcccttcgtggctgggtggagccacattgcgggcgcatgcgcgccctccagcctcgcgcttccctagcccggggttgctatgagttccaacggagttggcacctccaatccccgcccccgaccccggaagtgcctgcctacgggatagaccggcctcatccgg

SEQ ID NO: 47335 - DNA, 270 bp, Mus musculus
  source 1..270: mol_type = other DNA
tctgcactgacacagtgtccacgctccatcctgaggttcacacccagtaatcccagcatgggcatccctggcctggcctgacttccccatggtgacagtgtctctacacccaaggaccttcaaatttagagtgtatcaatactcttgaagaaggtagccatatgatcctggagcacctccttcagctccagaacactgctctgtgcaccccacttggttccctaaggaagtaagaagcctccctcacaagaaaggggaactttaggtagt

SEQ ID NO: 47336 - DNA, 256 bp, Mus musculus
  source 1..256: mol_type = other DNA
gaaaataggcatttacattgttaggctacccacggggccaaggcatctattcagcttaaatagattttacgagtcagaaagggtcattgggagccctggctgacgcagacagacatggccagcattgcctggagccctagccaaggatcatttattggttggggggattctgggcctcaggaccaagattctctgcaaacgggaatcaagattcaacccctttgtcccaaagttgagacatagaatcagggtctat

SEQ ID NO: 47337 - DNA, 457 bp, Mus musculus
  source 1..457: mol_type = other DNA
agccagtcattaatgatttcttggagataactcagaggctgcttttccttctacaaaagtaagagacgcgtgtggcagtctcttcgacgttcataccggcagtctactggtctcactgctgagaacccatcagcctgattgcttgaagaaattcggcctcagacggggttggaatttttaaaaattctagagttcgtctaataatattggaaaaataacaacacaatattactcatttgtaaatagtttaaccaaaactcaaacaaaatatgattaaaaaacaatcatttatagctaaaaggctaatatagacagtatttactactcgtggaaatgatattttgaacttcaagaaaggattgagcctgtcagagacactccttgtgtccaggcacatttatagaccagtgactgttacctaactccagttgtctgggtaaccacttaggttgggagc

SEQ ID NO: 47338 - DNA, 382 bp, Mus musculus
  source 1..382: mol_type = other DNA
agccagaccctttcatcaatgatttcttggagaaaactcagaggctgcatttccttctacaaaagggagtgtgtggcagactcttcgacgttcataccgacagtctactggtctcactgctgagaacccatcagcctgattgcttgaagaaaatttttaaaaattaataatattatttgtaaatagtttaaccaaaacaatcatttatagctaaaaggctaatatagacagtatttacttctaactttcaacgtggaaatgatattttgaacttcaagaaaggattgagcctgtcagagacactccttgtgtccaggcacatttatagaccagtgactgttacctaactccagttgtctgggtaaccacttaggttgggagc

SEQ ID NO: 47339 - DNA, 368 bp, Mus musculus
  source 1..368: mol_type = other DNA
ttccctgggatttacattaccgaggaactgagaaaataatgtagactacttcagcctattttgtactccagttaatgaaactcaagactagatgcatgttagtccttattctgaaatattatgcaccaatgcaataatcatatttaggaatttgaggttttttcctagtgagatgaggtacaaatctgactcttacatctttttagataaacatgtgagatcaatggactaaagaatagtcttaaatagttctttaagtagaatgtctgatatctccctgcactacatgaatgggtgctcatttactaaatgttgccatgtttcttcctagcgctgtacagagcaaaaagagaaaactgaaatccttt

SEQ ID NO: 47340 - DNA, 705 bp, Mus musculus
  source 1..705: mol_type = other DNA
attttatgtatatgtctatccatatatgtgtaaataacaatatgtataataataccaaataaattcagggaaaatatttttaaaaataaaactcagaaatttataaagctttagaatttatattaaaatgcacattgtacactggttatttgaagtagacaacttcacttccatttcattacatatataattttctctcactataaaatatctaaggtccacaatgagaaacttaaatagtatctgtgattctgaaaaggtctaaattgctttaaaaaattatccttattcaatacagaagaacaaattctgttgtgttatacatacagcataatttttttattcaataatttagttcttaaataaaatgctgaatgaacatttgaatgcacatattgctgagacatgttaatattttagtatgcaaccttttggaaaggccaatattatttaaatatatatgagagaagattgctaactctcataaatgtacaaatcaactaagacaagtgagtgtctcaggttaggattctattttaaaattgagatattaggctttgattgtctcgaagaaagttcttcagacagagttacttgacccaggagttaggacttggactgactcaggaccagctggaatgtccttatgtaagaaaagccttgcctcatgagtatgcaaatcatgtgagactgtgatgattaata

SEQ ID NO: 47341 - DNA, 520 bp, Mus musculus
  source 1..520: mol_type = other DNA
ttagtcttgtgacaattctatgccacagtacaggatttgaaatgtaaatgaagaaaatatctaataaaaatatatataaaaaagaaagaaagttgagatccctattctttataaaagaacacattctgctttattgtatgtatagcatatttagtttattcaaagaagtttagttcttattgaaaatgctgaataaataaccatttgcatgcacatatttctgaggcctgttcaattgatctcacttgtgtaattctggtctacagagtgagttccagaacagcaatggaataaaaagattgcaaactctcataaataagtttttaaaatttccagtaaccatttcaggctaggattcgattttaaaattgtgagattggctttgatgttatctaagagatgtgtacatctctcagggaaagttgctcagacagcagcatcctggctagaacatccttatgtaagaacgatcctgccacatgaatatgtaaatcatgagactgtgattataaatacatgc

SEQ ID NO: 47342 - DNA, 534 bp, Mus musculus
  source 1..534: mol_type = other DNA
ctaggaggatgtctttgaaagtccagataaaaaagagtcatttttcctgaggctgaaccaagtaagcacactagggtaaccttacctctttatgagaaatttacttgcaggtgacttacatgtacatattgtgattgtatgtaatgttgattctttgttgaacacttcaaagatttatatatatgtcataatatatatcacatatgttcatggaatcatgcacaggttatttacataatttatttcttctgataatgctgcaataatcagtcatatgtaatttttctaatgtataagatattggaaattcaaatgttaattgtatgtattgacttctaataagttattgtcaactgtgtcacagtggggccactgtctcaggacaggctctaatgttgcatccatagcctcaacaacttgggcttcagcatcctgattcctgacccaggtgtcccttcttctccagcaggagtatgctcatgaatatgcaaatcctctgaatctacatggtaaatatagggttgtctataccac

SEQ ID NO: 47343 - DNA, 649 bp, Mus musculus
  source 1..649: mol_type = other DNA
tcagccttcaagtaagatggattccatagagtctgactgttatgtagtcatgcttcctaattgtgtatgaggcctgatccatatgaaatatagaaataacaattttacatctatttagaattacatctatttagaagtcatgcaagtgtattttgtacactgtgcatattaaacatattcgctgatacaacatcatgtatttgcatatattgttgtatgtaactatggaatatatgagctagtaatgagagtttcattaattatctatgttcttgagatggtctcaattaatatagcaatttccaattggatccagtttcctaaaagcagtgtatatttatttctttctgatggaaatactttgataaataaattatatatagagtataatatatatttatctatacatatatatgtatatgcacatgtatatatacatatatacatatatgcactataatttggtcatttgagtgagttatttttaatatataatcctttgcaaaggaggctctgaatttatatcaatatcataatcataactctggagttgactccctggtgtaatatgcacctttatataagaagtaccctgctcatgattatgcaaattcattgaatctatgacagtaaatacagggatgttcac

SEQ ID NO: 47344 - DNA, 436 bp, Mus musculus
  source 1..436: mol_type = other DNA
ctactgcagttaatatttccattataattacaagagaatttaggtccataattggatcatcaattactaaattctccactaatatattagcaagtgtcattaatcttgaagggcccttgataactgtcacattagaaactgtattatatgaaataaaatctttaagcaagcataacacaagaattttctactagcatcatattaggtacattccttttctaaaaaaattagttaccagggaaagaagggtctcctttcaagctgatagaggggcccctgaacatgttaatggaagcgtgctctagcacatttaaatttcttaaaatgaacactagaatagtttaaactgatcctatctcaaagtctaggaaatataaaattaattgtcgttatgttcccagtcactttgctggaaaagtattggctgagaacccgc

SEQ ID NO: 47345 - DNA, 267 bp, Mus musculus
  source 1..267: mol_type = other DNA
tgagcaaagtgtgaaggatacattttgtactatttcagacttctgactttgggcttgaaattatatctgaataagaagtttaaaagactggtctgtcgacagacagccaaacgtggcagtgtctcacaagcctagtgtatgcacagggagttggtgccagatgctacctcagcgctcaagttcccttacctggaattgggcaatgccctctatcgcttacacccaggccagcgggccgaggggcggggccgggacttgcagcctgga

SEQ ID NO: 47346 - DNA, 483 bp, Mus musculus
  source 1..483: mol_type = other DNA
aattttgaagacactacaagtttttaaaaatacgttaatacttcaaatatatactgcacgttaaagtgataacagtttatgcctgtctctggtaaaatatactattaaatttaacctttttcaacttttgaaaatgtacacgtaaaagtcagatggggcagcctgcttaaagatgaaagacttaatgtatgttagtaccttttctaacgtgggttacagtaatatgtaacttagaaaagtgtgcgaatagtaaacttctcatctgcagaaagaatgctaactagatacttcctaagtatcgctatgattttcatgaaaagacagtctgcaaagccttgttcaagtataaagctcctctcgttgtcaactgtgagggtcaaacctgcgtgtttgcagaaaacacgggcgcgcaggcgcgcgtgctggggacggccgcggggcatgctgggccagcgccttcggcccgttgctaggaggcgggga

SEQ ID NO: 47347 - DNA, 385 bp, Mus musculus
  source 1..385: mol_type = other DNA
aagctacctgcaagttcaagttctccgagaggttggctgacgaacgccgagctctccgctaagctggccgtccctgcgagccaagtccgggtgtgtccccctggcgcggcgcccaccctccgagggcgcagaccgaaccgccctcacaggttaggggcggggcctgcctggcgtgaagaggcgggtccgaccgcgcgatgacaccaggcacagaccattcgccgccgggggatctttcctgagggcgagggagcgggatccggttggcgactgacacgtcgccccgcgcatgctgattgcgtcacgcactcagcccgagcaagcccctctctgggagaggcctcggtgggggagggccctgcgcactgtgatgacggtggagcgg

SEQ ID NO: 47348 - DNA, 417 bp, Mus musculus
  source 1..417: mol_type = other DNA
agcacgcactcaacctctagggcctttaggtgagcaaaaacccacctgactcagttaagggaggcggtcccccaaacgcaaagggaaggagagtcacccagtcctttccgccggtctccatgactaatttagtaagggtctcttttaaagtcctaagcacacttagaaacttccaattagtccccaattgtgtggccaattcctgacttacctgggcaacaaatggccgattaccttagggatcccgaaccgaggcaggatttcttcaagaatctatatcagcgtgacgtctcacggcgggaaacacagccagcagctctgcgcctgcgcatcccgtgagcgcgctaaagagactcccgccagaggctctgagtcacgcccaggaggcggtgcttgggccttggacggcgtcagatc

SEQ ID NO: 47349 - DNA, 441 bp, Mus musculus
  source 1..441: mol_type = other DNA
attgggctttccccaatagtctcttgggtatgggatgcccctatgctagaggataggccctgcagttgcggcatggcaacccggaggcgctccatcaggtttgttgcgccctcaacaggcccaggactctgcagggcacggaggccagttagctaaaggcctgtcctggcaaagaccaggaccgaggtctgaggaggggacctgccgccctcatcccctctagcagcctgtgtgtaagcttgaacacagatttctctttctcagcctcccagctttgagggtgtgccctgccccatgctcacccatttggtatgccagggtacttggctctcctactgcagccacagcgccttaaactggcagcctagggcgcgcaggcacaaggcgcccggagatctgggcggggcaggagtcgggggcgcgcgggccctggtaggagcg

SEQ ID NO: 47350 - DNA, 316 bp, Mus musculus
  source 1..316: mol_type = other DNA
ctttctccaagggaccttgtggcaaaagcatgcatacgttgagactgttacactcagcactggccattccagggatagactggactgtgagcatggacggactcgacgccgcatgggaacagctgccaccacttactgcggacagttgagtttaagagggagtttggtgtttcagcagcacaaccacacttccaagggtgaccctcgaagatcccaaggcccgcttctcgggaggggagcgagcacctcctgcctatcccccgcgaggtgggcggcggggccggcggcgggggtggggccggtggcgctgtccggt

SEQ ID NO: 47351 - DNA, 456 bp, Mus musculus
  source 1..456: mol_type = other DNA
agaactctattgttcttcactgtgggttgaactgtgtttttcccaaaagtcactgtttgaagacaagattgctattgaaatcaagaaggattcttcccaagttttggagatcacagtcttgcccatgtttgggttcccaactttggcctatacaattgatccaaccagattgtgtttctttgtcatatccattagtgctgaaaaaaaatgtcagttctgttcaaattccattcaaagtcaactaaagcagatgaaaagaaacactgcgtctcctcagagtcatttagaatgactatatatttaacttcatctctaggatgtttagatctctagcattcatataaaagccaggcatgggggtacatacatttctataacccccctgttgggcagtctgggacagatgggtctctggcactcattgactgaactaacagagaaaggcctctagtctct

SEQ ID NO: 47352 - DNA, 298 bp, Mus musculus
  source 1..298: mol_type = other DNA
acataggaagtcttttgcttatgactatgcagatctgggtttgcacatatatgtgtataggcccgtgtctgtattcatatatggaatgaaacatacccatcatgacacttcatggagaaagtctctctgagatgacatgatccaaggtttatgtaacatcatatattaaagggggagaaagctgctcttgaagctttgtgcaggatccaagtttgtgtgtcaggcacccaagatgtacatttacactttaaagagaaacgtcacatgtgagggcctagtaatatgagcccagttgcat

SEQ ID NO: 47353 - DNA, 272 bp, Mus musculus
  source 1..272: mol_type = other DNA
ataattagcaagagtttagggactacctgatttgagatagtaaccttgtcaaggatccttacttgcgaagattcacaaccccttggagttgaaggccttcctggaatggtttccactcgccgctccagggccccttccgcgggcggtgggagtgtctcagccgtccggaggtgagcggcggggcggggcggggagcacctgggcggggccggggcggtgcgcggggccgaggctcccagccgggcgcgcgccaatgggcagcggctggcagc

SEQ ID NO: 47354 - DNA, 542 bp, Mus musculus
  source 1..542: mol_type = other DNA
atgcctcaggttattagatttatcatttttaatcagtggtaggaattaggttactaatcatttcaattatccatcaaattagtgatggtgacataattatcatcatcatgagatttgcgttatcactatggttattcatattatcctgggggtaatggtccataaagttcaacctagtagagagtaggtgctagtgactagcatctaggcacttactgtgcaagacctctgcccaagcgggccaggtacccggagctcagaggcgcgtgcagcctcagcttgagtctcccgcgcgaacctgagcggacggctccaccgcggacctgcgcggtagggggaagcccgcgcaaccaacacgccggccaatgccggtcgcgcgctccctttgcgcgctcccgcgccggccttaaggcttggaccgcaggtggagaggcccgggtgcgggcgcgtggcccgaggctgtgcgaggttgcgcggtgcgcgcggagccgcgctgtcccccccatctgaactcagtgcgctgttccacggcaaactccgcg

SEQ ID NO: 47355 - DNA, 695 bp, Mus musculus
  source 1..695: mol_type = other DNA
gctcaatcgccgcgcgctccgggtgtgagctcgccccgcggggagcggctttcagctgagggggcggtggcagaggcggttcgggcagccccactcggccgataggcccccccccgcgcggggttcaactcccactcggcccgccccctcgggcagctctaggctccgcagccaggccgcgttcgggggcgggaggacccgaaagcctttgcgggagaggcccgcccgcctcctcccacgactcactagggcgcccgggtccggatgcgccttaggaaaagccatgctcacgccgagggggcagctggcagtccactcagaccacgggatcgcagggagctcacgcttccccgcgctccgcggcccctcgcaggatgctgcggcgcgcttttgagtggagggcgccgggaaggagggcctgccggcagcaaaccgcagctagctcaccgagagggcacgctccgcgggccgggggaggagaaagggcggccccagcgccccggccccggcaggtcggcggccaatccgctgggggatcggcggcgccggcggaggcaggccgaggggggtggggagtcgccgcgctcgcgccgccctggctccgccccccggcccgcgccgccgccctcgccgcgcgccgccgctgtcaatcaagggcgagtcagccgggctcgggcggagagaggagctgctac

SEQ ID NO: 47356 - DNA, 609 bp, Mus musculus
  source 1..609: mol_type = other DNA
gcctcagtccagtcagtgtggagctaagtgtgcctacaatactgtgtgttcagactcaataaagatttttttttaaatcatacttgaaaaaatattgagaaaaagcatgcctttcttaagtgatggatttattactctgagatacaaattttctactgcaatgaaagactgggtttatagagtaaattatttctgaaaaaagaaactattctgctggagaaaacccaatgacaagttaaaattgcactggccttggtgactgtccagtgcaacagctaggaatactattttgttacatttaagtccttgaaaaaatcttactttaatattagtatttttgctcaaaatgaaagtagtttattgacttacaatgtaacgtaacttattctttctctaaacttattgaataagcaatttagcaggactatctgctcaagacagtactgctgaatccagagccgctaactagtcctggaacatttctgggatccccaagatgcccaggggaggaaagcagagaaatccagttgatttcccggtctctgcctgagagctaccgggcgtctcgctcctccctcactcccgggacggggcggggcagccatctcc

SEQ ID NO: 47357 - DNA, 532 bp, Mus musculus
  source 1..532: mol_type = other DNA
tcccaaatatttttgtatttataaaatcaaaatgtgaatatagatgaaacagagttttagcaaggctaataaaattaatcagactgtggttttttgcattacaccacaaataaaaattaatttgacatataccttaaagcaaaatattagcttgtatttcaaaaattaaagtgtagaaccagtctgaactagttggtaaaacagtctcaaaataataattaatagatttaataccttaatgtgctctcagaggctactgagataattcagcagttaatggcattttatttggaatgaactgcaatccagaattggaaggctcaccagtcacccttatagatcttgaggcatagtgactatggattccagaagattaaatctctgagttcaaggtcatccgggattaaaggtgaacacacctttaatctgggctacacctttcatctgggattaagggtgtggtggaacacacctttaatctgggctacacctttcatctgggattaagggtgtggtggaacacacctcttct

SEQ ID NO: 47358 - DNA, 316 bp, Mus musculus
  source 1..316: mol_type = other DNA
tgaaggtccaggacgtgcacttccaaagcttgaacccacctctggtttctatttgaccgaaacatcaggaaatggaaggtaagtatcaagattttcttcaaaactatatagtaacttggtgctcgcgcgcacgcacacgtcggtcgcgcgtcgctcctgactccctacggtagaaggactcagtttttcacgcgcgcgcacacccgccggcgccgatgacctcacggcgcgcgcgccgcgcggcccggcgaggccacagattggctggccgcgcctccgcggcacttcaaagccggagagggagctacaattgtgg

SEQ ID NO: 47359 - DNA, 438 bp, Mus musculus
  source 1..438: mol_type = other DNA
tagaacgtattaaaactggatagtgaaagagttattatttaatgtaaacacaactcactttaaactctgccctttaaaaatgtgatattattaaggttatattacctatattttgacgccaaacgaatttgaaagtctgcatttctattaatgtcttagttataagacttaccagtcttatgacaagaaatatcttttagattcttgtaactaataattggttcgtatataaactcagtattttgaaagtcatttgtaagtgaattagtaaaacatataatattccaaggtaatatatttgtaaggttaatacactgctgatgtactaaataattttattttattcagctattttaaaagtctggaactaaaaaacagaaactatgtgtgcagtcattgcaggctgttttcaaagagtacttattctactcagtggat

SEQ ID NO: 47360 - DNA, 328 bp, Mus musculus
  source 1..328: mol_type = other DNA
gtaacttgtgctcgcgcgcacgcacacgtcggtcgcgcgtcgctcctgactccctacggtagaaggactcagtttttcacgcgcgcgcacacccgccggcgccgatgacctcacggcgcgcgcgccgcgcggcccggcgaggccacagattggctggccgcgcctccgcggcacttcaaagccggagagggagctacaattgtggcgaaacactgcctctgatttatcaatataagagggggttaaagtcgccccggccaggccacgggctctctctattgagaaaaaagaaaggggggggggaggaggcagagccactttttttttt

SEQ ID NO: 47361 - DNA, 370 bp, Mus musculus
  source 1..370: mol_type = other DNA
cgcggtgacttcagctcaagctggagtctgctgctgctgctgtcctgggccgccactgcgcttgctggcgacccaagcaaggtgtagcgtggggaggtttcctagcaactctcagctcggagcacgcccagccacccgaaagctgggagcccccacgggggacctcagctgccagggttctgggtggccagacgcctgagccgtacgcagctccctcccagcgaggtgcatgcccagtaagcaactgggatgccttgttggttgcccgcacaggagcttctagggagctcgcggagctgcttccccaagctgctggctggggagaaacaaaagctcttttctacttgcttcgcccccgcgggccatcggc

SEQ ID NO: 47362 - DNA, 284 bp, Mus musculus
  source 1..284: mol_type = other DNA
atctctaactgaagaataagttcttgagaaagatggttgatgaatccataactcagaactcatccagaaaattttcagtagaacacctataatgattcagaattgaagatggtcaaaatcagttttgtactaggtcagacttgtagtacttaagtgtatgtatctcaactgaaatgacagcttcttccctcgaccctctctcttaaagagcaggctccagtctgggctcactgatataaatgagtccttttcctttgctcctgaaccagagaaaagtacatgta

SEQ ID NO: 47363 - DNA, 510 bp, Mus musculus
  source 1..510: mol_type = other DNA
ggtcccatttgttgatagttgatcttaaaacataagccattgtttttccattcaggcttaatgtggacatacttgagcaactgagaatggaccaatttgcattcttctacatgggccgattgaaatgttgaaaatgccttctattttccactggatgaatttagctacttttaacacaccttaaggtcaggtatggtgtgattcccagaaattcatatatggttgagattattttttgctatcttagattttgtgttattccaaatgaatttgcaaattgctctttctaactctatgaagaaatgagttggaattattgcattgaatctgtagatgactttcaatgagatgaccatttttactatgttaatcatgctaacccatgaacttgggagattttgaagttcttgtcatacagatctttcacttacttggttagaatcacaacaagaatttttatgttatttgtgactattgtctcctggagtgtgatgtcagcagtgttgtagc

SEQ ID NO: 47364 - DNA, 482 bp, Mus musculus
  source 1..482: mol_type = other DNA
tagctatgcccctcaaggattatacctgaacacaggaaatcagtgtgtttgtccattggcacaaagatgcatgctatgactaattattggacaatgaattttgtgtgttggaacatatgcatttttcaatctcaaaagcaaagttttgtcagttttcttagtggaaataacttgtagagataatttgtcaaataaggtcatgacctgctggtggtaatgagagcgattttatttgaatatctatctcctgtctttaaaaacctcaggtttgcaaagccagttttgaaaagagtactgattatttgtttgcaaactcttttcaaattgtttggcttcctgtttgagcattccaacaatagactattgtaataacaatggagtctcagattggataccacagaggcctcactgggcaggaggaccaggactgggtcaccttgccctctaactgtgagcagctcacagcccgctcaggagtagga

SEQ ID NO: 47365 - DNA, 317 bp, Mus musculus
  source 1..317: mol_type = other DNA
cgcggtgacttcagctcaagctggagtctgctgctgctgctgtcctgggccgccactgcgcttgctggcgacccaagcaaggtgtagcgtggggaggtttcctagcaactctcagctcggagcacgcccagccacccgaaagctgggagcccccacgggggacctcagctgccagggttctgggtggccagacgcctgagccgtacgcagctccctcccagcgaggtgcatgcccagtaagcaactgggatgccttgttggttgcccgcacaggagcttctagggagctcgcggagctgcttccccaagctgctggc

SEQ ID NO: 47366 - DNA, 448 bp, Mus musculus
  source 1..448: mol_type = other DNA
ctctgaaattaattagattcaacaaagtttcaaaatatagtgcaattcagcatttgcctttatttcagcctgagagaaagcccggtaccagggttatcaactcttaaatttataacctgctttgcatcacaagctagaatgcggagcattattctggaccacattttaaagaacacatttatttgttcgaacagactgaggtcttcccagccccgcgcgggcaggggcaggggcagggccagacgaggctgccaaccttcggagaggctggcgtcctcacgacttggccccgctcggccagggcgatgcacgtacaggcggagcttgggctccgtggcccgcagcagtccgcccttctctcgcgagaggggaacgagggggggaatccccttgactgacggcgccgtcggcctctcgcacgccccgccccggcgccggagctcgctct

SEQ ID NO: 47367 - DNA, 421 bp, Mus musculus
  source 1..421: mol_type = other DNA
gttcttatctatagaaaggatagacttgaattgttacttatagtcacctcaacactcatataaataataaatttcaagttcgtctggagaactcccacaatgaacttaagttttgtatggatttaacattccgcaaaatcaaacagcagtgagatgtggcacttggcagagtcactgaagatgaccttcagtttatagctagttaactgtctttactcctgccagctaggactatatttatgataatttttcatcaagaaaatcatttttagttaaacctaaaattctgtactatcttgccctgtcccattacagcacctggtacaggaaggctgggtcgtccaatccggagctagctttgccgccctggaaaagcaggagcaacgtggatgctggcggcggtcgcgcctgcgcgtcgctg

SEQ ID NO: 47368 - DNA, 596 bp, Mus musculus
  source 1..596: mol_type = other DNA
gtctgacatcaaagcatatatatgtgtgtgccacatgtgtgactttgtaaaagagaattagagctactatttaaactaatcatctaaataggaacaaaaagtacaacggacttatactaatttttcttttagaaagtttggctttgcttgtaacatctttgttaatagaaatgataaaaaaatctttatgaaaatttccccatcatcaattaaaacatagttgctctacatgagctcagtgaccaaattgtatattgctttatagattatagaaattttaagatttataattttcatttaaagatttataataaacatagaataaatatttcattttaagatatataatcaaaatagctttattgttggactgttactttgagcaatctctgaggaaagtgaatttcttctctacaaaataaaataaggtttagttaattccctgagatgactataatagtcataattttcaattagaagtttatatgtaattgagtgttgaatataaaataaggtatttttaaatgccaaaagactgttacttttataaggatcttttataccatcctaccatcattatgacataagaatagaga

SEQ ID NO: 47369 - DNA, 321 bp, Mus musculus
  source 1..321: mol_type = other DNA
agatccttttactaaaagatttggaattttattccaaggtttagattgatatgagagtgtctcccagctaaactggttagtgaaacacctgattaaaaccattcaccaagaaacgtggttttcttcaatgaataccagctatttgaaagttaagatttattttgaaaattttgatcaccatcttcagtgaaaacgttttcttcaaagtttcaggcatgaagagctgaatactgatatcccttcagcagtgacagcggagtggtggccatggtagcaatcaggccccgcccagcggcctgcgctccggggtaggtctcggtt

SEQ ID NO: 47370 - DNA, 304 bp, Mus musculus
  source 1..304: mol_type = other DNA
ccagcaaggtctttcctttctgcagaagggttgtccttggccataaacaagttttatgtatgggtgctcagtacatcactgtgagtgagtaaataatatgcaaacactttatttccaaggacaagatgaccctatttttacctgaagaaaactacttttcacctgcagaaaactttagccccgtggaaagccagaagaccaggtcagggtttttaaaaggtttggcgagaaaagttgcctttcacacacaagtgctgagcaggccagcctggaccaacgatgggggaggaccctgctccttctt

SEQ ID NO: 47371 - DNA, 398 bp, Mus musculus
  source 1..398: mol_type = other DNA
ccatgggtatggggtcccaagctcaagttcctgtcacggctgccctgtccttgaggcaagactctctgacctaagtttctttcctgctttgtgcatggaatgaacatctctcatctccaatggagaaccagagagtccagagaacactggactctagggaagatgagagatctttcctctcacctctggcactagcgagtgcatgaagctttcttgaaaccaccagccaggacaggctggcaggctttgtcccatgccctccagccattaaaatgatgtccctgggaggagcatccaaggagaggagggtggggagtctcctccctttgctccaatcacagaaaaggagggggttcctatgccatggcaaggctacctatagctcagctcttcaacag

SEQ ID NO: 47372 - DNA, 375 bp, Mus musculus
  source 1..375: mol_type = other DNA
aggttgtacagggatgggtttcctttcagaatgtagagctcaagttcctgtcacggctgccctgtccttgaggcaagactctctgacctaagtttctttcctgctttgtgcatggaatgaacatctctcatctccaatggagaaccagagagtccagagaacactgggagatgagagatccttcctctcacctctgagcactagcgagtgcatgaagctttcttgaaaccaccagtctaggcagatggccaggacaggctggcaggctttgtcccatgccctccagccattaaaatgatgccttccctgggaggagcatcatcaaggagaggagggtggggagtctcctccctttgctccaatcacagaaaagga

SEQ ID NO: 47373 - DNA, 413 bp, Mus musculus
  source 1..413: mol_type = other DNA
ctcaggtcctaacttgagaaatcaagtgcagctggcctctcctttaaaatgccaggctttgtaagctggactttatggcataaatgtctcacaccaagatggaaattgtctagcttttcccaggaccaggtgtagtggactgaaggtgccctctgtggttccctgtcagtccttgaatttaaatttctgtgcacaaagtaacagtttatagttttttaacacatactgcactaattttagagaaatctctaaattttagaggttctctgtcagtaactaagtgctagagaagtaactgagataggttcccggcttagctcaggcagctccgggctctcgcggagcagcctaggtgcgcgcccctccgcgggagtcacgtgggtcctggccccgccccggactcctgagctctg

SEQ ID NO: 47374 - DNA, 325 bp, Mus musculus
  source 1..325: mol_type = other DNA
attagagacagtgtggcactggcaccatgataatggactgagcctctgaagctataaacaagacctggctaaatctatcttggccatggtgtttcttcacagatagaatggatccctagggctttgccagttaattttaaaatgccttggctacctcagccaaccagcctagcttaatgtgggtggcttttggggaccaacgctcgtctcccaaggcatgcgcatacacatgaatgtgagctcaaatacacacaatgtaatttattatattcatcatacatatagtttagaagcagttacagttaaatagtcactaacttagagt

SEQ ID NO: 47375 - DNA, 505 bp, Mus musculus
  source 1..505: mol_type = other DNA
tctttttattaattattgttacatagtcaatatgtaacaatatgttatacatatatgttcctaaatacacaaatacagccagctcagtctgtatgatgttattagctgttagtattggctaaccaatggtattccctgaagaagaccatttctttatcgtgcctttaatttttctattatacacaacatcattaatatctccctgtatacaccattagcgatatttaaaatcagagaacgtttttatttaccaatcttcacgttttgcagtcttgcaagcagagaaagcagccctttccattcggtaaagcgactgtgtcctacttactgaaagacaggagtacataactagatttcactggttctctagagacatcctggagattggcaattgggaatatattccacatgtataacttagtgagtgaaagttctagtgaatagagatttcaggagtaaggtgtgtagttaaaataaatccccaaattcggccgatctctgggca

SEQ ID NO: 47376 - DNA, 423 bp, Mus musculus
  source 1..423: mol_type = other DNA
aaaccaggctggctagtctgccattgagtcagtctccacaagatagaaacaggctggctgttgcccaccagtgcatggtcagccaggccgctgggttcattttttaaatatttcctgcaacagagctttatttaggacagacaaaatcatatcatttgcaccaaaacgaatggactaggtgaaaatcatcttgcacagatggtgtttggtttttgaaaaaagacataaaaaacattgtgtctgggtggaaatgtcacaatgagacttttactgtttagaaagtaaagaagagatactcttttcaaatgaaaaccagttacttaggtaacctgtgattgatcattaagcatggactgtgaacagaaccttttcttctacaagaaattcatggtttcatttgactttccaggagatatttaagga

SEQ ID NO: 47377 - DNA, 397 bp, Mus musculus
  source 1..397: mol_type = other DNA
acatgattttgtgggtggaattttttaacacaatatagtgatgacacatttgtctcttaaacattaacctagctatttgttcatggatatccagtattttagatacataaaacctcttctgaatgtagctttgattaacaaatgtgtttgtttaattctacagcatttaatcactggtataatatgttctacatgagaaggtgtaatgatatgtctccaactcttcatttctaccccaattacccagtatctctgcgatcgccaatttgggtttctgagctactttgctatgccacatagtgtatgtacatagtgtatgtcttcatataaaatactgtgtggagtattctagtaacaacattcattacataaagtcatgtatgtgtcactatgtaga

SEQ ID NO: 47378 - DNA, 547 bp, Mus musculus
  source 1..547: mol_type = other DNA
gagtaccactactgtacacttagggttattgtaccagggtaaaataggttacaacaatatttggccatattcaccctcactgggtcagtgctagtcctcaattctattcctcatttattacactgaatttgggataaaatagtctttcaaagatatagaccccttttctaaaagtgcccacactgagggactgtcagagtcaagaactgcttgctcaatttttgtgcataagaacttaaagtgctgctgagcttgagacaaggggagacttgagatatccccatcaccacaaggtttctatctagaaaacaaccagtgatagtaatttatatgtcataaagagaaatttaatttaaaaatcatgattcactacagaattatcttttatcttggtaccattatctgaatgataccaagtcacaggtaaaagcagttctttaaattcctaccttccctttggtcaatcattaaacaggtaatgtcactgggtaaccattagacaggtgtaagtgctgtttaatcattaatcagataacaacactgctta

SEQ ID NO: 47379 - DNA, 409 bp, Mus musculus
  source 1..409: mol_type = other DNA
ctctgagaaaagtttggcgttatgctagcttccttcctgtcatctgcccatgggatggagacagggaaaattttgagtcaaagtttgattttcagtgatgcatgttcaagtagaggcttcataatggccaaatgaaaataagtatcttcagtattataattgttcaaccaatctcttctttaatagtatttaatatatgagataaagaagagaaaaaccacagtaaacacgtactttatcttatatagtactttatttgaaatttatcctttatatgaaaatgatattaacagtactgttaaccattgcactgattaatcattagctggatagcagatagttaaacattagccagtgagtaggcatggctaactgccagaaagggagtgtcccttgttaaccattagac

SEQ ID NO: 47380 - DNA, 425 bp, Mus musculus
  source 1..425: mol_type = other DNA
tgtctcactcagatgctagattaagcctctcagaggtcaattatgctagcaggtccctatcattttaagatagatcattattttcagtgatgcatgatcatgaaaataaatgtcttcagtatcaaaattatccaattaatctcttctctaataatatataatatatgagataaacaagagaaaaaacagaaaacaaatgctttatcattatatagtactttatttgaaattcatccatcatatgaaaatgagtttttaaacagtaggcacacaacagtactgttaaccattagctagacagtagcactgattaatcattagctggatagcagatagttaaacattagccagtgagtaggcatggctaactttcagaaagggaatgtcccttgctaaccatttgacaggaagttgatatacaatgt

SEQ ID NO: 47381 - DNA, 520 bp, Mus musculus
  source 1..520: mol_type = other DNA
atcttagtaatgtgatgatttgcacaacgtatttttaagaactgcacctgtgtcacaggttattctaatgaggatataggatgtacttcacaaatgtgcatgtgttcagttctctaattttttcagctctaacacttgaggacagtttattttaatgtttaatagaatttcaattctttgtatatatgtatgaaacaagtgttttatatgatatgtaattgctttaataagaagaatctttataacaaataacacgcatagttcattcatttttaataatttaaaagaacacatggttgcttctaataaggctgtattataaaaaattagtggtttctatgatgtctgaaatgaaactagcattatagacacaagataggcaaagttttttatactgcgctgcatcccagctttttaattatcttaagaatttctcattcttgaaaagaactatcaatcagtcatgcatgtaatatatgacataaaaccacaaaagtttaaaccaatttgttccagttgt

SEQ ID NO: 47382 - DNA, 470 bp, Mus musculus
  source 1..470: mol_type = other DNA
cattcaaacctaagtagttatgaagccataaacacgcagatgtatttactgaatttcaaaaatatcattaattgttttatgattctttacttaaatggcaatttccactgcatatttgtgtcaaaagatacaagatgtaatttacaaatggatatgttcagctctctttttgttaataatttattttaatgtttagttgtatttatagtctctgtttatatatacatattaacaagtgtgttttataagataggtaattgttttaataacaagaatctttataaccaccagcacaggtatgcagcatttcatagttggaatcatttatgatgtttagaatgaacccagcattttaagaatttctcatctcttagtcatgcttgtagtgcatgatatagatgtagaaatatacctataaacataaaaaatttaaaacagaattcattccagtttcctctaagcatttattt

SEQ ID NO: 47383 - DNA, 475 bp, Mus musculus
  source 1..475: mol_type = other DNA
aaataacaaaacaaaactttgggttgaaattgtaaaattgttgaattctgctaagtttttaataagttattaacaaacatagtgaaggacaatttttctaatcatcttagtaatgctaatattttcgaaatagcattttaggattattgccaactgaataagacctaaaaatcacctgggagacacaggcattccttcttattattagttcttattacagtgaataatcttccagagatgtttaatttttaatcttgatttttttaattccataagacacaccttaaaaatgatattcagattatatttcctctattactaaaatggcaatcacctcaaagtagcactcatcatcattgcaaggttcaagacagctgtgttttttccaaacatctgatgtccaggaaatatcctgaaccacagcctgtttgcaagaaggacagagcactggatttaggtcagatggactatgcta

SEQ ID NO: 47384 - DNA, 479 bp, Mus musculus
  source 1..479: mol_type = other DNA
agatctccatcattgtcaagatgtagagtgcaagtgggctgctggtgcataccatctggtctaccctcactgggcaatggctgaatttgtgccttattttaaattatcatatacagagtatatgtcatatataacttttgatacatgtatgcatgtatgtgtgaatgtgtctgaatctattagtttttgtttattcatgttatcaaattgtattatataatatatattatattatattatacataattatatataacataataatatactatacaattatacatataggtgtatattttatatacatatatatatatgtatatatatacatatacatatatatataatattcctttcgaagcctgtttgttttctaatcaccatacattgtatttaaaaagtccattttcaataaaaggaaaacaagtattttttttctaactaaagctaacttaagctaactggatcttgtgtaaaca

SEQ ID NO: 47385 - DNA, 148 bp, Mus musculus
  source 1..148: mol_type = other DNA
aatcacagagactttctgtgctacaggtttgacctcagtcagtgcctaaagaagaggaaaggttaagacagtagaccaggctggcctcaaactcagaaatatgcctgcctctgctgttgtatatctcagatctgatattacgtcagcg

SEQ ID NO: 47386 - DNA, 432 bp, Mus musculus
  source 1..432: mol_type = other DNA
tggccatggcgaaagctgcattttcaacttttgagtgggtaaaattcattcctgagaactgagtgtttttgacacaccccctctctgcctgcgtaagaagtgggtcctagacagaaactaccacacagtgactctggagtaccaagtcccacagggaaacctgcgggcacgtgggagggggtccgtgtgaccggatcagaaggtgcaaccgggcagccgggcggcggggacaggtgcccggttgcccggctaggctcccccagctccggccgctccggccgcactccgagcgccgactccttcggtgcgccgtaaggcgagttcgaattgcaccaataaggaggcctttaatgaagaggctcggtcacgccaggcggggccgctgtgtgtccgcaccggcgattggtgcgagctgacatcatcgcagcctcc

SEQ ID NO: 47387 - DNA, 448 bp, Mus musculus
  source 1..448: mol_type = other DNA
attaagctccaggacaactcagggatccggaggtcaaaataaacaaaatcaaccacagattggatacttttattttattttatttttctaatagaaccagaactcaggtttcctcaatttcgaaggagaagtgaaaccggatccggacaggcgccctactgttctgactgtcaggccaggaaagccctgccggaagtgaggcgcgtgcctctgctcctagagcaggtggggtaatgggcgccccacgagcctctgcgcccacgtggtgggctgacaggctccgcgcccacttgtgggatcatccctgcagctgcgtccacccctgcagagtgctggagtctttgacacaacaggccccgagtcccgcccatcgccacagcccattggcgctcgggcggggcgtgggcggctcctgcgggtgcaggcggggcagcggttccaaggctgg

SEQ ID NO: 47388 - DNA, 201 bp, Mus musculus
  source 1..201: mol_type = other DNA
gaggagctcaagtccttgggttcctgctcctgtaacgtacttgaagcaccaccccaagagcctgagacactggctgtgtggctccttacctgtctgggtccggtccacggcggaggatcctccctccgagaccgtctccatactgtccaatgagagtctcgagaccgttccccgccccgcgtcgtgcgtcaggttaaaggc

SEQ ID NO: 47389 - DNA, 147 bp, Mus musculus
  source 1..147: mol_type = other DNA
ttcttccttcagtgaatcaaacaccaggagtttttgatgcatgttccttttcctaaaggaacagccttgggatctctgagtagttgtctgggagagataagcatcttagtaagttaactagttaaaaactgctaggcgcaaaagtag

SEQ ID NO: 47390 - DNA, 243 bp, Mus musculus
  source 1..243: mol_type = other DNA
atttgagagattaaagcgattacgttaaatagtacactcgactttgcattttaatagatcaacttaaaatgcagtggtaagtacccacggtccggagcgctgagcctacttgcgccaccaggggactcgctgggtcttggctcagcgcgctgctaagggcgggacttccgcagttaccggaagtacgggcgcgccagctgctgtgacaggtgacgccatctttgaaggatacagtcctaatcc

SEQ ID NO: 47391 - DNA, 334 bp, Mus musculus
  source 1..334: mol_type = other DNA
atagaaggaaaatactatcatgcttttactgtaggtgagttttaaacactgtttatgtaacagctccattgcttttcatcttctgcagataagctgaaatattaatagttctatctctaccaggctctcctgcagccagctagcaagactccatttgagagattaaagcgattacgttaaatagtacactcgactttgcattttaatagatcaacttaaaatgcagtggtaagtacccacggtccggagcgctgagcctacttgcgccaccaggggactcgctgggtcttggctcagcgcgctgctaagggcgggacttccgcagttaccggaa

SEQ ID NO: 47392 - DNA, 655 bp, Mus musculus
  source 1..655: mol_type = other DNA
gggccattttattaaaaccaccacgctttgttttttttttttttttggtggaactctaaatataccaaagataaaatgtacttccattaaaagtatcttaagtggcacccaaatgtggctgctttgtaacagtactttctgctggctatcattaacagcagaatgtcttatgcattctttgttactagttaaaattttcttaaataaatatcacagcctccaaatttgacagtgatttctctgagaagccaaatcttttttttctcagttcatatttatagactgttactagtgataagctttgtatactatattttttttaaaaaaagatttatttatttattttatgtatacaagtacactctagctgtacagatggtttgaaccaccttgaactcagtttaagagcagtcagagctcttaaccattgagaagtaacccacaatttcttgtacagaatgttttggttattcgagtctccaaatacgataaatttatttgcttcttgaatctgaaccttcagttttatcttataggaagccatatagaaggaaaatactatcatgcttttactgtaggtgagttttaaacactgtttatgtaacagctccattgcttttcatcttctgcagataagctgaaatattaatagttc

SEQ ID NO: 47393 - DNA, 470 bp, Mus musculus
  source 1..470: mol_type = other DNA
caaatcataatgataattactactgtaactaataataactgttattatatttattcatttattttttaaagatatatttattttctgtatgagtacactgtaactgtcttcagacacacaagaagagggtatcagattctagagcagccagtgctctcaactgctgagctacttttccccaattgtatatgtaataattaattcgtttttccagacagggagcttcacatataatctgtagtgaaaaattcctatcttatagtaacttgagtcgctgaatttattaagaatatggtttaacgggaattattgctgctgcaaatctacttcttaatacaggaattccagtgagaaaactgtagttgtcagagcgcgccaaggagagtcagggacccgccctagccttgcctccagctgatgcgagcccgggcatggccaaggtgccattggctggcgaccgacaggcgaac

SEQ ID NO: 47394 - DNA, 439 bp, Mus musculus
  source 1..439: mol_type = other DNA
gataacaccatgccctgtaattatgttatccagtggaccaaacagcttgtacttgctgctgtcctgggatccaagagatgctactttttgctaccaggtcttggacaaacatgcaagcccagagaattcatcatcttgacatttctcctgattcagattcgtgcctcagttacctaagaggccttgagttacacccaacacctcagaggtgcctcaagacatttctgagttgggacagcagctgtcttcttgtcatgagaaaatgatagagtgtttagtaatactaaacccctcattatgagaggatgaatcaagtcacccttcattagaaattagtataagaaaggaagatctgtctgtctctgtctcaacaatgatttggactaagctatcctaatgcaaaattagactgttttgtctctctgccaaatcaaaggac

SEQ ID NO: 47395 - DNA, 243 bp, Mus musculus
  source 1..243: mol_type = other DNA
gaaggtaagccccgcgctgcgctctggccgcggcgtccccagaggtggctggaaacaccctttggagccccgaagccggcttgggcccgccaaggtggccagccgggagtctccaccgcggctcttggcggcggacttcccggccgagcggggacgctgtgggactagaagcctgtctaggcggacgcgtgggccacgcctcgccggatagcggaagtcccgcccacctccgccggcggaagt

SEQ ID NO: 47396 - DNA, 617 bp, Mus musculus
  source 1..617: mol_type = other DNA
ttgctctgaagtgtaaacaccaagaatggttcttccaaaatgcactcttcagtatttgaaaaatgttcctaaccatggtatggtatggtatggtatggtatggtatggtaaccatggatattgttccaagagagctttttcattcgggaaaaattcgtatggcttcgaatttaagtaaagtaaatgtaatatacgttttttcttttttttttttaaaagaaaatcgataaaagaagggttttagtattttcaattctctgggaagcgacaagagcaggtttctttgcttatccaaatcattgccggacatgggtccaggtcctggggacagcgggtccggagcgaggggtgcgctttcaggacgccaccagacgaggtgtgcggcgcgcgcagcagctcagggcggggcggggcggggtggggcggcgtggcgtcgtgcgcgcacgcgccaatcacagatgccgcgagatgggtgcgcgccaagtagaagggaggactcgcgtcccctcttagccaatcgctacgcagcgcctccatgacgctaggctctcctgggcgccaaacgccagtcggcgggccgggtgggagggcgcggggccgcgcgggggtgggacttc

SEQ ID NO: 47397 - DNA, 290 bp, Mus musculus
  source 1..290: mol_type = other DNA
cctctgcagcttcagtgctcagcttctgctgcaacagcagatctaagttttattaattatttatttacattagagacaggagggtggttggcagtcaccctcactcagtctcaaaggtttaagacaaagcgtacatacacatgtgcatatggatccacacatcgggttgggcaaatactaagtagtttttcattgctcaggtgatttaggataatctatatgacttataaaatagtgggcatggtagggcatgcctgcaatccgagcatgcagcagaagtcacaagtttt

SEQ ID NO: 47398 - DNA, 485 bp, Mus musculus
  source 1..485: mol_type = other DNA
tctgaaatatttgagcagaacaaattggagtccataggttattgaataataataataataataataatagacataaaattgtgtaggagattctcaaagagttaataaaatgctttaagaactctggagacagctggccatggtgtgtgacacctaccttgatttatttccacggatgggaaaaatgaagtctagacaaaacattgtgtgtttcaaggtcatatctgttctagatccatgcttttaaacttcaaacctaggactcaattttttaattattttttcctcttaaaagtattttaaaaaaatcagctgatccagaacatttgaagttttaaaagcattgagtcttgaggagcctaactaagcctcagggttgggaagacccccacgagcgcgctctcgaagtactcgctggaggccccgcccccctgagcgcgcgccgccgtggcacgtccgcgcgctcccaccctccgcgcgcgcct

SEQ ID NO: 47399 - DNA, 659 bp, Mus musculus
  source 1..659: mol_type = other DNA
gtcccacttgtgcatatttgagatcttacccactcgggtcagtagtacacgggcgagtgcttgtccaagctgcaacgcagcccaccgggcttggccggatcctaacacaccctcgtgtctcggtgctcgcctccagcgcgcctgcacgtacgtagctcgcacgtgtgtgttaaaccgatttctcagcgaggcggagcgggtgcggcgggctcccccggcctcggggcggggagacagcgcgggccgcgcaagtcccgcgccggccgctagagccccccgtgcgcagctcggcccaggccccgcgctcgcccggcccggccccgcgctcgcccggcccggccccgcgcggggaaacaccgaggaggccgcgagccgggccggccgccgcgcccgcaccgtgtgaagccctgccccccaggcgtcctctgcagccccgcaggccccgcgccgccgtcgggctgaggagacgccgagcgagcgagagcgcgcggcgggccaggcctccagccggcgcgcgacgccccggccgcctcgcccggtttcgccccggcgcgcgccgaggccgccaacatggcgcccctcgagccccgagccctccgcgctgagccagcggggggagccggggaggatggcggggaggaggaggcggcggcctgcgt

SEQ ID NO: 47400 - DNA, 278 bp, Mus musculus
  source 1..278: mol_type = other DNA
agctctgttcaaatgtcaagcaattcccagaatccatcactcactaaataatgatttctggtgttttaatcaaaggatgactctgcatgtgagttttgaaatttcaaaagcccatgacattcgaaaattaaaacagaataagaatgtgtaaaattccaactatgccattctatttcatcagtgatgcttgtgaacttcccacatatgtttttcctcctttagaacaagcattaaactgaagcagaaaacatatgtgtattgcatccatgctgatgact

SEQ ID NO: 47401 - DNA, 551 bp, Mus musculus
  source 1..551: mol_type = other DNA
aacacttctctctgcgatgctggtatcagtggcagaactgttaacagtttgaaagaccgtttgactggtgtacttcaaaaagccaactcattctctaagtaagttctaacttagagatcaccctagatttctacaaaggttgttaggacaacgtatccaagacttttaaagccatatagcttaagggctctcctctgattagatctagaattgctcactagaaaagatacacagcaatttgtaatgttctaaccagagtgataatgggtggtccattctttctaaacgtcccacttgtgcatatttgagatcttacccactcgggtcagtagtacacgggcgagtgcttgtccaagctgcaacgcagcccaccgggcttggccggatcctaacacaccctcgtgtctcggtgctcgcctccagcgcgcctgcacgtacgtagctcgcacgtgtgtgttaaaccgatttctcagcgaggcggagcgggtgcggcgggctcccccggcctcggggcggggagacagcgcgggccgcgcaagtcccgcgccggc

SEQ ID NO: 47402 - DNA, 255 bp, Mus musculus
  source 1..255: mol_type = other DNA
taattttcctggctgaaaaaaaaaagtgtgcacacatgtgcatatgcacgcagacgcgttctttttctcctaaagtgtaaacttctggggagcaaagctgccctaaaggttgccagccggctcctttattttctggagctgaggttcacttgtccataagttcaggtggtggaaactcctcgcccaggttctgggctggtttccctcgcccctgccaggcggagagcggtgccactgggcatgctcagaaacaag

SEQ ID NO: 47403 - DNA, 230 bp, Mus musculus
  source 1..230: mol_type = other DNA
ttcactgtgacagctcacatgacacatttatgaggagtaagtagtactaccgtatggactaagtttttatttaatacatgcaaaggtaattattgactttcacttactcctatgggccctgggtgtgacacatgatatcatacgactttgagttaactgtgagaggatgactgactcacaagcagagagttctgctagcaactactgctcttggctctctgtgataagtg

SEQ ID NO: 47404 - DNA, 444 bp, Mus musculus
  source 1..444: mol_type = other DNA
ctctcacggcagatcgcggataccacggtgtgagtcttgtatcacaatgcatggcaattttaatatatacttattttatctatgcatatgtgcctaataaatgtatgtgcacgaagtaccttcaggtgcccatggaggccagagggcactgggtctcctggaaccagagtgacagtctcgcgtgggtgctaggaaccgaggcgcatcctctacaagatcagtgagtgctctgctgactcaataactaagaaaaccacctgagggagtcaagctgagctccttggacttgaggctgagcgctctggcacgcgccagttcagccagtaagcggcactgtgccccggcgctggcggccggaggagcgggctgcggattacctgcagcagccggggctggcagctcctccccgcccgcccccagcccgcccccgccgctgcactagcc

SEQ ID NO: 47405 - DNA, 220 bp, Mus musculus
  source 1..220: mol_type = other DNA
ctggtgagagcagaagtgcagcactggccaccggcctgtcattgtcagttgtgtgtgtgtgtgtgtgagagagagagagagagaggtgggaccggatccatatgtgtttgctgtccgaggtgcccctaggtcatccctggaagccagcagctccagccagccaaccacacgtgttggagacggggagtgggtggggccggcctcagcgggctattaatcc

SEQ ID NO: 47406 - DNA, 378 bp, Mus musculus
  source 1..378: mol_type = other DNA
aacatcattcctaagggaaaaaaatgttatgttttatttgtgtatttcctctgactaaaaaaaatataccctttaaatgagctcctgtattgcagagcccaaaggttcattcagactggcagctagcaaaccaagtgtgtatctcaacttgagtgttttactcagtaaacctataaattaatagtcactttcattctatgagggagacaagatatttagtgtctgcaaaactaagctacaattaattttcaatactatagtatgaatttttcgactagaaaaccatttccagaacaagagacgctctggtctccatagggacccagtactcaggactagcctatacacggcggtgaggtcacatgccgggaagggggc

SEQ ID NO: 47407 - DNA, 330 bp, Mus musculus
  source 1..330: mol_type = other DNA
gatcagtctagaagcaagattcaggtttgattctcaagacacataagaagtgcttctgaagagacctgtctgcaatcagacaggcaacaccgattgcttgggcagtgagtgttgctctcacagagaaccagtttggttttcgtgggcttagaaacttttataattttaacccctgacgccctcttcaggcctcagggggcaaatataaaataaaaaatgcttttgtatttgaaaaatcaccttgagttctgaactgaatttattattaatgtatcactcatcactgtaatgagctgtactaagattctactattttatgatataagtagt

SEQ ID NO: 47408 - DNA, 606 bp, Mus musculus
  source 1..606: mol_type = other DNA
ctctttaaaaggaacgcgtgtcaccatgactagaaagcacgtgtgctggagaagcagctgaaagttctacatccggattcccaggccgcaggaagggagaggcactgggcctgggttccactctttggtgattaagcattcaaaccttgtgccaccacacttacagttttagtatttttaacaggaaacttcatgtaatttcctccttacatattttttaaataattcctgcactgatcacttaaaattatttcatttaaggccaggcatggtggcacatgcctttaatcccagcgcttggaatgcagaggcaggcaaagttcaaggccagcctggtctacagagtccaggatagccagggctaccctgtctcagaaaaaaaaaattatttcatttctaagtatgttatggttatactaacacttatttggtaactatccgtaaagtaatataatttacatagaaaagtttgatgtagagaaaaatcacgcatggctgtttttctattttttactttgagtaatccttaaatgaagagttaagttgaaaaagaaaaatgttgtccttaaaaaatatcatctataacccggtaacagatttttacct

SEQ ID NO: 47409 - DNA, 145 bp, Mus musculus
  source 1..145: mol_type = other DNA
accagaatatgaaaacaaaaaagttttgtgtattttttgtttttgtttttttgaaaaaagttattttcacttaaaaaaattaaaatgtcatgtttctaataataataataacagaataagaaaaacctcgtgaatgaccggttcc

SEQ ID NO: 47410 - DNA, 344 bp, Mus musculus
  source 1..344: mol_type = other DNA
tttaaactccttttttaaaaagaaaatagttctatgcttatgtccaaggcagatattgtatgatttaaaaaataatagaaataacttaaacttttaaataaaatatagccattttaaaagatcctataaaaaaataaaagatcagattctctgctcttaattagaataaaatcccatttaagctaaatcttaattcgtttaagggccacagaaccgtatactgtttttttggtttttgctttttccttcagaggagtaaaccagagacctcaggctgcctgaagattaggaaactgccggcaggcgtctcagcccgggcctgtgcaaggagcacgctgggagtg

SEQ ID NO: 47411 - DNA, 495 bp, Mus musculus
  source 1..495: mol_type = other DNA
ttagttttctggcttccagaatgtaagataatacattggggttgttttcaatcactacccttctggtcatttgttacatcaacaatgacaaattgatacatactactgaatgtaagtttcctataactcaggaatatcggtaaagttagcgattaccattaattgatcacttatttgtatgtacataaccttacataatcccagaacaatatttgaggtgtaattaagaccacaaaaccatctagaatgtgttacatttgggatagcatcctttaaaatgtattatagattacttcctgacaatcctggccccagttcttgtttctcagagcgacgaaacagaggtcccgcctcattggccgccgcggagccccgcctcagggaggcagagcgacctccgagcctgtgaccttcccactgtgggggggccccaaggggctacagggaatcataactgaggacgccgggggcggggcctcctgggatgaagcgggg

SEQ ID NO: 47412 - DNA, 594 bp, Mus musculus
  source 1..594: mol_type = other DNA
gtattgttagagaagcctatttaaatactacagtaaaataccgtatggtaaggtgaagcatgttttgacttgttcacttttaatatgactgttatcattgaaatcaaatatgttctattagctttaaatccagttccatggacttagaatttttggttaagttaatatgatatctttgttaaaatagccttcaagacatctgtatttgaatgttcaattgtcactcttatgtgcctaatatgaaaaatcaagcaactcacaatgttccttgggtgttgtcaaagactcatgaggataaaactcaataagacgatgaaatatatatgaccttcatctacgtgtcattgaaaattttagaatatataaaatcctgaaggtaaaaaggtctatggcatagctatttatttaaagcaagtaatttctatcagtctttatatgatttgttttagtcagagcatgaacatgagatgaatcacatacatactgactatatcagagataaaccatgaacttagaactatattagtgttcatggtatctaggctacttaaccctgagggaaaaataatggaaattaacacgtccttttcttcc

SEQ ID NO: 47413 - DNA, 564 bp, Mus musculus
  source 1..564: mol_type = other DNA
gtggtttgatttttaaataaaagagtgaactgtatctcaagactcccacgtctggagcgcgcaggcttgtgggtgtgctatgagggggcgcacagtgcatacacaatgcacttcccagcaccatcgataggatcttgggggtggggtggggtggcggatcccggacgggtcgggggcacagatgttttcccagccgcagggcccgtggggccgcacagccacaggattcttggcattggagcccagaccaggcttcagctctaaggccgctgtccccagggcgcgcgcaccaggggcgcgcaaggccgggatgggcgggtcgggtgcggacgcgcgctcccgggggcgcggcgctgccaatcgcagacaaaggccgcccagcagatcatgtggtgcggcgggctggagcggcgggcgcggcgcgatgcgcgggtacccgggagcgaacggctgcccgatgaagctcgagcagccccagcctgatggaggcgcctccgtgggagccggtgcgcaatgactccctgcctcccacgctgagccccgcggtgccgccctacgtgaagc

SEQ ID NO: 47414 - DNA, 498 bp, Mus musculus
  source 1..498: mol_type = other DNA
gtgctcctctgctctgaggacaagggcgcagcccccaacacaggccggcaagaattctagcgcagcgccgcagaagctggccaactcgtcttacatattaatgtggtttgatttttaaataaaagagtgaactgtatctcaagactcccacgtctggagcgcgcaggcttgtgggtgtgctatgagggggcgcacagtgcatacacaatgcacttcccagcaccatcgataggatcttgggggtggggtggggtggcggatcccggacgggtcgggggcacagatgttttcccagccgcagggcccgtggggccgcacagccacaggattcttggcattggagcccagaccaggcttcagctctaaggccgctgtccccagggcgcgcgcaccaggggcgcgcaaggccgggatgggcgggtcgggtgcggacgcgcgctcccgggggcgcggcgctgccaatcgcagacaaaggccgcccagcagatcatgtggtgc

SEQ ID NO: 47415 - DNA, 543 bp, Mus musculus
  source 1..543: mol_type = other DNA
gtattgttagagaagcctatttaaatactacagtaaaataccgtatggttttgacttgttcacttttaatatgactgttatcattgaaatcaaatatgttctattagctttaaatccagttccatggacttagaatttttggttaagttaatatgatatctttgttaaaatagccttcaagacatctgtatttgaatgttcaattgtcactcttatgtgcctaatatgaaaaatcaagcaactcacaatgttccttgggtgttgtcaaagactcatgaggataaaactcaatagtacttttactgaggctttactaaagacgatgaaatatatatgaccttcatctacgtgtcattgaaaattttagaatatataaaatcctgaaggtaaaaaggtctatggcatagctatttacttaaagcaagtaatttctatcagtctttatgataaaccatgaacttagaactatattagtgttcatggtatctaggctacttaaccctgagggaaaataacaggaattaacacgtccttttcttcctg

SEQ ID NO: 47416 - DNA, 571 bp, Mus musculus
  source 1..571: mol_type = other DNA
gtattgttagagaagcctatttaaatactacagtaaaataccgtatggtaaggtgaagcatgttttgacttgttcacttttaatatgactgttatcattgaaatcaaatatgttctattagctttaaatccagttccatggacttagaatttttggttaagttaatatgatatctttgttaaaatagccttcaagacatctgtatttgaatgttaaattgtcactcttatgtgcctaatatgaaaaatcaagcaactcacaatgttccttgggtgttgtcaaagactcatgaggataaaactcaatagtacttttactgaggctttactaaagacgatgaaatatatatgaccttcatccacgtgtcattgaaaattttagaatatataaaatcctgaaggtaaaaaggtctatggcatagctatttatttaaagcaagtaatttctatcagtctttatatgatttgttttagtcagagcatgaatgaatcaaactatattagtgtgcatggtatctaggctacttaaccctgagggaaaaataatggaaattaacacgtccttttcttcc

SEQ ID NO: 47417 - DNA, 315 bp, Mus musculus
  source 1..315: mol_type = other DNA
gaagggacagttttacatggttcccacccgagacattttgactcccaataaccatgataatcagaggcaattcctcataagttcaaaacatataatttcttaactatgcaaaatgtaaggatgcaatataaattataacactgtgtacaggcaggcagatacaaaggtaggtatatttctcaaaggcaggcagacctctgaattttttttttgcaatgttaaaaaaaaagaatgtgcttgctgtccttttctgagaatcttctagaaaataccagagatcagggaggtgagagactctcaggactcaatgagggt

SEQ ID NO: 47418 - DNA, 484 bp, Mus musculus
  source 1..484: mol_type = other DNA
gtgctcctctgctctgaggacaagggcgcagcccccaacacaggccggcaagaattctagcgcagcgccgcagaagctggccaactcgtcttacatattaatggtttgatttttaaataaagagtgaactgtaatctcaagactcccacgtctggcgcgcgcaggcttgtggggtgtgctatgagggggcgcacagtgcatacacaatgcggatacttcccagcaccatcattaggatcttgggagtggggtgcgggtcgggggcacagatgttttcccagccgcagggcccgtggggccgcacagccacaggattcttggcattggagcccagaccaggcttcagctctaaggccgctgtccccagggcgcgcgcaccaggggcgcgcaaggccgggatgggcgggtcgggtgcggacgcgcgctcccgggggcgcggcgctgccaatcgcacacaaaggccgcccagcagatcatgtggtgc

SEQ ID NO: 47419 - DNA, 381 bp, Mus musculus
  source 1..381: mol_type = other DNA
aaaaaaaaaaggactgtccaggattctctgagtttttagagttgataatcgggtccctggaacccttggactccaagcaaatctgactttgaattgtgtcccacacttgagacttgcggaatcctataacttaaggaacccagctcacttagtgattggatgagtaaaggcacaaggaacttgcctaactgcagaatgctgttgcaaggagcccaccgtcgggttggatccggaatgctgggaaccaacgcccactgctgcgcgggggaacctgtagacgggacaggcggggtgggcgggccctcccccatagcccctcggttctcctccccatttccaggggtggggacgacgggaggcgggcgtagggttatatctgcg

SEQ ID NO: 47420 - DNA, 506 bp, Mus musculus
  source 1..506: mol_type = other DNA
tagtcagtgatgatatattatattcttttaaagtgtaaaaccatgggatagcataattaaactcactaattaacttgatttaaccagtccagagtgtgtgtaagtagatatatgtgtatttaaaatcttgtgttacatgcaataactaaaattttgtcagattaaaaaaaagaaaaaaagctgttacatgtatgaatgtttttcttgtagcatgcctgctgcctgcagaggcccagacccctaggaactgcagttacagaaggttcttatctgggaactaaacttaggttctctgcaagagcatttttattagatattttctttatttacatttcaaaaaattaattacttctgaccatagataaagctattctgaaattctttgaatatacatttgtgattttgttttctgaatgtttataatgccatattgccttttatttggctaaaagtcaaaagctcagcagctgttccagcactgactaagtggtttctggagggtaaca

SEQ ID NO: 47421 - DNA, 406 bp, Mus musculus
  source 1..406: mol_type = other DNA
tcttgaggtttttttttttttaatcctgtgacctccaacagaaaataggacaacaaagtttattctgaggcaactttgagtgaatagtgcttagtaacagagattcgggtttcccagaattacatgttctactgacagcatagcaggaaaatctccagctgatgatactcttcttttgaaaaaggttggtaataagcagtttttttaaagaacctaaagatagtccaagataatcttggttactgatcatcatctctagacagtcagtcactttgtaatagttcagagaagctgcacagggccctcctcatcacgtcggcgaccccagcgtgccctcccggtggggcgggactttaggcgctcgaggcggggacggtgcgcacgcgcagaggagcggtttcccggg

SEQ ID NO: 47422 - DNA, 500 bp, Mus musculus
  source 1..500: mol_type = other DNA
tgtgaagacaatcagtgtgatttcccaccccactgcgggcagtttcagcagcctaagtgcacctccacggtactgtgaggcatgtcagatagatatgcgcacttaatctgtgttcagacagaagtaatacggtttcctccttctttatgcagtcggtttacaatgagactcacgcttggcaggccatgaccatctcaccgttgggagtcgccaggatttgactggctgggaggcagctgttctgccaagcctggccgggtggcggtcttgcccgcgtcgcatttccagatgttcagcatctgcgcgcgtgaggcaccctaggtgtccccaggtgaagtaccctgagaaccctccaaggctgcgcactccccgggagggcgggtttggcccgggatttggggcgcgcggagcccggagtgggagccccagtgacgcaccagtgacgtcggcggcggcgggcgggatttcccggcccctcccggcgcgggaggagacctgct

SEQ ID NO: 47423 - DNA, 469 bp, Mus musculus
  source 1..469: mol_type = other DNA
ttactacaattgcttttttaatacaaaaccgctactcagtggcaatatgcgaggttggagatggatcttttgcaaacccagccctcaacttggtgggaacgctagtgaggagcgcgtgcgcacccaggcagcagcttactagagggaagcaggaaactccctgctactcctcgaggtcatgcgccctgcagcaatgtccacagcggagggggtcgtacagcaacttgagcagttaacgtgcaggttccccgtgtgcggtacccgcctttactacaggggaaccctagaaggtggatgcgcatgctcagtgtgccgctaaggcaccgcggccggatgagagacgcgcatgcttcgtgtgtgcacttcgcctccagccgcagcgagggactaccgctcccgcccttccggcagacaggagcgtgcaggaaggccacgcacgcgggggcgtggccttggccgggaagcggcc

SEQ ID NO: 47424 - DNA, 461 bp, Mus musculus
  source 1..461: mol_type = other DNA
cttgaaaaacgctcccatctgaaggtctgtgtttctattggagacttgccaaatgacaatagtagcttagccccaaacaggaaaggttctggcagcttatttcatctttcattatcgttcactgctgtgcaataaaacagatttataattaattatgtctcccagcagagttgtgcaattcctcttggattgaattacaaactgacttggatccagcaaagccggatcacattgcgatatgcttatatacatagcatcttaaatttgttttcaatgaaatagttactggctttttaacatctaaaaataaaccaaaacactcgattcataggaacgtcttgtttaaagtggtgacttacttaaaacatagtgcccataagcatgaaacatttttgttttgtaattgccatgagccatcatagttcgcgtcttgaatcaaacagtacgtcctctgcggaggt

SEQ ID NO: 47425 - DNA, 229 bp, Mus musculus
  source 1..229: mol_type = other DNA
ttttaaaattggcttgagactagcgacacagatatgggtcaccgagctcagctgtcctttgactccaagccccggggggcgatggctctgcggccggcagtcactccgagccgggtcagcatcctcagacttgaagccgccgccggtacgagactagcagtaggcttcctctcagcggccagcgacgccgcagcactcagtcacactgcgcaggcgtcgtatgccacct

SEQ ID NO: 47426 - DNA, 477 bp, Mus musculus
  source 1..477: mol_type = other DNA
tcccagcacggcggcccgaggccgccgggcccacggtgcggcccgggtagggcggctccggctcggcgcggcggggggcgggggtcccaggaggccgaggccccgctgcgagcgccgactcagccccgttgccatctgccccgatgcgcggcccggcccggagcgcacagacgaggtctgagccctgcggccagagcccctccccccacccccaacaccagcaggcctgtggggagagagagcgaaggagctgcgggtccgccggcggccgggactccggctccgactcctccttggcggccgctccggctccctcgcggggggaggggggcgacactcggacggaggtccgggccccggtctcacagccctccagaggcacggcggccgaccttcagcggctccctccgggcagaagtccaggcggtggccgtcgcggcggcaaactgcggctcgagactctccctccgacgggag

SEQ ID NO: 47427 - DNA, 343 bp, Mus musculus
  source 1..343: mol_type = other DNA
aatacagtccatctgtactcatgatggtgagcactatcattttcatttcacactttctagatatatttgtattgcacagatgtcagagaagtatcaatttacttctatgaccagggattataattcaatcactttgtctttaaatcaacacctgttcaaactgcaagaatgctgtctgctttacagaaatctttatcctatacatgattaaaaggcagataaaacctatcaacaattcatcatttgtcgtcgtcatagatgactgcagaagttccaggctatcccgggccacccctgtgagcaagaatttctggaaaggtttcaggtgcagagcctaattcaa

SEQ ID NO: 47428 - DNA, 535 bp, Mus musculus
  source 1..535: mol_type = other DNA
agttactttgttaaaaacaaatatgcaaaactatattgccagtgaaaatatatcattataacttctgattaatttcttcatgtatagattaaattttcagtaattcaaaagttactttgaaacaatatttggtgtaactagaagtcagatcagggaacacagatcacaagctggtgcttgctccatcctacatattctggcacatctattgccagggaatatttggaaatcaagcaaaggcatttataatttttgttccctcgttttctgtacaacacggattctcaaacttagtctgtaaaaggagtagtattagccggctgtgttccaataaaacagtgttgatggacacttacatttgaatttactaactaaaactaaaaactgtagtttttctgatccttgagttagaatgtttgataagaatctctttagatcctccccagagggaccttctgagatttcctgtcccaccagctggtgtagaaaacacattgtgtgctcattagcaggagaggtcattacagaatctgtg

SEQ ID NO: 47429 - DNA, 450 bp, Mus musculus
  source 1..450: mol_type = other DNA
ttttcttaaacagggaacaatagttccccttacactttgagaaaatatatataactctttaattctttctcccaaaacataagggtctaaaatcgttttaaagcaatttgttagtggttttatacttcttaagcttctacaggagcccttctcctagtctagaaggagagcgtgcttggcttggggcctcccgtccctcggcccgcaacacggccggcctcagccagggcccaggcctggcacggaacatgactctgcaaagctacgaggggaccatgtctggggcgctcctgtgatctgcgacgcatggaacctgcgggtcccccgaatacctgaatgtagtcagcgagaagctgtaaccgcgctctgccatcttttctttgacccttgcgcatgcgcaagaggggcctgcgcatgctctgagcgcggggaagtgggcggacttaacgc

SEQ ID NO: 47430 - DNA, 455 bp, Mus musculus
  source 1..455: mol_type = other DNA
acttacatcacaataaacttatttctgagggaggattaatggagtctttttaaagaatgaaagccctctggaatttgtgcttgataaaccctggcaggctttgctgaaggctttacagcgttgtttgtgcctcaggggcaaaatacatctatttaccctttagtttagaactaaataaattcgtgtgtaatgtatttttttttttttagtatatttaaagcaccgaatgagagagttacttctatccttaaagtagtacttgggacaagcaattgaaatctaatacttaaaataatacttaaaaaaatacttaaaattagttttgctttctaggacagcacatttaaaggttccttaaaatgcttccgagtggcgtttatggttctcgatttttattttgctaaaaatatccaaatctgagacccaaataagttttgtactaaggcgggactcgg

SEQ ID NO: 47431 - DNA, 421 bp, Mus musculus
  source 1..421: mol_type = other DNA
cgaacgttcgttttaggactatggactgaaatgattatctcaggtagggagacaattatttattatgctgcgcttgagatataataaaatatatctctcgaagctagcctgggctacacagtgagttctagaccaccctgttcaataaataaataaataaataaataaataagctagcctgggctatacagtgagttctagaccaccctggagtttcaataaataaataaataaataaataaataaataaataaataaataaataaccaactctgctgcagttgccgttgtagcagctcccagcacctctggagcggtccgggacgcaccggcgcgggctgagcgcatgcgttaagtccgcccacttccccgcgctcagagcatgcgcaggcccctcttgcgcatgcgcaagggtcaaaga

SEQ ID NO: 47432 - DNA, 407 bp, Mus musculus
  source 1..407: mol_type = other DNA
actctctgcttttgtctttgtcataagcaacaagtcaccagaaacgtcaattccgttaaaaattttccccagtttagcacgtgaatttcaaaatgttcttcaaattgagcaccctgagcaccaaggcactcctggtgggcctccctttcaagtaacaggttccgttgaagtaacatgggtcttttaaaagaaaccaaggacaaaagtggcccacggggacatcttcaactttcaaaagcatcatcccgcgagaggaagttgcatgggcgaagcgcccggcagcgcgcgagccccggctgctcggctgcgcgggagcgcaggcctggagggctcgggtgacatcacccgcgggccccttcctcctgccgggtgggtggggcctggcgcgccgcgcgggcgcggggtca

SEQ ID NO: 47433 - DNA, 473 bp, Mus musculus
  source 1..473: mol_type = other DNA
aaagtggcccacggggacatcttcaactttcaaaagcatcatcccgcgagaggaagttgcatgggcgaagcgcccggcagcgcgcgagccccggctgctcggctgcgcgggagcgcaggcctggagggctcgggtgacatcacccgcgggccccttcctcctgccgggtgggtggggcctggcgcgccgcgcgggcgcggggtcaaggggcggaggcggtggagcgcgtggctcccggctgcccgcgccagccctgcccggcccgacgcgcggcctcagtgccgcccctcagcgcagcgccctgggatccgcgcgcgcggagcgggaccccgccgggcgcggcctggaaaggaaaccaacttcgccccctgcggcggcggcggcggcggcggcggcggcgtcgtcccgcggctcggcgcgtcccccccagcgctcctccgagtggcggaaattagagggacgggcggagggga

SEQ ID NO: 47434 - DNA, 524 bp, Mus musculus
  source 1..524: mol_type = other DNA
ccccgagaacaacagcccttccctgccagtgtgacccaggcaaaagaaaaacctaactttacttctattttaaggagagttcacttcttttcattaaactcatatttatagtgtttacaaatgattggacttgaagttctagcttttaaagaacttatgaagttcacttgcaaaggaagacgataaataggcattcaatttcaaggtgtaaattaatagtatggacatacagattttcctgaaaaaaatattttcctataatcataattataatactagaattcctataaagaacactatgaattttctttgctgtggaaaaaatacggtgctttgcaaatagaagtaactttatgaagtaacagatgtcttatgtatagacataaggctgaacctgctcaggacatcacccaggtcctgtctcagaagccaagagagatttccattagataatgaattatgaaatgtctcacactggaaaaacgagtcatgagtgtacaactaagtactacagtataaaactt

SEQ ID NO: 47435 - DNA, 187 bp, Mus musculus
  source 1..187: mol_type = other DNA
cctggacatttaaatatgtggattctgtcaggcagaacaaccagctgtctcaggcagcccctctggaggacctcccgaatggaaacagtgcatttaatttgcttgcctttctccctccaaagaaaaaatgtagaaaggactggagtgcccccccccccccattcttcagagaatggcaggattggaa

SEQ ID NO: 47436 - DNA, 313 bp, Mus musculus
  source 1..313: mol_type = other DNA
ctgggtagccgcccggggacggagacccgaagcgggcccccgagaagttgccgccgtgccgcggagactggctgctcccgtacggcctagcccggggcccgcagggcggagtgtggtgcggactcccgtacccgtcccgcggggagggcggccgcggccccccgcccagggcaccccggaaccaccccaacctcctatccccgggctggggtacggaggagttgcgcaccttagttccggctgcacaaaggttccggtcttcccggagtagggccatccgtcttggaggcttccctggcggcggggccgggct

SEQ ID NO: 47437 - DNA, 302 bp, Mus musculus
  source 1..302: mol_type = other DNA
caaggcagcagtctgctttctaaaactcagcttttggcgggctgtttcctaagttaccaaaccttgggggattctgcgacaggagcccccgaggcgcgagcgctcccctcagggagcccgagcgctcagtgtcagtaggtacctgactgcgggcggccggtccacagccccctcccgccggccaggcctcggccgggtctccgaaaagccaccagcccggccccgccgccagggaagcctccaagacggatggccctactccgggaagaccggaacctttgtgcagccggaactaaggtgcg

SEQ ID NO: 47438 - DNA, 443 bp, Mus musculus
  source 1..443: mol_type = other DNA
cttagatataattaacttaatgcttttgctttataaagagatttacttatttcatgtatgtgacacatcagaagagggatccccattacagtgtaaggctttttaaaggttccgaaacgtcgtgagtctagtcaagctaacgtcaccgtgaccttttcgcgccatgatggcgccggagggaaggcctcccctgccggaagtggagtggctcctcgcgtcacttccggtgacggccagggtcccggcgggcgcgagcacgcagcacctcccctcgcccgcgctcgctctctccatcggcgtccccgaacgtgacgagcgtgcgcgccgcgtggtgcgcggcgagggctcggccagccagtcgcgtcgccgtcccgcagggagaacgcggagggcagggaggggcgagcggcgcgcgcggagcccgcgtggaggggcggaggaca

SEQ ID NO: 47439 - DNA, 457 bp, Mus musculus
  source 1..457: mol_type = other DNA
cagctcttgtagaacttttaagacagataagtggcactcagccttctccacatcgtctttttgtactggaaaaaagatcatacttaagtttaaaactctaacctattgttagtaaagtgtactaggtttctagactgcaaacttgattgagtgtacattcattccttttggttcttcatttggggccaaaggagtgggcagttttaaagaaaacaaccgattcagtttaactactaatttaagacattagtgtgttacgggatggcggcctcccccccgcgacacgggaatcccggcacggccttggggggggggggcgggctacgcctcgcgaacccggggactcgccgtgggtccaccgggaggctgtaccactgcgcctcccccgcgcccgccgccatggagtactcggccccacggccaggaagtgcggcctggcgccccgccccgctggccc

SEQ ID NO: 47440 - DNA, 416 bp, Mus musculus
  source 1..416: mol_type = other DNA
aattaagatctctatatacatacaccttatcacattttatatttggttttatacatacatttataggatacaaaattctctctgaagataaaaagtaataactttgtgtaggggataacttattgacagagcatatattccttattggcaaaacttttgccttcaggacaaaaatgtaaaacagtaacctgtttagtcttcaaactatgagttacttataagtattgttggctaactgtattcaaaacaaattgtcagaaaaattcagttatctgatgtgcagttcttagtattacttaatctcaaaccgatcctagaatcagctcagcacttgcagaaactgaatctcagcccttgaatggtgggacttagcttgcagcacccagctagcccccccgaaccggaagcacttgccc

SEQ ID NO: 47441 - DNA, 585 bp, Mus musculus
  source 1..585: mol_type = other DNA
aaacataggatagctcaagttttctaaatgatgtttttcatattacatttacaaattattatctgacattgtatcttgaagatagtcaatgtcgaagcaattaaacaatagagatttataattttctatattcatatgtcagttttgattcacaacagctatatggcagctctcaaatatatgtatctgtaattccagggaatctgatatgcttttctgacatctgaggacacgaggttcctaagtgtgcacagacacaaaatatctatacaattcaattttaaattaaaatgaaagatgtcaatttaatgtaccaagatactaaatcttcttttttttttttatataaatagtcactatcactttaaaaagtgagtgggagactaaagatttgatatagtagtgttctaaacctaggctttttaggtaagtttagtgaaatctccgagttactttcccctgttaatggcggtaacaggaggaattcataattttctgaaatagaaaatgagataattcataattttactgtaaacaaaataacaatttagcattaattatagatatagtggtgtctctgttgag

SEQ ID NO: 47442 - DNA, 252 bp, Mus musculus
  source 1..252: mol_type = other DNA
aagagcaaggctctgctttgcacatcaagacagaccttgatctgtcccccggttgaaccagagactacttttagctaaggtttagagtgtgagctttgtatgttgactctcaacacaatagcttagtcagcaagggaaaactgttgtgccacagtgtctgagagcccactggcaagcctcacagagcctctggagggtggatggactcgttccttctccagaacagtcaaggccctgggattgaggaacgtc

SEQ ID NO: 47443 - DNA, 284 bp, Mus musculus
  source 1..284: mol_type = other DNA
aactggaggtaactggagttacagttttgagacagtatctaattaggttgtaaaaggtttttacaagtctctctctctgtctcacacacacacacacacctatttaggaggggtcaattagtcctagtttcttttaatatattagattcaagtcttatcacatgtgtaactgaagttggtctgagtagtgtctgctctcagtcacctcaagggggatcagagaggggtggctgttcccagacatccacccctcccattggacagctggttgattcaagatctct

SEQ ID NO: 47444 - DNA, 697 bp, Mus musculus
  source 1..697: mol_type = other DNA
atcaacaggctgttatgggttgctctcaataaaacattttatatctcattaaaactcacatttattttgtgtatctatgtgtataaatgtgaatgtgcatatgcctataggaatacatacagagctggctctctccttctattagaaatcaaaactttagtgactcttttgcactttaaattagtttataattctttaaatataaacaggtcttaagacttctaataattctacttctggtcttagaaaaaggaatgagtatgttaaattataaagggtataagtgttctaagaagaaaaatattgaaattgtcacttaaaattctattttaatcatccaatgaatgacttaatcaataaaaccttaaaacaccttacagatatgttttttacctaaacttctttattctaacaagacatgataaattttcactgacatggataaaataatttttgaacatatagaattttgggtcacaaatttcaagtagtggcatggttttatcttaaattactacagagcttcctcttttcagaaatatatcccctcttcttaagaagaaacattggtgcttatgagaacaaaaaaatatattcctttgatgtaaacaatgaacagtttcataaaaacaagacaattcttagaatactttttctagttacttggaaaaaaaaaagttggtggaccagttagccc

SEQ ID NO: 47445 - DNA, 737 bp, Mus musculus
  source 1..737: mol_type = other DNA
ataggaatacatacagagctggctctctccttctattagaaatcaaaactttagtgactcttttgcactttaaattagtttataattctttaaatataaacaggtcttaagacttctaataattctacttctggtcttagaaaaaggaatgagtatgttaaattataaagggtataagtgttctaagaagaaaaatattgaaattgtcacttaaaattctattttaatcatccaatgaatgacttaatcaataaaaccttaaaacaccttacagatatgttttttacctaaacttctttattctaacaagacatgataaattttcactgacatggataaaataatttttgaacatatagaattttgggtcacaaatttcaagtagtggcatggttttatcttaaattactacagagcttcctcttttcagaaatatatcccctcttcttaagaagaaacattggtgcttatgagaacaaaaaaatatattcctttgatgtaaacaatgaacagtttcataaaaacaagacaattcttagaatactttttctagttacttggaaaaaaaaaagttggtggaccagttagcccaactctcttcttttgtatgagtttattttgtaaagaaaattgcaagatatcagataccacatgatttacatgtaatggccttctaaggaacccagaagatcggtttgtcaggaaaaattttgcctgtttctcaggacataaatgtc

SEQ ID NO: 47446 - DNA, 474 bp, Mus musculus
  source 1..474: mol_type = other DNA
ctggactcactctgtagtccaggctggcctcaggattgcataaccttagtcttgaatgttaatgctatcattgaatgttaatgatagctgtctcaagctgtatatacttaagctgtaacctagtatacacaaggagacaaaactttacaaagactgttaacaatttcaattaagttttttcttcctttggagttaaatgaaatgtaattacccaagtcaaaacctactttatatttggtagaagaaaacacaaaaatatccttttgcttgtgcagcctttgtatctggatcttgaatcactagcaaatcataaacaaactatagcaaatgtttcttcatcatctccaagtaacatagttatgttacagtggagtgaaggacagactgggccattctccctacagatgtctctctagacgggcctgatgcctccctgtgaagcagtccaaccttgggatgctgctcctgagatgg

SEQ ID NO: 47447 - DNA, 526 bp, Mus musculus
  source 1..526: mol_type = other DNA
tgtctccttttgtcaaatggacaagaacacagaaacaaggtttgtcaaatgcaggtaacaaggtttgtcaaatgcctctgtgacacacgtatagccctggctgtcctggaactcactctgtagtccaggctggcctcaggattgcataaccttagtcttgaatgttaatgctatcattgaatgttaatgatagctgtctcaagctgtatatacttaagctgtaacctagtatacacaaggagacaaaactttacaaagactgttaacaatttcaattaagttttttcttcctttggagttaaatgaaatgtaattacccaagtcaaaacctactttatatttggtagaagaaaacacaaaaatatccttttgcttgtgcagcctttgtatctggatcttgaatcactagcaaatcataaacaaactatagcaaatgtttcttcatcatctccaagtaacatagttatgttacagtggagtgaaggacagactgggccattctccctacagatgtctctctagacgg

SEQ ID NO: 47448 - DNA, 402 bp, Mus musculus
  source 1..402: mol_type = other DNA
cagctttccagtctgctgaggaatattagacattactcccatatatcatctttccatattagtactattgttacaaataatactatttgctcctttgtgacaggtaaataatataaacatgtgcgcacgttagaaaacaaagccaaagcttggtcaaatatctctttgacaagctgatttcttttccccatgcctatacttcagtccataaaagtaaaagttaagaaaatgtaaatgtccggtatctccaattacacttaagagttcttttcctctgtctccacttgtcaaagggggaagaacacaggtaatgaggcttgtcaaatgcacactaatggttaccttagtctcgagacagggtttctctgtatagcccatggactctgcgttttcctgaacaat

SEQ ID NO: 47449 - DNA, 403 bp, Mus musculus
  source 1..403: mol_type = other DNA
caggctagttagtatgaccatattatatatgttatatgggtgtatgaaataataaattaacatataagaatcaatctttgacaattatggactgtatatgtgttctatatatacacacatgcaggcaaggggagacagaattgtataattttatattcttatatttatttttttgtgagaagataaaaggaagccatcattgaatccttaagagtccttcaagaaacttgcaaattattgaattctgaaagacatgtttgatgaattatcctagcagtttcatcaaaataattctgaaaaatcatttcctggtaagttagttagaaaagacttacaaactattggatgataccaaactttgcaaaggaatccaggtctctttctaagataagagttcttaaat

SEQ ID NO: 47450 - DNA, 419 bp, Mus musculus
  source 1..419: mol_type = other DNA
ctcagctactctacagctggcttgtagtgtagcagcttctgccctgataccctgccactctgatatacatcgcttacagcttttaaggccctaaatgatcaggctcctgacttcatagtaggtattaagtggaaatgtaaataacattgtaaagcaagggtctttaaaattctatattattattaatcctaccattacttacaaacctctggacttgaagctttgacgtgtagatctcactgaattgagactcaggcctgaacagaaatttagtgtcatttcttcaggaagaccattgtaacacttttaatttgtaaaaaaaaaaaaaaaaaaaaaaaatgaggggggttgcagttcttggagaaaggagtcccttctcagagattaggatgctagtggcatcacgcgtttcctgttgg

SEQ ID NO: 47451 - DNA, 567 bp, Mus musculus
  source 1..567: mol_type = other DNA
atttctcatactagcaattaaaaaaaaaaatccaaacaaactgtatgtttaatcattggcgctgaagacttttagcatttaaaaagcaatgaggcacatttaaggcgaactgaacttgagtgttaacaaatattttcacatgtcatcacacaaagatgagcctttgattggtttataaaaacagtgcactgttcaaaattttgcacgtatataaattcacatttgtaatgtaaacattataaaaacgattaaactactttataagagtatctattaaaaatactattcttaatattattttcctctaacaggctgagagtcttcagcactcatagtgcaatatatttttaatacagttagccttaactatcagtaagacaaaggcattactcctacgtaagactgggcatctaagagaagccttccgtagaattctctaaaagcctgctgttagaagctggataccttaacaggctttggaggcgcggctagtcctaggcccgcccactgcctgcgtctttgcgtgaccagcgcgttgacgtcacggacagggtcccgccctgcagc

SEQ ID NO: 47452 - DNA, 362 bp, Mus musculus
  source 1..362: mol_type = other DNA
attgattttcatgtctctttctaaagcaaagaagaggaaagtaaacatgctcgctttccaaacacgctggtggattgggaaaatctttcagcatgcagattttagactctcctgggcagttccaagttcctgttatataaactgccaggcaacaacagggtcacgttgctccagttgctccaacgaaactttaaggccgacttagcaaagtctcccctgcacaggctgaaagcaagatgctccttttcttgatctgaagaaaaaagactatgtggagcggccgagatgatgtcatcgcttctgcaggagagcagcggagtgggagccggctttgctctcgccgctgccaaggctgctgagcc

SEQ ID NO: 47453 - DNA, 301 bp, Mus musculus
  source 1..301: mol_type = other DNA
aaacaaaattctcaaagctctggccgttttagagttttgtcagaagaattgataatctgatttttattacaccaagatccagcctatggacagcgctcggctgagctctgcgctccatcatgctcaggttttatctcaagaggaaacaagcagggaggaaggtccaggtccgctctctgggagagaatccctcctgtacagtcttagactgcaacaggagtcggggaggaattttaggcgcctactgcttgtgagcaggatcctcgagcctccaccacagggagggaagggccggccgggc

SEQ ID NO: 47454 - DNA, 410 bp, Mus musculus
  source 1..410: mol_type = other DNA
ttctatgggaactttaacacactttatttggaaaaaaaataaagattcagattaatacatctacatctaagctgtgacccagattttatgttttatgaattagtttgacttatttcctttctctagctgagttgagctgataaaaaaaaatttctatttcttagtaagagccaaaattttgtcttttgtttaagttttattcaaacgattaagcaaatgggacaattgagtatcagcacaggtacaggtgatgcttatcttttcaaaagcaatttgaaaatagtcaataacatttcaaccattgaaggaaaagaatcgcatttccaaacagcagcttgtttgggagaaggttgcccgccattatttccctattctgttcttattctgagtacagaacatttggggtggta

SEQ ID NO: 47455 - DNA, 412 bp, Mus musculus
  source 1..412: mol_type = other DNA
taaatttgtttatttacttatttatttatttatttaaagattctgttgaaatttaaagagtgaatcgggactgaatggttcagtgaatttggaagaagataattaactccaaatgcattcttcatccattgctagaatatgtttagattgaaagctttctattaatctgtgacgagtattttggtcactgctgtatattagtgaaaatattaatactgaactaagtcacctgtgtagaaaatattttacacacacacacacacacacacagagagagagagagagagacatggctcatgcctttatttcatattctctataaagtttgataagaaatacttaacagagtaatcaacaaaccttaataaacatttcttgacagtaggccttcaccctgaagaacacagaaccc

SEQ ID NO: 47456 - DNA, 523 bp, Mus musculus
  source 1..523: mol_type = other DNA
atcgaaaggaagcattgctttctgagataggctatgcacagcatctccctgcccagcacagaattctgaattcggagaagacagaagtttctcctgaactttccctgttttaaaaattagtggagtacgttgccaaggaagtctttggcttcattgaagaaaatcttgcagtttagactagagtaaaagaggacttattttaaagcagcccaccaaagtttcccctttggtggaaaatctcaaataaggtggcaaaacgcggtttctgagctcatcagagacacactatttataacagagatgaagtgtgcatactgtgtgacatttccctctttttaagtaggggactccaaaaaagtcgtgggcacccagtcctaggcactgtgcaggggggcggcaaacgcgccaacaaacgcgtgtccgcgcgcaggtgccgggggcggcggcggcaactccgcatcggctgcccagagttcgcggcagctcgcgggatgctcctagatgcaaagagcagcggcagccg

SEQ ID NO: 47457 - DNA, 587 bp, Mus musculus
  source 1..587: mol_type = other DNA
aagggctcttgtccttggccaagtgccaccatgcctgccgcatttgtgacgtttagaatttgaaaaaattttttaaaaatgccatttctgaaaatacttatacaataaatataatagcaataataaatctttaaaaaactgtttgtgaacagacactataggctgtatcctaggtttcttcattctcattatggagggaagcatggagcagcaggcagctctgcatctggatctgcaggcagcagaagagagactctgtgactagcttcccaaagcctattccaatatatgagcctatgggatcattccattcaaactctggcagagagtgaacaccgtgtgcatatacttgtgcacctacaaacagagacacagttctcatatctctctgctaattttgtatattacagagatgttgttttgttctgtcaactgaacttcagaaaagctgtgcatttagtcaaagcatttaattgcagtaactgtccatgttaatttttcttgacaggaaaatggttaggcatgacattcttgccttggaaagccatgagtgttagtcagctttcatatgacctgtgacaatcaac

SEQ ID NO: 47458 - DNA, 459 bp, Mus musculus
  source 1..459: mol_type = other DNA
tgaatttgatacattgaatacatgtatgaaattggaaaaaatgctattctattaaacaagacaatgctaataaatttagctaatatgaattaactaagtctgtaataagcttttctcagagccaaagcaagaagggactcttatctagactgaggtagtctgagtgtttggtgtattttattaaaaaataccaaaacatttatttttaagtcggcaagtcaatacgaagtagctagcgcgcacatcttttcttcttattagatttaagatctagttctttgctaaagaaagctaaataagtttaaatataattctgcattacactttatagtcataattattctacattacaactatattcatttcattttgtaagaatgaaacaggaagggcctctctcttccaagccaacaacctcaaggttcatgtggtcactgacttcagccagaggccggaagt

SEQ ID NO: 47459 - DNA, 322 bp, Mus musculus
  source 1..322: mol_type = other DNA
gacctggctcatcagggaggtcacaccctggtgaccctgtaccatacagaaagaaagggggaaaagtcagaatatatttttgtttttgttttccatttcttttaagggaaggctctcctgaaagcaggatattctcccactggaagactggccgtgggctggggaatttctcagatctatttgtaacacacagaaaatgctttaaataaaagctacttccttttacaagcagtctgagcgcgaaccctgcccattcaggtcggagcaccattgggagcagggttccatcctgtggtggcagagtctgctggaggctttgcct

SEQ ID NO: 47460 - DNA, 355 bp, Mus musculus
  source 1..355: mol_type = other DNA
ctgagtgtttggtgtattttattaaaaaataccaaaacatttatttttaagtcggcaagtcaatacgaagtagctagcgcgcacatcttttcttcttattagatttaagatctagttctttgctaaagaaagctaaataagtttaaatataattctgcattacactttatagtcataattattctacattacaactatattcatttcattttgtaagaatgaaacaggaagggcctctctcttccaagccaacaacctcaaggttcatgtggtcactgacttcagccagaggccggaagtaacttctccagcccttccagatctggacatctgaacttctctcagacatggcaga

SEQ ID NO: 47461 - DNA, 239 bp, Mus musculus
  source 1..239: mol_type = other DNA
atcttaagaacttattagtttggccccagcgccgcagggcccaggctggaccgggttgtttcttcgagggtctcataggaacccacgtgtcgccaggcagccctttgacacgtcgtctggctactcacttgaggactcacaagcgggctctcggtggggtggctccctagccccccctgagaaagctgggtgtgtcacactgggaggggcctagctggtctccccgcccattttaaagg

SEQ ID NO: 47462 - DNA, 431 bp, Mus musculus
  source 1..431: mol_type = other DNA
aagaacttattagtttggccccagcgccgcagggcccaggctggaccgggttgtttcttcgagggtctcataggaacccacgtgtcgccaggcagccctttgacacgtcgtctggctactcacttgaggactcacaagcgggctctcggtggggtggctccctagccccccctgagaaagctgggtgtgtcacactgggaggggcctagctggtctccccgcccattttaaaggccgaggcctagccagacgcttggagtgacccgacgccactgccaggggacacagccacgaccgactcccgggctgggtgccggggacccaggactgtgcagaggaaacccgctttcccgccccgagagagcagagcggcgcgggaagccaggccccgcccccggcccacctcttccgctcggccctgaggagtctgc

SEQ ID NO: 47463 - DNA, 376 bp, Mus musculus
  source 1..376: mol_type = other DNA
ataaacacggatgtatcttttcttattcataattcttgattattgttgagagagaacattgtatcctaccacatttatcagatttttaaaaaattactgatttataagttcttgaaagcatttctataaatgagcatatcaatgtgtgtgtgtgtgtgtgtgtgtgtatacacatatgtgcacatgtgtatgtgggtacccagggggttttattttaagctaaaataataagcaaactacatatcttgagccatataaacagtatttcgaacatccgtgtcaactgttagtctgataattctgataaatcctgataaagttcaggattcatatgagttccagggcctcaccacactattgactggacaagaatact

SEQ ID NO: 47464 - DNA, 490 bp, Mus musculus
  source 1..490: mol_type = other DNA
tttgtacaggttagttagccttacaagcctgccaaccaatgtttcctctctggagcccatggaaggtaggcgtgcatgctcacatagcatacacaaaatggtaaattaacatttaaatctttttttgagacagggtttctctctgtcctctctgtagaccaggctggccacatttaaatctttacagactaaaccggagcatgtgtttttaacttttaaatcttacttaacttctgagcatcacttagtcttgctgtagctcaggaaacagagcagcaggcacagctgtgtcttgagtacctgataaactcacaaactgtcataggcaaagatctgccggctgtggtaccagtgtctcctggcccagcatcactgttgacacttttcaaacattagtttgcatgcaaatctcatgaatattttgcatgtgcttacccacgtgtgtctcctgtatcaggactgtgcatcttcgctgacgatcctcaaaagg

SEQ ID NO: 47465 - DNA, 351 bp, Mus musculus
  source 1..351: mol_type = other DNA
gaatgctatgcaaccaggcttctttttgagacactgtctcactatatagacttagttagattaaaccttactatatggatcaggctgacctacaacttatggcagtcagtgtctgtttactttaagtaaacttataagtctgcaagtcctcagtgtagcacatgacaagaggcacagtgtcttgagtactgagtaggaagtctgccatgctgttcaccctctccctacattgggctttccatgcaaccagtttggaaagtctccttggactcaagtgagtgctgtgtggggccctcccattctggaatcttctagggaaggtgagtcaccgtgacaccttgaattccattt

SEQ ID NO: 47466 - DNA, 442 bp, Mus musculus
  source 1..442: mol_type = other DNA
ggtgtttgtgcaggaatagaaacccagagtaaatcaatgtcctaagccacactctacatgtattttgctcgataataaattactactatcttcacttccagaacacagaatgttctggtgcatgataagagcattaaccactattcttgatttttctttggactctccttttaaattaaaacaaacaaacaaacaaacatttttttttaattctagaaaaatggttgtgtttattgatagttgcaaacatatttaattattttaaagtgttttaaagttagccccaagtaaatgtggcacatctcttgatgttcataatatcctgttaacttactaaattatccttttaatacattaatgtctctttgagacatcactaatctcagtgataaaccactgagtggaactccgtggctccctagagtggctctgggagcaacag

SEQ ID NO: 47467 - DNA, 379 bp, Mus musculus
  source 1..379: mol_type = other DNA
gaaaaaacaaattttgaaagtctcttggtgctagaagatgcttttctttataaagaatagagaccatccatgtctcctgcatctatggctcagaggacatggaggctctccctaagatgagccctcttaagccagtggaatatgtacatatatagatacagatatctctatatctgtatagatatagatatatacttgttcatgcacatacatatatacaacatatatacatatacacaagaaagtgatgtaattctacttcagttaaaatttttttctttttaaaagtctttttacgaggcaatgttgcattgctacttcagctaaaagaatttctttttaaaagtctttttacgaagcagtgctctgtgccccgccc

SEQ ID NO: 47468 - DNA, 528 bp, Mus musculus
  source 1..528: mol_type = other DNA
ttaaaacaaacaaacaaacaaacatttttttttaattctagaaaaatggttgtgtttattgatagttgcaaacatatttaattattttaaagtgttttaaagttagccccaagtaaatgtggcacatctcttgatgttcataatatcctgttaacttactaaattatccttttaatacattaatgtctctttgagacatcactaatctcagtgataaaccactgagtggaactccgtggctccctagagtggctctgggagcaacagctgggagggctggattcccttccctgcgcaggagcgacgcggtgagcgagctcgtgctccaggcggggggagggtgctccctgctacctgggaaaggccacccgggctgcgctgcggctgcctatgggtccccctggggcgcggagctggcccggacctaggcacgctgcagaacacttctaacctttagtgtatgtgatttgtgccaggtacgcagaaaaaaaatcaaaagcagcaaggcaggcgtaccctactcttgta

SEQ ID NO: 47469 - DNA, 403 bp, Mus musculus
  source 1..403: mol_type = other DNA
aatccccctgggggtgggggatccccagagcttgctggcagccaatgtagctgcatcagtgagccccaaccatacccacatgcacatgtggatgttcataaacactcaaaacaacaatatttttcagctgctatagaaaaaggatagccaaataataaagtgcaaacttacattttgatttccgtaagtgcttcaaaagctattattctgatgaacaaaacgttcccaaatgtcctgagaatttataagacatctctaggaagtgaagtttaacttttgaattcaagctacctgggattttgcacgcatataaaatctgtatactcactagggctttgttgggtatttacttgtctttagacagtctaggaaaattttaggccagtgagtctccagctccaac

SEQ ID NO: 47470 - DNA, 473 bp, Mus musculus
  source 1..473: mol_type = other DNA
tgtgagttctcactcaaatgattggaggtgaacctcaaactgtacagatgatttgtttgctctgagttaatctgcacacaaaacatcttaaagctgtgtttgttctgacatgtttgtgttagctttacacaccattggcttagcagactgcaaatactaagctctgttgagtgccttcgttcgaagtcaaacaagataagcttaaaataacaaagtgaacttcacttttttttttccactttttttttcagcagcagcagcagcaacaacaacaaaaagaaaatcggcatatctttaccccacttctcttcaaatttgaattctaaacttgagcactaataattaactttggttctctagaatccaacctacatgatagcccaacctaattctagtgatagagatgacatctctgtgtgaaaacagtcaaacgaaatggtctgatttatgtaaatgaaatctttcaacttaga

SEQ ID NO: 47471 - DNA, 387 bp, Mus musculus
  source 1..387: mol_type = other DNA
aggtggacattacaattatctccctgaaaacggctcgtcccttttcccacagggaaagagggtggcttgagtggtgcctagcaagttccaagccagcataatagaaactttatatgccccagtaatagcatttgaaatttgaaatgtatataacgaaaatattaaaggtggtggccagcacttttaatcccagtacccgggatgcagaggcctgtgaatctctgcaggactcattaatgataattccttttgtttcccctggggctcttgcgcaggctctgggctgcttcccgcttccatcggaggctcagcgccacggttcggactagggctgcaccgggctacgccccggaattgacccgcctacagcccgcccgtctctagtgc

SEQ ID NO: 47472 - DNA, 246 bp, Mus musculus
  source 1..246: mol_type = other DNA
aaataagcaatttcaacaaagcttaggtaatttagctagggcttcctagaatagcactgggtagttttccatgggattctacaggaagatcagattccagttaaacatcacaacagttgttacaaacttttttgctgaagagctggaaatccatagtagactatactggctctttactgcctatagtgtcttaacaaagtctacttgccagctgaattttcgagtcagcactgtaacaattatcaa

SEQ ID NO: 47473 - DNA, 581 bp, Mus musculus
  source 1..581: mol_type = other DNA
ttgtttatcagcatatgtgctgataaaggaacatttcaagacaattctttgtgcagtccggtctgtcctggaactcgtcctgcagagtaggctggcctggaactcttagctaaggttagggggttatacacgtatttcccacaatgcactatcccagtataggtctctttggagaaagtgagtggctctgaaaagagccgcagcagcacggcctggatgttgggcaggacgccgccctgcgcgatggtcacgcggcccagcagcttgttgagctcctcgtcgttgcggatggccagctgcaggtggcgcgggatgatgcgcgtcttcttgttgtcgcgggccgcgttgcccgccagctccaggatctcggccgtcaggtactccagcacggccgccaggtacaccggggcgccggcgcccacgcgctccgagtagttgcccttgcggagcagccggtgcacgcggcccacggggaactgcaggccggcccgggaggagcgagtcttggccttggcgcgagccttgccgcccttacgcatagtatatatagttggttacacattggttaccaatggcgccct

SEQ ID NO: 47474 - DNA, 388 bp, Mus musculus
  source 1..388: mol_type = other DNA
cttaatttaaaggctgctgcgaattatatttcaactgaccggagaggcaaagcctgactgtccattacattttaccttatgccttgttaggtccaaggcaaagaacgagctcagtgccctccgacaccgcgtgcttggccagctccccgggcagcagcaggcgcacggccgtctggatctcccgggacgtgcgccaggcgggaagcctcgctcgcgatgcgctcgaagatgtcgttcacgaacgagttcatgatgcccatggccttggaggagatgccggtgtcggggtgcacttgcttcagcaccttgtacacgtacaccgagtgacggccttcaaaagttagggcgccattggtaaccaatgtgtaaccaactatatatactatgc

SEQ ID NO: 47475 - DNA, 491 bp, Mus musculus
  source 1..491: mol_type = other DNA
tttctaatttagttgttttgaaagaggaatcaacttcagaaggctttaacctatttgtattgacttacatttataataccaattttataatcccaaatttataatcacttgatttatgctttttttcctcgagatgagaatgagattcaccaactctatctcaacaagttgaaacagataaaagttgtctttgacattaaaaagtaaaccaatgttcattgttttccaccaattttctatttaaattttaagttagtttccaaccataagtatctggaggatgagaaggaactttataaatatactactgttcctaggaactacaaaggtttaaattcttcaatacgcagtgaaagttgggaattagtatactcctgagcccagcgcaggcctctggatctggccagacaaaagcttaggtgacttaaagctatgtcactcccctaccatagagctgtcagacctccgagcttcctagagagcttccggaa

SEQ ID NO: 47476 - DNA, 597 bp, Mus musculus
  source 1..597: mol_type = other DNA
gacgcgcatcatcccgcgccacctgcagctggccatccgcaacgacgaggagctcaacaagctgctgggccgcgtgaccatcgcgcagggcggcgtcctgcccaacatccaggccgtgctgctgcggctcttttcagagccactcactttctccaaagagacctatactgggatagtgcattgtgggaaatacgtgtataaccccctaaccttagctaagagttccaggccagcctactctgcaggacgagttccaggacagaccggactgcacaaagaattgtcttgaaatgttcctttatcagcacatatgctgataaacaactaatcactgtacaatcaatcctcacttgaatctgtttatattgactgttaaagcatttggtggtatcacagctacagggggtcaatgttcttagagcctctttttaaagtcactcttttacacatcttttcatttaatctgaagtaggaaaaagaaagtaagaaaagtgcttttaataaaaattacattgatttaaacgaacctgcggcgggattttcttttcaatgaggaaattgcacacttggttaaaccaattaagttgatctggcagc

SEQ ID NO: 47477 - DNA, 575 bp, Mus musculus
  source 1..575: mol_type = other DNA
gtcgccttctgcaagactcaccttgcacacacagaggacttgcaaggcatttatccgtgttccgtctttagacaagttcggtaattctatataagaatcaattcttttcgagtacaaaaagtgtctctaaagagttatgtttcctaagaactttccagcagcacggcctggatgttgggcaggacgccgccctgcgcgatggtcacgcggcccagcagcttgttgagctcctcgtcgttgcggatggccagctgcaggtggcgcgggatgatgcgcgtcttcttgttgtcgcgggccgcgttgcccgccagctccaggatctcggccgtcaggtactccagcacggccgccaggtacaccggggcgccggcgcccacgcgctccgagtagttgcccttgcggagcagccggtgcacgcggcccacggggaactgcaggccggcccgggaggagcgagtcttggccttggcctaagggtctaatattttaaccagtagaaacacaaatttgaacaatatgcattctcattggataggtgtaattttaaactaaccaataaacatgcgtatataggg

SEQ ID NO: 47478 - DNA, 280 bp, Mus musculus
  source 1..280: mol_type = other DNA
attcagatgacggttgctcgaggtctgagtgccctctagtggccatcgagatagtgtttagaccctgtcttgcccttttccaagccagggttggtgcaaactgtgaactgaaatcggcttaaaggtttctataaattcttataaacatattaaaatggccttttggaagtttgaactaaaaacacggtggaaagtgtgtactgagcacagcagccgcctgcagacagggaaacaaaaggcgccctttttctttttggtcacggccgcgggcgcaacttcc

SEQ ID NO: 47479 - DNA, 524 bp, Mus musculus
  source 1..524: mol_type = other DNA
ccagtttttgtaaatatagtttttccatcaattttcttgacagatcctaatttagtaggagattaaaaaaaagtgtttttcattatacttgtactgtacagagagtattagtacagaaatattttacttggatattttcttgaaaatattagtgaaagtcaattaaataaaaaaaatctttgaaatgtcaatatagataagcttaaatttaatatggtcacaatagaaatatcagaagtgaccgtaagtatagtgatgaaaaattcacttaacggtgaaaaatgactttaaacttaaaatgatttaccgattggtgcttttatgaaaagttctcaagagaataatacaggtattatgaggctttttgtaagtttgaactaaaaaaacccaaaaaaccaaacacgttggaaagtgtgtacttagcagccgcctgcatttgtacagtcagtgtaccagggaaacaaaaggcgccctttttctttttgacagctgcgggcgcaacgcccgccgcagtataaaaaggc

SEQ ID NO: 47480 - DNA, 400 bp, Mus musculus
  source 1..400: mol_type = other DNA
aagtctttagatttctaagtggctctaaaaagagcctttgtttcaggagtgagttaccgacacggcgtgcttggccagctccccgggcagcagcaggcgcacggccgtctggatctccatgcgccaggcgggacgcctcgctcgcgatgcgctcgaagatgtcgttcacgaacgagttcatgatgcccatggccttggaggagatgccggtgtcggggtgcacttgcttcagcaccttgtacacgtacaccgagtagtgtgtctgcacaggctgccttttaaacaaacttgtggctatagctatcgcgaattagcagtgcaagggcttttcaatgcaactctgttattggtctaggtgcaatgcttctatgtaaccaatgaaattcctttcatgtgcatt

SEQ ID NO: 47481 - DNA, 616 bp, Mus musculus
  source 1..616: mol_type = other DNA
aatgcactacaggaagaacattaaaacgtagtaatagctactagtatttataggtcagtaaattaaatttcacaattctaaataaaactaagtgttgcactcattagcccaataatgaccaagtgtttttgtaggtggaaaagagcctttggtggttggaaagggttgctttctacagcagcacggcctggatgttgggcaggacgccgccctgcgcgatggtcacgcggcccagcagcttgttgagctcctcgtcgttgcggatggccagctgcaggtggcgcgggataatgcgcgtcttcttgttgtcgcgggccgcgttgcccgccagctccaggatctcggccgcacggctgccaggtacaccggggcgccggcgcccacgcgctccgagtagttgcctttgcggagcagccggtgcacgcggcccacggggaactgcaggccggcccgggaggagcgggtcttggccttggcgcgagccttgccaatgcacatgaaaggaatttcattggttacatagaagcattgcacctagaccaataacagagttgcattgaaaagcccttgcactgctaattcgcgatagctatagccacaagtttgtttaaaaggc

SEQ ID NO: 47482 - DNA, 646 bp, Mus musculus
  source 1..646: mol_type = other DNA
tctaatgtaaaatattttttaatgtattttctgtctacaaatatccctaggaaattctcagaaccatatctaatttatttttacttagaaataaggccattgtcatctgaatttagcaattcctttttaagtatatgttttaaacctttctgtgaattgggccagtcttgcagaaggtccgagatcccctggaacagggtcctgtgggtgctgggaactaaacccaaaccccaagagcagcaagtggtaactgctacaccagcagctcctaaatataatgatttctaatctccttacttcaaagaagatttttaaagagaaatatctaaagtggttaattttagcctgtgttatttgctacagacacaaacaacgtttttgcacaaaccaaaagaactattagttctactcttgcataagtaatgttccttgcatacttcgtaaaagttaacagaaatatgcaagtaactctcacgatgatttttttgtaaacactggaaggatttttaaaaatatttttagtcagttgcgcgtgattcaaaaaagaaactgccaatgtgttattattttcggcagtaagtaaaaatttggggactaacaaacacaatttgagggcggtggattggccgctccaccaatccccagc

SEQ ID NO: 47483 - DNA, 464 bp, Mus musculus
  source 1..464: mol_type = other DNA
aggcaaaaagcctgttcataaaacaacatgcttactgtctgatcttattgcttttgtttctggcaaatttgaccacattaagtgggttcccagcgtcttttaaccttgaatggtgtaactttgtaacttgtaaatgaatgccaacagtgttgctgtagaagagtaacagaatctcaaagccttctggatctcaaagccctagtaagttgcagatacactgattttgaatttttttcgcgccaaaatcgcaacagtatcaattgcaacttctaaaagtttccggtcataaaagtgttgcaagcagtttttgaagaagtgctcaataacggtgctcttgtttaaataaatagcgaagaggtcttttgacctccaaagccaacattatctcgagatgataaattctgattgttatgtaaaaagatgaaatttgtacgttaaatataaaatgtaggcaacgtttttcc

SEQ ID NO: 47484 - DNA, 507 bp, Mus musculus
  source 1..507: mol_type = other DNA
aattagaaagtactcaggacagagagatcagccctcgatctcagaggttaacctgacttcagagaattctaggctaaaaaatagtaactaatatgtccgagtactaaagaagtgagtcagacgaatgccctccgacaccgcgtgcttggccagctccccgggcagcagcaggcgcacggccgtctggatctcccgggacgtatgcgccaggcgggacgcctcgctcgcgatgcgctcgaagatgtcgttcacgaacgagttcatgatgcccatggccttggaggagatgccggtgtcggggtgcacttgcttcagcaccttgtacacgtacaccgagttttttaataaggcgttattcaaatgaggcttagagatacacatttctgattggttaaaattttcaaattttcatggcgtagcgcccaatggaactacgcttcggaaaagaagaagccagccaatcgcgtaggctctttttcgcgcttggagaatcctataaaggccaag

SEQ ID NO: 47485 - DNA, 737 bp, Mus musculus
  source 1..737: mol_type = other DNA
tactagctaacattgaactttagcttttgtaaatcaaagactggcagataatagcctttaaatataatggttttaaatttgtaacctatttgcaactctgtagccacttagggggtggtgtttttatctcttttcattaaaaaaagaattggacatattccttctatagaaaaagacaaatgtgttagctctgaaaagagcctttgttttttaaatgatcaggaaacaattgtcttatttgcagacggccgatgttgggcaggacgccgccctgcgcgatggtcacgcggcccagcagcttgttgagctcctcgtcgttgcggatggccagctgcaggtggcgcgggatgatgcgcgtcttcttgttgtcgcgggccgcgttgcccgccagctccaggatctcggccgtcaggtactccagcacggccgccaggtacaccggggcgccggcgcccacgcgctccgagtagttgcccttgcggagcagccggtgcacgcggcccacggggaactgcaggccggcccgggaggagcgggtcttggccttggcgcgagccttgcggaggagcttggcctttataggattctccaagcgcgaaaaagagcctacgcgattggctggcttcttcttttccgaagcgtagttccattgggcgctacgccatgaaaatttgaaaattttaaccaatcagaaatgtgtatctctaagcctcatttgaataacgccttattaaaaa

SEQ ID NO: 47486 - DNA, 388 bp, Mus musculus
  source 1..388: mol_type = other DNA
ctccttcgcctctttggacaggtaaacaaggcggaagaggaggagctgcttctaaggtgcctgcgatgtgtaacagctttttacgctgaaagggccttggtgccctccgacaccgcgtgcttggccagctccccgggcagcagcaggcgcacggccgtctggatctcccgggacgtatgcgccaggcgggacgcctcgctcgcgatgcgctcgaagatgtcgttcacgaacgagttcatgatgcccatggccttggaggagatgccggtgtcggggtgcacttgcttcagcaccttgtacacgtacaccgagtgacggccttctgaaaagaagaagtcagccaatcgcataggcccttttttgcgcccagagaaaactataagggcca

SEQ ID NO: 47487 - DNA, 464 bp, Mus musculus
  source 1..464: mol_type = other DNA
tgggccgcgtgaccatcgcgcagggcggcgtcctgcccaacatccaggccgtgctgctgcaaaaaggctcttttcagagccatccacagtgtcttttaaagaaacttacgtaaatcgattgaactaatttccctggtgttaagtactgaaaactggccacttttcatgtaagcatgaaaagtagctccgtgtcttgttctagatgtcctagaactccaggccagtcaggcatgtgccatcaccgccatttgccatgttttagagttggtgtacttactcctacatagtgttactgtaaaagcgacattttgtatactataacttttgttccataaggacgtagtgatcacataggcgtgcacgtatgagtgcgcacctgcatcttgcgttgtttgatgcacgtaagtttaaaaaaaaaagttgatgaaattagcttcctttccatataaaaactataagagggg

SEQ ID NO: 47488 - DNA, 464 bp, Mus musculus; identical to SEQ ID NO: 47487
  source 1..464: mol_type = other DNA

SEQ ID NO: 47489 - DNA, 388 bp, Mus musculus; identical to SEQ ID NO: 47486
  source 1..388: mol_type = other DNA

SEQ ID NO: 47490 - DNA, 595 bp, Mus musculus
  source 1..595: mol_type = other DNA
aacaagacacggagctacttttcatgcttacatgaaaagtggccagttttcagtacttaacaccagggaaattagttcaatcgatttacgtaagtttctttaaaagacactgtggatggctctgaaaagagcctttttgcagcagcacggcctggatgttgggcaggacgccgccctgcgcgatggtcacgcggcccagcagcttgttgagctcctcgtcgttgcggatggccagctgcaggtggcgcgggatgatgcgcgtcttcttgttgtcgcgggccgcgttgcccgccagctccaggatctcggccgtcaggtactccagcacggccgccaggtagaccggggcgccggcgcccacgcgctccgagtagttgcccttgcggagcagccggtgcacgcggcccacggggaactgcaggccggcccgggaggagcgggtcttggccttggcgcgagccttgccaccctgcttgccgcgtccagatggtagaaattctgaaaaccgtacgcttgcaaagagcaagagcttggcccttatagttttctctgggcgcaaaaaagggcctatgcgattggctgacttcttcttttc

SEQ ID NO: 47491 - DNA, 143 bp, Mus musculus
  source 1..143: mol_type = other DNA
aaaaaaaaaaaactaaacatgattgctgtttgcattctcttttttataccggcttctttagtatttaaaaaaaaaatgagagtcgtttttcgaagacatgaaaacgaaaaaatattttcaaaatgtacgcttgcattttgaaa

SEQ ID NO: 47492 - DNA, 376 bp, Mus musculus
  source 1..376: mol_type = other DNA
accttacttaaaattttaaaaattacatttcgtgtatacagtgtgtatgtatacacagtatgtatgtatatacagtgtgtatgtatacacacacacacacacacacacacacacacacacacacacgctattgctatattgtgtatttggaaataggggtgtagagtgaaactttctgtatcccccttgtttaatagaccctttcccgccagggtgcaaggttacaaatcctgactttatcccctgaaggccctcgtacgttcactcgtacgatgaagggactcagtttggggaactgggacgcgcaccaatgcgcatccaggtccaaggccgggtcctgcctggatgctagacacagaccgcagatcccagagtg

SEQ ID NO: 47493 - DNA, 249 bp, Mus musculus
  source 1..249: mol_type = other DNA
taatttttaaaaatctaaattctctcacagtgccttgaaaggaaagaaggataaagatatttacctttggcaattaattttttttttgcattagcacacctggctactgataaccatcttagagctttctgagcattaaatctgaggcagcataaacccactgtgttcatacactgtacagagtctttggacaatccagcctctacagactctggcgtctggctatgcgttagcagttactactgacgc

SEQ ID NO: 47494 - DNA, 391 bp, Mus musculus
  source 1..391: mol_type = other DNA
gctgagcttcaggtatgccaaactgacctgattttgaacaaattacgccagaatacaatataactttaagtcaaaaggtcattgtggcttaggtgaattcatgtttgcagctttagtggctcttaaaagagcccgacacggcgtgcttggccagctccccgggcagcagcaggcgcacggccgtctggatctcccgggacgtatgcgccaggcgggacgcctcgctcgcgatgcgctcgaagatgtcgttcacgaacgagttcatgatgcccatggccttggaggagatgccggtgtcggggtgcacttgcttcagcaccttgtacacgtacaccgagtgacggccttctatgcaaataaagtgagagaaaaggctgagcctgcttttacc

SEQ ID NO: 47495 - DNA, 612 bp, Mus musculus
  source 1..612: mol_type = other DNA
ccaaagatgtggtggtgaatatagacgttccattccattccattcagtgcaaaaacaagttactaatgacaaactggaatttagcctaatcctttccagaaagctaagtgctaagcccctgaaaagagcctttgttggcgatcaacagtgctttgtataaagcagcagcacggcctggatgttgggcaggacgccgccctgcgcgatggtcacgcggcccagcagcttgttgagctcctcgtcgttgcggatggccagctgcaggtggcgcgggatgatgcgcgtcttcttgttgtcgcgggccgcgttgcccgccagctccaggatctcggccgtcaggtactccagcacggccgccaggtagaccggggcgccggcgcccacgcgctccgagtagttgcccttgcggagcagccggtgcacgcggcccacggggaactgcaggccggcccgggaggagcgggtcttggccttggcgcgagccttgcttggtccttatagttttctctgggcgcgaaaaggagaccaatggaaagcgttttgattgggccaaagcctatatgacgtcatcaaaccaataagctttatttgaataaggcctctttaaaaggg

SEQ ID NO: 47496 - DNA, 480 bp, Mus musculus
  source 1..480: mol_type = other DNA
agtctaaagacactcagttgagttatatgaaatcctaatagcatctgaaaattcattgagcttcctgttcagtttatggatagtacaggcatatccttctcaggaatagattactgtaatgcaaagtaactaccctgtatacccagcagctctctttaaaagccttggtgccctccgacaccgcgtgcttggccagctccccgggcagcagcaggcgcacggccgtctggatctcccgggacgtatgcgccaggcgggacgcctcgctcgcgatgcgctcgaagatgtcgttcacgaacgagttcatgatgcccatggccttcaccttgtagacgtacaccgagtgacggccttcttcccttttaaagaggccttattcaaataaagcttattggtttgatgacgtcatataggctttggcccaatcaaaacgctttccattggtctccttttcgcgcccagagaaaactataaggacca

SEQ ID NO: 47497 - DNA, 470 bp, Mus musculus
  source 1..470: mol_type = other DNA
gactggcttgtcctacagtgggttttaatgagattgtctgaaaaaactctagaagggttaaacttgaatgcttaatcttagatttacgcagcagcacggcctggatgttgggcaggacgccgccctgcgcgatggtcacgcggcccagcagcttgttgagctcctcgtcgttgcggatggccagctgcaggtggcgcgggatgatgcgcgtcttcttgttgtcgcgggccgcgttgcccgccagctccaggatctcggccgtcaggtactccagcacggccgccaggtacaccggggcgccggcgcccacgcgctccgagtagttgcccttgcggagcagccggtgcacgcggcccacggggaactgcaggccggcccgggaggagcgggtcttggccttggcgcgagccttgccgcttccctggtaagggtaaaagcaggctcagccttttctctcactttatttgcat

SEQ ID NO: 47498 - DNA, 448 bp, Mus musculus
  source 1..448: mol_type = other DNA
tgaatggaataatggacgtctatattcaccaccacatctttggagactcaatattaagtcactaagtaggtagttttaacattgtaaacctcaggtaaatacactgtaaaatctggataatcttttgttaccttaaatacataattttgtttatatttctggacgatctcgaagttcgagaccagcctgttctacaaagctactatcacagcagtttaaatggttcacgtactaaaacactgtagaggttttttgatttttctcactatcttattgattcattaaaagatattccaagtatccgcaaataaagggagaatgacgagatctgcttcttttctttttcttgtttaagaatgtgccacattaaaaggtggaagaaacttgttcttatataaaatgaatgagccgctaggctcctgggctgctgagcgccccttaagaggga

SEQ ID NO: 47499 - DNA, 471 bp, Mus musculus
  source 1..471: mol_type = other DNA
ttttacacattaatgtggaatattcaggagaacttattcataagttggtgcatttctgactgaggaatcattccctaaagtaaattactttcaatgagatttaacacatgtagaaaattgagaacacaacacaaattttattaaatttattcctactagcttctgtgaaaattatacaaaaaggaaaatgagtccatttgaccaagagcaattttctagcctgaggtcatacctcaggttcatactcagaactgtgttaatatgaaaaattgagaaagttatgttatgcatttagactttgtctgggaagatcacagtcaaatggaagtttatacctgattacagctatcatcattttaatggaaatgaaaaatatatgttttttttccccataggaatgaacagagaaaaatcttacatatgtttttcaaaagacttttttcctagtgccatgcatgaagtcaaaagatg

SEQ ID NO: 47500 - DNA, 609 bp, Mus musculus
  source 1..609: mol_type = other DNA
tttaaacatcctgtgtttaaggaaattccctcccaaaaggaaggatttacccttggaggagctattgctcaggatcacattggtattgaaattgtgacactgtccatatttagcatttttttttctagaaaggaaatggttgctcaaagatttaccataaccagaataagtaaaccccacaaagttataattttggagatccaggataactcatcctggctggctggatgccttcccagcaagcaagcattacaaatacagaattcaggaattagcttgttaatcttgttttaccttgtaagaatagtgaagtggtaaaatattttacatcaattagtgattttaagaataactccaatgcactggacttgttcatggagttaaaaacaagtctgattttactagcttttgattacattctaaaaaaaaagtcaccattggaatataaacttaaggtaagtacatgcattaacatgggattacaatatcactatcatcacccatatcagtgagaaattcaatcaggtgcatgctgtaaaagaaccatgtacattttcatatttcagaaatttctcattacttctcacctgaggtcaaaagatgatttgg

SEQ ID NO: 47501 - DNA, 345 bp, Mus musculus
  source 1..345: mol_type = other DNA
atgtatgtatgtatgtatgtatgtatgtatgtatgtattttttaaccagcaaatataccctacttgatggacgtcaacccatggcatgtgaagacttggctgaaattcatatccaagaagtcttctgtggtgaatactccacgacacagagagcaggatgccggcactcatctcttccctctcattctaggtcagtgaatgagatctgctgaaaccagtccgctgtgcacactcggcagaggctcacgaggttaacttcagagaaggttttgaccttggacggttactgaatcaatatcccacagcttggctgtaaagagctgtgcgtgacgtttcacgcgtcgc

SEQ ID NO: 47502 - DNA, 252 bp, Mus musculus
  source 1..252: mol_type = other DNA
tcagagagttcctgataatcagatgtggcaggaagataaaccaatgtattgtaaatcttctatgttttctttttaattctattgttgtaaccagagtagtgagacatcagaagagctcaatggggaacttttccccttgttgttactggccacaagtctcgcagatggccaggctgcaacaggatccttctgatgattggtgattggttaacttttgtcaattctcaaaatcaccttggtggccagctgtag

SEQ ID NO: 47503 - DNA, 547 bp, Mus musculus
  source 1..547: mol_type = other DNA
agaaaataacattcatatatgaatatatatggaatggttctaaactttacagaacatgtgaaacccaagttaggaaatatgcacacatatgtagttatgggtaactttttttctcaaaaagtagctcactgaagataatttaaaaatctcaatgtaagtggttcattatacaaccatagaatcagatttggtttttataataggtagcaatcaaaatgtggtttagaggtattcatgctgaaacaacagaacctcacagatgtttgtgtgccatgtggcacgcacagatgagatatatcaatatttaaacaagtagattctattttatagtataaattaaatatatagctaagatatttagatttttggaaacaagacttcatgatatatttgagtctctagataggaacatcaataaatttgaataataatacgtatcatctccttatcctccagaaatgttaggtgatttgagagatattttgcttgtatctcccatgataatttcttccaaaaggtatttcctggattaagtattcctacttca

SEQ ID NO: 47504 - DNA, 454 bp, Mus musculus
  source 1..454: mol_type = other DNA
attttcaagatttcttgaagctggaaaattttatgaaccacgcgttgttctaactagaaagtttctctgagcagaaagaaaattctgtaagaacccagagatactggtcacagcacagtctactggctcagtagacaatttgaacatttgggtaacacagtggggttgtccaacgctcattccgtcctcctttaatgaagtagcgaaggaataaaaaacttgagattctgaaatgagtattttcaggtcacccgagcatctccagagcctcggacggagccagcgctgaccactgcaggatagaatgagccagcttgaagtctcctcaaactttggtgacaaccaaatctgtgactccgaagtcgccctcaacttccgagtctgtaactgagaccaacgcagagcatgattctttgatgaaaagacgcgacgcgtgaaacgtcacgcacagctc

SEQ ID NO: 47505 - DNA, 398 bp, Mus musculus
  source 1..398: mol_type = other DNA
ggattttttgtcttaaaattttaatttaaaataagctgcagaaattctgcaaattctgaaaacaggaattagtgaattcagaatacataattgccaagagaattctagtactcacttcctgttatatacatgtgtgtatgtgtatagtatatatatatgtgttatacgacattggtctcagagatcaaacaagaagcactcttgctatacattttttttttcaagtagggaaaatattgacatcaaggtatttaaaaccgccgggcgcagggcacggtttcaattcagtgggtaccggagctgctgcagtcccaaattaaagagccagggcgcaggcgcgctcaggttccgcccttcgggaggtccggtgcttattggcccggaatcccggtgcagcc

SEQ ID NO: 47506 - DNA, 561 bp, Mus musculus
  source 1..561: mol_type = other DNA
cttgacgagggacaacttgagtcctcaggatcatcctgctctccgtccgtccgttaagcaggaggggactgctgtggcccgcctctgccggcgtgtaggtcccaaaagcgaggcggcctgctgatgtgcggaccgcgccccctggcggctggtccgaggctgagacctgtttttactcaaacagttacagatttaagtattcacaaggtgaaatgtaaaattactaaaggcgcgtttaaaattttaaaaccgcaactccaataaatttataagctgcttcaaaaactttaattttaaaatgttaaaacttcatataattcaaataataaaataaaaattcaaataatatgttgaaacttcaaataattaaaacttcaaggctcagactgaagtttacaagttgaacttcataaaactttttaaaatgtgtgttaacctttcaaccaagaaaatgctgttttggtctctacaacacactctttcaacactctgttcttgatgcatgatcattcatgcacatttgtaaaaaactcagatgagggctgcgcgcggacccaggtc

SEQ ID NO: 47507 - DNA, 321 bp, Mus musculus
  source 1..321: mol_type = other DNA
atttttttgcctcggatataaaatatattagatagtcctggactaggcgtttctgcaaggcacagtaagggatattccagtgccggtaactgacttccctgtctcaacaaagggaacgcgtttgcgcgttccaagccatttcctggattctgaaatttaactatagaggttaactggatgtaattcaatgctcgctgttattttcagtgatatgattttttttatgtctaataaaatccgaacaagatggtgttttataatcccagaactgctaaggcaggagaattgccccctctttggaacagtcccggggttatgaaa

SEQ ID NO: 47508 - DNA, 399 bp, Mus musculus
  source 1..399: mol_type = other DNA
tatactagaaaaagaactagaaatctcataatcttcgcaaatatatgcgtattagctatgctatgaacttatcactatgaactgatatatattgttcttaaattttattttatatttatgtacagcatagaaacaatcattgataaaactgttttttttctttatctttgcattttttcagtaataaatgaaaattcaaaaccaaataaggttataccttgaaggtggacatccagtggactcctgccaccacccacattcctgaaggtgtctcatggagggaggagaggtaatgacaaagtaatttaccttttccaacttggcataattcaaacaaggtattagtaacattagtctttttcttaaaagtaacaaacactgctatgaagcccagactgg

SEQ ID NO: 47509 - DNA, 251 bp, Mus musculus
  source 1..251: mol_type = other DNA
ataggcatcaacttgatctggctgcttctattgatgactcttaggtctctgaagacaatcaaaagaaagactaagtagttttaaccactgagtacaaagtcttagcactgtctactcccttaagctaggcgtgactttaattccatgcctttaattccagcatgcagaagagtttgagtgctgggattaaaggtgtgagtcagcacaccctctgtgtatgctacctagtaacaagtgactatcccgggctc

SEQ ID NO: 47510 - DNA, 302 bp, Mus musculus
  source 1..302: mol_type = other DNA
ctggaaaagcagccagtgctcttaattatagatgtttgaggtttaaggtctacctttaaacaattttaattttaatttgaccaaaaatgggactatgggcaatattaaaagtcacatacttaaaaataactctttaagagaaagtattaaaattaagagaacagttctctgtataattttaaatatagtcttcagcctactcacaaaggagcaagtttattagcccttgttgcaatttaaattactatccaatcaaaacaaggttttttcatatacaagctaccattggtttaggtaaaaat

SEQ ID NO: 47511 - DNA, 456 bp, Mus musculus
  source 1..456: mol_type = other DNA
taaggctttatgaattatgtatagaagaaactgagctctgtttaggttttattgggcaaaataaatctgacttattaccaagagaacacatgagttgatggtttcgatccatcgacctctgggttatgggcccagtaaagagagcctttcaaaatattatacttaactttatttgaaaggcctgcaggaaggcttctaatttttgtctacctaaaggctaatatttgtaacattaacatactagtaagtagtggaagaaatggtgctattttctccagtgtttagtcctttacagccgaaaataaaaacacatcagtatttgtgatcgctttctaaatttgttacaagtgacaaatatgtattgctaaagaaactgtttagtctgaacgttggtgacgtcactaggcattgcccatgccaggggcggggccattgcagggggtttcgaaaacactg

SEQ ID NO: 47512 - DNA, 538 bp, Mus musculus
  source 1..538: mol_type = other DNA
ttggataacaggtctcaacttcaaatttgtgaccaatagaaatctggttaccattaagtaccgtaattgttacattttcgtcaaaacattttaataagagatactatgtctttttccttactttatatttaaggagatgtaagggagtgtacatcttttaatgacttttacaaatgtcttagcatgagtaaccctaattatcttcagaaaaacactagcatgttttctagtaactatgtacaggattcattgaaattgcacaactacaataattattcttaatctttcttcatagacaatttcaaaacaggaaaccaactttacatgtagctagaatttatatatgaattttgtatctagggagagatttttattgatactactaacaaaataacttttaaaagaaaaatggctttgactttagtacagtatcaaaccaactttttcctaaaaactatttcgtctagttttcatagagtctattggctaaacttggccaatcagaagaaagaaacgagtcttcatttgaattagagca

SEQ ID NO: 47513 - DNA, 419 bp, Mus musculus
  source 1..419: mol_type = other DNA
ctgtactcacactagttttggcattctggtatggtaattgggataagcacatcctgagtacatggtatgtttctctaccattatcatagaaacaagatccaggccagcctggtctacagagtgagtgccaggacagccagggctacacagagaaacccatatattcaatcaatactagtgccctttgtagacttgaaaacagagctatgtgcaagcctctgagaaatgcattcataagtgagatttaataatgcttgcaaaattttagaagttacattttcgtaaatcttccacctaaaagataaccttactgtactatatccggttttgtagataagtgtatggataacaacctcctttttaaaaatggccacaggggctgtgcctttaaaaggtccgcattcgccatatatatacca

SEQ ID NO: 47514 - DNA, 575 bp, Mus musculus
  source 1..575: mol_type = other DNA
attcaaatgaagactcgtttctttcttctgattggccaagtttagccaatagactctatgaaaactagacgaaatagtttttaggaaaaagttggtttgatactgtactaaagtcaaagccatttttcttttaaaagttattttgttagtagtatcaataaaaatctctccctagatacaaaattcatatataaattctagctacatgtaaagttggtttcctgttttgaaattgtctatgaagaaagattaagaataattattgtagttgtgcaatttcaatgaatcctgtacatagttactagaaaacatgctagtgtttttctgaagataattagggttactcatgctaagacatttgtaaaagtcattaaaagatgtacactcccttacatctccttaaatataaagtaaggaaaaagacatagtatctcttattaaaatgttttgacgaaaatgtaacaattacggtacttaatggtaaccagatttctattggtcacaaatttgaagttgagacctgttatccaattacataggcatttgaagaggagcatgttccttctataaaagga

SEQ ID NO: 47515 - DNA, 296 bp, Mus musculus
  source 1..296: mol_type = other DNA
tatattaatgtttcaagcacaaaaccataattctggtaagatttacacgttgcacaaaactttagtctttacaaagtcgcaagattcaggatacttgtcggcttgagtcaaggaaaaaggacctaggtgcatattttacatatacaataaacctccctttgatatattcaaatctggtttggattggcttaacatattttagggtcatgagatttcaaattcaagatttctttgcctcaaattctttaagcgactcgatacaattgcgcgtgtgcgaacgcaagcgtacttaaagg

SEQ ID NO: 47516 - DNA, 402 bp, Mus musculus
  source 1..402: mol_type = other DNA
ttgtttttaataatgaaattcaaatcattttaaaactggaaattgtaaactttgtacggagtgagttgctaagtcaggttatatctcactggtacatttctctatcaaatctgaaaaatatgtgctttcagcacactggtatctcaaatatcattaaaaaatccaatcgatattttctacaataatcttctcgaaaaactcaaatatttccgtgaaaacaagttatttcatagagtccaagtttgctagagaagtagtatttttaaggaaaaccttaaagttgtcccaattttcgtcaagtttgaaagagagttgggattttgaacataggtgcacaaattaaggcaagaatgtagcctacaggctggcaacgcggcgcacggcgcacggcgcagggaacca

SEQ ID NO: 47517 - DNA, 293 bp, Mus musculus
  source 1..293: mol_type = other DNA
tattaaccgaccatactgtaatttgaaaataagctgtgcctgaaaataagtgggcaagaatctggaaagaaatttaacttacattttaaacacattaaaaactacacttgtcgccagataaactgtaaatatgtgcatgagtgtgtgtgtatatatatatatgtatacatatacatacatatatagataatggcagagtcaggttcacaaccggaagtgacacggaattaccattggttatttaccaatcaaaaattcaatccccagatgcacttccgcaaattccgaatggc

SEQ ID NO: 47518 - DNA, 345 bp, Mus musculus
  source 1..345: mol_type = other DNA
ataatgaagagaaaacttgaaaatttcattccacttcttatgcactctggagaagaaaatcttgtgtagtacaatgctaatattgtgtcatttcccagcgttataatacaaaaccgacacggcgtgcttggccagctccccgggcagcagcaggcgcacggccgtctggatctcccgggacgttaatgcgccaggcgggacgcctcgcccgcgatgcgctcgaagatgtcgttcacgaacgagttcatgatgcccatggccttggaggagatgccggtgtcggggtgcacttgcttcagcaccttgtacacgtacaccgagtgtcaactctgatttgaaaaagat

SEQ ID NO: 47519 - DNA, 621 bp, Mus musculus
  source 1..621: mol_type = other DNA
ttccagtttgtcctaatttaaaaaaaaaggccaaaatgtaataaaaataattataagaatcctaacaaatgatgcttggtaattaaaatcttatttggtatactagtgaaaatttcatattgtaagataagacaaatgacagtgattacatcacggttaatatttcattggaaaatgcagcaaatggctcttttaaatgacgaagtggatggctctgaaaagagcctttgtttttatacaagcaagcagcagcacggcctggatgttgggcaggacgccgccctgcgcgatggtcacgcggcccagcagcttgttgagctcctcgtcgttgcggatggccagctgcaggtggcgcgggatgatgcgcgtcttcttgttgtcgcgggccgcgttgcccgccagctccaggatctcggccgtcaggtactccagcacggccgccaggtacaccggggcgccggcgcccacgcgctccgagtagttgcccttgcggagcagccggtgcacgcggcccacggggaactgcaggccggcccgggaggagcgggtcttggccttggcgcgagccttgaataagcagttactaagaactaatggtttttatgccattggctttgaata

SEQ ID NO: 47520 - DNA, 662 bp, Mus musculus
  source 1..662: mol_type = other DNA
tgttgccaaataattacaattctgttgtttcatggaaattgatactcttggcataaaagtaacttcacggtcattttgctcatatgcacacatgtcctagtgggcaatcttatgaatctgaaaaaaattgacccatttattggagaattttcttatgccattgaatacaaatcggaaattttagtcctaaatccacttaaggcttatagtatttcagcactttactgaattaagtgaatggctctgaaaagagcctttgttttttttacgagattagaagaaagatcttattgcagcagcacggcctggatgttgggcaggacgccgccctgcgcgatggtcacgcggcccagcagcttgttgagctcctcgtcgttgcggatggccagctgcaggtggcgcgggatgatgcgcgtcttcttgttgtcgcgggccgcgttgcccgccagctccaggatctcggccgtcaggtactccagcacggccgccaggtacaccggggcgccggcgcccacgcgctccgagtagttgcctttgcggagcagccggtgcacgcggcccacgggaaactgcaggccggcccgggaggagcgggtcttggccttggcgcgagccttgccaccctgtttgccacgtccaatctttttcaaatcagagttgac

SEQ ID NO: 47521 - DNA, 390 bp, Mus musculus
  source 1..390: mol_type = other DNA
cccctgggtggtgtaaaaatcctcttgcaatttgcagcaagaccctgagtcagaaggcacgtctttttttttttctacacagaacataaaagtaacaactgttactaagtatcaacatccaatgttacaattttttccctttttgaaaccgacacggcgtgcttggccagctccccgggcagcagcaggcgcacggccgtctggatctcccgggacgtgcgccaggcgggaagcctcgctcgcgatgcgctcgaagatgtcgttcacaaacgagttcatgatgcccatggccttggaggagatgccggtgtcggggtgcacttgcttcagcaccttgtacacgtacaccgagtaatttctggaactttcatattcaaagccaatggcata

SEQ ID NO: 47522 - DNA, 583 bp, Mus musculus
  source 1..583: mol_type = other DNA
cgcgcagggcggcgtcctgcccaacatccaggccgtgctgctgcttgcttgtataaaaacaaaggctcttttcagagccatccacttcgtcatttaaaagagccatttgctgcattttccaatgaaatattaaccgtgatgtaatcactgtcatttgtcttatcttacaatatgaaattttcactagtataccaaataagattttaattaccaagcatcatttgttaggattcttataattatttttattacattttggcctttttttttaaattaggacaaactggaatctatacaaaatatacacttactgtttttaggaaaaagttctcatttatctaggtaaaacgcgtgtttaaaattactcctttactgattatgttaatactgtaatcaaacagcttccttagtgaaaaaagactcaaaagtttaagttttgatttttcacgtgtatcttcaatcttcatgtagaggaaacaattataacagtacacaaacggcatgttatataattaagtatagattggatagaactttgttttgtgaaagataaaagaacaatataacaaatctaccatatata

SEQ ID NO: 47523 - DNA, 567 bp, Mus musculus
  source 1..567: mol_type = other DNA
gaaaacaatacagcatgagtatttactgtattagcatttatcctttgactaagaactgtcaatattttgaggtacatataactatgatgtgctaaggataatagattttctgtgcaatgtttattaactaaaaaacatacatgcaagaaattcagcgctacagtcctgtaacattttgaggaatgctaaaaaaaaaaagttcagattcttaggcatacgtacctaagtcaaatagtaagtgttcttaaaattgtacttaaaactacagcacctcatgttgtggttaaagttatttcactgctgcttaactgtaattttgatactgttatgaattgtaatgtaaatatctgaaataatactttataggttcacgagactaataacattactttctatttggtctgataaaagacaaatttcttttttcacaatacataaattgtcactcttgagggcaatgtgttgactcctcagccttttcataggataaacgccagaagggcgggaattgaccatggttcacgcccccttcccttaacaggtccgcattggtattataaaagccag

SEQ ID NO: 47524 - DNA, 300 bp, Mus musculus
  source 1..300: mol_type = other DNA
ttttaaatcatacttttagggtacccttgaaggtcaccagaccacctaaccgaaaggccgcctttttcttggacgattttctaacttttcctttactgaaccgaaagatcaaagttttaaaatacagtttttccaggaatttggtaattgagcccaagctttaacttctggaatttcaaaatagagcaacttctgtttttaaaaatatatatacaatttaatctaaagcgtttagaaagaaaccaatttgtaacattattatacaatgaaagtaagacttaatttgcataagactataag

SEQ ID NO: 47525 - DNA, 563 bp, Mus musculus
  source 1..563: mol_type = other DNA
aatggtcagttatctagttttaatataccacattacaatttagtcctacatttccaaagacgttgaaaacagcatttatatgtttcttggaaattagtcatttttatgttttgaggtacctcaacccaaaggagaattatactaagaaattattttaaaacttacatagatatatagactcatggcctatgagagaagaatttaactcaaaatggtaaataatctgttaagcattgaactaaaccagtttgaacttccttcacttaagtgcagatttgtaataaaaatcataatgccaagactaaccactttgatgggtcagaaaactgtacagtccaagatcagtttataatttacgaagaaaatagaaagttttgtttctctgagttgaaatttgctgaaccaggaaatattgcaagttagcttaatgcttttgcatgaagcccgagacttcggaacattattttttaaaaatcgggcaattcgatgtagggaatttcggctgccagcgaggcgggctggacagcgcaccaatcacggcgcagctccgccctatataaacg

SEQ ID NO: 47526 - DNA, 172 bp, Mus musculus
  source 1..172: mol_type = other DNA
agctgcagctgcaggcagccaagaaaaagtaaattttctttggccaactgcagtaaaagagctgttgcagcgaatcttaagcattgagcgattcagtgcggaaatcaagcatacaaacccaactagagtacttttttttcgatcgtgcttaaataggttagctatagcagat

SEQ ID NO: 47527 - DNA, 428 bp, Mus musculus
  source 1..428: mol_type = other DNA
tttttttttctcccaacaaaatggttgtagctaaatgtaacctttaagatttataagcacctaactgaacgcactgttctaccacagctctctctttgagaaagtgggtggctaaacgccttggtgccctccgacaccgcgtgcttggccagctccccgggcagcagcaggcgcacggccgtctggatctcccgggacgttaatgcgccaggcgggacgcctcgcccgcgatgcgctcgaagatgtcgttcacgaacgagttcatgatgcccatggccttggaggagatgccggtgtcggggtgcacttgcttcagcaccttgtacacgtacaccgagtatcggatttccaaacatgcaaatgaagtttccagaagcagattttctattggctatatcaatgagctcacttgtaatactataaaagct

SEQ ID NO: 47528 - DNA, 608 bp, Mus musculus
  source 1..608: mol_type = other DNA
gaccagaagttctgagacctttgtcttaataaagtttactgtaattaaaactgttaacaatcaagaccagtcgttactatagaaattatcaatagagtatcctgttcaactcttcttttgaaaaagtggggcagcagcacggcctggatgttgggcaggacgccgccctgcgcgatggtcacgcggcccagcagcttgttgagctcctcgtcgttgcggatggccagctgcaggtggcgcgggatgatgcgcgtcttcttgttgtcgcgggccgcgttgcccgccagctccaggatctcggccgtcaggtactccagcacggccgccaggtagaccggggcgccggcgcccacgcgctccgagtagttacccttgcggagcagccggtgcacgcggcccacggggaactgcaggccggcccgggaggagcgggtcttggccttggcgcgagccttgccgccctgagacatagtaatagtgctgtgtaagtaacagaacagtaaaaacaagttaccaagactgtacagacgcggcagcttttatagtattacaagtgagctcattgatatagccaatagaaaatctgcttctggaaacttcatttgcat

SEQ ID NO: 47529 - DNA, 380 bp, Mus musculus
  source 1..380: mol_type = other DNA
atcattgttaaattaaaatttggaatgccaaaatcaacattaaacttctgcctttttttaaaaaggggggcgggggtggattagccttgttttgacatcactaatcatatcacaagcttcaccaggaccttgtagactttgtaatgaccttgtaattacaaacacttcttctcttaaggtgagcaagccatgctgtgattaataggataaccgataacctaactattcttttgtagactttctcagtttttattaaaaaagaggatagacggaattgagattaaaataagcctttctttcatgagaaagggtctttaagagagcatgcaagggcttgctagccaatgaggattcggaccaggtccgcagaaggcctattt

SEQ ID NO: 47530 - DNA, 463 bp, Mus musculus
  source 1..463: mol_type = other DNA
tccctaaggagggaacagacatgttccatggataaaaagaatctgcagagacatctactagactagctatgttaagagattggaaactgtgattccagctttctaatgttataattaaccgcatccgaagcccttctcttgagattcaggcgggggaatagcttcaagaagtaattctaggaacttcacaggttacttccatcacgtatataaataatttcagtgagaaaaagccacatatgtagaagaccaagatgttggatacattttctactaaaagttacttttgagttagcaaagaaaagagaaagttttcttcttccttttgaatttgattgaaaatcaaggacttttactagttctgtctaagtccccgtgggtcacctggtgtcataacctgagcaatgcccctcctccgggggcgggggaggcacctggggatgcaccaatcacagcgcgccct

SEQ ID NO: 47531 - DNA, 367 bp, Mus musculus
  source 1..367: mol_type = other DNA
actcccacacaataaataagcatatgtgtgtgtatgtgtgattttaaaaatcttttatccataaatacatgtatgtgtgtgaatacctgttatctagctttggtcttcatgccatcctaggaggaggatgggaggttatttccacataggattttaagagctagctggcaacagataattctcccgtgggattgtgtgtgtgtaaatgttaaatatttagatctcaaatttgtgataagttttcacaattaacaatatccatagcgattttggttcagtatacagatttcaaattgcaatcacagcaatcctgactcagcagtggctccagtctgtgctgggctcactgtcccggaaagggatctag

SEQ ID NO: 47532 - DNA, 490 bp, Mus musculus
  source 1..490: mol_type = other DNA
agtctagaaggtcctcctgtactaagacaaactattttctagattagaattcccgtgcactgaaacttatatctgtattgctgccaaattttaaaaacagatctttcaaagactctctttaaaaatatagcccaaggtctccctttatagaaggggatgtaaagcattttaaagtcagtgtctttaaatcagatatttaactggaaatcccagtcctagtccaaatcagaagtcactaaggacttgtgttacttcccttgcgaagaaacagaataattgtgaaaatttaggcggaaatcgtttcatttttgtccctaaattaagggaaggattctctatctaccccggacttcctttgctgaagcctgaaactcgagagatttggtgcaagatattttaatattttctccggcgcagcgcggctgctcagagcttgccaggcaggccgctggagcaccaatcagcgcgcgcctgcgctctatatatacag

SEQ ID NO: 47533 - DNA, 592 bp, Mus musculus
  source 1..592: mol_type = other DNA
tgtaattttgtgttacaaggtacaaagcgtaataacttgtaactactttggagttgaagtaaaatcatgatccaacaattacttcgtagaaaactgggcttttaaatatgaacactcactactcaaagaagtatttgtgtatttagtagaatttcttgacgcagcagcacggcctggatgttgggcaggacgccgccctgcgcgatggtcacgcggcccagcagcttgttgagctcctcgtcgttgcggatggccagctgcaggtggcgcgggatgatgcgcgtcttcttgttgtcgcgggccgcgttgcccgccagctccatgatctcggccgccaggtacaccggagcgccggcgcccacggctcacgccggcccgggaggagccggtcttggctttggcgggagccttgtcgcactgcttgcagtgtccagacattactgttaacataccacatagattgtgtagtgtcactctcttgcccaattgtagatgggattttgatcttatttgcataaagcctttgaggccattaccaatcaaaagtaaaagcacttgctccttcatttgaatttcaggagtataaataaaa

SEQ ID NO: 47534 - DNA, 581 bp, Mus musculus
  source 1..581: mol_type = other DNA
aatgtctggacactgcaagcagtgcgacaaggctcccgccaaagccaagaccggctcctcccgggccggcgtgagccgtgggcgccggcgctccggtgtacctggcggccgagatcatggagctggcgggcaacgcggcccgcgacaacaagaagacgcgcatcatcccgcgccacctgcagctggccatccgcaacgacgaggagctcaacaagctgctgggccgcgtgaccatcgcgcagggcggcgtcctgcccaacatccaggccgtgctgctgcgtcaagaaattctactaaatacacaaatacttctttgagtagtgagtgttcatatttaaaagcccagttttctacgaagtaattgttggatcatgattttacttcaactccaaagtagttacaagttattacgctttgtaccttgtaacacaaaattacaacaagattgtgattccatctggagataaaaactccattaaaataccaattttaattttttcttttttttgtaagaacaaaacgtaactagagtgtagcgcgcgactttcaaaaagttgcaaggccaatcaaaatgtttaggg

SEQ ID NO: 47535 - DNA, 561 bp, Mus musculus
  source 1..561: mol_type = other DNA
ttttccaggtagtttaaggataattcaaccacgataaagaataatttggcatgcttatactgtctttgatattggatgaccattcagaaacagtttgtagctgattgaaatgatttattccttgtattgaggatcacatgctagaggagtgttgttgtttgtttgtaacaagcagtttaaaagaagctacattagctagggaatcttgaactctggttcataaacagttgggtaatattctataagattctacgtcaagatcaagaagtagttaaacctgaaacctactctatatttcagagtttctaaaactgaaaacaacaagaaaatcagtcagttacttatttccatttaagtaaaaactggaaaagaaagtaaaaaaaagttcttaactattaatcatgaaaaccagagtttaaatcccagaatctacgtggtttttattttttaaagaacgatatgaaaaagggcaggcctttatgcaaatgaggagctcaaattctggctttctattgggtactattaaccaaaacagaatacctccagttagtataaatgctt

SEQ ID NO: 47536 - DNA, 544 bp, Mus musculus
  source 1..544: mol_type = other DNA
gcgcatcatcccgcgccacctgcagctggccatccgcaacgacgaggagctcaacaagctgctgggccgcgtgaccatcgcgcagggcggcgtcctgcccaacatccaggccgtgctgctgcgaactacagtttttatactacatatgaaaaagttacgaagtagctttcaatcttagtaaattgattttaatactgttagtaccttccttagtttgagtcaaaagtgtgtaagagatgaaacctttagaacatactatataaatttttagtagaaatttgtctagagcataatggtagtaagggctaagggccattaaatctttgcaaatatttgattttagaattgataaactacatttatttaaactaggtcttgcaaagcgttcacttgtttgattacctgaattgagttttcaaagcttgagacaatttgatgtatgtatgtaagtaaaattatgtaaaactttcttatgtaaaatttctgttcacaggagttatatacactacagtgtaaaattaaaaagctttttaaccaggattta

SEQ ID NO: 47537 - DNA, 486 bp, Mus musculus
  source 1..486: mol_type = other DNA
tttgtctacagattcattttatggaggaattttttcaaatgaggttcctcctgttctctagtttgtgtcaagttggaataaaactatccagcacaaatagtaacaggtaaaaatatttatgtagtacttctttgaaacaatctcttctaatgtagtacagttccagcatcatgcaatggattatatgactaggcaaaggggcctatgacaagtagaattttaataaattctacttataccgattctatttcaatttctattaaaaaaattctcttgtaatttatttttaaaagtatctttcacatttgaatttttaggttttaagaaacaataatcacatggtcttttggcacctgttgaattttttaaaaagatgttttaaacctaaatactttacaggggtatttgttttaatccttgctaaaatccttatagaacaatataacatataataaaagcagtactgagcaaaagaagcctttggtc

SEQ ID NO: 47538 - DNA, 421 bp, Mus musculus
  source 1..421: mol_type = other DNA
ctgtaaattagtcaattaaaacccagaaagccagcttgtgggccttctcgcaatgtatcgttacctgggaaagtcttgcccatttttttttttaaagaatttaaaagtgcaatcctaacatggtatgacgatttctatagtttatagttaaaaaattgttttcgaacgtatcagtgatatctggccaaaaatgcgtgaaagtattttgaaaattcaagctccaaatgcaaggtcagactttccacgcaaatgaagagttctaaatctgctgttttagtggctacttcaatgtagaagtcacattgttacatttcaataatgaagataacaagattgttctctattcttcaaagataacagtcactggaattttattccatttactttaaaaatcactatcctttgcatactataaatagta

SEQ ID NO: 47539 - DNA, 437 bp, Mus musculus
  source 1..437: mol_type = other DNA
tccgcaagctgccgttccagcgcctggtgcgcgagatcgcgcaggacttcaagaccgacctgcgcttccagagctcggccgtcatggctctgcaggaggcctgtgaggcctaccttgtgggtctgtttgaggacaccaactccaactggcccgccgcatccgcggggagagggcgtaattgtacagttccgtacagttctacggaattaacaatggctgtaatttactccatccttaaacgaacctatatattccctagtgtctatagttgagtttataacagcccaaagttgatatcaagtacaaaataggtttacccgtaaagtgtacaggtcggatctctgacgtgacggcggggctgatgggcgagatatgtgacatcactttcccgccgggcatggctgagaggagggatcagtgatgtcgctcccgccggc

SEQ ID NO: 47540 - DNA, 415 bp, Mus musculus
  source 1..415: mol_type = other DNA
aatgtaacaatgtgacttctacattgatagccactaaaacagcagatttagaactcttcatttgcgtggaaagtctgaccttgcatttggagcttgaattttcaaaatactttcacgcatttttggccagatatcactgatacgttcgaaaacaattttttaactataaactatagaaatcgtcataccatgttaggattgcacttttaaattctttaaaaaaaaaaatgggcaagactttcccaggtaacgatacattgcgagaaggcccacaagctggctttctgggttttaattgactaatttacagctaccactttctgatgataaaacaggagactgtggttgaaattccacctcaagcagccagccggagaagttttgaggccgcctccacagcactgctctataaata

SEQ ID NO: 47541 - DNA, 336 bp, Mus musculus
  source 1..336: mol_type = other DNA
tcctgaccttctcaagagaggagtcacaggtacctgtaactccagttccagggtttgggtaaataaaaataagaaaactaatatagtttggattttttaaataataataataaaaagaaaatgaaggtcttcaccttgttttaagaaattctcagtcacagttcacatctgttcactgtggacaccagaggacggaaggcagtctagctgattgactggatccctctgcaggaccatctcgttcaggcatatagagtgctttgtctgcagctttcagcgaagtggcttgttgactgaagcagaaaaacactctgagaacttgaaagtgaagttaaa

SEQ ID NO: 47542 - DNA, 433 bp, Mus musculus
  source 1..433: mol_type = other DNA
cacattcttgatcataaggctcaggattaagcacaggtagtggacatctactgcaaaaccttctttgccagacaagacagcgctgttgtacacgtgagctcacagcagctgtggctgtcgggagctcatggtctcacccatggccgaggagctattggcaaattcagattctaagatgctattctgatcacaatgcatcatgtgcatgtataaaagttttaagcggttacttaagtgagttagaaaacttgccattgtacatggtaacatgtgcaaattgagaattgttttatgtagtttatcaacaaacatagccatttgatttggttaacaacgttactaaataagattatgggtaaagtacaaaatgtgtttaatttgtaacttatcccatttcaaaccggaaaaaggaaatgtctttactaataactgc

SEQ ID NO: 47543 - DNA, 433 bp, Mus musculus
  source 1..433: mol_type = other DNA
ttgccagacaagacagcgctgttgtacacgtgagctcacagcagctgtggctgtcgggagctcatggtctcacccatggccgaggagctattggcaaattcagattctaagatgctattctgatcacaatgcatcatgtgcatgtataaaagttttaagcggttacttaagtgagttagaaaacttgccattgtacatggtaacatgtgcaaattgagaattgttttatgtagtttatcaacaaacatagccatttgatttggttaacaacgttactaaataagattatgggtaaagtacaaaatgtgtttaatttgtaacttatcccatttcaaaccggaaaaaggaaatgtctttactaataactgccagctcacagctgaaagcagggggtgcttcagcctgtcattaatgattaataattggagtcatg

SEQ ID NO: 47544 - DNA, 280 bp, Mus musculus
  source 1..280: mol_type = other DNA
ctctgacctcaacatttatttaggggggcataataaaattaaaatgcttaaaggatattttagaagttcctaactgatcagtagattacaattcaattcaaaagagttcaaagttcaaagaggtatagtgtttcagtgacaatccatggaattccaaaggcctcctcaactgagacatcctaggaacactttctagactccagcttctcctcagaagatgcaaggctggggcaagtgtaaagttaaacattaagcattacccttggcatgaatttggtat

SEQ ID NO: 47545 - DNA, 277 bp, Mus musculus
  source 1..277: mol_type = other DNA
gtctgtgcactttgtgcacatgtagtatgtatatgtagcatgtgcatgtgtggcatgtgtgtcatatatttgtgtgtatagtatgcatatactgagtttatgcatagtatttatgtgtgatatgtatgtataagataaagtacatattgtatttgtttggatagcatatatgtacactgtattgcatgtatagtatatatgtggttttagtattcatgtattgtacaaatatcatatgtgttatttccatttgtatatgtatatgcatatatatata

SEQ ID NO: 47546 - DNA, 364 bp, Mus musculus
  source 1..364: mol_type = other DNA
aagggtgacagttgcaaccgtggatcatggaagagttccagagacctaccaaatcatcgtaggtcccaagattgggagagctgcaggcaccactgcactagattaatcctagagcagtaagcctctggcctgagaatgtaggcctatagctgctctctgtgtaaaattagttctattaaacatggaccctatctatgaagattattgtactcctgagatcatagatgatgaaaccattaatgactcaatttgtgataaataatcacatataatgtaaaagttgacttcacatgaacatcaattaaataataaaacaaagttaaaaattaaatggttgagccaataaaagcctccatttggtcta

SEQ ID NO: 47547 - DNA, 402 bp, Mus musculus
  source 1..402: mol_type = other DNA
ctgatacaagttttttaaggcacttttgagaaattgcagaactggatcatcctgtgctaactttcagctaagaaggagctgaattagtggcttacttttgagtaatacttatactgtcagtattaatcaagtctgaaattgaccgctgtcatgcactgaaaatgaaggtggctctgaaaagagcctttttgttttaaagcagcacggcctggatgttgggcaggacgccaccctgcgcgatggtcacgcggccaagcaacttgttgagctcctcgtcgttgcggatggccagctgcaggtggtgcgttgcccgccagctccaggacctcactggtgcaccagcccccttcaaatcttgctgattgatgatggattaaccaattagaaatcacagcttgaatt

SEQ ID NO: 47548 - DNA, 406 bp, Mus musculus
  source 1..406: mol_type = other DNA
cagaagtcaactggtcaacagttttcagttttaatcattagaaaacgtgctcaaaaaaaaaacttaaagtgtctctaaggagtcagttacaaacatctgaaaactcttccgctgccctgcaactcactgtgtatcacagcccagactctgtagttcaggagctacaggtgtgtgccacccatgcctggctccctcacagtgactgcagtagcaggtccctacagtacactacagttcagtgatgttggctccagaggccggtgccagcactgacacttttagtttgaaaggtgagtcaacctgaagtgttttcgtgagagagacagttcccagtttctcaggagccccgctgagatctgccgggcgtgcggggcggggcaggaggacgcctgcgggttgcctcctg

SEQ ID NO: 47549 - DNA, 308 bp, Mus musculus
  source 1..308: mol_type = other DNA
tataatatcttctgatgaaatgttctaaaataagctccttgggggtagtgttactttgtttttggtaagatagaataccatgcacccacaatcatgcctcagtacataatggtgtctgagagggttaattatgcttaggaaatattcatcggctgaacattattcatcttttatttttcacgtatagaaaaataatgggacacttctgtgacctgtggcttgccatagaagcaacagatattttcattctggaagtctatttaatgtcagaaaatgagtcctattctcagttctctgtggagagtgga

SEQ ID NO: 47550 - DNA, 258 bp, Mus musculus
  source 1..258: mol_type = other DNA
caggccctaagtacagactggaccaggtgtggctcttaaaagaggccttggtgccctccgacaccgcgtgcttggccagctccccgggcagcagcaggcgcacggccgtctggatctcccgggacgtatgcgccaggcgggacgcctcgctcgcgatgcgctcgaagatgtctgtcacaaaggagttcatgatgctcatagatgtaaatggagaattcaagctgtgatttctaattggttaatccatcatcaatcagc

SEQ ID NO: 47551 - DNA, 546 bp, Mus musculus
  source 1..546: mol_type = other DNA
tcagatttagcagcaggaatattccagcttaaggagactgggtcgccattaaaaggcattttccaaaggggccccttgattgcatgtagctcttaatcaacatagcactagcttccgcgctgggggctctgcagctctgagcctcagggtcccagcccgggccctccacgctggcagccagcagatggctccgaagcgaggctgcgaggaggggcgccgagcccggcgccgccgcagcagtcaaggcagcagccaccgcagccaagcaccgcgtcggtccccgggctgtgccccgcgccgggcaccgtgcgcccaggcccggaggccggccggggacccgtgcggaggccgctctcgcgagggaaggaggagagcagagccggcccgcccctgcccagcccagcccgcaggaggccgagaccagccaggctcgccttccgcttcacctacgcccaaggtgcggcgcagaggccgggctgcgcggcgcccgcccgggaagaagccggtgttgcagccgccttgcgttcggcccctgaagcagcgagc

SEQ ID NO: 47552 - DNA, 255 bp, Mus musculus
  source 1..255: mol_type = other DNA
atgtcttcatggctagcagagagaaatacagaagctgtgaagttctctctctctctctctcccactcagagtctctccttgaatgttaggctgggagccagcacatgtgaagaaatcctccaagacaacttctgagtgggtagacattgtgttgttactttaaagctcaaagtcttgaataaaattagaaaacttatattcctcatttaaataacccaggaaatatatacttaatgtcttggggaaatttattcc

SEQ ID NO: 47553 - DNA, 308 bp, Mus musculus
  source 1..308: mol_type = other DNA
cttattatatctagatataaatccaacaccttcataaaaaggccagcaggaggtggttagctctggccgggagccgttcaaaatctgaaagggcagatctaccagctctgtgttgccaaaatcctttgatggtgaagaggagctggactaatccctccaatgacatggagtcattgacatggagtcagaggcccctttctgtcctggacatatataaagttcttcaccgacatggtggatatgaatgccaatgagttatcagccagctggcaccaccgggtcccaagtgacttttttttttaacttag

SEQ ID NO: 47554 - DNA, 199 bp, Mus musculus
  source 1..199: mol_type = other DNA
gtttaagtaaatacgaaatccttttactgatttcttgtagtgtaaagagttatgcagtgcacaagcttgtttccgggatagggtcccacggggcccatttggactggtccaatccacaggccatgttctcagtttatttgtctagtactgaaaccaccagctatcaagccatgctattggtttgattgcactatagtag

SEQ ID NO: 47555 - DNA, 226 bp, Mus musculus
  source 1..226: mol_type = other DNA
cttatctaaaagacttttttgttacagtctgcaaacagcgaagctttgatggaactccacccaagggaggattctaatcttggggagctgtggaaggttacaaggcctcctaggtgagggggcaggaggagcttcccagctcactggtgtgcttttattaagctctccaggagccacagatactgagatctactatagtgcaatcaaaccaatagcatggcttgat

SEQ ID NO: 47556 - DNA, 243 bp, Mus musculus
  source 1..243: mol_type = other DNA
aacaacaccatcacaaggtgggaggtgttgctatcattcctaggatggcctgaaataggatggaatcctcctgcaggtacctgaaggtagctcagttacctggcaacagtcaggtgtgcctgactcagggggaagggatgccttagcatgggcccgcagagccccccttatctttttataaaacacaacacctgagggttttaagcctggctataagcctcacttaggtgcgagacactcctc

SEQ ID NO: 47557 - DNA, 339 bp, Mus musculus
  source 1..339: mol_type = other DNA
acagtgaggcagctgtcatattgcacctgcagtcagggtggatcagggacacacacacagcagccgtgtgtgtcgtggtgaagttgacagtgaatgccaagatctgacctgggagcgctctctgcagcctggacagttgtacatcatctgtggtgaactactaaagtcagtcaccaggaattataaatgagttattccactatcattaaacaaatcttattcttattaacatggaagtacatttttgaaaacatgtcacgtcgggggctcccgtggagtcgagaacgctccattggatgattatgaaattggatttgattgatttaatcactgtaatca

SEQ ID NO: 47558 - DNA, 389 bp, Mus musculus
  source 1..389: mol_type = other DNA
tccctgccaggcctggtccctgtcctcaggttaggcgcaggagggagtcacttctaccatttagaagacaattctccttttaaatatgagctcaggttgctatggaaaaactccgaagcctttgccgcgtggctgccgccctggccccgccccaggctccttccaggggtggtctctgatttctgacagctgacaggaatcaacacaacaaaggtggtttcagctctgcgaaacaaacctccgtttcgaacccaggttcataaacaacaccatcacaaggtgggaggtgttgctatcattcctaggatggcctgaaataggatggaatcctcctgcaggtacctgaaggtagctcagttacctggcaacagtcaggtgtgcctgactca

SEQ ID NO: 47559 - DNA, 408 bp, Mus musculus
  source 1..408: mol_type = other DNA
cactggtggtcacgtgaaagctgggctttaactcctccctttaaagtcctaagtatcagaatgagtaaatgttatgcaatggacattgtcagacacagacctaatgctacagttgctttaagtgttactctaaagttgccctcagcaggctttggtgtagcacaaggcttgctttactttcaaataaactgtcattgaagcaaaagcaattctctttcaacactacccattgtgttgatcttatcaaactaaacaagtctttcttctcagtggtgagaattacctcacctgacactgcaaaaagtttcagaaggcttttcatatgaatgaagctgctttcttcagggcagatgcggaagctgccctccccagggcttgggcaatccgctgtggggaaggaaatcgcct

SEQ ID NO: 47560 - DNA, 450 bp, Mus musculus
  source 1..450: mol_type = other DNA
ctttgattttacatattgtaaatacacaattgtatgagtaagggatggacgcagagtccactcttgggccctagttaccaatgctgacctgggatttactatatataacccaggctggaatgtttctgtctgtcagacccacctacatttatagttatgtataattcaaattcacaccaaaagagaggtttcaaagtcaaacaaaagtcttgcttctccctatctgtcgaaacaagccctgggtacttgtacccagaggccctctttttgagatccccaaaggctggctgcacaggcactcttgtctcagctgagatcaactcccctgcggcggagtccttctaagctgcgccacaagctagtgtcccagagcctgacgtgcaggcaggctgaagggaccatcaagcagctgtctccccccaccggtgacgcgccagcccccgcgtgcgc

SEQ ID NO: 47561 - DNA, 287 bp, Mus musculus
  source 1..287: mol_type = other DNA
tgtgagctcagctgatctatccactcagcggttaacagcactgaatggtggctcatcaccatctgtaatgagatctggtgccctcttctggtgtgtctgaagacagctacagtgtactcgtgtacataaaatgaataaataattctttgaaagaaagaaggatcttgctatatatggcccaagttaaagcccagatccttgtatatacaccttaggggatctatctcttgatggcttcagctctgtcacctacggggcctggaatgccaggctaggaaccaggcagt

SEQ ID NO: 47562 - DNA, 432 bp, Mus musculus
  source 1..432: mol_type = other DNA
gtatttgttacagcaacaagtaaggtgagctggctttaaacttatatttatatagccagccaggaagtcctttatagaggtttcctgtatatgcatattcatcttggtgtccatgaagggcatcagtggttgtaagccaccatgtgggtgcttggaaccaaacccaggtttgtgttaattgaggtctagttcaaatacagtaaaagtcatctgtcttaagtatagagttaaactgtcacagtgtgtgtgcgcatctaggtatgcatgcttgcatgtatgtatattaaaaactaaacacacaaaataccttggaaaaaatatatgtatattctcgtgtttggacacttccagagactgcacgcaccttggctgggtgcgcaggcgcacggaagccacgggcgcggtgggcggcggcgagaggcgattggctga

SEQ ID NO: 47563 - DNA, 589 bp, Mus musculus
  source 1..589: mol_type = other DNA
ttttgccacagatggtagcgtccggggcgcgcgcaggcgtagagcgctcggggcggtgccgcgagcagccgccccggacccgggaggttccagcggcagccgctgcttctgaagccactccggtgcggggggtgggggaaccgaggctgtggccccgcggacgctcgacctcctcgactgttgggcgaagcaggcctcgggagccgacgctcgaaccgagatgccgggctcactccgcggacaggccgtagcgcagggctccccgccgcgtccttccctccgtcgccgcccggggcgccgagcccgactatggggcccaggtgggggctgagtggcggcagcagcgcgcgtggcccggccacagagcgcagcgcagcgggcatggaggggctccgtcggcccgtcgtgttctcttgacatggctcccgcccgcgccacgagcagcgcccccgccgccgccgccgcctcctcctccgcagccgccgctccgcccgcaggctgcggctagacggcccaccgacggtcggcctgcgagtcccgctctcctctccgcggggaccccgccctgccgcctctagaacccgggaac

SEQ ID NO: 47564 - DNA, 611 bp, Mus musculus
  source 1..611: mol_type = other DNA
tggaagccagttctagtatgtgccttcaacgtgccagcactgaaagctgatctgagttcgaggccagcttggttcaaactggggcgccggccgcccttttccaggtcccggtcctcggacgcccaagcccagcaggcggtccctccccgccctcggcgagcagcccgcgacccccgtcgcttactaggcctcggacttgaaggacgtgggaggctggcgcggccacccttggtcgttctctggcgctcggctgctgcagggcgcgccccgcctcccgggggagagcggcggaagcgagagacgcgaactgacctgcgtctgccagtcgttctcccgcaggacgctggggaccatcgtggggtcgcatcccgcctcttcacccggtcctcctccgcctgtgctgcttcgggcgccgacgccgcccgccctgccggccctgcgggctccgccgcatcggaactgctgccagacgctgcttcccgcgcgactgatcgcgaacgccggaacctgcgcaggcgcgcagcgtgcaagcgcgtccgcgtcccgccctctctggtccccgtccgcggccagcgaggcgcagatggggagggcgcgtgcgcgctggggcg

SEQ ID NO: 47565 - DNA, 488 bp, Mus musculus
  source 1..488: mol_type = other DNA
ggcgggagacccttgccacgccttaggactttccatattgatattttgccacagatggtagcgtccggggcgcgcgcaggcgtagagcgctcggggcggtgccgcgagcagccgccccggacccgggaggttccagcggcagccgctgcttctgaagccactccggtgcggggggtgggggaaccgaggctgtggccccgcggacgctcgacctcctcgactgttgggcgaagcaggcctcgggagccgacgctcgaaccgagatgccgggctcactccgcggacaggccgtagcgcagggctccccgccgcgtccttccctccgtcgccgcccggggcgccgagcccgactatggggcccaggtgggggctgagtggcggcagcagcgcgcgtggcccggccacagagcgcagcgcagcgggcatggaggggctccgtcggcccgtcgtgttctcttgacatggctcccgcccgcgccacgagcagc

SEQ ID NO: 47566 - DNA, 387 bp, Mus musculus
  source 1..387: mol_type = other DNA
gagagcctcattaagtagcctgggctggcctggtaactgttgtttgaaagagtgttataatcgtgaagctcttgcttcagcctcatgagtcctaggcaggagacatttagtaacatttgtaacctgtctgatgtttctccacaaagatgacagtttaagccaccgtggatgtataaagaatacttcttgtccttattacaaaactaaaaatacaaggaacaggcccagtttaccatccttgatttgaaagcagcacttgaaaccaagcagtctgagccaagcagtctcaacagttcaggaagcaacggaggcccctctgcttagcggggcagtgcgggctgcggcgcaggccatccctaggggcgtgtgtgcgcgtgcgtatgcgtc

SEQ ID NO: 47567 - DNA, 392 bp, Mus musculus
  source 1..392: mol_type = other DNA
ttattaaggattgcttcctatagaacacaatgtctataaagtctggaaaacagtagtctactctgtagactcccaggccagcctggactacaataaggcaggttttttctccacacactccaacagtttgctggttaaaaaaaaaacaaaaaaccaaacatgcttatttacgtttcgtcgtggacgcaaagcaagagtctgggctctgcgagaatgaactcttcgcgtcgtgctcgggagaaaggatcgcgcgccccggtcgccctggtcctagatgatcacggctttagcgccccagcgcgcacgcgccctccccatctgcgcctcgctggccgcggacggggaccagagagggcgggacgcggacgcgcttgcacgctgcgcgcctgcgc

SEQ ID NO: 47568 - DNA, 242 bp, Mus musculus
  source 1..242: mol_type = other DNA
tttgagacactgttacaactaggaatttacctacgtgtgtgagaacctaaattcagttcatagcactgcaggaaaagtaattttttaaaaagtatattggggtataattcacttagaataaactacacatactaagtataatgtgatgaatatgtgaattgatgctggatgtattcattcccgttctgagacccagagtgctactcctcaggtctgtgaattaaaaggaaggaagtgacctc

SEQ ID NO: 47569 - DNA, 306 bp, Mus musculus
  source 1..306: mol_type = other DNA
atgttttctcaataacaacaacatttgttctgaacacaaacctgctgtttcttttattcaaattaaaacttagggtttctttcttttttaaaatagggttctgttagttgcttgatgtacagcagctacgtcacgaagcaaagggcagtggcttgggagcacctcagtactcaggagcgctgtgctccgaattcacctcactgaacagtgatccgtcctcagcagttcaagctctgtctcctcacagctcagagagagggcgctctcggtgtctccgccaccccgcgcgtccccgccaccccgcgc

SEQ ID NO: 47570 - DNA, 182 bp, Mus musculus
  source 1..182: mol_type = other DNA
tactgggggatccgccactgactgtgggttggttctgtatagagagctaaaattctagatttatacgtcaattttctcacttaacaaaaagatgtaagtttataaacaccctgtaaccgacggctgcctggcagacagccggctcaaatagcgcctccaccttgcaggtgcagtcacaggac

SEQ ID NO: 47571 - DNA, 179 bp, Mus musculus
  source 1..179: mol_type = other DNA
taaccgacggctgcctggcagacagccggctcaaatagcgcctccaccttgcaggtgcagtcacaggactgttgccaaacgttctcggtgatttcgctttgatgtttgctgttctggaaaaactaaacagtgggcgacttcattggaaaacagtgttattttgaaacgaggcttggttt

SEQ ID NO: 47572 - DNA, 482 bp, Mus musculus
  source 1..482: mol_type = other DNA
tgaacagctgccagcacttgcccaatgaagtgttttttaaataattatttttcttgaatgactatttcctggcacatgtttttcaaagatttagcacatcaaagttctaatgaagtgaaacctctattcgtcctactagcaatgcttaaagtacttctagcttcatatatcagtgaagaaagttctgaaactcaagtctgtctttagtattgtgatgtaaacaacaagtctattgacaaatatttatctaggggcttttccttgttctacagcaaaagcttaacgcactgtcccttcaaagtgagttttaaacacagtagccttaaataaaacttatttgatttactaatagactgtatatttgtgcatacatagatacatagggagctgagcctggctctgttacggacgcagaccgggtcggcacacgccggagcatgcgtggacggcagcgcgcaggcgcgggacggctcgcgcaggcg

SEQ ID NO: 47573 - DNA, 505 bp, Mus musculus
  source 1..505: mol_type = other DNA
cagaaaatactgtagggtctcacctacctagctgtgtgtgggtgtccaagctccaccctagcacagcgctgggtatgggcgcgctccaggcctagttcacaggctagctctgggcgcgagtccccgcgggcctaggcaggccctctgggcgggagcaccggtgctagagacgcgcggccgcttagggttcacagcggtgcggggcccagagtctgcaacccgccccgcccgtgtcggtaggtaccaccgcgaagggcccacccgaggctcgccactgggcggcgctggccagaatggagcgccaaactgcagattatttagtttattgatattcatttagtttggctatacttgaggctagcctagaacttgctaggtagtccagggtgtccttgaactaatcctccaatcccaattctagaattgccctaattctaggatgatagacgtcaatgcattttaaagtatttcgttttccttaaatgaaagtcctgcacttgagacc

SEQ ID NO: 47574 - DNA, 547 bp, Mus musculus
  source 1..547: mol_type = other DNA
ctagctctgggcgcgagtccccgcgggcctaggcaggccctctgggcgggagcaccggtgctagagacgcgcggccgcttagggttcacagcggtgcggggcccagagtctgcaacccgccccgcccgtgtcggtaggtaccaccgcgaagggcccacccgaggctcgccactgggcggcgctggccagaatggagcgccaaactgcagattatttagtttattgatattcatttagtttggctatacttgaggctagcctagaacttgctaggtagtccagggtgtccttgaactaatcctccaatcccaattctagaattgccctaattctaggatgatagacgtcaatgcattttaaagtatttcgttttccttaaatgaaagtcctgcacttgagaccgggtgcatgtgtgcgcgcttgagtgcgcgcgcggccgccgctgtccctcctgtcccggctcgcgcaggggtttaaagcccgagcggcgtgggttcccagactgcacacctggatgcttcgggagcgctgattggcctgctagggc

SEQ ID NO: 47575 - DNA, 420 bp, Mus musculus
  source 1..420: mol_type = other DNA
aaacggacattgagtttgcctgcctttaattattaagacagggtctctctgtgtactggaactcactctgtagaccaggctggtttcaagctgggattaatggtgagcactaccatcccttgctctgcttactttttgaaaatctattttaaaaaacgacaaaacaaaaacaaaagctggatttggtggtgcagcttgtacttggcaggtcgcctgggcttcagtgggtttaaaaccagcctgtctcagctcatggcccagagttcaatccctaacggtgccagggtgggaaggggcggtgctccaggtcggcccttcccacaggccgcccgcctgcgctgcgcggactgggcctttactcgcggccgcgcgcgcctgggctgcgcgggcacgtgggccgctggctgtcaatcacgtgca

SEQ ID NO: 47576 - DNA, 306 bp, Mus musculus
  source 1..306: mol_type = other DNA
ctcctcatctgagaaatttatatgcagagaggcctcgagcctggtttccgatgtctggcccgccacagggctagggccactcatagaggctgactcaagaagtttgactgtcacgggctgtgagtcacaaggctctgctcctagggagctggctgcaccaaggccgagactagtctcttgggcattgcagggcccatgggccggctgtgacccaggttaccacagggatgaaagtccttggctttcttgggttggccggctgggaacacagggaggcctcccagtgcttccttgctccagcagtcc

SEQ ID NO: 47577 - DNA, 475 bp, Mus musculus
  source 1..475: mol_type = other DNA
cagctagatgcttggctgaagggtctagactcaagcgtttttaaaagtttaggagggtatatacaataaaggattatcaagagcgatttaagtaatcaacaatgtgtctctccagaaaactactgagaacatagaccacattcccaatattctcataacatagccattatgttgtgctatacacagtttatcaccataaaattagtatgtttagagtttctgtagacactctgaccagacgtttgagccttcaattaagttcaaatgatgggctcatagtaaatcataaatctaaaatgtaactccagattattacacatttcagagaaatatgtttcttcaatcacaggttttcgaagctcatctttatggcacaggtgtcttcaagatggggctccatcagccattggctctcagagataatgccctctttgcagtgcaacattctcaagaaggaagcgttgccagcatcctc

SEQ ID NO: 47578 - DNA, 483 bp, Mus musculus
  source 1..483: mol_type = other DNA
ggtagattatgagattataacaatttatctgtctatatcctcccagtgagtggagataagtagatagaataataattggttacactatgtacttacatttatgtgtacatgtgtggtgcattaatacactttgccctaaaagtgaatgtgctccttcaccaaactgtttgtttatatatgaaaatgcaacattacacactaacagagtgtgagaactcttatattttcaagtttaagatgccttgatatttagtatatacattttgaagatcttaactcacccaataatcttgaatgaaaaattcataagtagccatgtttaaagctatgtgctaaggaaggaattaccatctataagttttatagattctctagcttaattaatcaaaatgtcttcctgaatatgaataagaaataaaataccatttgatgtttaaaattatattatatatattcatgaagatgtcaaaggtttataaagcc

SEQ ID NO: 47579 - DNA, 316 bp, Mus musculus
  source 1..316: mol_type = other DNA
tcattaaactctaaaaagtctttaattttttttttttttattgcatttctattatttatgttgttaatcaaaatcagtcttagtctgtaccttataagattcatgggtttattataatatctcatttattgagagaaacattttacagtgtttctgtcaaatgttcatataattattgacagcattgattataactaaaaacaaggaaaagtcttttctcctgctggcaatcgatcagtccagatgatattcaaaataatcctcaaggaagaatgttgcttatcaatagacattctgcccgagctcttgggttcag

SEQ ID NO: 47580 - DNA, 442 bp, Mus musculus
  source 1..442: mol_type = other DNA
gactatagctatttcattaaactctaaaaagtctttaattttttttttatttcatccttgaccaagtaatcattgattaaagtattgttttctactatttatgttgttaatcaaaatcagtcttagtctgtagcctgatacgactcatttattgagagaaacattttacagtgtttcaggttaatgaaagattgagtttagtaaaacagtctagataaattgtctgttagagctatagagaggacaaatgtttatataattattatataattattgatagcattgattataaccaaaaacataggaggagaattcttttctcctgctggccagaaaatgagtaattgatcagtccagatgatctttctcaataatcctcaaggaagaatgttgcttatcaatagacattgactcaatctggccccgagctctgcttgggttt

SEQ ID NO: 47581 - DNA, 670 bp, Mus musculus
  source 1..670: mol_type = other DNA
tcccctccccaccatgggtttggggaaagaaatgtttatgctatgggttgcatgcacatcagaactttataatttaggccttaatacagaagaggctgcatattgggttcaaaatgaaaacttcaggtttctgttagttagatctggttgtgtctcagtgatcaacaactacattattcacggtaaaaccataaagagtctttcaaggtatataaatccaaacatagttgtaataaagagtgctcccattttattaaaaggcaaattccttatgctataacacattgcaaaatcatgtttcatgagtaaagaggtgatcatttcatatgttaaacggatattatatgtatgaaataataccttttaaatatctgtgtttagacacatagattactgaaactatgaccaacattgttgagaagaatctttaaagtgttttctggttgctgccagagattcacatattgtaacatttgtgagagcttaaaactcagaaagaaggcagtgtgcttgttaagtacagaaatggctatgagtcattatggaacagggaattctttgatttgcaaaattacttgatagtagtactacagtacaagcaaagagttaatattccctgaaggaagagactctgtgtgctacagacattgcttctctgtatatatagtag

SEQ ID NO: 47582 - DNA, 361 bp, Mus musculus
  source 1..361: mol_type = other DNA
atggcttatttagttagaaaaccttcaagaaaaataagctaaatagaatttagtggattagtagaagatagctaagttatgcctgcaagaaacagtgttctgtatatgcttctgaggtcaaaggcaccatcgaatattatattgctattgaggtaaatttctttttcacaaaatatatactgtttaataatatttgctgattacagacagaaattcatcttttaattaaatgccaaaaataatggaattgatctagagaaaaggtttaaagaaacatattttcttacttacctggtctgcgtcactatggaaccaaaagagtaaggaatatttttatacttcctacagggatataatctaa

SEQ ID NO: 47583 - DNA, 487 bp, Mus musculus
  source 1..487: mol_type = other DNA
agaaataagattactgtgcaaacttaccaagtctaacattcacaatgcatggtatttatactcttgtaactaagcttaagaaactatgtgccctgagttcatgatatgaaaaatatttagtcttatagtgatctagaattacatccatgatgtcaataagtaccataaaagctgttattcatataataatgttatcagctaatagtggaataacagttatagttgaaatgaaacagcactttgatgtgatttaaggtcaaccagacaagagaaaacttgtgatttaccttcctcaaacaataatactataatcagagttttggtaaatagacatgacatgcctgtcaatgatttttttcattctatagattactaaagcagtcatcaactttggggcaacactttaaaatgttgatggttacaattttgcaaaagaatcatatgtatttatgatatttgaaaactatattataaataatttgaatga

SEQ ID NO: 47584 - DNA, 525 bp, Mus musculus
  source 1..525: mol_type = other DNA
aagaagtttctctgtgaagtatacttgatatagttcaaaaggtcttccaaatatctaaattaagcatgtagatttgtactgcctagttttgtgtcaacttgacacagctggagttatcacatgaggaaatgcctccataaaggcattttctcaattagtgatcaagggggaaaggcgccagcaagccagtaaagtagctgaataaaccctttcttcaccctgtctaagacaagattattttaagtgtcagcttagttcttagagaaacactcttcaaagtaatcagtgattactagcagagattcatgataatactacagataatttactaatgctatgtcatggtggtcaaatattcagtaaagaatccatctctgtctataaatattagaaaaaagaggggaagtaattatgaacaatactttcttcctgatttgatatcaaaataattcgaagtatgttgtaattaaattgttaatgttccctgaaaatagacagatggttcatgaatgaggagtactctat

SEQ ID NO: 47585 - DNA, 490 bp, Mus musculus
  source 1..490: mol_type = other DNA
aagttttcggtagtgagaacttactaaatcaaatttatagcaagagacatatttaggcaacatataagtatagaatcccctaatttcttgcaaaaccttaaagacaaaagcttctgaactataggctgcaacaatgatttactgtgattacaggcaacactaaagaatcattcacctttccttgatacatggatgtaatatacctaacaaactgattttgaatgatttctctctaggcctatttagaatgattgctgctgtgacatgatgtcctaatattagatgtcatgttcttctgaggcagaaaacatttaaaacagtttacacttacactgatagggtcattatccctgcaaggagtatggctctatacatctagaagtaagttcataccgtataaactgcagtatatatagttataccctgtaaatggcagtgacactgttaacagaacctatttgtatgaagcaattcagttttataccttact

SEQ ID NO: 47586 - DNA, 551 bp, Mus musculus
  source 1..551: mol_type = other DNA
gagaacaaactggtctatacttagaactgattttggtgtgtgacagaactgaatggtaagaacttacagtcaatactatatttcagtgctgcatagcttttatcatgccacatgagacttgccaaatccaaagataatggatcccagtaagatataaccattgggtcagtagtagtacatttcctgatattatccaggttaaaaatctgtatctgtaattgtatgagaatagaatggattctgtagttattcagctcaataaaaatgatgtttttctaagtgtagcaagtaaaactctttacagtatttcatgaatgctggtaaagacttataaaggcaaaactgtttagagtaaacacttactgctatgctcttataattcagaaaggtgacatgggccatagttatatccatttgaatatcacaatcccatcaatatttttgaatgagagacaatttatcttgaaggaaacaagataactactgaagatgctctggtaataggctgcactctttgaccctaacagagaaggtcataggatcatcagttg

SEQ ID NO: 47587 - DNA, 380 bp, Mus musculus
  source 1..380: mol_type = other DNA
ttattacatgttgcagcatcttcaatactaaaccaccagactgatttatagagtggttgtataagcttgcaatcccaccagaaatggaggaatgttcctcttttaactggacatatatattggatattagccatctattaagtgaacttctaaatacctaatttaagcatgctagcttagttcatataggctaaatattcaatagtgaatctttctctgtccataaagattaggaaaaagatagtaatcatgaacaattattttctcatagtctgacatgaatatctttaatcaactgagaatggcatctaagatttcaaaaataatttcagacatatatgaatatgttgtattgaggttatctgctcgattatatagga

SEQ ID NO: 47588 - DNA, 590 bp, Mus musculus
  source 1..590: mol_type = other DNA
agtagatgtatttccttttgataaatattagacctaactgctttggattagaagatcactcatcactgtttctatagcacaagtgctaatattagtagtaagaatatgaaactatacttattaggacaaccatgatacaattgttaccattgcagttaacaaacttctgatatgattaacagtcaatacaagaaatcaacttacatttgttattttaaaagaattcccagtaatttttgagaggctattgttgttaaattatctaatttattttagaccaacttataaatacataatttaaagatacaggatattataatgtcagcttagttcatgattactggcaaggattcaaaacactatggataatttactaatgctgtggtatgtggccaaatattcaacaatgaatctttctctgtccataatgattggggaaaagaggaaaaagaagtaatcatgaacaattatttttttatggtctgacatcatcatcattaatcaggcagctgataatggaccatccagatgctcataagtatgatgtttcacgaaagagtgtttctggttatctaccagaatatatagga

SEQ ID NO: 47589 - DNA, 664 bp, Mus musculus
  source 1..664: mol_type = other DNA
tacttctcaagagatattgtacagccaggcttctgaaattccttcctttcaaatgaatattagacctaacagatttgccaaaatttttggcagcaagtactctatttcaacaatatgaggacattttgttggcattgagttatgctgagcagattccagagtctggaagccactttggaattggttttggagaagtttcaccaatgctaatactagacgcaaatgtataaactaatcattaggacaattgctgctggtaattaagggcaattgcaagaaaagaactctatttgttattttaaaagagtgtgcaataattcttgagagatgtgttacatatatctgacttatttcagactgacttctaaatacctaattaatttaagcacacagattataattattgtcagcatagttctagagaaacactctttagagtagtcagtgattactggcaaagatttctaataacactatggataattttctaatgctttgacatggtagtcaaatatccaatatcatgagtgccaatttcctcatggtctgatatgatcatctgtgattacacatataagtatgttgtaataaaatcaagaaagacatgtgtcaccaatgaatgtttttctacgtgacttggagatatctgctagaatatatagga

SEQ ID NO: 47590 - DNA, 528 bp, Mus musculus
  source 1..528: mol_type = other DNA
atatgatctctaaatgtcttattcatttggtaatgaataacatgaaaactgatgagttgacacagtggttaaataagtgataatatattacataattataagggaaaaggcattcccaacatgtattgagttatttaacacagtgtcagtgcctggagtaaacagaacctaagatctctaaagctcctaacaccattcaggctctttagatacatgtctgtagtaaactgaatggactcaaatgttaaagccatttcattctctactatgctgcctagtttcatggctccaaagaaactctccaatgctttgcattctaagatgagcaaaaattgtaccttataagtgttcagattaattgaatcacctgaacatggtaggaaaaaaaatcttatcttattatatagatcttaacatattactgcggtaatagtgatgatgacgttgatattatctgagacagtcattgagaaaatgtctaatgatttataacgtatttccttcctgttacagcagtaagtggcctga

SEQ ID NO: 47591 - DNA, 601 bp, Mus musculus
  source 1..601: mol_type = other DNA
ccccagcaggtggacatttgaaatgtaaacagataaaataaccttatttaaaaaaaaacaaaatgcaaaatctagaagagtttgcttttggagaattttcaatagtacatgcaagtattagcagtaagtatataaaattgcattcactagtgtaatctaacaaacttctgatatgattaaaactgataacaaggaattaataattacttggcattttaagtcaaaatcttttttgagaggttttaggttctagagaggagttaaagaagctctgtgaaatatatttaatatagttcaaaatgtcttccaaatatcaaaattaagcatgtagattattagaactgtcagtttagttcttagagaaatactcttcagagtactcagtgattactagcagagattcaggatatcactatggaaaatttactaattctatggcatggtgttcatatattcaaaaaataatccccatctgtttataaacatgaggcagatgataaaaaatctagaatttaaagaaggtgcaattatgaaaaaccatttttttctgggattttaaaagtagttttgacaagaatcacacgtataggtgtgttgtaat

SEQ ID NO: 47592 - DNA, 523 bp, Mus musculus
  source 1..523: mol_type = other DNA
ctgcttagaacaaatatatttaataatccaatcctgatacttatattcaatatatggtgatacaactgtctgaatagaattaattctatttagatttaagccaagctccatggacagaaattatgtttatatatgtaagcctagcttaaaaaaaatctgtgacttaggattttcttttctttgacagagtttctctgggattttctaatatacaagaagaccttgtatgttcttttgttaaatgaaggtcctttgcttacaaaacaacaaaatttacatcttatattactgaactattgtaccacatatgtagaaacaaacatgttcatgtgaccttgtgctcagaaaaggtgaaaaaaaatgaattcataccaacctttatcaaatagggatggataaagacttaatttggaccctagttatagtcttgaaacaagctaaaacggttatatcaatgtcttgaatcatcatggtcatgaggctcttagaactgactgaagtttaagagtcatatgattgtcag

SEQ ID NO: 47593 - DNA, 526 bp, Mus musculus
  source 1..526: mol_type = other DNA
aaatatcatactgacatctatcatgagacaactgtcataggtattctgattaggtttaagcccagttaaatgcaacctattggcataagatattttgagctgcaacatgagtatttggttaggtgaaagtaatttacctacaacctatatttacactttataatattgacttactgtgtctagtaaatacctttactgtgttcctaacacacacatacacacacatatacacacatgaatatatgttacattgttcatatatatatgtatatatatatatacatacatacatatatacatatatatatacatatatacacacacacacacgcacacacacacacacactatatatatatagtgtgtgtgtgtgtgtgcaatattcaatgacagaaatattcaagtatcccatattttgtaggtttcctatatttatggtattcacaaaaccctttatggagaagagaacttaacttgggccctaggtgtcatcatgatcttgaggctgttagcacttcctgaagat

SEQ ID NO: 47594 - DNA, 426 bp, Mus musculus
  source 1..426: mol_type = other DNA
agtggccacctgtataatcaacgtgttcgatttaaacagtacccaaataagagcctatggtatgagaagtgacatatttagaaagaaatcttgtttgatagaagatgacatagtgttaataggcggcacttcctaatttaggccaagttaaggtataggtgtcaccaaatacatctaagttagatttaagcaaagattcatggacagaacatgattgttatagtaaactttgtttgaggtctatcatatattataatcagaaattatttggtagtgtttgaaggcatgaatataactcccatgagtatctgctgagactcaaaaggtttaagctgctcatgctgtgttttaatgctcagaattaaagttatcttatccaagattcagtaaatatttcagagtcatgaaattctgacaaatattcaa

SEQ ID NO: 47595 - DNA, 633 bp, Mus musculus
  source 1..633: mol_type = other DNA
atgtaaaacaaagtattgttagataagcctatttaaatactagagatacagtaaaatattgtatgttttggttgcatgataagaataaattggacaaggtgaagcatgttttgacttgttcactgttaaaatgactgttatcgttgaaatcaaatatgttctattagctttaaaaccagttccatggacttaggtgcttttgaaaatgtttggttaagtaaatgtgatatctttattaaaatagccttcaagacatctgtatttgaatgttaagttgtcactcttatgtacctaatatgaaaaatcaagcaactcacaatgttccttgggtgttgtcaaagactcatgaacataaaactcaatatgggtgacttttactaaaaccaatgaaatatatatgaccttcatccaagtgtcattgaaaattttagaatatataaaaccctgaaggtaaaaaggtctatgacatagctttttacttaaagcaagtaatttctatcagtctttatgaggaagacaagttgttttagtcacagcatgaaatgaaccatgtacataagataaaccatgaacttagaactatattagtgttcatggtatctaggctacttagagggaaaaataatcgcgttt

SEQ ID NO: 47596 - DNA, 634 bp, Mus musculus
  source 1..634: mol_type = other DNA
tgatgtttgacatccatggttccaaaaaatgtcattgaaaaatctgaccagtcaaaattaatgactttgccaagtcaagcaaagatgtatagatctactaataatataacttttatagatgcagaaatatttccatgtacatgaccaatgtttatagtaaatgatattttttttcttgtaacaaatttgaattcctaccaaaaatcctttgctcttatgcatttgatatataaaagcaaatactatagagtgttccacggtgaaattgctcagaatatgtgactctttttacattattgctcttatgcatttgatatataaaggcaaatactatacagtgaaggtaaaattgctcagaatatgtgactcttcttaaccttgctccaaaaatattttgacaggttcaagattgagtagaaattttagaaatagtatctaaaaatataagaataaattcacatatgtcttcatagagcagaatactgttgtaatttacaatgtaatttgaattctaaacaattcttggaataagtaaagaatgcagttatacatagcttaatcatcattgcaattggctgggtgagagtcaaaggatttgcatattacttccttctgccccatatggccttgaggg

SEQ ID NO: 47597 - DNA, 634 bp, Mus musculus
  source 1..634: mol_type = other DNA
ttttaaaaaattatttattataacacattaatgagagatttgcttgctttcttgcaatgtttcagaaaatactgaatttaattcaacaggcatttacatctagtattgtacagatttggaaatatatctgcaagcaaagatttcagttaacaatatgaaagcagttgtctatcatggttagaagtattagcttaaacaacaaggttactgaaatatcccatggttcatatacttagctttatctaagctatagaatagtggggggccactgcacatctctgtaatatagaatactttcagtgaatcaaagagactatgtaaggagataccacattatctggttgcttaaggtaaagaatatcattaccattccaagccagatatataaactcaccttatattgataaaatttggatttgatttaaactcaggtctatagcggcctatggttgttacttataagaacctgaagaactatcagataaaccttaggtataataaattcatattagtattcttggatcaaaaatggctctggtgatttacaacataacttcgaccatagtcatggcataaaaatgaggtaaataatgcctatataccaaggttaatcattgttgtaatgaggatatta

SEQ ID NO: 47598 - DNA, 484 bp, Mus musculus
  source 1..484: mol_type = other DNA
tatgatccatcacatgcagaaataaaagtttagaggttaatgttgaacactgcagctactcagcctgaacataactcaaaatgtgacctttgactcaacagtaatgtagatgtaaagagtcaactactttctggatgtagttattcactaaacagatataatgcactcattaaattatgttattaatgaattttgcaaccaaatagttgcatagatattggcaaatactcttaaagattaaattattgaaatatggttcttgtctgatagtcaaatgtcaggaaactgataaagtacgtatatcataccactgaagttctggggatattacagaattgctgtaactatagaaaaatctaatatacatatattctccctgtgtttatctttaatataattgacaccgttacagttacaataccctgagggagtacagtcacaggactctcatttgggactctggaattctagatacccttcctcc

SEQ ID NO: 47599 - DNA, 452 bp, Mus musculus
  source 1..452: mol_type = other DNA
aagagtccatttatggatgtagataactctgctcttttcagagtatgtagaaattaggctgggcatgatctctagaatgttaacatagctaacttgataatgctaaatgtatcaacagatgatctggtcatctgcatgttaacacttatttcacaataacgtccattaagaagatttttagtagataggtagctattatcaaagtagcaaagataaaccttataatggattcaaatcaatttaagtgcagagaatgattgctactatgcttaaataaataagtgatagttactatgcatggatccctgagggtcatataataacttaaaaatatgcaacccattaatggctcaagtagttttgcaaagacttaaccctacatttctcccctcagacaactacagtaatgttgatggggcagttaacattccctgaggggtcatgaggccctc

SEQ ID NO: 47600 - DNA, 58 bp, Mus musculus
  source 1..58: mol_type = other DNA
gcttggagcgctctggagacacgctgatggggcctggaccattagttaagagtccgcc

SEQ ID NO: 47601 - DNA, 144 bp, Mus musculus
  source 1..144: mol_type = other DNA
tctaagaaagactgagagactccctgcttgggtaacctacaagggcaaggtgtaggtccctggaagagcttagaacttctttgaattcttccaggctgaggcatctgcagccggagctgcgcaccagtgagagggagaaacctg

SEQ ID NO: 47602 - DNA, 411 bp, Mus musculus
  source 1..411: mol_type = other DNA
tcccagagcctgacctgggcggagctgctcgtgggttgctccatagctcagatttataattgactttctgttaaacattgcagcaagttaaattaatgcagtaggattacagtcgttaaacaaatgttagcagttcctcaatgtcacattaattgagacgcacatggagtttcacagaagcaaacgtgatgcttcgtaacgatgaccattaaatgtattaggtacaatcatggaacagtcaagtcactttcgggaatggccgatggaaataattcgttcagtcttgagttaacactgcatcagctggacagatgtagcccgcagtcctgcagccccctgcaggaccccgttgatgtccagggtcatagtcagctgactgctgtgtcatactgcattcctgcagatgccagc

SEQ ID NO: 47603 - DNA, 395 bp, Mus musculus
  source 1..395: mol_type = other DNA
aaatcacacaaagtctcttattgaggtaattacacagaaaatcttgtttggcctacccaggatttataggggaagtgaaatcattaaataactagttaacctctgtttggcaaaaagagtaagtaattactttgttctgtacccagagttgttaaaataattgtgatgacaggtgtctaaccatccattgatttacttacatctcgaaaagagattttgcaccaaaggctgattctttattcctgggctgaaaagaactaataaaaatttttaagcagatcttcacacatgcgcgtgcgtgcgcgcgcgcgcgcgcgcacacacacacacacacaccagctgtacttctagcccttttaaaaagtttgctctgtacatcgggttccaagccaatg

SEQ ID NO: 47604 - DNA, 416 bp, Mus musculus
  source 1..416: mol_type = other DNA
cacactgtggttattgccaatttgggactgtcagagcatccgttcatggatggcaatcttgccaggcagagattgaatagctgaatctctaataaattttcaagataaagtaaaatgccaatttgaatctgaagagcttttaaaacttcatcaggaagcacaacaatagaatgccatcgaatgatctctaatttacctaatttgctaagactgactggcttgatctctctcaagacagaacaaaagtggtgtactgtgtgtgctcccttggttcacacagtctgttgtcctaaatgccttttgagggaaaatggcaagcagtgacttgttaatttatacacttcttaaattttaaaatatacaggcctgggtcgcgtcgtgctcgtgcatgagtgcgtgcaagtgtgtgtgtgtgt

SEQ ID NO: 47605 - DNA, 446 bp, Mus musculus
  source 1..446: mol_type = other DNA
tcaggcagactagaagccttgctcagtggatgcctcctcgagagcaggccgtggtgcaggcttccctgtctggcacaccaaggcaaacggagggaacactggactggggccctctggtcactcagacccctgttaggcctccctggaggtgggctcagccttcctgtttgatgaacaaactgtgttctaatcatggaaaaaagaaagaccctgcaggcatccagatgtttctatagtgaaaggagctatggctgatacagctgcaggaatctttataggaattcagaaatattgcttacaatgtaactaagtaaagcctccataaggaataagtttctaatgccttctgaactagacacactgccttgtctggatctctcacactgagctgagccatctgacctcagacctcctaacaacaaatacaagtggttgggttttttggt

SEQ ID NO: 47606 - DNA, 515 bp, Mus musculus
  source 1..515: mol_type = other DNA
tgaaaacataaagattttgttccatatttttcacatcattcctttctttttgctttttaaatataaagttatgcattactgacaaagaaagtataaaggtttcttcttatgtattcttatggaattattaaatgaaacctgacttgtctctgcagaagcagaaatataagcctactgcagtgggccacatattcgatagaacaactattattttagttattcttctctatagaagagaaggaaattattatagagagatgctgtctcaaaagagatagatagatagatagatagatagatatgtaatgaaaatgatttactccggaggtaattatccctttttgtgaataatgagtagtaataataaatggcaagatgtttatgttaatctcttaactgtgcaggacaagttataaggttataacttagcagaagttagttgataagctaacatttcacctttgtttgtagaagaatgtggtaataattatagataaaaacaaacgcaaattttg

SEQ ID NO: 47607 - DNA, 206 bp, Mus musculus
  source 1..206: mol_type = other DNA
agcacttcattaggtaatttagaattgagttcattttgttctcaaatagtctgtttttattttaaaataaatgcagcaaaactgataatcttttattttacaactctgaaattaatccatgccatttaaaatttttccaagatttcatcttcaacacttcaggctgggatgtgggattcaccttagggttggaacctgagcaaggc

SEQ ID NO: 47608 - DNA, 381 bp, Mus musculus
  source 1..381: mol_type = other DNA
ctcaggacctgagagcaatctctcttcatggtggccaagtacatacatacatgtggagttttatgtttgtaaaggggctacataataaatctttaaaatgtaagcactggcttccggagtagcagcaggagccgggcctgaaactggagcacaggacaccccagctgcctgggaggagggtgagacggcttcggaggaacccggatcgggcccgctgcgcgcccggggagggcggcgaactggggaacagactgggcgtctcccggtctcctgccccgggccgggctcccggggatccgcgcccatctctgcccggctcctcctccggggcgtccccggctgctggccaatgggcggcgggcggtgcggagcgggacagaa

SEQ ID NO: 47609 - DNA, 350 bp, Mus musculus
  source 1..350: mol_type = other DNA
gcaggcagcttaacccgcggatcagttcgccctgattaactcccctgggtgtttctggcttgtagtcagagttcactgaacaaagagttaatttttacttaaatcgaaatccagctgaaccacccaggatttttccacctgccagttacaggaaacaaagtccctgagggtgtcaccttacactgagtctgcgaggcagagtccctgcccaggtcatcagagccagccccgcgggtaggagctctgcttccagccagtcaggttgctctatgcaaatagagcccgggtcaccccggtaaccatggtgtatggcagccaatcagccagggcgacctcgctccagttcgcgg

SEQ ID NO: 47610 - DNA, 478 bp, Mus musculus
  source 1..478: mol_type = other DNA
tgttttttctttttaaaccctaaaagaataaacgaagtgtatggatgagaacttcattctttgaaagtgaatgccattgaaatcaaggtttgttctacttggaaaagtggagattttcaagtgttattagcacctcacagagactttgttagtggtgtttagaaagttggcagttttctcactatgtgaaggagagtaagagtccctcccttttgtactgctgaacatcacttgggtctaaggaccaggggtatcaatagtgttatttcatcaagatcataattacaaagatcatgaataatcgtaagccacctcttttgttgtaagaagatcaaaatcgtcttggcaaaagacaaaaagcgcctggggcagggcgaccgagtcagacaccagaaggccctcgggccccactgcgcccgaagccacgcccccaacgcggcgtcccgcgaaacgccctttccggcgtcgcgctgacgtc

SEQ ID NO: 47611 - DNA, 317 bp, Mus musculus
  source 1..317: mol_type = other DNA
tgcttacctgaaaacaccaagatacaactgccgaggttaaaattatcattttaaggtgaattggctaactacctgagtactcagggatcccccatcttgccatgattgaaactaacacattctctaaacgctcagagaggtcacatgctgtgagaactatgctcagtgcagagaacgggccatacccatccggttgaagagtccccagccccctccacaggagggcgggacacccaggcacagtggggggcggtcctgggtatgggcaagccacgccctctcaaggcggggccgaagcgcccgccctgcactccgcc

SEQ ID NO: 47612 - DNA, 587 bp, Mus musculus
  source 1..587: mol_type = other DNA
accataaaattattttcataactgtaattattttcataactgtaattttgctactgttttaaatagtaatgcttaatcccaggtgcacaccttgaggccagcctggtctacaaagtccaggacagccccgcagtgcaggtagtgggggctttctgggggtagtcattgcaacacactgccctgaaaaagagaccagggtcacgtctctgcagaggtgagtcacctagcccaagagcatgctccttctcggtctgagttgggtggggcagggatcccccgccttgttggctcagaaaacccagacaggggagcccctctaacaggggagtcaaggcctgagacactgcccgtaactggcaccagggagccccaggggtggggaccccccacccggcgcgcgtgcgcaaactgcagggttgtaggctggggctcatgcgcgagcacgagcgcgtgcgcgctgggcgtccggccgcgggggcgagggccgctgtccccgacgtccgcacggccggacagtaatgccgcgtcccgggtggagcgcgcagcgagcgccgccctggcgccgcctcccgctgccccgcccgcct

SEQ ID NO: 47613 - DNA, 332 bp, Mus musculus
  source 1..332: mol_type = other DNA
agtggctcttaacccccctgggggaatgatcttcacgcaggggttgtttaagagatatttacattgccttcataacagtagtaaaattacagctatgaagtagcaacataataattttatggttgacagaggaagccacagggatatgtctgcttcagttcagctggccatctccagagtccacaggagggtaccttcaaaccttagggcttatggagtttgcaaatcaatttgccactcagacccttgggaccccaaagctctggcagtcctttgactgaggagcactcggtgctcggctaggcggcggatcgacgcgctcggcgctcgcg

SEQ ID NO: 47614 - DNA, 276 bp, Mus musculus
  source 1..276: mol_type = other DNA
ataagaaaccaacacatgatcacagctgtgtttctccctgctttaatgttagtaatgtctcctgtgtcttaatgtagcagaacattttcttacagtattgtaatgccaatccaggtgttcaagaaaaagacatgaatattttaagtgtacatcattaatcctttaaaagctaaacattgttggactttcaaattacaagtgaaaatgctaacaacaggttaatctctacagagagctagtttttgctggaactaggaatattattagtttgattga

SEQ ID NO: 47615 - DNA, 517 bp, Mus musculus
  source 1..517: mol_type = other DNA
tacagcctttacaaatgttttgaatgtaatcttcaaggtatcaccttttggaaggtaatagttcaaaatgtctggtacagtaaattaaataattgaaaaagaaaaaaaaaggactactttctaataactccaaaaattgtttaaacagatactgtctactgtgtcaaacaaaagagaacatgtgtttcacaagctaagctttataaacaaagttagtagaaccagccgctcctccgggtccagcccggcggcctgcgcggaggcgggtggggaaggctcggcccgcggctcccacactcagccccgcgccccgggtcgacggtcccgtgccaccgcggaattccactccggacccggggcgtcctcacccaggacgcgacactcacctgcagcttgcaggcggtgtcaggtcccagccaaccggttccaggccgccgcagccagcactagggccgcacttccgcacgccgcgagcgccgagcgcgtcgatccgccgcctagccgagcaccgagtgct

SEQ ID NO: 47616 - DNA, 516 bp, Mus musculus
  source 1..516: mol_type = other DNA
tctcactatgaatgacacttctgtcttacaaactccaaactttcaaatatctgactatcctgagaattgaagattaactccactctgagattttggacataccagaaaactatttaaaagtttgatttactccctgtaaagaaggctgtgttgtttaagatggttatagcatattacactgcacttatggacagaagctgtatatagctgccaggcttcaagctccttcatgtttatcaggatgctttcaaattgtccgcatctaagtatatgcatatggcttgaaatatattaatcacttttcaaagtcttcaagtgcttgcaataatttccataaaccaaatttaattcaggtgggcctgctgccaacagacggaccaaccccagggtgggtctctggcatttcttcttgaatgcttcatgccattaaggagaagttacagtaatctaaggttttgtgccaagccataagtatgcctaattcatcactattaataagtttggcgaatgacgctg

SEQ ID NO: 47617 - DNA, 322 bp, Mus musculus
  source 1..322: mol_type = other DNA
tgaattcattgcacatgttgtttccatagatcataaactctcctcttgatttcaaaaaaatgacccacttttgacaaatactgtgacagtgggtctttctaagtagatatgtcacagagaaatactatagcgtgccatctggcatgtaaagatactaaacaataaatggcattaacccttattgattaattaactcaataactcagtaagctttaaaaggtttatttgtcactataataaatacctaagataatcaacttactgagagaaaagttctagttctagttctagttctagttctagttctagttctagttctagt

SEQ ID NO: 47618 - DNA, 414 bp, Mus musculus
  source 1..414: mol_type = other DNA
gcccctttccttgctcctttgggcactgcatggctgtgggcaaagcccacgggcacctctcttgcaaagcggcctcccggtaaaagtatggggcgttgtagaatttcaagctcgtggtttttacttgttacaaatattgtgccaaaaatccgcaggctgcacgcagcgcgcagctcaggacggcggccagacctatgcaggtgtctctctggagcgtccaaaaagtgtcagctctaccaggtataggagagcgtcggggggcgcagaaacccactcggtggccgcgggaagccagaagctcctacctgcgcagcggggcgggcggggcagccgcacaggcgcgcacactcgcgcgcacaccctagccgtgcgctcgctccccattggcgagaccgaaagggcggggccggccaa

SEQ ID NO: 47619 - DNA, 514 bp, Mus musculus
  source 1..514: mol_type = other DNA
gattttttaatttgtttaattgtgataaaatacacataagcataaaatttaccatattgaacattttacttgtagtgttaaatatgttcagttaaaggttaacctgttctttaactttgggagattttctttataagttgttgagaaattttaaaatgaactcttctgctatgccgaggaaatgcatttaagtgatagtttcaatttagctgatgtggccctacgtgtagccacctgaacatatattctaagttttcttatatcttaaatattgttaacagtggttcaggaaacatctctttttgccatattgatttatttctaacatatatacccaagagtaggatattttgatcacgtgatttttttaatctccatattgttttttataatgacttttcatcttcctttaaatatacttaagtaaatcaggaaaaagtaagtgagcaatgcttgccttctcattggctgtaagtgagcaatgcctgccatctcattggctataagtgagcag

SEQ ID NO: 47620 - DNA, 550 bp, Mus musculus
  source 1..550: mol_type = other DNA
gggcactgcatggctgtgggcaaagcccacgggcacctctcttgcaaagcggcctcccggtaaaagtatggggcgttgtagaatttcaagctcgtggtttttacttgttacaaatattgtgccaaaaatccgcaggctgcacgcagcgcgcagctcaggacggcggccagacctatgcaggtgtctctctggagcgtccaaaaagtgtcagctctaccaggtataggagagcgtcggggggcgcagaaacccactcggtggccgcgggaagccagaagctcctacctgcgcagcggggcgggcggggcagccgcacaggcgcgcacactcgcgcgcacaccctagccgtgcgctcgctccccattggcgagaccgaaagggcggggccggccaacctgcgcccgcggagactctgtggccgcgccgccgcgtggcctcggcctgatgaacgccttggggggagccgcggccacctcggccacctagttcccccaccccctggccgtgggcgcccaggccccgcccgcgcggagccgccgcagggttatgg

SEQ ID NO: 47621 - DNA, 345 bp, Mus musculus
  source 1..345: mol_type = other DNA
cccgggcacagctcaagggccctctgctgtgacctctcacttgggacgtctggcaccctggcgtggctaaggaagctcttccagggcacagtctccccaagactcagcccccacagggtccggcgggggtggaggaggggaggtccagagggggaggagtgacgcgagccctgtgcgccctccccgtggcgggcggcgcggagcaaggagggggacgggctagtccccggggtccgggctgaggtcttggctcgagggcgcagctgtccagctctgggcagcgtcgcctcagtggcggaggctcggaagagggatgcgcggggcgttgcctccgacccgccgccg

SEQ ID NO: 47622 - DNA, 321 bp, Mus musculus
  source 1..321: mol_type = other DNA
cccctacgagccaaaatgtactggtcaggacagaccctccgcttactgctagcagggagtggggcgactcgagggctccgtggaggcctgggaacagtggaagggtctccgggccggtgaggactccgaaagtccgcagaccgggagaaccgcagagtctggaccgagcgcgggctgcgggcaggggcgcgggcgccgggcccgggcagccggcgcgcgtgtggtcagccccgcggtcctccagccgccaggagcgggccggcagagctcggccgctggctcaggctgccgcctccgtagtggggcggggctcccctgccc

SEQ ID NO: 47623 - DNA, 374 bp, Mus musculus
  source 1..374: mol_type = other DNA
ccctccgcttactgctagcagggagtggggcgactcgagggctccgtggaggcctgggaacagtggaagggtctccgggccggtgaggactccgaaagtccgcagaccgggagaaccgcagagtctggaccgagcgcgggctgcgggcaggggcgcgggcgccgggcccgggcagccggcgcgcgtgtggtcagccccgcggtcctccagccgccaggagcgggccggcagagctcggccgctggctcaggctgccgcctccgtagtggggcggggctcccctgcccgacgcgggggcccgggaaggcggccggcgcgctgcccccgcccctggttattccagcagccccgagcagtgtctcctggaaggcgca

SEQ ID NO: 47624 - DNA, 248 bp, Mus musculus
  source 1..248: mol_type = other DNA
agtaacttacagaagtagactaccacactaactttttaaatttgcttttcaaaagtaaaaatacaattttgtattatgcgctggcctcaaactctgaggagtactagtattaatacatttataaatgcctattgtccggaatcccttttatttagcatttctagttccgcacccagaaggccaaaatcctggggcatgcgcacgcgcagaaatgcgggttgcggagtcttctgcccgctttggactac

SEQ ID NO: 47625 - DNA, 439 bp, Mus musculus
  source 1..439: mol_type = other DNA
gaattcatgagaaccctgtgtaatcgtaggattcttcctttgtcctctgaagaaagacaagaagcactaaaagttctgtgaatttacagttccaagttaacaatggcctgggctagtcaattctaatttaagttgcatatttgtccaaacttttagtctaatagagacaaggatcacctattgcttgtaactggcaatctgggtagaaggtatcttttgacctggaagaaaggacatttatttattctcttggccatttgcagctgaggaagaaataacttaatctctgcttaaagaaataataataataataataataataataataataataataataataaaaaggcctggccattgacagccctccaaggtcgggttttaaacactcagccagaaaaggcgccccagcttgggcttgccaggaagacacgcccct

SEQ ID NO: 47626 - DNA, 428 bp, Mus musculus
  source 1..428: mol_type = other DNA
tataaagtttggttctattgggccctgtcctagtagctcagtttgcatttctcagtcagtgaatctgtcagtgtgtcatgaaatttgtacaggttttactgaacttccagccctcgaagtaaatactgttccttgaacggaattagctaatgttcacagaagattcacaggttagagtagccttgaaacttgactccagccttggatacctagatttggatattcctcctggcatcatggggcgatatgaggtccaggggcccggcgccctcaggccccgcccccagagaggcgtggctcagcgcggagaccccggcaggggcggagctgtcgggggcgctgctgacgcgtcgctgcttgggcgagtgacgcggcgccagccaggcctcagcccggctcgcgccgcccgccccgactaagctggcccg

SEQ ID NO: 47627 - DNA, 395 bp, Mus musculus
  source 1..395: mol_type = other DNA
gatctctcacagacccaggagccccctgagtgagcaagggttggatggtaaatgaggcaccaactgaccctattccgttatcctctgaagaaagattacttaaaaaaaaaaaactctgtgattttaaagatccagaatgattgcctgggctaatcaattctaattttagtttgatattaatccaaagttttagtctaatagttgagaacctctccagcctgctgtggtcacagagctagccttgacacacacactcctttgcattctgcagtgtttctgtgaaattcaaaagaaaatcttttgacctggaatagaggacatttatcctcttggccatttgcagctgaggaaaaataagttactgggtctctgcttagattatttcaaaagaccaa

SEQ ID NO: 47628 - DNA, 227 bp, Mus musculus
  source 1..227: mol_type = other DNA
gctaaatgaagcattcctttgtgttacattctataaggtgctacagcttagacacagccgagacacacctaactcaaatttctgccatttatataaaatgaaaaattataacacaccctcccacaggcgttgcatgccccctagcttcatccaagcggtttggttaaatcccttggtacaaacagggaggattcctgtagaccagtctgcagctagctgctgaaggc

SEQ ID NO: 47629 - DNA, 313 bp, Mus musculus
  source 1..313: mol_type = other DNA
gtttctcagcaactttgtaagatgtaacgcagccatccttgagagccctgcatgcttcatgaaatttctttctgtgccaaattcaagaatggtggactcacttgagttgagatttctggacacagtgccccagtcactaccacatacatgagcacatattctgttcacaagaaatgctcatgactgaggagaaaagcatagacaggcagatttctgagtttgaggccagcctggagcaatgattctctttgtcacacagcaaaaactcctcttcttgcaaaggatagagctggaggcagcctatctctctgta

SEQ ID NO: 47630 - DNA, 216 bp, Mus musculus
  source 1..216: mol_type = other DNA
tcctttaaggaataccaatctcagttgatcattcatggtaatgggagacactaccagaactgtcaacccttactgggctgtacataggtgtagctagaagtattcaaggggccacagcatttttgcagtctttcagtggaattcaaaaaggaatcatttgattggtaatgagaatggaaggagtaatttatcaagtactctgcttggagaagttac

SEQ ID NO: 47631 - DNA, 297 bp, Mus musculus
  source 1..297: mol_type = other DNA
gggtgactcatcctatagacagggtgagcctctcctgttctttgtcattttaaaagcttgtccttaaataactgaacaaagaaatactgaatctctattaactaaactttgtaagatgtagcatctgagcattactttttaaaaatatatttgtgtttgcttctcaataaatttctttctctggcaaagtcaagaagtttacacatgattgcatactctgtttaaacaaagtgctcatgactagagttttattaaaatccctgctgctgtggtcgccagagccagaagcagcctgtc

SEQ ID NO: 47632 - DNA, 482 bp, Mus musculus
  source 1..482: mol_type = other DNA
tgaaattgagtgagctctcaggctcagggaaaaaagtatacgtcttacaataccttcagatctgaaacaagaaacactggagtccagaaaattttatgctggcttctggcttctgtgacagcatcatgcatttgatacaaagacatatattcaggtagaataaaaataaactacattattttagttttaaaagttaaagaagttgaagcagaagaggtattctcttttggggaagatgcaaatagaatatgccttgtccttggacatctaatttgtctcagaggaaatttctgtcattttacaaggattcctccaatagaagaggaaattagttgcaaaaatctctgtgggaacttagcaccagttacatttgcttggccaagtgtagaccttggttccctgaaagccagagattcaaggatctaccttgtggagctggatgaggtcaggaatgtcctctccacctcttgccatgacgtcct

SEQ ID NO: 47633 - DNA, 449 bp, Mus musculus
  source 1..449: mol_type = other DNA
gatattgataatgggcagtaaacatatacatcaagaatttcatgataatgactgtcatattcctttgtaagtatagtcaaaaccaaggaatttattctgacaaattggtatgttgagaacaaggtttactgatataaatgtgcctctatcactgggccagaaatctctggattgtggcttctgagtgtaacaggaatgcacataatacaccatgaacttaattattttcattttaaaacaattaaagaatgggattctaggaggtattttcattttgagatatgtgaatacagtatatcttatcttgcaaggaagagtcctctaatatagcagtctatacccagcaattggaaaattcttttggaaattaacagcagaccttgattccttgttcgacagagaaccaaggatcctcagggctgaagtggccatagcttcatgaggccagg

SEQ ID NO: 47634 - DNA, 469 bp, Mus musculus
  source 1..469: mol_type = other DNA
ttctgaatgtcattgagtaggcaacattcttactgaatcctatctaggaatttgggaaggcttagctatgtcagaattcaatcttaaaaggcacttataagaagataatgagtgtccatgaaactctttgccttgtgagcacttccaggccccttgtcctgccaaggagactctctgagtgtatcagggatgcacatattacacatgaactacattattttaatttcaaaacaattaaagaatggaattctaggagatattttcactttgacacatgcaaatacagtatattctctccagggatagaggttacaatgtccggcctaatgcaaggaagagtcctctaagcagtctataatcagcaattggaaaattcttttggaaattaacagcagatgcacctgaatgtctttcatgtaccttgattcctagtcagccagagaaccaacatagcttcatgaggtcaggc

SEQ ID NO: 47635 - DNA, 428 bp, Mus musculus
  source 1..428: mol_type = other DNA
attctgaatgtcattgagtaggcaacattcttactgaattctatgtcagaattcaatcttaaaaggcacttataataagataattctaccatccaggccccttgtcctgccaagcagacttcacctctgagtgtatcagggatgcacatagtacagaactacattattttaatttcaaaacaattaaaaaatgggagaattcaagtactgtatattctatccagggatagaggttacaatgtcctgctggcctaatgcaaggaatagtcctctaagcagtctataaccagtgattggaaaattcttttggataaatagaaaggacacctggagcaccttgattcctagtcagccagagaaccaaggattctactagtctttcctccttcagggctgaagtatagaggccatagcttcatgaggctagg

SEQ ID NO: 47636 - DNA, 470 bp, Mus musculus
  source 1..470: mol_type = other DNA
tctgaatgtcattgagtaggcaacattcttactgaagcttagctatgtcagaattcaatcttaaaaggcacttataagaagataatgagtgtccatgaaactctttgccttgtgagcacttccaggccccttgtcctgccaaggagactctctgagtgtatcagggatgcacatattacacatgaactacattattttaatttcaaaacaattaaagaatggaattctaggagatattttcactttgacacatgcaaatacagtatattctctccagggatagaggttacaatgtcctggcctaatgcaaggaagagtcctctaagcagtcaaaattcgtgtggaaattaacagcaggattctggtgttcacatgacaggacacatggagcaaacaccacctgaatttcaggtattcccttgattcctagtcagccagagaacggctgacatagcttcatgaggtcaggc

SEQ ID NO: 47637 - DNA, 589 bp, Mus musculus
  source 1..589: mol_type = other DNA
tactaatttgatacagtgtgtctgaggaaacacacgctgtatgtgtttgtactagaaatctatatatagctctaatttctgcctttcctaccaaagaatagaattttgttatctatcaatagtattataacttgaatataaaagacacacaacaagcacagattgcatatacttgtttatacatatgtacagacttcatatacttgtatatacattaggtaaaaaccatacaaagaaaatagacagaaagactctgtctttttaccaggaatgttatttatgttatttatgagtagaaaatgcagaccattatattcctgtactttggatttatttcaactaattatgtttttctgagtataattactttggaacagaagagtattatttatctgtgagtgctagacaaatactctgactgcactcgagtcaaccacccagggagttcagcctgggtttttctagagtctgtagttagtaaaggcatccaggaacccgtggcccacagccaaaggatggggtgcattgttgggctcaggtcaccagactctgacctttgcctttcctaacaccagagcccagtacctgc

SEQ ID NO: 47638 - DNA, 328 bp, Mus musculus
  source 1..328: mol_type = other DNA
agcacagactgcccacacttgtgtatacattatgtacatacactacactcacataacacacacacacagagagagagagaatgctattcatgagtgacaaacaactaattttactcatgtattttgattttttttcaaataagtgcatttttctgtgtctaattattttggcccagagaaagacaaatcattcagtcttgaaaaaggcagagtgaattactcagagactccagcctgggttagaaaagttatccaggactgccctattgccacttgggatggccaggaggcaaactctgacctctgaatttcctagtatttgaggccc

SEQ ID NO: 47639 - DNA, 371 bp, Mus musculus
  source 1..371: mol_type = other DNA
ttcagcacaggtactgcacataccacaacatatgtcatctgctagcccatctgtgctgagggcagaaactgtatcttctctattctgcttccaattacatcattggcaccattccagctatataataaaatttcttaaagctgatgctcacacataaactttctgaaaagacaggattgtgattttagctcataggctgagaagaacctctgtccttgtgaaggtcttaatagtctctctcagcaaaacaactcatgatgaagccaatccctcatgtgaagtattaatgcatttatcaacttgtgagcttgctgttagaaaaggcattcttagaaaaggcagcaaccgggtggtcaggtaacctagccctg

SEQ ID NO: 47640 - DNA, 447 bp, Mus musculus
  source 1..447: mol_type = other DNA
aaagcacttttttacagcagcagtttcaaaaaataaaatttatggctagcactagcattaatgctgcatgttgcttctgtggcgctccacccaagacagcctgatcaaggctcaaagtttgataataagctttgtgtttataaaggaaaaaaaaaaccccttcagcttgagtatgttgtagcaaccttaaagttcccatgggtacctgcaattgcagccaagacagatgtctgtgtccaggttgataaggtctgtttagcctgctgaaggctgggaatactgctcatccttttcatggctgggaaaggcttacgtcacaagtatgtccatccactaagtgctggcacacttctggcatcgctagcccaatctgaggcaaagtggccaagagccagaggataggctagattgtgggtccgcggccgccccccataagtatttaaggcc

SEQ ID NO: 47641 - DNA, 198 bp, Mus musculus
  source 1..198: mol_type = other DNA
ccgactaggccgacattttttaattaactattgtatttttacctatatatcagttcctgtaatttactctttcaagaaacagaatcattaaatacatattctttggtgcacaggctttctgccagatgccggaagcaaggagagaaactggttttgcccacaactactggagcccaggccctgggcgcagcggcaaag

SEQ ID NO: 47642 - DNA, 463 bp, Mus musculus
  source 1..463: mol_type = other DNA
tttctgatcctaatgtgacatgccaagtgcttctggcacagaaactgtcaaaaactttgcccatgcagatatcaaatttgtgagtttagtaggccaaagatctggaattgtttctcacaagtatttatcaaacttcccagcacagcctgggcagcgcccctgggagatcaggaaagggtctgagcacccagcccttggtctctgcctgcgtctctggagtctccaggtttcacctgtagccccggggccccgcgcagcagccaggccggctccgcgcagcccccatcctggcagatctgggaggggtggctgcgtcacggcccgctgaagccgctgtgcagcagagggaacccgagtcaggtccacagggctctcgccgcgcgccacactcctagattctcgatttccggactggtagcaagcagagaagaccgcgcccgaggccttaaatacttatgggggg

SEQ ID NO: 47643 - DNA, 267 bp, Mus musculus
  source 1..267: mol_type = other DNA
cgtgaatcaagagcatcttgtgtctcaatttcattttagccatattatttctctaatggttaatatgcctttcacatgctcataaagctcatttgtataactctggagaaaagtctaaattggattgttttttttttttttcttgccagtagcaggaaatattgtatattagtcacttttctgttgctgtgataaaacactgtaaccaaaagtgacttggagtaaggccatcaacatcctgcctccagaaagcagtttggagatggc

SEQ ID NO: 47644 - DNA, 431 bp, Mus musculus
  source 1..431: mol_type = other DNA
aaaaacccaacttaagtacatgtgtttatacactagatgtatgttcatttgggtacatacctgtatgtgaaactgataaatcatacagtaaccataaaggttttgcattctttgcaggaattatgtgtactctacatcaaagttgagttcccctaatgcatttaataagactttgacaataagacacctgcagcaacacagtttcctcgacaggctgctgtggtggacgaacgataatttaccaacatatagcagctatgatttttttaagggctctctcagaactcgctcagaaagcaaggcaaaagtgccattccttccgcccgcgggcctccgggatggtcgcaatgcccagctgggaggctggcgctcgcccgtgcacacagccccggggcgtgagcagaggcggagacaggggcggccgcagccta

SEQ ID NO: 47645 - DNA, 381 bp, Mus musculus
  source 1..381: mol_type = other DNA
acaatcttgaaagcttaacattatgtgtaaggctcaaaaaatggaaattaaagttaagaattgttactactgtttttgtcagtcatacaaacaaaacatcccaaatttcattttcaataagactagtatatttctacatacaatacagctgtgatagtaagaaagaatactttcctaaaggtcttttgtggaatttcttgattaaaacagcttcaactctttgcacaaagaatgagtcaccctgggctgcaccatccctgaggaccatgatttgccagctcacctggggtcctaaagcttcaagaagctccatagtcactctgtaaccatggctacggcgcaccttcagtctcgacttgagctaaaacgcgcagaaatcgc

SEQ ID NO: 47646 - DNA, 613 bp, Mus musculus
  source 1..613: mol_type = other DNA
gacacctgcagcaacacagtttcctcgacaggctgctgtggtggacgaacgataatttaccaacatatagcagctatgatttttttaagggctctctcagaactcgctcagaaagcaaggcaaaagtgccattccttccgcccgcgggcctccgggatggtcgcaatgcccagctgggaggctggcgctcgcccgtgcacacagccccggggcgtgagcagaggcggagacaggggcggccgcagcctagcaccaccccagtagtccttagaggaggaccagcggcccccggaacggcctcgggagcgcgggtgtcggtgccgctcacctcccgggagtccagcggcggtgcggacccgcggaggtgcgagctggacgcggcgtgggcgccacttcagcaccgaactccgaccggtcctcgtcagggcccagggccgtcccggccgggcagccacggcgaggcgccgctcctgacgtccaccgcccgtccttcctcacctaggccggggtacttggccgcgggaaggcctctgaggtaagtcagcgcgggggtcgaggccaggggcgccgccgctagtttccgaaggggcggaggccgcgcgatttctgcgcg

SEQ ID NO: 47647 - DNA, 432 bp, Mus musculus
  source 1..432: mol_type = other DNA
ttttcctggttatcacatttttaaaagtgaaaacaagtgagtcatttaacaaatatattttaagcactgtgtccaaaacgtgatcactgtgaccttttgtcagtgaggttctttggctaacttacccagccaacacgtgtctgagagcagaaatttcgacttttaagaggcttttaggacagcccgggctgcagttcaagtcctgcccaggttcagaaaggacatctagtagagatgcattttcagttctgtcccgaggccacacctgtcctgctactggggaggcaggagccccatctgtagtccccagagggctggatacaggcgggtgccccgcacctcgcaccgcgccccggctccctctcgcggtgccgcagtcccagccgcgccgcccctcggctctgcccccatgacgtcagcgggactgggcgg

SEQ ID NO: 47648 - DNA, 146 bp, Mus musculus
  source 1..146: mol_type = other DNA
ggcttttaaacactcagttgtggaataggagtctttcaaagtgtccaaagttatgatcttttggctcgccaagtgctttggcttggcgaagcctgctcagagtaagaagaggaattgctcaccccaagaccgtccctggggctgct

SEQ ID NO: 47649 - DNA, 411 bp, Mus musculus
  source 1..411: mol_type = other DNA
aaaaatgactagtttttggtcttaatcaatggagttatctattaatggattcatagtttgttgggctcttaacacttttcctcgggcccaaagaaatgggtccggatgaccttgagcttagagctctgtgtttgtcacagtggtgcataaagctaagatgtacaaatgatgagttcttaagacgtgcataataaatgttgctctaagtaacctaaaggcttgctaccattatgcttagcatgagtcaggaggatcaggagctcaagatcaacatcagctagagttctaggccagcttgagctttcctgaggctctgcttagatcccttagtgaactggactccttggcagttgcaagcaagtaggactagaaggacacgctctgtttttgtttctgggcaggcctgacaag

SEQ ID NO: 47650 - DNA, 264 bp, Mus musculus
  source 1..264: mol_type = other DNA
aatattaaccacaaaggctgggcttgttgcttttatagtaatacctcaggagctatcacaggaatattgcctatcacatcacattttaaatctcaatttgatccactaagagttacaggaaatttaagcagactctttgcagttcctagagtctccaagtctactgtaaaaagcttgacaaaccgggcaagtttttactagtgtcccagtaattaaaattaggctagagcaggcggaggccctgttctaggccccgcccaaagt

SEQ ID NO: 47651 - DNA, 247 bp, Mus musculus
  source 1..247: mol_type = other DNA
ggcggtaccacccatttaaactagtaaaggaccttcacctcattatgtcaccaacttgtcctattaccatttggttccgtttgagacctcagcctggacctcctagggtcctgaggttcagcaggcctggacgggatcccgatgaccataggcagcaccgaggggccttcttccgccattgtgtgtcaaaggcacacacaaagtattgctaagttaccaagttctggacctcgtggacggggcctcc

SEQ ID NO: 47652 - DNA, 608 bp, Mus musculus
  source 1..608: mol_type = other DNA
ttaagatttccattaattccattaataaacttctcagaatatgaaatgtctcgagaatgtagtgaggctaagatgcataattctcatcaggcctggcacgcaggagctgggcaaggctggctctggagtctggagtgccaagagcagcctgtgcgcagagcataggggagggggtggggcaggccgccctcattcacattcattctggagcacagaaagaaaaaaagctgccttatttgagtctggaagaagaacagaaggttgttctggaagacaggcaacccttgggctcaagaccaggagtggggtgccagccgccaggcacctcggaaacgagcccggggcgaggtcccttgcggctgtgggacttgagactggcagacgacactgtcctctcactcccccgcgcccagagaccaccagggatcttgcagcggcccgggtgtccctctccccgcccctgcgtctgtccgggcggtggcgacacggcccggctggagggggcgctcgtgcgcaggagcggcgcagcaggtgccgcggttacctccacctcggcggggggagagggggcgggccggggcgggaggcggaggccggctcggtgagcc

SEQ ID NO: 47653 - DNA, 527 bp, Mus musculus
  source 1..527: mol_type = other DNA
ctgccggggatgaccggtcaacggaaatcacgtataaaaagcatagtctttctcccaggttgtaggtagaagaatgtctggaaccaagctacaattcttaatgctagacccggggagacccgggcctccgtcaagctaaggcacgacccggtaaccgatgggacacggggcgggtcagcccgagtcccggcccagaccaggcgagtcaagggcggcgcggggaccagcaccagtccctctgcccggattcccgcttggtctgagcccgcgtccccgccccatgcggcgccgccccgggactctggactccagcgacgtgtcgatcccacccccgtgtgggcctggcagagtgctcaactcggggctggagaatccgtcgccttgcgcgcggggagagcgcaggaccagcctcgcctagcaggcgcgtgcagctctgggccgggaccgcccgcggcgggtcagcgggaggcaggagggaggcgccgcagccgggactcgacgtcgccgcccgcgatgggaagtgcctt

SEQ ID NO: 47654 - DNA, 290 bp, Mus musculus
  source 1..290: mol_type = other DNA
aaaaaaaaaaaacccaaggaattgtaattgtctggtctgtcactttgtaaacgtttcctgcacgagtaagctaatgtttcaatatctgctaacagtaacagcttgggatgcctttacatttaaagaaaatcttccatggaaaagttttccagcaccagcttctagccctggctgtcctggaactcactctgtagaccaggctggcctcgaacatcggaaatcggtcttatttcctggcagatattctggctgtcccggaagttacgttccgcgccccgcccccggacgcc

SEQ ID NO: 47655 - DNA, 334 bp, Mus musculus
  source 1..334: mol_type = other DNA
gattaaaatgttcaacagctatttaaagagcactttcatttcatagaaatttgaaatcccttgaaattgagtagctcacacatgaaagaaattactaggtttaagacaacaccacactgaagttgtgagctctgaaatattttctctttttttttctatttatttatttattgaggaataaagttctatcattttatatccttataaaattttgaaattaaaaagcttttctaaaacctgaaagttctcctctgtagcactaatgagttattgtatgtcagcatttcagttgtcaggagatcagacgctggcagcaggactgcatccagtgttt

SEQ ID NO: 47656 - DNA, 474 bp, Mus musculus
  source 1..474: mol_type = other DNA
tcatgaagagttaaggaacctcacctggccagcaagggacccttggagaaaagagtccaagtgactaagcctttattctttatcccctgctgctatcagcagaagttaaatttccagaagccagtggctttgggccacgtaagaagcttttgaccaggacacttctcaatgctccagctgagctatgaagtgtgaggcatcacttggtctacagtgaaggaaaactaacactaaggagatttttatgtgttcatttgctttgtttcctttttaaatctggaaaaaagaataaatagcagatggccctcttacctgtgttctaggtctgtgaagtcttaattatgcacacaccaggtttgaagtcaagaaactggagtttctgtggaaaatctctgaattatttggcaggataccttccatgggcagcttttctgtgctttgaaggtgcagaacaagttctcagggccattgtga

SEQ ID NO: 47657 - DNA, 562 bp, Mus musculus
  source 1..562: mol_type = other DNA
gagaacattcaaacgtattctagttcaatcttgaaaaggaaagaaatggtctccctctgtatgaactaaaaagatgcagatttagagtaagtccatctgacaaaaatattatcaacgaacagattttttaaaaaatctcttttcaatgctagctcaggggttccagactagtcaggacccctcaaatgtcattactggcattttgatagtcatatatatagaattgttcttaaaattttttccctttaccaaacttctagggaaaggtacttatatgtatacaaattcaattatagtgtgtgtgtgtgtgtgaatactcatttgggttatataaatgtatcctagaaaagttaaagctagggatataatatcagcaggggtattattcttcccttgtttggtttaggatatgtcaggcaaacctcatagcttgggccaggacatggctactggccacttcatgagtcctcaagcccaccccaagaggatctgtggagcctcaccagagtttctcagactttcacacggaacatggagcggcggctgccgccgaactctgccc

SEQ ID NO: 47658 - DNA, 161 bp, Mus musculus
  source 1..161: mol_type = other DNA
ttccttggggagacagtgccttggcgaaggtgacactttgtccaagcaccaattgctagttaacggttcgggcccgggcgtgagatttttgcctcgaaacaaatgttttaaaataaaacatggtgtgtgcccctgcacccagcactctgcggggaaccaga

SEQ ID NO: 47659 - DNA, 284 bp, Mus musculus
  source 1..284: mol_type = other DNA
cgggcttagcctagtccacagaacatatatatattcatatcaagaattttatctacgtgcaaacactatgaaggtactttacaggttaggggcaaacgcctacattaatgaagcttataccgtttcatgttcagcttaaacttaattgtgcaagataagcatatccaggagcattgtccatataatcttttaaacataatgttcatgcttaggctctctgattaatattccgaagaacacaggccgagctcacatcctggcccggagcgcacctctggctcgct

SEQ ID NO: 47660 - DNA, 436 bp, Mus musculus
  source 1..436: mol_type = other DNA
aagagctgcacctatttccatcaccttaattccagcagtttctgggcaacagcctgacagtgagtggttctctcagagatacagtgtgtcacattcctagggatttactaagcatcagactccggcagaaacctgctatgttctggaggtgcccaggacacctccttcttggtcagatccataggtactgtcccaattatcctctatgtaagtttatgtatacttaaacttttaagtatagggacatatgcagataaatatttcgaatgcttatcaaatactaggcttccacatatatagtttttagaggtttgaaagtaaagacaaagtcattaaaaggcagatcttttaagtttttatgatgttaatgatctttaattttagtaaaactagagccttagaagagaattagtagttgctatgtgacatcaccagg

SEQ ID NO: 47661 - DNA, 639 bp, Mus musculus
  source 1..639: mol_type = other DNA
gatttgagatctgggagatttgtaaaactgcattatgtctaaaataattctagcattatttgtaaaaagctataatgttagacaagtactgtagcatatacgcacaattggagcaactgtgtaaattttaatcttattgtagctctgactaaaaaagattgttagttttaattatacattttatttagagcaataaacttgctactggtaagaaattttgtttctttatatccacactgaggttacaaaattctagactatctccacttaagctagctactttgagaatagcacatagactgtgctggtcaatttatcatcacagtgacaaatatcttcagtctgtatttaacaatgtgacatatgaatttccttgcacatagtattatacaagtttcctgtttcctagaacactatgcacaaaggctttgtataaagcacatgatgagcaaataattatgatcttcaaaccttagtcttaactgtgttaaatttaatacttgaatagtagtggaaagagggtggagtactctttaacaaagcttgttcccccaggaaataaaatcaagaggtaatccaatggccattattttgagcttggccaaattgggacattacatgtgattcatggaatccatt

SEQ ID NO: 47662 - DNA, 179 bp, Mus musculus
  source 1..179: mol_type = other DNA
ctaagcttgtttcctggttcacaaccatcgtaaattaatttatgcacatataggtagatggtgatttatccaatcagctggctgatatccattaggactgtcatttcttttttctaaattagtatttgtattgagaatttcatattgtactttttttctctttgttattacatgtaaac

SEQ ID NO: 47663 - DNA, 254 bp, Mus musculus
  source 1..254: mol_type = other DNA
caaattccagttttggttcctcaatttaagagaaaattggtgaaatcaaatgtaaagaattcttgcactagtatatacaatttaagctttcaggaaagcaagaatggttgtctccaagcaatgggaatttcacttagtttcgtgaaatgtttaacctataacaatttaatttctttttagcttcattatgtttaaacaaaccaactctatcataaaatccataattaaattctgagtaggcaatcttgacacct

SEQ ID NO: 47664 - DNA, 645 bp, Mus musculus
  source 1..645: mol_type = other DNA
tctgataggacccgctctacccagccagcccgttaaagtagacctcccggatccccttaagaggagggagggaagctgcgggcagagtgagacggccgcgccctcgcgccgccctccccggtgcccagatcccaccccggtaggaggcccagctggcgacacgcggcggggcgcgcggtcccggctccgggtcttggctgcggccgccggggcggcgggcacgtggcagggcgggagactccacctggccacgccgctggcccctagatggctggcgctgtccccggccggcggccgctgcgggagcacggaggcatctgctgcgagaaccgctgctgccgtcgggtcgcgacttcagacgcgtgccccagcgggcacagtcactcccgccctctgctgggcaactagcgcccacgtccaggcagggccggtgggcggtgccgtggccacacagaccccggggagcgggacttgggcaactcggagccccgcccaccccggcccgccggcttgctccctgcagcccgccgctggcgcccaggcccggaacggagtccgtactccccttggccgcccgcctcccacccctcccgcgagggcggcccgaaaacccggagcgcgggagcgttgctccgccgggccggg

SEQ ID NO: 47665 - DNA, 358 bp, Mus musculus
  source 1..358: mol_type = other DNA
gctgtgcacacacgtgcacgtgcgcacgcatgtgtgtgcacacacagacaatattcattggttaagagcactgaagatagcaacagtgtaaatcacaaaatagtaatgttggaaatgaaaaaaataaattaaataattaaaaacaaagtaaaaatgcagaaatgtcatattatattcctctgtaatttcctatacttttttgcaaagcagatgtatttcctctgtccaggtatatgcactgttcctccacggagaaactgtgggatagaatggatgtgccaggttttttctttcaggttcttgagaaccttcagacccagtgcctgcaggaactggggccgaggggcgggccgggagg

SEQ ID NO: 47666 - DNA, 496 bp, Mus musculus
  source 1..496: mol_type = other DNA
agtcccatactgtcagattcagtatgtagatatggacactgtactggacacttaatgactagaaagtcaaacctgaccttagctcagctctgggacctgaacagatgttctgtgcacataagatcacatgggggccctcagccttggggggatgagcctcaatagatactaaaatcagtaactattgatgactccttaaattctgctataccgtgcccagtttaaaagcctgggaaaattagctttgctttttgttcgatttgtggaccaatatttctaaaaccccaatttttttgtgtaagtaagtatacacacagccatggtgaggctccctgttagaaattctctcagaactacaccctgaatcaggcaattgggttttgaccggcaacccccagaaggcctgactgagccttagagggtctggtgaatgccttcaagtctgaaggaaggcgcttagccatggagggaggtgccagccctcttctttgaggac

SEQ ID NO: 47667 - DNA, 498 bp, Mus musculus
  source 1..498: mol_type = other DNA
ggcgtttcgaagtccgcaaagctctggctaccgagacgctgggcgcgctgggcgccgccatcttgacgggaagaggccagggccctaggtcccttgagccgctcgcccgccaggaagtcgccagctagttacctccgcaccactggcgctgcgtcgcagccgagccgggcaggggcagggctggggagcgcggctcgtaacccaggcaacggggcctaggcaggtgtagggggcgtggtgtcaggagacaccgggatctcggccacgcccccgggcggttcgaaaggcggaggaggctttcgagcccgcgactgtcctcccgaggagcgagcctggggctggacggctcggcctcctgccgcccgaggagcctgtgaggaacgcggagcctccaggacacgggcgccaccccttagctgcccgccgccctgcctgcggcgccacctctcgcgcaggacgcgagccaggccgcgcgcgagccaggcggagcctctcttc

SEQ ID NO: 47668 - DNA, 535 bp, Mus musculus
  source 1..535: mol_type = other DNA
aagggggccctagagcaagccttcagttttgtgtccacgtggtctagactgcctgcttcaaggcaagatataggtaaacaggacactgtttaatggtcctaaacccagcatttgaagggcaagtccttggctcctcccctccagggctctgagggtcacacctgggggtggagcctgtcactttcacaggttgtggccgcctgatccgcgacccccgcagacagagctgggcacccgattcccggcccgaagagaggctccgcctggctcgcgcgcggcctggctcgcgtcctgcgcgagaggtggcgccgcaggcagggcggcgggcagctaaggggtggcgcccgtgtcctggaggctccgcgttcctcacaggctcctcgggcggcaggaggccgagccgtccagccccaggctcgctcctcgggaggacagtcgcgggctcgaaagcctcctccgcctttcgaaccgcccgggggcgtggccgagatcccggtgtctcctgacaccacgccccctacacctgcctaggccc

SEQ ID NO: 47669 - DNA, 640 bp, Mus musculus
  source 1..640: mol_type = other DNA
ccttactagatgttaagacatacaatttatggttgtaaaggttagtaaaatgcagaattttgaaataattgtgcttgcatatataaatctaccaaagataataaattctctcttaattgttctgagacagttatctgtgagacaattcctcagccctcagtggatgcataattcattcctggatgacttaatcctttgtgaaatgaaagtctttaaaaactgtggaagattcaaatttgaggaaattctttgattacagctggtgataaaaagtgtgtgtgattgaagcttttgataaaagccttcatatgttgccatttaagggaaattcttgcatttattaaaacaccaatggtcttgcgcacacacccctagtgcacgtgactgcgggccttgtcatctaccaggaagtagacactaaatctttttattttaataaaagtattagaattggttgaaatatagaacaatcccaatttcagaacagtagcagtaaattaaattgactttaatgtattttttggttgtctgcaagatcatagaactgtagaaataaacacaactctaagtttcagacgtctcagcagtgtgattccatttgtgtaaatttgaaaaagtgagtatgcttatccagtatatt

SEQ ID NO: 47670 - DNA, 403 bp, Mus musculus
  source 1..403: mol_type = other DNA
tagcctaggcttatggtatagatcgcgatagtgactgggggcccccatgcgagccgaacgaacccccggggcctgggtgtgtacgcgcgctcgcgtgcggagtgtgcgggcgagctcgggggcgctcccgggcgtgcgctcacgcgctctaggctgcgcctagagctcaactgtgggtctgcaccccactgagggcgagagaagggtgattcggaccggaggagtctctcccctccccaaacctctctgcagggttggacaggactccccgtctccggggcggggagaggagagggagccccgattctgcgcactgggggcccgttgagatcgcacattaattggagatatctgagtctatattataaaaaaagtcaggcctgctcgtgggcgtgaggctgta

SEQ ID NO: 47671 - DNA, 521 bp, Mus musculus
  source 1..521: mol_type = other DNA
tctctagtgtgcagtggcccacctcaaaagaataaaaactcagtcttcttctttgcctcaaagacacacaattgcaagtgcactcctttcaatgtgactcaggttgaaactagagcctctgtgtgataaacactgagagttgattagatcagcgtagctctcatgggactaggctagttactatgtcctgctttatgcctcaggaagacagtgtgaagtagacaatgctcttctgctcagcctactacactaaaaaaaaagaggagaaagcccaaggtttgttttttgttttgttttgtttctagaagctaggaatatgacaaccccacacttaggcttctcaacatgcagagccgcaagctaaagaaaacagtgggtttttttttctttataaatgtcccaatttcaggcattttgttacagcaacacaatgcactaaggcagattctgtttctttggtagtttcaatagaatattgaagtcttttaaaaacgttgaagagacttgacttgaaattgtgt

SEQ ID NO: 47672 - DNA, 246 bp, Mus musculus
  source 1..246: mol_type = other DNA
cctaaccaatagcatctctttgaaaatggatctgtggttaaaatcaatggttaaacatgtggccatatcaaaataaagataggcaaattctggggtggttctttcctttctctgtaagtcttggagatacaccaacactcacctgtctgtgaaaaggcagatcctcccttctgcctagcccttctgacccagcaagagggcagaagagaggcccagtgccatttgccagttgctagtagtagccag

SEQ ID NO: 47673 - DNA, 536 bp, Mus musculus
  source 1..536: mol_type = other DNA
tggcttccctgacgccttgaagggagctgtggatacaaggtggcggtagacgccatccttaggcccctcgcaggcaggcagcctccgctgagggcccttgcgtttgttagagaaggcactctcctaagtaggggcggggtgaagcgcctgctctttaatctccggccccatcctcgccccacctggatgcagggcgaggaccgggagcagcgctggatctggggtccaccgtctacctctgttaaaatagtgaaacaaggctgagagccactggcagtgctagtggccaccagtgagcgctgggtggcaattgcgctcagctgtagcggccgagacccttcccctccggctgccgggcccgcccctggccccgggcgcctagggagggcgtggggctagggggtgaggtgggaactccacctccactcatcccgggatagtggcaactgtgacgacagggacagccgggtaccgcggtcctcccgactcccccagctcgttcagccgcggctgctgcggcagctctgtaacacgtc

SEQ ID NO: 47674 - DNA, 322 bp, Mus musculus
  source 1..322: mol_type = other DNA
cctgcctttcagggaggccatgggcccatgaactgtctccatgggtaaatgcttgtgggctctcctgttccgctggcccaaccccagtgtcacatgtgcctgctggcgttagccagctctgagactcacatcaggggctgttctgaagagtcctgcaggacctcttcccatacctgcccatatgcgcatgcgcatgttcagagatatgcgcgcgcgcgcgcacacacacacttgctatttcaagtatgtgaaagccccctggaacagtattcaaatgcccagagactagtattcgatactactccttcagggggaggacgag

SEQ ID NO: 47675 - DNA, 345 bp, Mus musculus
  source 1..345: mol_type = other DNA
tggattcacattgattgactttcagagtgggccactgggattctgaggtctaggcaggcagatctctgagtttcaggccagccaggactacatagtcccatatctgagttagagctagtttatatttaactagagaatagctatgcagtgttcaaaagaatacatttttcttttcctttgccagctaggaacacttaactgtccctggaaccatttagttatgtgggtgcatgcgtgcatatatgttttgcacaccttttaaaagacagtttctggctggatttacaatgaagtcacgatgacctggattacaattatagatacatttggaggacttagcctagg

SEQ ID NO: 47676 - DNA, 269 bp, Mus musculus
  source 1..269: mol_type = other DNA
tgactcaccagttcctttaattcataaatcaaatgacggatgctctagaaaacttttgctcactgtgacaggtaggtagctttcacaagctcagctgtcagctccccgagcccaatgtggagctggcggaatcggaggagtccctgtgtcaccaccggccctgtccagactgcagtccatggctatgagccttcggcgcccctgaggccgcgatcggaagccaccggggtgtcaggatacagggtcccctagtgccctcagggagcatg

SEQ ID NO: 47677 - DNA, 272 bp, Mus musculus
  source 1..272: mol_type = other DNA
agaaaacttttgctcactgtgacaggtaggtagctttcacaagctcagctgtcagctccccgagcccaatgtggagctggcggaatcggaggagtccctgtgtcaccaccggccctgtccagactgcagtccatggctatgagccttcggcgcccctgaggccgcgatcggaagccaccggggtgtcaggatacagggtcccctagtgccctcagggagcatgccttcttcctctggacccaggtgcggtccggaggacgtcacactggggc

SEQ ID NO: 47678 - DNA, 364 bp, Mus musculus
  source 1..364: mol_type = other DNA
caccctctcaaacactttcttttataagttgccttggtaatggtatctcttcacagctacagaactgaacctctaatgatcagagtttctatctgtgcactggcaattataattttgtgacaaggtattaactctgtagcccacatagcccaggctggtctccagctccttggcccctccctgctcagctaggctctcgcgggagcccgtaggctcccctggtccccgccaccgccggccacgtgatctcccggcccgcaggccccgcccctgggcgcttagaggccacgtcgacggtggcggggaggggcgacggatggcgcgcgtgcgtgcgtgccccgcccctccaccgcggcccggatga

SEQ ID NO: 47679 - DNA, 272 bp, Mus musculus
  source 1..272: mol_type = other DNA
ctgtcaacaggttggcctcaaacaccgctcggcttgagttaaaaccgtgcgctagataatacttaacattttaacatttaataaaggcagatagagagcaaaagtgtgctcacttccatgatccatcggggtttcctcccggcacaccggctccgcgggagggagaacacaccaactggtgcgtcgcagggcgctcgaacgccccagtgtgacgtcctccggaccgcacctgggtccagaggaagaaggcatgctccctgagggcactaggg

SEQ ID NO: 47680 - DNA, 569 bp, Mus musculus
  source 1..569: mol_type = other DNA
agacaagaaatatttattaccaagatctttaagtggtgtttactagagagcatttaacgccaccccaagttatctaaacagcttttgtatctgttcaggcttcatgggagcagaaagggacccaagttggggctcaggagtctttagagaaatggaaaaccacgtcttgtttctgtttcaggcaactatgaagcccagtctagccttgaacttgacaaaatatttctggagaagcccttttcgggattctctgttaaattatcttttacacaacagaaattccgcctcttgggggagtaggaaatcctccaaaggtgtgccactggagcaagtcccgcggggtcgcagccctccgacggggatccagtcgccaggtccccgcccctcgcctctgctcaggcttcggtggcgcagggcggagccgcaggttggggagggcggccccaggcgtcggtgacacgcgggggggagggcgggggaggcgaggcagccgcacctcgccctgggaagaagccgaccaggtgtggcctgggcgccgggtgccagcggggaggagactcgcaccgcct

SEQ ID NO: 47681 - DNA, 546 bp, Mus musculus
  source 1..546: mol_type = other DNA
accaggctggcctcgaactcagaaatctgcctcccagccaagagcctggcttctttcaaagatttatttatttattatatgtaagtacactgtagctgtcttcagacacaccagaagagggcatcagatctcattacgggtggttgttcggaccttcggaagagcagtcgggtgcttctttcttaaagatatatctatctatctatttatctaatgtataggagtacactgtagctgtcttcagacacaccagaagagggtatcagatcccattttagatggttgtgagccaccttgtggttcctgggaactgaactcaggacacctctggaagagcagtcaatgctctgttctaaattaagaaataataaccaattatagccaattggttaaaacataataaattgctttaaaaagaatttgaagagccgtttcaggaattttctgttggaaaatcaagttctaacctggctcttcccgataggctggcgccatcccggggccccgcccacggctcccagaagcccgtgcgcgcccagaagctcg

SEQ ID NO: 47682 - DNA, 366 bp, Mus musculus
  source 1..366: mol_type = other DNA
caaatgtctttgaaaactatgatttctacatattgattaaaaagctaggaaattaaattttttatttgtcctcctttcaagactggagacaaacactcaggtatggaaagactggactaagaccctttacacagctgagtcgacaatttgttgagaaaatgaacattatggaatatatcaaatgtctattagtctaattgagtttcttaacctctaaccgtgttgctttatttgttaaaaaaatttgaccctaaggtgacaatacatgtcaaaatgctttataaaatagtggtggccagtaacaatgtagaaactatgtatatactagttcctaccggagtgtgatgacgtaacaccagagcgtcc

SEQ ID NO: 47683 - DNA, 344 bp, Mus musculus
  source 1..344: mol_type = other DNA
acaagatggccatgtacaataaaagatcaccatatatatgtcttatgagttggcgtgggtccatgcgccccagcccaggcgttccactttgactgcctttccttttcaaagtgaaggcagtcttgggaagtggtttcatcacaccccctgaggccaggccctcaaagctgacagcagcatcaacagaagctgccactgttccttggcctcttcgtccctagcagggaaaaggtgctgcacaaggaccccaggacctaagcgacctcttcctggtggctttcagcagaagacagcaagttgctgggaggagccggggcgggagcggcgccgcggaggggacccgc

SEQ ID NO: 47684 - DNA, 412 bp, Mus musculus
  source 1..412: mol_type = other DNA
gccaatagtgacactcccggtgagcatatgacagggattctctgtgtatccctggctgtcctggaactcactttgtagaccaggctggcctcgaaggcgtgcaccaccacgcccggttggggtattttaatttaagattgttctataattttcttatttggagaactatttgacgagtttgggaatcaatgctttatatttataaaacaaataatctaaattattcttctgatctacaatagttttataagcattgtaatgaatgattcaatctttaagattcggatacattcagttcgaggctagcctggtctacagagtccaggttagtcagggctatacagagaaaccctgtctcagaaaacaaaactaagattcggggccggacttcctgctcaatcaaggtcctagc

SEQ ID NO: 47685 - DNA, 392 bp, Mus musculus
  source 1..392: mol_type = other DNA
ccatagaatgacatctctaaatgtctaaatggttaaagtttcaactttcatacaaaactggcttagcaaggctggtatttttaaaatgtctagctgtgcctaattcttgtgaaattttaaaacttacacacatctgaccggattgtaacgttcttgaatactattccggttaaggtaatcgtaataatccttatgtggaataatttatgatatttggcgatcaaatatcagagattttataacatttgtcagactcgccagggatttacatttcaagcagtgagtggcatgttcagtccagaagcaacttcatccctttgcctcaggctgctgagatccggctcgagcatccttcaacggcgaaggggcggagccgcgcgccggcgcacgcg

SEQ ID NO: 47686 - DNA, 421 bp, Mus musculus
  source 1..421: mol_type = other DNA
gagagaaaactcatttaaagtagactttaagcagaagtaatgctatctaaaatatttttcaaacgttttgtaacagaaatgtttaactaaaattcgggattctgataatctactgtagaaggatagtaaactaacaaaatctttcagtgtttttcccaaagaagagaaactgcactctgggaagcgcgcgccccgaccaccccgacggcggcggcgtccaccttctctgttgacacggtgtgggagcccacccgagttctgcctgacgacgcctggccgcgcagcaccgtctccgcctccgggtctgctcccgcgacggccgcctcggccgccacctccccggaaggtcttcacacgccggaccctgcgcgccacttccgcctaggcgtctctgtgcgcgtgcgccggcgcgcggctccgc

SEQ ID NO: 47687 - DNA, 417 bp, Mus musculus
  source 1..417: mol_type = other DNA
cgggacgccgggccatggaggatcagcgaggcagcgggcagccgagtcccgagtcccaggccccgctgcgcaacagagaatcccgcggccggagagcggcgggaagcacctcccaggcgcagaactcggtgggcagccgccagcgggtcccgggagctccagcccgcggcgcgcgacccccgctccatccccgcgggctccccctccgcagctccgcctgcaaccttttaaaatgtcgccagacgccgcgccgcggccccccgcacgcttcccgtcaatgactgcattgagagccggctccggcgcgagttgcttattaagtattcgtgtaatattaatagtcatgaatatctgctatacacgcgcgcgcgcgcacacacacacacacacacacacacacacttttttcgtttttct

SEQ ID NO: 47688 - DNA, 635 bp, Mus musculus
  source 1..635: mol_type = other DNA
attttgctttgctacttgagtgttttcaaagaacaggcaaaaaaaattctaactaaaatcaccataacttctagttctattcaaaattatattcactaaggatctagttctattcaaattcactaaggatcatttttaaaagcacgtgaatatggcataaagtgattaactaggctaaatgagagaggtaataaattttctattttcctgtagaacttcaagaatgttttaaatagtaatcattaaactgtcaacagacataccactgctatatttgatgtagtaatttgaaatagcattttagcaaaaatcacatccagatacatttcctttccaaagaaaagcacctttaacagaagatatatatatatatatatatatatatatatatataatattatatatatattcatattacacttcaggaagcaaatttatagatactggttgcaatttaattttaaaaagtattttcaaattatccttagcctgggttacattctaagtagttcatatgctaagggccctgcttatttagaaatcatcttaaactgcatttattgataactgaattagaactcatttaattgaatatgcagtgtctagctaatgatttatgaggtcactacttagca

SEQ ID NO: 47689 - DNA, 524 bp, Mus musculus
  source 1..524: mol_type = other DNA
ggatagccagctctggagcggagctgcagggacacgcaagaggcgaggtgccgcttgttccgacaaccaggcgggccgactagcagtggcgacgcgagggcgtggcccagccagtccgacgggttggagccaggagccttcgccagaggcgcccaggctgggccgcttcgcgtctgtgcgcgcccggggccgcgtcccggctccggctccggctcccgctcccggaacccggtccggggaccaaccgagatcggagaagccgcagccgacgggctcacggctccgaggtcctaggggttgctcccaggcgggacgccgggccatggaggatcagcgaggcagcgggcagccgagtcccgagtcccaggccccgctgcgcaacagagaatcccgcggccggagagcggcgggaagcacctcccaggcgcagaactcggtgggcagccgccagcgggtcccgggagctccagcccgcggcgcgcgacccccgctccatccccgcgggctccccctccgcagctccg

SEQ ID NO: 47690 - DNA, 250 bp, Mus musculus
  source 1..250: mol_type = other DNA
gttgcacctgggaaaccttacagtccaaacgcccggatgaatagtcagtccccggaggaaaatcatttaacccccggatctgtccggctggctcccagggcgctgcagcccgagggggtaacagttggtccctaggcgccgccgctggtaccctgcgtagggcttgcaggctggcatgcaggcaagtgctctaggagcaagttagcggctagaagaattgggagatctccgagcgcacacgggagctctc

SEQ ID NO: 47691 - DNA, 227 bp, Mus musculus
  source 1..227: mol_type = other DNA
ctctgtgtctaatttaaaagacgctggcaactgccaggattttctcctagaagagggcatcagatcaagacagggtttcctctttggagccctggctgtcctagggagcctcagtttcaagtaaccgaagcttccgaatctgggggatatttttaaacaactagctcatagtagttaatatgcctttttaaggacttccctagcagtgcagaaaattaagccctgga

SEQ ID NO: 47692 - DNA, 337 bp, Mus musculus
  source 1..337: mol_type = other DNA
agagtgaaccactttacaaaatggctgcattttgacatggcatgccattgggctggagtctgggcgcttggaatctcaagttcctacttggaaggactctgcatgctgtgctagtctagactgcagaaggaagactggctctgcttaaaactgcatctaaatgtagtcctgaaaacccagctcgttttgtttcgactataaagtcaagagtataggagtgagatctgaatcctcctgtgaagtcttcaggtctcatccaaattagaccgtacgaggagaggggggtttaagtcaaagtcactccccccccatcccaggaccggaactcctcctcctg

SEQ ID NO: 47693 - DNA, 298 bp, Mus musculus
  source 1..298: mol_type = other DNA
ccttggtcacaatgactgatacttccaggaattttacaacggtccagaaacatttgttctttcttcagagagaagttttagaaaatgaccacaaatttgatggcatcttggacagttctcagtggttatcacatttcgacatagcatgctaactagtctgagtagatcgatctctgcccaggggcggaccacctcttgtaggagattccagaaggcagcctgctggaggcacctctagcttttcgtatgcaaaacccccatctgggcggggctgagctcctggccgcagggattcgcc

SEQ ID NO: 47694 - DNA, 619 bp, Mus musculus
  source 1..619: mol_type = other DNA
tgaagttatttttacattagaactttaagaactacaatcattgtcagcaattttcatgccttaggaatgctttaaggtttttcttaaccttttaaattatcagataataactgtatatatttatggagcacaatgggatatttgaatgcatacatagatctaacttttgagctggttcaaaatacgctgtagtagctagtttaaaatacacaattaatgctgtcaactatagttacctttcaaggaaaaaaaaagcagatgttacctactgtagacattttatctactatagcaagtaaatattatttcaattctgagaagcctctactctgtaaagagcaggatccctgccccggaaggaccagcccgcctgtcccccgcagccccggggctcgcgctgcctcttcgcgggcccgcgctgtaccgtgaggacctgctcgtagctgccggcgaccagctccattccgcagcactcgtgccgggcaagagacgccggcgtggagacccgatggctgcggaggctggccctctcagccggcgcgcgagttatacgtcaccgcccgggggcaccttttaggcgcctgcaaatggcaataacggaggacgcgctccgtcctcc

SEQ ID NO: 47695 - DNA, 356 bp, Mus musculus
  source 1..356: mol_type = other DNA
gagaaaggaaaaaaggatattattgctttcattaacctctatttatttatctttatgcaatgtttggacggcttgcctgcaggcgggacacggactggcaggcccgggctcgcaatccagcgaggggacactgccaactccgggtcccgcgagccctgaccgtccccgggccgactcggcacgaaaacaaaaccctttgcttgtgatccgaaggcaggcggagctctgagttcgaggccagcctggtctacagactgtcagaggaaatgcattccggatccggttgtctagacaaccgctggccaccggagccggaagtgggcccgccccttccttaggcgcgccggaagttgggg

SEQ ID NO: 47696 - DNA, 454 bp, Mus musculus
  source 1..454: mol_type = other DNA
gacggcttgcctgcaggcgggacacggactggcaggcccgggctcgcaatccagcgaggggacactgccaactccgggtcccgcgagccctgaccgtccccgggccgactcggcacgaaaacaaaaccctttgcttgtgatccgaaggcaggcggagctctgagttcgaggccagcctggtctacagactgtcagaggaaatgcattccggatccggttgtctagacaaccgctggccaccggagccggaagtgggcccgccccttccttaggcgcgccggaagttggggcttccggggagaagttcccaaggccggcggagcccacggcttaagggtcacgtgacgtcccacgtaacggaggacggagcgcgtcctccgttattgccatttgcaggcgcctaaaaggtgcccccgggcggtgacgtataactcgcgcgccggctgagagggcc

SEQ ID NO: 47697 - DNA, 251 bp, Mus musculus
  source 1..251: mol_type = other DNA
cctcagtgctcttaagggccaatacgctatgagggtcagctgtgcctgcttgcaaaagatggtcccagctggactgttcaccttcatttagaaaaggagtggagagggtcgtggggcccctcacctataataggttttccagcatgacttctgaggagtaaatacttaggctctcccagggcaaaaatttcttaaaaatagattggttcactgtttaaatgtctatacttaagatctatactggatgatca

SEQ ID NO: 47698 - DNA, 438 bp, Mus musculus
  source 1..438: mol_type = other DNA
aggatatacttgtattataatctcaaaaataaaagaaaacagtgattttcaagagttagcgcaccttacttattaaagccatgtgactatgcatgcttctttgtgccagtggaacaaagggacctagcacacacccaatgtgttaagtcataagtagtctagtgtaaccaaagaaaattatctagaaagtcctttttatagatagaaatttatataattctatataattctagacagaattatataaatttgcacagcttcaagtggacacttatataataaaaatgtttcaagaataatttttttaaaaaaaatacagcaaccttccctgaatcctgactttgcgaaacgatggtgggcgtgtcgcgtccgctcggccccgccctccatgggcgtggcgtgagcgggctaggtgcgcggggtggcgcgccctggccg

SEQ ID NO: 47699 - DNA, 203 bp, Mus musculus
  source 1..203: mol_type = other DNA
cttactctctgcacggactcggacagagaaagactggaggcgcctgctgctggcctccgaggagactgctggaaacccccctgcattccaggctggagcttcaggtgcagagagatccagtgtctctgtacaaacctgcttaaaggtgcttctgttcagagggatgcattagctctctctctctctctgtgtgtgtgtgtgtg

SEQ ID NO: 47700 - DNA, 420 bp, Mus musculus
  source 1..420: mol_type = other DNA
tttgcttacaaggaaaacaaatcataatacaacttattttttcgtggggttttcataaatgaagttttcaaaaccaagcttttttttttttcacagcaccacgggaggtggtggaatatggcccttctactattatttattccccttcccagggcgcctttgtttggtcaagagacagcactggccctggcccggtggctcactctttctaagctttctgagcgacagatgcgagctcagaacagctcggctcctgtctgccggtgagtgtgcccgggggcaggcagcctgaccgcgctgctaattggagtttcttggcgaaaactgaaatccaagagtttgcgacttggatcctcgctttgatctcagtgcggatctatgacccgcgggggatccccggaagcctcgggatgtctacgg

SEQ ID NO: 47701 - DNA, 528 bp, Mus musculus
  source 1..528: mol_type = other DNA
caaagaaagagagaagatctgtatttccaagtttttttttttaaagatcattcttatctttgtccacagaggtacctttgacactcaaaaaaagtcagtttagacagactagctcaggttggtgcagaactccctaagaagccaaggctgatcttgaacgctgggattatacaggtgcaccaacccaagaccgctcgcccagccactccccaggagtagcggaggagctgctggtggcttctccaggagcctgatgctggccagctgtgcttgcaaatcccagcccggccggcaggggtcgccgcgccagcgccggcgggggggcgcgcggagcggggacgcgcaggcctctggggggcccacggcctcgcggccggcgccggggctcctcccactccgtggtcccctccgagggccagcggcgcggggcggaggaaacggcccggagcgggcagggcgcggcgcgcgcccgagggggcggggaggcgggcggcgcgcgcccgagggggcgggggcgagtgactagcg

SEQ ID NO: 47702 - DNA, 690 bp, Mus musculus
  source 1..690: mol_type = other DNA
aaaagtcagtttagacagactagctcaggttggtgcagaactccctaagaagccaaggctgatcttgaacgctgggattatacaggtgcaccaacccaagaccgctcgcccagccactccccaggagtagcggaggagctgctggtggcttctccaggagcctgatgctggccagctgtgcttgcaaatcccagcccggccggcaggggtcgccgcgccagcgccggcgggggggcgcgcggagcggggacgcgcaggcctctggggggcccacggcctcgcggccggcgccggggctcctcccactccgtggtcccctccgagggccagcggcgcggggcggaggaaacggcccggagcgggcagggcgcggcgcgcgcccgagggggcggggaggcgggcggcgcgcgcccgagggggcgggggcgagtgactagcgcgggcggcgcgtggcgcggcgcagaaggaaggcggctaccctggacagcgcatcgcggccgcgcggccatggtgagtgagtggggggccgcgcgcctcgtcccggatggcggcggacgttggggccggggcgtgcgggcgtagggtcggggcgccggcgggtaaccgggcgcgggggcgtgtcggcgctgcagccggggcccaacgctctcccccccacgagccgctcgccgagggaccccgcgaaacccg

SEQ ID NO: 47703 - DNA, 333 bp, Mus musculus
  source 1..333: mol_type = other DNA
aataagttgatttctaaatttattgcatcgagctcaactccttagctggaaagcagtgttttaatttcaaatagaaaaaaaggacttgagataaataccttgtttttcagaagttagttcaagcaaatgtggcaaaacctttggctgttggccagatgttgcttgaagtcactcaacttatttcctcacaagtaactaacctttgccgggagcaataggttgggttcaagtacaacctgttttactaaaaccaattttgtatttgaattaacggctgaaagtccgacgcacagtcgcctcgcgcagcggctgagtcgctgcggagtgagcagc

SEQ ID NO: 47704 - DNA, 300 bp, Mus musculus
  source 1..300: mol_type = other DNA
tctatagaaataatttttttttttttaaaccaggcttatcaaacagaagcgttcttagaaccctcggaggtcctagtgagaagaaccgcttttcattgagaaagaaatgttttccagcagacccgaattcggattctttaaaacttaggttactctcaaaaggaacgtacctccttccttttgataacgtgaaaagaaatgatcgtattacacgcttgggcggggtggaggcgttaccttcaccgccaccagcagccaatggcggcgcggtatgcaaacgaggcccgcgccgtgctggtc

SEQ ID NO: 47705 - DNA, 326 bp, Mus musculus
  source 1..326: mol_type = other DNA
acacatgtgaagtatccaggcaagtgtgtatgtacctagtttccagtaacatgttccaggaacatggagcaggcttcaagagagggtttggttgcttccattcagggtccaacactgagtaagaccaccgttgtcttttctcctatggaaactaaccagaaggggggacagtttaaagtaatgccaactgtctatattgtctggggacacctctgagatctcccaacttgggaatatactctccaagagtcccatgatttaagactgaattgcttcctcctacttacaggtaccggggaacgggtgtgacaccagtgacctctgcc

SEQ ID NO: 47706 - DNA, 342 bp, Mus musculus
  source 1..342: mol_type = other DNA
tacagcaagcactcatgtagtccttattttagtttcctgttgctcagaagaggacactgagcagtggctcacttacctgctgcttagagtaagaagaaaagagtatatgccacaaataccataagtacttactatatgtcagaatgtcccatgtcaatttacagtagaaataccaaaccaaatggctttttaaatagcctatattttcctgcaatccaaaaggccacttcaagtgaatttaaactcaacgtcaagatcactgaaatagttttgctacctactcaaaattataacatcttctcaacttattggacagtctgacagagaaacaggccacgaaca

SEQ ID NO: 47707 - DNA, 399 bp, Mus musculus
  source 1..399: mol_type = other DNA
ttcgctgcctatagcagcagagtgttctgactgatttgccaactcgaccttcatgtgctgtgaagcatttctgctcggtggtctcgggagccatccacactccatttgtttgagagacaatagaagataatggtgctttttaaaaaagcatttggaaaaaaaatgacaatatgacaatggactcatgtgattttgtggaacaaattccaaaggccttgtaacttctcgttaagcagaggtttcaactcagttctaagcttagaagctgccacatcatcagtcagcaatgctgtctgctatagcttgcacgtgagagtgtctcctccctgcttggcctcgggccaggacagagagggttgggtgagttcaggggaggggccccttgatcatccactccca

SEQ ID NO: 47708 - DNA, 420 bp, Mus musculus
  source 1..420: mol_type = other DNA
ctgcagagctgctggctcaggaccactgtttttctcagttcttataagccctggggaagtcatgaataacatcaactgcagacttccttaatggcagggaaacaagcctgtgatgtcacaaggcagttctccttaagccttctgcatagatggaggtagggacctgtcctttctcccagggtacaaatgctgtacggatagaatgtctgaacaaagtgagacacccttgagtcggtgtctcagcggatcaaagacttttctcaagcttgaaaatgcctcagatttgtaaacacatccaagtctgtacttcctggtttaaaagcttctgatctttcagtcaaatgaaaagagcatttgtaacaggttatttagcaacctatgctgtcaggttacctatcgcagagattccctcccacactt

SEQ ID NO: 47709 - DNA, 340 bp, Mus musculus
  source 1..340: mol_type = other DNA
actaatcatttagaagccgaggctttagttgttttatcttattaaagcataagccgatagcagcaattcccaggggtacctgacaaaaccacattgttgttgttatcattattatcacctcaaatgcgaagtactttagtttagttccaaactaatctggttccccgcccgccccagtaatacaatctatttaattgtacttcatacttttcattccaacagctagcaaaaggggaagcgggctgctgctctctgcaggttctgcatgtcagacggcgggcgtctgcctctgacaataacattgtttagggcttgtttacccccactctataggggttca

SEQ ID NO: 47710 - DNA, 602 bp, Mus musculus
  source 1..602: mol_type = other DNA
gcagaagcctgctgggtggctccgccccgcaccccctcttgcgggttagtccccagctgacaggcagctaaggaggggttaactgcgctcgccgctgcttaggctctgggaagcaccggctctctctcttttttaaaagttattttttaaagttaatgcgtttcaagcctctacgcggagcagaggaaacccccttggggtcccccctccctcctcctcctcctcctcctccctaccagggccagggcgaggggcggggctgggagacaccatgacgtcaccgggccggcccacagcctgctcccggccccgcccggccccgcccctcctcccgggccaaccgcccccgactgcggcccggccgggcttccccgggccgcggagccccgcctccgctgccgccccgccccgccccgcccttcgggccgcgcctcctcctgcgtcctgggtccccgcggcggggcctgcggcgggcgggcgggcgggcggggcggcagggggccccgggccggcttcacaggagcccgccctcccgccgcagcccccgccccgccgcccccggggatcccctgctgccccgcccacgcgcggggggaagccgc

SEQ ID NO: 47711 - DNA, 352 bp, Mus musculus
  source 1..352: mol_type = other DNA
aagtcagttgtcagtcaacttgtcctctggctgagcggacatgggcaagaggagtcttccttccaagtccttgcaagcaagcatggtactaatcatcacttctgcttggtccatacaaggtggttacagctttaagaacatatctcaaatttaaacaaccaaagcatcttttttgctgtggagataataaatctgttgcatttctgaccatgcacagacaaaaagagggagagtgaaagccttctgtatttctctcctcattttaaatgcaaattaaatcaaaacctttcaattttcttaaattagcaggctaatgcgttctaaagagcggccccacttagatcccggcttt

SEQ ID NO: 47712 - DNA, 459 bp, Mus musculus
  source 1..459: mol_type = other DNA
tttaaatgcaaattaacaaaacctttcaattttcttaaattagcaggctaatgcgttctaaagagcggccccacttagatcccggctttgctcttgactggagattgaagggaagctgttcatttgggctcacaggctcagcagccctgctcagcttgcccgccgctcacaatatgggaaatttcagacagcttttaagctgtttctagggacagaaggaaagagttataatgggaatgttcactgaacatactatattgccagttaaatagactgggatttgagatcgcaaaaatagattattaaagcagaaattctgatttttaaataaccggtgagatctccgctttatgcaaaatcttcatgtagattttgatggttccctgccaaagttttacatgggaaagtggtaatttccttccttcgcagagaggtaacctgttctggccattttatctg

SEQ ID NO: 47713 - DNA, 386 bp, Mus musculus
  source 1..386: mol_type = other DNA
ggcagcatcaaacgggtgctgatcacgcgagtgttacagtcagacagtacaaagggccctttgatggccacctctccttcaggaataatggtgcagagccacatcgttatttgtatgagatgtgacccattggttctgtgaataagcctggtctacattgaaaatatcaattcttcccacctctaaattgtaaggggcagataagagagtttccaaccatgccatgatctgtttcgaatggtcccgaggcagcctcaggctagagagtcccctgggatctctatctgtgccagtggctgaaacagggctgcggcaggaggcgtggtgttgatccagagcactgaccccttggcccacccgggtacagatcagggctaacctgatct

SEQ ID NO: 47714 - DNA, 392 bp, Mus musculus
  source 1..392: mol_type = other DNA
ctgccaaaaggcaaatggcagcaactgcccctttgcacagtaaacgatgaacaaatggttttgcttatccctccttgatcattgaccaataagtttttgtttttaagttttaaatatttgtgtataaagagcaccatgcgcgtgcccactgaacccgggttctgtacaaaaagtttttaatagctgaggacttaactgatttgcttccaccgggcgaggtggaagaaacaccgcctgagggatcccggtttccacggggacccggttaacatccacgtgtgggtgggactcccagactctgcgcacgcgcatccggggcgacgtcacgtccggcggcgggagttagaggcggagagggccgggccgggtgtctcatggcatcgctcccctcg

SEQ ID NO: 47715 - DNA, 249 bp, Mus musculus
  source 1..249: mol_type = other DNA
cagcattctgcgtgccacagccactgcggagtctgggtgaggtcgcccatgccacatgggcacttgcgagtcagaactctaggggttcagcgccgagatgctgactgtgaaccacgctgctcacacttctcctccggcctccccgggcctattaagggcgcgccctgggccgggcgctgagcgcaacgcggggggcgacgcttggcggccaatggagcacggcgctaccgcaagggcggtgcaggaacc

SEQ ID NO: 47716 - DNA, 341 bp, Mus musculus
  source 1..341: mol_type = other DNA
gtagccttggctttcctgccatagaccaggctggcctagaatgaaaggctttttaaattggaaactgcttctaaaaagtaggaagtatatatgttaactaaccatttgtcgaacatatagtgtgacattagaaatgagtatttagagaatagtgtaactaaacatgcctttcctactgtatgacatcacgtgggccatgtattcccaaaaaatatatggggatgcatctcacaagcaacgatggtcattctctgttccatagatctaagcgcgcacgcgcctcagcacgtttcgcggcctccgaaccagcagagggcgtagagagcgcgcaccgcgcacgg

SEQ ID NO: 47717 - DNA, 216 bp, Mus musculus
  source 1..216: mol_type = other DNA
gtagaccaggctggcctctaacctgggaaagataaatgtgacatgctgatgagcaccagcagtagtgatcataacctctagcccggaaccgactcgccaggccacagattttcaggggaatcgactctgtgctgtgcatcccccagtgtgctcaaggaggccacagagcgctccgggtctccggcaggggccgctgcagccagggcttggcaccag

SEQ ID NO: 47718 - DNA, 753 bp, Mus musculus
  source 1..753: mol_type = other DNA
gagaattgcaaagtaggaagtctccttttttaaaactctgctgacctcagtaaatatttccatgtttaaaaaaaaatgggcataattctctgctacctaacaaagaggaatgagcttataaaatgttttgaccggactcctcataaattaattaattaacgagagggtcactcatcttcagaaatggtagggccctttattgacccgctagctaggcagaaaccccgggctcagctcccggcggcgcagcagggctcgattgctctcgcctgggcgcgctgcggcctcccggcggctgagggggacggcccgtcgagacgcgacgaggccgccggtcggcgcagctaggatcccgcagccaccggaggcccgcggccgaacccgcgcccgcgtcctcgcccgcgccggcgagccccaggccgcggagaaggccgtccgcgcgcgcaccaggcccgcccctcgcgccgcggcccgcctcctcgcctggcgccgcccgcgcgcagcgtctcgcgccgcccgcccgctcgctcgcccgccgggaaacagccgcgagagcagcggccgccgcggccgctcgcacctcctcgcgtcgcccagggccgcgcgcccttccgcccgcgctcccggtcgcgtgcccgccagcgcctggccaacgctccctcgcgcccgcccgcggtcggtctcctcaaccgccgcgctccgccgggccgcgcggcccgccgcctgcttccggggcgggcggactctgggcgc

SEQ ID NO: 47719 - DNA, 498 bp, Mus musculus
  source 1..498: mol_type = other DNA
gtgactcacccaggggagctgccctctttaaaaaaaaaagcatgaccctttcctcaggagaggctatctagactcccaagggagcctagttgcagtgtttcacattcacactgaagcctgtgtgtaaaagttgcggtttaacattccctttccctcccacgggagcccctggcaaggcaggtgcttggcttgattgggtggtggtggtgtctgatgcagcagccgcaacaggagcacggagtaccagttgctcaaagtgatagtttatcaaaagcagagcctgcactgcaataacaagggactctgagactcgggagtgtctacactggcagttgtctcctccacactacccaactgctgagaagaagggcgtggcggggtcccggaccgtggtgccttaggggttcaggctctcggccggccccggcagtggcggttgcgggtcggctgtgcgccgtagagacaaagcggcccgcccgcccgcggctcccgagctcc

SEQ ID NO: 47720 - DNA, 278 bp, Mus musculus
  source 1..278: mol_type = other DNA
agcagtctttcaaaaagttcggaactaaaacactgcctgtctcaaatatcttattatgccatagtctagttcttttaatgtcaaaactggaaatttagctgtgagtgtatgcatagttcccagtcgagcttggtcaagaacttctcaaaggtctgcgaagggagccattaacattcttaagggccaccctagttcctgtctagcctggctggggcgaaagggcaggtctgcgcggcggcccacgctcgctcccgaggcgactcggagtcggggccgcg

SEQ ID NO: 47721 - DNA, 521 bp, Mus musculus
  source 1..521: mol_type = other DNA
gtgatttgatctatttaaaagaaaaatctaatttgagatggccatacacttctggatgtgggcgtccactgctgtggggggagggtggtctccctcctccatagccgccaactatccatagctccccagttaggggtgggcaattgtgaatcccttcccccaccccctggtccctgagccttggggagcagatgcaaagcagatggactcaagattcttttagacattgttttctaaaagacttatgagcatgtgtgtaattaatgctttagtataaaatgccaaggactgcaggcgtttgctcgatgggtcatctagctggggtggcgcgtgccatcgcggcttccgaagcctcagggcgcggggcggttccgcggagctgcttgttgccgctggccagccgcagcagcaacgcggacttggggacgcgcgcggggcggggaccaggctacccgcctcctccgactggggagtccccggggccggcgcgcggggaagtcccaagcgcgggtacaagagca

SEQ ID NO: 47722 - DNA, 390 bp, Mus musculus
  source 1..390: mol_type = other DNA
acaacctaagacgccttcttttcatgtttttgctgaggccacatagagaaggaggcccaccatccttccttttgccatatccatattcattgtatggaatgaatgagtttgacaaactaggaaatgagtttgacaaagcagaaacaacctggtcctcagtagagcccagaatgccttgtagtgttccaggcagcaagtcagatccatgacctgcagccctggcagttgatagcctcatagctatcatatcccagagaggcaaccacagtctgtgtggcactgagcttagtatggtcctaagtaccttaacaatgctgaaattgtcatgaagagcaaagatggtgatcctttcaactccacccttcatgagcccttccatggaactgatca

SEQ ID NO: 47723 - DNA, 563 bp, Mus musculus
  source 1..563: mol_type = other DNA
gccgccgccgccgccacgctccgaggcctttcccccgggaagcctggcggcttgccctcgcgggcccgcgggcgcgctctcgcgcgccgattcctcgattccacaggcggttcgcgcccggggtgggggcggggcggggcgcgcggggccgggccgagccgggccgggccgggagggcggcccccgcggggaggggactggggggcggggccggcgtggggagttcctcgctcccggaccacacgctccgcgggccaatcccgagccagcctctagcagtgtcgcacgcgggacacgtccctaaggtgccccgggaataggcggctctcccccgggccgggcgtcctggggcactggtacccagctgcccggctgcaggtagacgtgagggcattgagctagggagcctctctcaattccacgactgggctcggcgtgggagaggcgcctgacgggcggcccgcagaggcttcgtggaggcctttccggggtctcgtcgacggggctgcggctccgcaccgggccgggccatttaaagttgggctggctagcctctctctcat

SEQ ID NO: 47724 - DNA, 442 bp, Mus musculus
  source 1..442: mol_type = other DNA
gcctctagcagtgtcgcacgcgggacacgtccctaaggtgccccgggaataggcggctctcccccgggccgggcgtcctggggcactggtacccagctgcccggctgcaggtagacgtgagggcattgagctagggagcctctctcaattccacgactgggctcggcgtgggagaggcgcctgacgggcggcccgcagaggcttcgtggaggcctttccggggtctcgtcgacggggctgcggctccgcaccgggccgggccatttaaagttgggctggctagcctctctctcatgccctccgctgtggtgctgccgccgccaccgccgccgctggagttgactcttctgctcgcactgctgctgcagcacaaacgtgacttccaacattttaaatttatcttttccttttttcttcttcaagatgtaactacagatcagat

SEQ ID NO: 47725 - DNA, 284 bp, Mus musculus
  source 1..284: mol_type = other DNA
ctactggaggccaggcagctgccaggctacagagcctgttttgctggcagtggcccatgcctttctgcagtctgtctggagagctgcccagggtattaaaaagggatactattgaaacattgccctgtttcagtgcactgtacaaccagaaattctgtaattttgatttgtctgcattgcaggtcatggaaatagcaggaaagtttcttttgccttttctcattttaattcatcaaaatggtaaaaagcggggaggggtgccgcgcggaatctgcactgccgct

SEQ ID NO: 47726 - DNA, 353 bp, Mus musculus
  source 1..353: mol_type = other DNA
tgaccatcttgtcatttaaaaaagagggtgtcaccctggtagccagtcttaaagcaatgtcctcattttggtcagtagtcgtctttcctgagtagaaaaggctcggagtgttttaatccccttttccacgtggaagggctggggatgtcacccactgccctagactagccgagttccacccccacaagggaactaaaggatgcaggggcctgaaattccttccaagaagcataaccttggagaaggccggcttcccgccctgtctgcagagcgggcgagcgcgctcgcgaaggccccgcccctcggcgccgcgcgagcctcccctgagcgccgcactgcggctgcgccggccg

SEQ ID NO: 47727 - DNA, 342 bp, Mus musculus
  source 1..342: mol_type = other DNA
tcccagccttcagagagatggagttttccaaagatccaaggtggtaaaaatatgaaggttgtacacctttaaccacaggtgtttcaatgtaaaactaagaatggtgttggatcaaactggttattagacatcacaggagcctttgatcacagttctctcaaacccggacagaaaggcgtcccctggagctgcgggcgacagcgggctgggaggagcgtcgcccagtggcagaggccgcgggggattggggagaggatgggctcccacctcccgcagctccacaggcggtgccgggaggcggggcttcagcccaccgagacgcggggcctctataaaagacgc

SEQ ID NO: 47728 - DNA, 286 bp, Mus musculus
  source 1..286: mol_type = other DNA
actcctaccctccatgggtatatgccaaagaaggtggccctttctcacgtattctcacaacacatatgaaggccatactcctccttctcctttggtcacccctatgagtacgatcagggtataccccggggctcagcccaggtcagagctctctagggtgctgcatggcagaactgggcccggggcggggctcagctcagagacccgggatgtgggcgggacctggaagccgggggcggggcgctcccttggggcgcctggcgcgggggctccgggtgcgaggcgt

SEQ ID NO: 47729 - DNA, 330 bp, Mus musculus
  source 1..330: mol_type = other DNA
ttggagaaagcctttttccccggcaggatgaaactgcagcctgactcctaatgcctatttgaagagagcaatttagatttatattaaggaatgcataagtaggtttctgtgatgaaatctcatctgaatcaactgtggagagtgtatggtgtgcagtagagccgtaaagcacttgacaagccttcaagtaattccaggtgatggaggttttacatagaagcacatatgattggctgctcactggtaagatgtcagaaactgcaactttggccaaggcacttttcctgggtggggctgaagactcttggggcggaggactagtccccacct

SEQ ID NO: 47730 - DNA, 498 bp, Mus musculus
  source 1..498: mol_type = other DNA
gctagctagagctgccagcttgtccaggcaggaaaggtgaagctggggaagcctgagaactttcccgagttgcaagccaaggcagcaggcgcgggccttgcctcggatgacgcgtaaggatacaatgagtcctctttagatgctcacccggggggcaccaagggcacttcgtctgcgagtctcccaggttgcctgccctgtccccctccaactaggttgcagggagccggggaggcgcgcgagcaccgatcggtcaccactagtcccctccggtcggtgtcggggatccggagccacagttgcggagagacaacccggcctcccctggagcgagcgccgctccagcccgggtgcatagaagggttaagggcgcgggccggcagccgcgccgtgcgctcgccgtgctctgtgcggctcgccgggccgcctgccagagggtgcctcccccccccctcccgaagtcggatccttgagctgcggcggcggcagccaactgct

SEQ ID NO: 47731 - DNA, 353 bp, Mus musculus
  source 1..353: mol_type = other DNA
gttcaaggtcatcctgagctatatagtaagctgaggtcagcctggaccctctagctatttagagcagaagagggacagaactggcctcctgggtcctggtcacccctggagaagcctaaattgaaaacaaagggttgagacatatcaagcatcttttcgactccaccttcttctcaagaagggaaaatctgaagcttactgctagtgtgagcaacccacagttccctgctccgcctctcttgacaaggtgcggggcaggctctgtacatttgcaagtcgaaaatgatttccagatccgctggcagctggcctgccacaggctgctgctgctgatgtgaagccggttgcagaga

SEQ ID NO: 47732 - DNA, 639 bp, Mus musculus
  source 1..639: mol_type = other DNA
gcttccagaattgctggtagaaatttttaaaagaaatcatactttttacaattatatccggataaataaatgaggtcaattcactaaccgttctgcaattcaaatagaaggaaatagattctttgcacccatcttcctgaataactaagttaggcaggaagcacaaagtcctctgcagtagtcagcagggccagcaaagtttttccaaatgctaggggctattattattattctcttggttacccacagcaccagcttttgggggctaagaaaacttgagagttcttctcacggttcagacgctagagacagatctaggtgtttgggaggggactggcctctgtacaaaccaccccaggccccgggggactctcaagtcaactggtcgtgccagcgaggcctagcaagaagctagcgtggtctgcttctcactctgggtccctgcgggaatcgccaggggtcccagcgccagagccccagccaggcgacccagcgcccgcgcgcggggagagaagcagctgttcccaacagctggggggcggcggcgccgggcgccccaggtgctgtcccggccaatcgcaggcgtccggcccgccccctccccagccgggcgtcgacccccagggccgctggggaaaa

SEQ ID NO: 47733 - DNA, 326 bp, Mus musculus
  source 1..326: mol_type = other DNA
aactaaatattttattttataagagcgaggccagcctggtctgcagagtgagttccaggacagccagggctacacagagaaaccctcatggtgtctgttctctgcaataaaaccctaagacaacaggagttcaagaacaacctgttctacagcaagtcccagggctctcaaattttaaacaaattcagtggaaaatcgaaaatcgatcctctctgtctaattatgctaaccagagagaaacttctactcgtttctaaataatcagatgactttttaaagtttctgtatataagttacttgagatctacaatctatctgaagagata

SEQ ID NO: 47734 - DNA, 386 bp, Mus musculus
  source 1..386: mol_type = other DNA
gagttcaagaacaacctgttctacagcaagtcccagggctctcaaattttaaacaaattcagtggaaaatcgaaaatcgatcctctctgtctaattatgctaaccagagagaaacttctactcgtttctaaataatcagatgactttttaaagtttctgtatataagttacttgagatctacaatctatctgaagagataccgcaggaggaggcgaaggcatttcctgcttgcaccggcgatcgcccgccctcggctgggtgctcccggcccctcccgcgcccgtctgtatttggagctgccggaagctgcgggcgactctccccgagagcagcgtgaccgactcgggctcccgtgcaggggggaggcggaggcagcaccgggcct

SEQ ID NO: 47735 - DNA, 426 bp, Mus musculus
  source 1..426: mol_type = other DNA
gcatgctgtggtgaacaccattgtatccataggagctgatgctcatcccatggcttgtcttccttcttatagaacccagaacagcagcctggagttgtaccacccacagtgggctgggcccttaatcagcccaatcttatcttgcctcctctcaaatgactctagactctatcaagttgacatagcacaataatcgttcaatattctcatagtatttggctcttcttattaacatagcaaagtgtattaaggttattctctagggaccttggtaatggagttcattagaattctccgttcacagtgtccaggaccacgtcctcggcatcgcacacgtggttgtgcgatgccgcgacgcgttacgttaccgaatatgcccgcccgcccggctccccaagcctggcgcgccggagaggtggggtttcc

SEQ ID NO: 47736 - DNA, 439 bp, Mus musculus
  source 1..439: mol_type = other DNA
atacattgtttagtcacctaactataatattaactgaagcaaatatatgtttactagggatatatgaaaccatttactgcgtttcttgtataccaggaaacggtgtgtgttgacaacaaagcccttatatgtttaatgaaacagtaatgaagttgatcgcggccacggttaatttcaacaccgccgccaaatgacccgggctttgtgcctctgcatccgcgttctggccgacagggagcgcgggctcggccaacccttccttcctgtcgcagcgtgatgacgcaaagcgtcggtcgcggaggagtgacggtgttctggctcgcgaccggggcggccgcctcaacagcggtaataggcgcaagagcggcggcggcggcgacgactgcagggacgacgacggcggcggcggcggtggggcgggcgcagcgcgcacaggggg

SEQ ID NO: 47737 - DNA, 612 bp, Mus musculus
  source 1..612: mol_type = other DNA
gtgtggtctctacagtacggcacgcagtatcgtgaatgagtgaatttggaccttccaaactgttaagacttgaaccaaacagagcaaatccgcttccttcggttccgcccaggctgggaggtctggctttggcaaaagcgcggatcgcgaaacacagccaacaccgcggcaaagctcggtgtggggcgccgaggggcggattaggcctgcgcacccggcaccctcgccccccagaccgccccagggccccggctgtgagggtgacagcggcccctgaaggtgactcgagctccaggaggtgtctgtgacgtcccccgcaggctcaggaacaggggaagccaggggctccttctccaggcccagcagcccggagcccgaaccccgtgtcccggctgccctgaggccggagacgctcgcctttgtaaagcgccccttcccggtctgcagcggccttacagcccgggcgcggcccccggagcggaagatggcgacgctgcccggctcccggcggccgcgaggggccgcggtgctgcgcgctcggcccggcccgagcggctagagcggcgcttgggcccgcggcctcctcccgctgccgcgccccgccccgcgccc

SEQ ID NO: 47738 - DNA, 293 bp, Mus musculus
  source 1..293: mol_type = other DNA
tcaaggcttaaataaaagtgaactgctactaactaacaagttttgttgttgtacaaacccacttcacaagtattcttttgtttgttttgagttctcctgtttctgtacgtagctaccttcctctgtcttcagaatcttactatacagagactaggagccatgctcccagcgaagctgactggcagtccgtttgggcatccctgagagactagctgtcacttacaggaggcgtgattatcccaggtctgcgcacggcgcatgcggacgactgcgtcgtgcgtccgccagggggt

SEQ ID NO: 47739 - DNA, 446 bp, Mus musculus
  source 1..446: mol_type = other DNA
acctaaaaaacatctttttctgcctaggattttttttttatctagaactcactatatagtacaggctgacctctactttagttttatttttgaatttcattaaactgaaaagctaacttcactgaaacgctgtaacaggctcacacagtcttagcagatgaagccgggagctgtgaggactcacaggccccgccccaggggcgaaggccccgcccaatgtggtctgatcccaccccggaagattatccaggctccggtcctataggccctgcccggggcgtgagaactctgcccaggacacgcaggctccgcccagcgtgcagaccacgcccagggcgcgcaggcccctcccaggaccctgtggggccccgcccttagcagctgccgagattgcgcagtggcggaaatcatcggggcggggcgagcgccgggaccctcctgctccc

SEQ ID NO: 47740 - DNA, 793 bp, Mus musculus
  source 1..793: mol_type = other DNA
tccatgtagatgggttccctacagcgcttggaatcccaggacccctcctccaggctgcggggttcccatagcccagagtggaaatccagactggggtcctgtccacccggtccgcagctggtgccggcgccagagtgccaggtgcagccgccgcccaactcacctccgcccggccgaggcgcaagcagctcccgcccgcggcgccgcaaccccgcagcccagcgcgggaagccccggcttgcacagggtcccccacgccaccccttccaaacgcgggacgccggggagccccggggaacgcgcgcgcctccagacacagccggccgctttgtgcggagctgtcaagcccgccgccacccccaagcgcgcccgcgtgaggctcgagtccctacctcagagcgctggccagggggcgaatgctgccctgggctgcaccgggctgcaccggacggcctgatccgcactgccagctgcagcagctcggccgccgccgcttccgcccctatcacgccgtgacccggagtgggaggagcgcacaggcccagggagcaggagggtcccggcgctcgccccgccccgatgatttccgccactgcgcaatctcggcagctgctaagggcggggccccacagggtcctgggaggggcctgcgcgccctgggcgtggtctgcacgctgggcggagcctgcgtgtcctgggcagagttctcacgccccgggcagggcctataggaccggagcctggataatcttccggggtgggatcagaccacattgggcggggccttcgcccc

SEQ ID NO: 47741 - DNA, 347 bp, Mus musculus
  source 1..347: mol_type = other DNA
tttggtatctaatttttatcaaatcaggactttgtaaggactttgcttttcactgaagacaaagttaaatatagttttggtttttgtttgaccaggctggcctcaaactcagagatccacgggcctctgcctcttcctctggagggctggcagaggcaggttaaatataacttaaggttctaaagaatttaagcaaggctttacactcctggcaaggcaggaaagtttttacttgggaaacaaagattatattacaggtcttgtggagccacacgctgtacctccctagtcaagtctggattgttagactctcacataagctgctgcagtaaggagcactcacattg

SEQ ID NO: 47742 - DNA, 459 bp, Mus musculus
  source 1..459: mol_type = other DNA
aaaaggggcacagaagaaaataaagtctaacttttgtccctcaacttgaatctgtctaacattcaccggtttgatgggtccctgtcacggtgcagcgtaccggcgacgggaagcctcgcaagtaggtctcatttggaagccttctccgaatcaaccccgtccgcggggtgatcgccgctcgccccggctccgcggcccaggacggccggtcatcccgggatcgggaggctggaagctcgcaggccccctagcgtccaaccgttcagcgcggaggccccggctcgcgcccgcccgccaccccgtgcccacccgccggacgccgcgacccgggtcctcccgcggaccgcagaccccccgagaccccgcccgggcagcccgcgagagacgccgccgccccgcctcccgcccgccctcccgcgcgcgccaactcccagcgccgcgcgctgattggccggcgcc

SEQ ID NO: 47743 - DNA, 701 bp, Mus musculus
  source 1..701: mol_type = other DNA
tgaatctgtctaacattcaccggtttgatgggtccctgtcacggtgcagcgtaccggcgacgggaagcctcgcaagtaggtctcatttggaagccttctccgaatcaaccccgtccgcggggtgatcgccgctcgccccggctccgcggcccaggacggccggtcatcccgggatcgggaggctggaagctcgcaggccccctagcgtccaaccgttcagcgcggaggccccggctcgcgcccgcccgccaccccgtgcccacccgccggacgccgcgacccgggtcctcccgcggaccgcagaccccccgagaccccgcccgggcagcccgcgagagacgccgccgccccgcctcccgcccgccctcccgcgcgcgccaactcccagcgccgcgcgctgattggccggcgccttgaaaatcgagcgagcgcgcggcgcgaggacctcggccccgcgcgacttctacacagcggcggccttctcgtgcgcacccgcggtgaggacggcggcggggaggcgccggggcagcggggggacgcggccaaagcactgaggcccgccgcgggggaggggactcgcaaggctcggctcgcctgggccacactggccgggcccgagccggcccggggcggcgcaggccgggcgggagcgcgcgcgggcggctgagagggcggtgcggtttcccgcctcgggcatcccc

SEQ ID NO: 47744 - DNA, 312 bp, Mus musculus
  source 1..312: mol_type = other DNA
tataaactggttaccaagtcaaacttgactacgaataatatattccataattatgcatcatactcaaaggtgtcggctctctccggttagagagaggtgagggtctctcctgggtcggtggagacagactcagtaaccaaatccagagagtaattaaagactccattagtactggctaaggacacttgccctgacttgtgcaaatgtgtctacatttaaaaaaaaaaaaagataggtttattttgggggaaaaacccgcgctgcctgcttactaaggagtgcgcctccgggggaggtgtgcgcgcgcgctgg

SEQ ID NO: 47745 - DNA, 438 bp, Mus musculus
  source 1..438: mol_type = other DNA
cccttcaggaagtacatcctgaccttagctgctaaaggaaaggagaaaaatccctgtgccagagatctttcaaaactgcaatgttcaactttattaaaaacaataattggatttccattaagtgaaaatataactagttacctacatgtcttttattgacaaagcacttgaagtgaaatcactgtaagtatactaaggcttctaacttgatttgcccacatcagatgcacttggacagctaaagtacacacagtggggggtgctgctcacacccggcgcaggattcctggggcaacgccaggtccccgacctgagagccactgctctgcgctctgcctgcgcctctggctgctgcgcgccccgagctgctggctgggcctgtcaagacaaggaggcggagagggactcctcctcttcccgagctgtaggtctgggcgt

SEQ ID NO: 47746 - DNA, 368 bp, Mus musculus
  source 1..368: mol_type = other DNA
tataggggcatgcgcaccttacagcacccttcaggaagtacatcctgaccttagctgctaaaggaaaggagaaaaatccctgtgccagagatctttcaaaactgcaatgttcaactttattaaaaacaataattggatttccattaagtgaaaatataactagttacctacatgtcttttattgacaaagcacttgaagtgaaatcactgtaagtatactaaggcttctaacttgatttgcccacatcagatgcacttggacagctaaagtacacacagtggggggtgctgctcacacccggcgcaggattcctggggcaacgccaggtccccgacctgagagccactgctctgcgctctgcctgcgc

SEQ ID NO: 47747 - DNA, 339 bp, Mus musculus
  source 1..339: mol_type = other DNA
ttcttgaaagcgagtccttctgaaagcacggctgaactcccaggctcagagtccctcagcagcttagaagcctcgggttgcccggcgccccgccctcgccacctccctccgcgccgccgcccgcgcgccgagctcgcccgcgtccggttcttgtggcgacccggcccgcgcgctggccccgcccccaaggcgcgcggctctgtcttttgcttcgggccgattgtcgctcacaaaaaaagacggtcgatttctggagctcggagccgccgggtgctgcgagcgccggacgcgcaggagggcggggacccggagctcgctctaccgcttgtcgcggtcctc

SEQ ID NO: 47748 - DNA, 341 bp, Mus musculus
  source 1..341: mol_type = other DNA
ttaaaaatatcttataattacagtagtctattaaagtatactttctcacacttatagaacatctctatatatacagggtatgaaatgtcacacttatctatacaatatgtaacattcttataatcatctattttaaacaatagatgtaaaacaacattacttagcagtctggtcgacaacacttaagcttcgaagtttaactgcaccttcaaaagggtgaatgctcgtgaacgtgcaaaaaaagtaaaagtgaatttaagttttatttttccccttctaatgacaagacgagaccgctggtgctcaggcggccgcacacctggggcgctctgcccacccct

SEQ ID NO: 47749 - DNA, 370 bp, Mus musculus
  source 1..370: mol_type = other DNA
acacataatatttacaaaaaatatttaattaaaaatatcttataattacagtagtctattaaagctatactttctcacacttatagaacatctctatatatacagggtatgaaatgtcacacttatctatacaatatgtaacattcttataatcatctattttaaacaatagatgtaaaacaacattacttagcagtctggtcgacaacacttaagcttcgaagtttaactgcaccttcaaaagggtgaatgctcgtgaacgtgcaaaaaaagtaaaagtgaatttaagttttatttttccccttctaatgacaagacgagaccgctggtgctcaggcggccgcacacctggggcgctctgcccacccct

SEQ ID NO: 47750 - DNA, 214 bp, Mus musculus
  source 1..214: mol_type = other DNA
ggctgtagttctgtgtcttttggtaggcacaaaaaaacaaacctgtatgtgataatatgtaaagaagcagttgcattccttgactatattgtcaattatatgtctataaggcagaaaaaaaagaaaaggatgccatgtgtcttctgagtcctttaccgctttaggaaagggttttgaaagaccacaggcatcaggccctatttctgcgtgcagt

SEQ ID NO: 47751 - DNA, 375 bp, Mus musculus
  source 1..375: mol_type = other DNA
gataatatatatttttggataggtatattcataatgactaaagaatgataatttagatctttcctgttattttttgaactgtaacttacatgacattgaatcaatatgttcttgcttagtcactacataattcatttgttttaatgtgcccataattttgtaagaatgtaatttctagatcttataacatattgaattagaggcttatagcccaggtgtatcatataatacaatgaaactacaatataggtcatatatgtaactgttcagttaaacttcatgttcaagttaaagtagtgaaaatctaatattttcttttccctcattacacaggaaaccggaattacaaaggagaacgtcaccctggattaacta

SEQ ID NO: 47752 - DNA, 398 bp, Mus musculus
  source 1..398: mol_type = other DNA
tttgccacctcactttaagaagcaaatgggaaataatttgaaaatactgctaatactagaaatacaattgaaaattcaaattcaattaaattgagttccgctcaaattcctagtcttttcgcaaagatttttgtctttctgttacaaccaagaagtgtttttttgtatgagcaaaatagtttaaaacattacactatgaatatcttcaaacttagtcttgtctttttgtaatcattttttaaaaaaagtattattttcaagaaacaacatagatagcacatcttttttaaaagaattgattaatgagcttccttgcagtcaatgaaaggggagccctatagtctgaagcttcctgcagtacgcggcattctggagcgctgcgtgggtagtgaagtgcg

SEQ ID NO: 47753 - DNA, 596 bp, Mus musculus
  source 1..596: mol_type = other DNA
atttggtgtttgttacatacaaaacattgaccgaatatatacgtcttatttaatgccaaagaaaaggagaaatgtttaagattctttttggcttaatcttatttatattttagttatgaattgcatgaggactaacatccttattataccaaatagatggaatttgtagaactggtgtattttgtaaaaccactgaagtgactatgcaaagtgatagaatcacttaaaactggtctttgccagtggtaaaagtcatgacctgaatttgcttctgttttaattcaggcatcaaaaattgaaataatgcagtaaatggcaaaagctttaggctgacttgataagtaattttctggttaccaattgatatttgaagttttgataattgttttaaataaaatatacatttttaatcctctgattaaattggattaatttttaacataacctaaaaatttgattttttaatcgattgcaatttttttggcttttgccaagatccaagaactttaaagaatatcaaggaattctaaatggttgaattttaaataactcaaaggcctgatttaacaggtgggcagagattttgcccacaagga

SEQ ID NO: 47754 - DNA, 407 bp, Mus musculus
  source 1..407: mol_type = other DNA
aaatcaaattgaactattttttctatagtaaaatttagacttttaaatgtttatttttagaaaattaacttgtctaggtgatctcaaattatagaatagcaccactcttttattgtaaaaaattaaggtgcaaactgaggttgcatatgactttagtaatctcagttctcctacagcaggatagatatcatggtagcttggctcatatactcagtacatgtatgtctgcatactcatagattttaaaatgacatattaccttaaagtctgtgttagacttgcagcctattatagactagccttcaatcttgaattctcttcagatcgtatcagatctgatttcccaaaaaaactataccagcaaaatgatatcattttatgttatcaaaagttgataaaatgttaca

SEQ ID NO: 47755 - DNA, 563 bp, Mus musculus
  source 1..563: mol_type = other DNA
cactctgagagttggagaattcagatttattaggctagcctactccacactgatggtctgtttcagaaaacgaggggaaatttctacttgagttaaagtatgatacctacaggaccctatttaaactgtcatagtgcaagacaatattgactattaaatataatagttcaagaatattaatgaagacattcgatgcataatatgggctttcttcggaacacgtggttccgtgagcgaagctccagagcagtcctcgctcctcctgcgactctgcaccggggctcgtggggagtcggtgccccccacccccacccccatgctgcaggctggcagccgcgccctctcatggccctgagggtcctccgggctttccgcgcacacgccgtcggctcagccagcggctcccacatgttcgaaaaccttagaagctgtccgccgcgtcacgggccgcctcgagtctccgtatcacgtgcaccgagcggctccctattggctgttgggtcgggcgcgcgcaaggccgcggcggcgacagggcgtcctcggcggccgggctgtggagtggc

SEQ ID NO: 47756 - DNA, 402 bp, Mus musculus
  source 1..402: mol_type = other DNA
acccactaggtaagcttaaattagaaatttaggtaaatcctagttggagaatctttttttttttctcctcagagatttgagatctgcacaggcatggtcaccaccctgcgagttacaccccggtgtattgcacacctgggaaagctgtttaaggctacccacgtctaagaggcgtcttggacgggtccctccctccggctgggcctagtgggtggggggcggcagcgcgggggcggggcaaggcagtgacgcggggctggccaggctagaggcgcggcggcgcggggcggggacgcagtcccgggtccgactggccgagccccgcgcgccccgcccgcgccctgcgcctccgcccggccagccggcgggggagggggcatgagccggcgcccgcgcgccgcc

SEQ ID NO: 47757 - DNA, 487 bp, Mus musculus
  source 1..487: mol_type = other DNA
gggtcgacctgggtagggggaaggacccccagcagtcctgtggctcagttgcgattgccggagcatcgggaaagtgaggaagatccccctgcatccagtcgggggcagggggctccgcggctcgtctccctgggagtcccggggccaccctctcccgcggggtgcccccgagcccggctgctggctcccccaggcccgcggcccaccttctaccgcggcccgccttcccggcggcgggagcggggcccaggccggcgggcggaggcggcgccacccggggcgctgacgtagcggccgctcggcggccgggggtcccttcggtggggccgcggctccccgcccgccgcccccgcgcgtccattcgctttgtgtcccgcgcgcggccgggccccccgcgcactctcagccctgcgccccgcggcccggcgggcggctcccggcgcggccccagcagcccgcgccggcattgtgtggacgcgcccggccg

SEQ ID NO: 47758 - DNA, 443 bp, Mus musculus
  source 1..443: mol_type = other DNA
gaaggcacagcaactggcttttactcgtactggggcacaaaggtccattgggcctgtcagggctatgatcccggagagacacgcaggctctgcacagtggggtgctggctgcaagctagacccagagcaagaggctctcggaaacctggagtaaccgttgacaccctagcctcagggcgtgtcctccccaaggaaacacggggcacctttttaaacagatcaagtgcttatgttcaaagtgggtccctggggacccccgatgtcatcgcgaggacaggcgctgggctgcttgccctagcctgctcaggcgcgattccagcagctggcgtctaggccccggcccgccccgggtggaggcggagtccgggggcggccgcgcgcggggggcgtgtcgggggcgggccgggggcgggccgggggcgggcgcacagccgtagcccgtg

SEQ ID NO: 47759 - DNA, 782 bp, Mus musculus
  source 1..782: mol_type = other DNA
gctcagcatacgtaccgtcggcgcctgggtttagccggaccctcgcagcccgagcccctggaggcagcgcacgtccgctcgtctccggagggcggcgcacgccggggaggcttgcccctctcggggagtctcctcagccgggtcccgacaccaggccgtgaagccgccgtcccgtcccgggagcgacgccatcttgtcgccgccgtcgcgctcccgggctccaggctccccctaaccccgccgcgcgacacacgcggcggaggaggagcgctggctgccggccacgcctaccgggcccgcagccgcgagcggggcggagccagcctcggaggccgcggcctccgggcgcggcctgcacgggcccaggcgcctccccgaacccgcccggctgcggccccctaaagggcccgacaagccgagtagcgctccgccttctccgccccgccgccgccgccccgggagcccggccgcggccccggcgccgcctcttccgcctcccgcgtccgcgcgggcgggcccgacgtcagcgccgccccgcccggcccagcttcggcctcggcctcgcagagcgcggcggcggcgcaggtccctccccagacatggccctgggaggcggcagcacatggcggccgcggcggccgtgagcgcgcccccggccagccccagccagccctgaggctgcccgcgcccgccggccgcgccacggccctgccgcccccagccccgccgccgccggccccgccgccgcccgcgcgcgcgcgccccgccgccgccgccatggg

SEQ ID NO: 47760 - DNA, 706 bp, Mus musculus
  source 1..706: mol_type = other DNA
gcaccaggcccgatcctgactcaaccggctgcagccgcaccttgacgtggaccagaccttgggcggtggcgtgcccttgttctccactcgtgcagccgggccttctcgagcgcgccattgaagaagacgaagagctcgatgttgcctccgaagcaggccttggccagagccgccaggtagcagcatgtggttccactggccggcgatgcaggcagttgtcggcatccaccagcaggcgcagcggggtctgcgggggccgctgccgcccgccgcccaccaggctgccccgggccagcttctgcagctccaccggcaccacggcgctcggacagtgcttctcgatgtagtcctggaagccctgcacgcccatggcggcggcggcggggcgcgcgcgcgcgggcggcggcggggccggcggcggcggggctgggggcggcagggccgtggcgcggccggcgggcgcgggcagcctcagggctggctggggctggccgggggcgcgctcacggccgccgcggccgccatgtgctgccgcctcccagggccatgtctggggagggacctgcgccgccgccgcgctctgcgaggccgaggccgaagctgggccgggcggggcggcgctgacgtcgggcccgcccgcgcggacgcgggaggcggaagaggcggcgccggggccgcggccgggctcccggggcggcggcggcgg

SEQ ID NO: 47761 - DNA, 444 bp, Mus musculus
  source 1..444: mol_type = other DNA
gagggggaggtgtcacagagatggcatttcagatgatttggctctccaggccccaaaaggggaccctgagaagccctgggtgaaatttgggcctgacccccatgccagagacccactagccctttgggggctatcccctcaaaccaggcagagttgggctggacaactcagacacttacagtgtgagccacccagtggttttaaaaagtgacaggctctgtggcacataagcagaggttccaaaagtggggaagtccagctgtcaccaccagggggcagcaccagaccacagcctcctggttctgggcttggtgcccacatcagaagaaagtgttcttgttgggggttgcagtgattcactaagggagaaaccacattgagtctcattacttagggtgatcacagtattagccaagacttagcctgcaactgactgctgcagtg

SEQ ID NO: 47762 - DNA, 238 bp, Mus musculus
  source 1..238: mol_type = other DNA
ggttggtaccagagctcctgaggccacacattttacagttatgccagccatttgtcctcaaatgggggacttggtagaacgaggacccactaactgagaagttcacttgagttctctggtccagacaagagctggagcgggactcccggcgtcgctacaggagaagctcctcaggggccgagctctctgctgcggccccacggctgacgcgtctcgggcttagggccaggcctgcggg

SEQ ID NO: 47763 - DNA, 286 bp, Mus musculus
  source 1..286: mol_type = other DNA
tacatgccgttaccctaaataactgttggtcagcgctgctgaagcggcactgagccacacgatggtggtaggtgcctccccccccccacaggcagctgctctccactggcagacagggatctctggctatgtggccaggaattctgattgatttcaacttttctccaaggtcacctgcctggaaaggcttacttcgaggcgatcagcctggaggctccccaacttctgccacccagtgcaaggggttggcgggagcgcgacctgggtgtggctagagacagccacg

SEQ ID NO: 47764 - DNA, 429 bp, Mus musculus
  source 1..429: mol_type = other DNA
aggttccagggcttgctggctagccagtctaaccaaactgagcttcaggcttagtgagcctccccggtagtagggacaagcgagcctctactctgcctggttgccacagcctctgaccactattgaggctgagctcagctcacattccgtacagtatcttccaatgctatgagaagaatgtagacaaacatgtattttctgtttagaagtcagatatttctgtccagcaaacctgctaagaatgttaacaccattggagcatgctagttgaatttaatagctaaatacacttactggccagctactacatatatagtaacctgaataataaagctatttcctttaaaaaaaaaaagtgacactagccaatgaaaatgtcttcctgtagtgactttggagtcactgacagatggctcccagagctagggg

SEQ ID NO: 47765 - DNA, 400 bp, Mus musculus
  source 1..400: mol_type = other DNA
aataataataataatgtggactttgacttttggcctccatatgcatgcacgcacacacacacacacacacacacacacacagagagagagagagagagcatggactacttggtgagacaacctaaaacaaacacaaaatttaggatagattaagactgaaatggagtcaaatttgcagcctatatgaggggactttcccctgagggctgcctggaagaggcagagcttagccctgctggggcagtcctcatcagagttccctcaggtctcttggagtcaccgtgaaacaatgtcacctgggtcatcaggtctgctcagaggagcccaccaagccctggctgctactgcagaacctggtagggctgagccagctgttttgtgaccaatattgcaaaaatta

SEQ ID NO: 47766 - DNA, 408 bp, Mus musculus
  source 1..408: mol_type = other DNA
aagagccagccccctgggatgctcctactttctgtcctatcgctgacattcagggacatctgtggccaatgaatttcagatgtgttaatcagatggtggacatacggacaaatgaacaaaacctgccacccagtcatgacttctggttagccagtgggcactcagcactgtgggataccatggtggtgtagactgtccaaaacacatagatacatgtcacatgcatgtcaaacaggcatacataataaagatctccttaagaaaatgtacaatttcactatagcttccctaaacacagagtaaagtgtccctacacggagcccaaagccacgtggattcctgttcccccggggccagtggccccactcaccctgtggcatcccaggctgagccccgcctgcctgcctg

SEQ ID NO: 47767 - DNA, 287 bp, Mus musculus
  source 1..287: mol_type = other DNA
catctttcctcagggacattgggatgatcaaatataggtccttgctcttactgagcaagagctttaagttttatttagaattataacattatgctcacggaggtgccttcatttccatgaaagaaaatccgcccctagcgtcaggctgttggcatccttttggcagtgcccgcggcccgccacagcgaatcttactcgtgatagcccgccaatcaacgattggtctcccacaatgctaagggagacgtagctttgcgtcacgttagggactgcagcccccagtgttc

SEQ ID NO: 47768 - DNA, 511 bp, Mus musculus
  source 1..511: mol_type = other DNA
aaatcagtgaagctacttttactaacaatgaaatctttgtttttttcccagtcttccttggaaaaattaacacaaaaaaacccattaagctggattttctacagcaatattcagtgctgtggccaaacaatttaacacaaatatgaaaattatgtttgagacaggatctcactctcgaactcctagatgcattaaaggataaactgaggtcatttggggcaaaggctccacggtgaggtttcctcgccacgtttccccggaggctcagagtcgcccggcgccttactgcagccccagccgtggccctaggacagtgcgagggtgagcgcctcggactcggggcgccaggaagccgccggcctcaaggtccgggagcagatccggaaacctcccttccggttcccaggtccgcgtttcggaagtgagtcactcccactccacctaccaccctggacgtcgagggtaaggtgggcgggacccttctgggaatggcggccgccgggggcgtggc

SEQ ID NO: 47769 - DNA, 522 bp, Mus musculus
  source 1..522: mol_type = other DNA
aagatttatcatcatatgttaagtctttgtctttattattactaaatgtcaagtctatgtgttcaagcacccagcagtgctgggtgcttttctaactttcttatggagagataaagaagtaatgaggaggcttgctgctcccttatacattaaatgtgcatgcacacaggtgttaatcctagcacgatagagatacatgtatttcatatatatgaaatcaataattttttgtagatgtgattacacctgtgcacaatcacataatctaatggtattaatatgtaactagtttttgtttccttaatacagacaaatttaacccaatttaaacaggattgacatacaggttgtaggtgattttgaacatcaatattcgtgcaatattttatgtaaaaagcctatgaaagtcacagattttttttttaatgccttttcaggtgattaaaaaaattttttcccttggaaaccattttccctagttacttctttggctgattttccacacaaagaactgaaaggcgt

SEQ ID NO: 47770 - DNA, 364 bp, Mus musculus
  source 1..364: mol_type = other DNA
acacaataaagtaaatgtaaaaggttgatcattttggtgtgtgcattttatttcaaaatgcagtaacaaaacaaaccccacagggagactgaagaagcatgctgttttatcagaactcaagcatgatttgtaaacttgtattttctagaggaagcatgctgcctgttgcagaggtataactttaagaaaatgataaaagaacttagcctatcttgtcagaagataggaaaaatgcatgcctgcagacagatctgtattctcactcggggatttggataatcttgtagatacataatagaaacagtcccttttctcttctaggaaagaaaggatactgctttgtaaagggcatgatcatgtacaa

SEQ ID NO: 47771 - DNA, 431 bp, Mus musculus
  source 1..431: mol_type = other DNA
gggctgcagctcacttgagatgcaaataacgggatatctgttaaaagatgagttctttacctaaggaaggagaggatgaatccctaattaagcttccctgacatgtgtgagacacaaattttttatggaaactagatttctgctaactcactagataccttctgtaccaactgagtatttcccttaggaaatgattttcttcttgaagaatggcatgttacctgactctgcttagttatctgtaccagtctattgtggggttaaaagcttacccccccccctaaacatataatatgggcaagattaatgttttattagcctataaacagtgagtgatttctgaaattaatttataggtattcatttatgttagagtttcataaagtattctcaaaagtagacgtctagagtttagctagaagttttgtaac

SEQ ID NO: 47772 - DNA, 650 bp, Mus musculus
  source 1..650: mol_type = other DNA
attaaaataaatcctctaggttacttataaagtctaatagaaaacactgttttgaagaaccaaaacttctcaagcttgaaagaatgtctttcccagctaactctgtttaagtaagcaggcttgctagctgcaactcttaaggagggctccttcagcaaatgaagaaagtttctagcagcagaggcttttattcgatcccacttaaagacaaagtggactataaaattattttgctgagggaattcatttctctttaaaagttattagtagtctttataagtgggaaagaaaccaatgcactctactgcattctcaaagtaaactagatgtgaaatgctgtatgtttccacttctgattcttagtcaagagtcaaagggctccaggtcacagtggactttaatctgaagaattctttggcataaaaatgaaaataaaaacagtaatcagtacatgttgtttcatttagtcttgtttgcctttcatattaagagaaaatttttgaatccacaaaattctgtataatgaaaagaagtacaaaattttaattcaacccaagtgttttccaagcagattgtatttacttaaattgctccagtaattcaaaggacagccctgtctgcacactgagttactgtggatttttaagaaa

SEQ ID NO: 47773 - DNA, 529 bp, Mus musculus
  source 1..529: mol_type = other DNA
gaatataaaatttcattcagtaaaattttttgctactacaaaattttggaatcaaacttctttttaaaagctatttcacaattctatgaactaaaaaaaagggcctgttctgaaagtgagttccaacaaggacaaatctataaaataatttgttttaaaactcactttatatatacatttttattgtattaattatattatgggaacaaaaatccttagttgtcattaaattaagaacaaagtttctgagttcgaggccagcctaaaaaaaaaaaagaacaaagactatgctcagtttggtgttttatttcattcaaaagtaagcatcttaaaggcctgattttaaaaagatttataaactaatattcactaaaagattcgtgggatcccgagtgcagtacactgcagctgccctagtgccgcagtcgagaaggaatgttggcaaagatttccaccacatggaatctgctgttgaattccacatgggatttaaactgttgggccctgaaactttattcagcagtttgaa

SEQ ID NO: 47774 - DNA, 333 bp, Mus musculus
  source 1..333: mol_type = other DNA
taacactgtcctaccaagattgctggaaacgttttccagagctcttcgagaagaggaaggagaggagaataacacgtgccggcaagtgcatttcctccacgttgtaaaactgacagagtgtgagaaaacactccgccgcgtggttcctgatttccggttcaagtaggcggtgacgtaagagctcgctggcccagtggccggcggcgggggtgtctagacgctcgacgcgacatttcgcgggccgtcaggctcgggaacgtcgtccgaggccgtgggcgtggacgcgcgactcccggcagcctctccccccgtgagctcgagagtggtccgttc

SEQ ID NO: 47775 - DNA, 423 bp, Mus musculus
  source 1..423: mol_type = other DNA
tttctgctgattataatcaagtccgagccacgtaccaggctccggacgctgcagcgctgcgacctccgcctccagggcgcgcagttcgcgggtctcggaatccatggctacgaatggcagtctgggcgcctcgggcagccaggagacttcaaggagcgcgcgcgctcctggaacggaccactctcgagctcacggggggagaggctgccgggagtcgcgcgtccacgcccacggcctcggacgacgttcccgagcctgacggcccgcgaaatgtcgcgtcgagcgtctagacacccccgccgccggccactgggccagcgagctcttacgtcaccgcctacttgaaccggaaatcaggaaccacgcggcggagtgttttctcacactctgtcagttttacaacgtggaggaaatgcacttgcc

SEQ ID NO: 47776 - DNA, 411 bp, Mus musculus
  source 1..411: mol_type = other DNA
tccaacactgtgtgtcttgagtttgaaatcaatgcttaaagaaaagccagattttccctttgattctcaactattttctgctgattataatcaagtcatacgagccacgtaccaggctccggacgctgcagcgctgcgacctccgcctccagggcgcgcagttcgcgggtctcggaatccatggctacgaatggcagtctgggcgcctcgggcagccaggagacttcaaggagcgcgcgcgctcctggaacggaccactctcgagctcacggggggagaggctgccgggagtcgcgcgtccacgcccacggcctcggacgacgttcccgagcctgacggcccgcgaaatgtcgcgtcgagcgtctagacacccccgccgccggccactgggccagcgagctcttacgtcac

SEQ ID NO: 47777 - DNA, 341 bp, Mus musculus
  source 1..341: mol_type = other DNA
tctcaccggatccgacaatgacattcaataaagggttcagattattgtcagaccatggttagtatgtagcataaattttagatgccatcacagctgggaatctaactcagttggatggtgcacaaatggccggcttatccacgcgtggaacatttcattccttagctgcttaggagttccggagcgagaccctgagtctaaactaattttatatggcgtcaagatctcaaatatactcacatatatttaataatattcacatatattgacatatatttaagaatactgggacgaaagggtgtctctcgttcataggccaagacttagaaggcaaaaacttt

SEQ ID NO: 47778 - DNA, 407 bp, Mus musculus
  source 1..407: mol_type = other DNA
agctcactttgtcaaaaaaagaaaaagtaggtatcttctaggaggcaaacttacaatgtaactttctggttgacacctgagaaagaatgtttcttataggaaacatatgaaatgacgaataatgtttagatggaacattaatatgatcgtatgcctagctccattttgctactcatagcaggtgtaaagcttgtattggttcacaattgctgagctcacccatggagaaactcatcaaagaacttctagagcagacctcattggcagcctcacaagggaactggactcagaccaactaagtttgtaattgcccagtagaactatttctatacagtaactcttgtggcagcctctctactgccagcaccacacctgtgtgatgtgccatgagccctcctgacacatct

SEQ ID NO: 47779 - DNA, 244 bp, Mus musculus
  source 1..244: mol_type = other DNA
gtcaaaatcagatgagggtcaaggaaccttgacatttttggctaatatatctgacccaaggtcgatgatgctcccgtaatcatttcagaaccacacaggtgtggacctgactggggaaaatgtcttcacctgtttcgctcttctaaggttaaatttatgtgtgcgtggttttaacagcagctataaattgcagtaaatattagaggaagcaatcgatgtaagccagcagctggaaatgaccagc

SEQ ID NO: 47780 - DNA, 342 bp, Mus musculus
  source 1..342: mol_type = other DNA
tacaaaatacctaattttttaaaaagctgaaagaagtatgcaaaaaaaaagaatgcttcctataggaaacatatgaaatgacaaataatgtttagatggaacattaatatgatccagattgatgaaactcaccaaagaacttctagtgagattcctgaggtctgcccagtggactaactaagtttgtaattgcccagtagaactatttctatataggtcggaatttaacccttgttaaagtctatttttgcctgaggggaggggcagtggcagcctctctactgccagcagcatgaggaggccacacctgtgtgatgtgccctgagccctcttgacacatct

SEQ ID NO: 47781 - DNA, 326 bp, Mus musculus
  source 1..326: mol_type = other DNA
atccagtattgatggaattctgactttgtcaaatgtacacaggcagtgacttggaaagtcagggccctaggaatgctaagcctcttgagagtctcggagggctagtttgtcacaaaaccctacaaattagttttgtcatagtgactagatttttaattctgttgtcaggaatctgtttgcaataaaaggactcagtactattgatccaaagagaagtgatttcatgtaggctacatatatttgtctgaatatatgttgtaatttgttcagagtaagtgtaaagattataaaaattaataaactttacctatttaagaatgttactt

SEQ ID NO: 47782 - DNA, 558 bp, Mus musculus
  source 1..558: mol_type = other DNA
cttattacaatgcggcagtgctacagcactcgaggaaccaggtcggtgaccgcctggatccagacactgggagagtcgcacggattctcgtgcgatcgtcttgcagcctcgcgaggagcccggggtcttctagagcagcggctgcagctaggccaaggctaggtgtttgcagcagccaccctcagcaggtgcctgagctttgcaagctgagcctagttcctcagccactgcgcagtgcggcgtacagtcctgcagtccaaagctgctgctccgcaggaaagtgcacctgcgcggcgcacggtcatgtgacctagcctcctgcatctccgcagctagccaggcagctacaagagaggccggctctacgccaggcccgcggctccccagcgtgtacctcgccgctccgggtgcgcgccccaccctccaggtgagcagcgccaggccccgcccccgccgccagggcccgcctcccacccgcgcctgcgcagtgcgtccggcggcgccgggcgccggggcggcgcggccgtcgcagttcggcgggcgcagtgcgcgtgcgcc

SEQ ID NO: 47783 - DNA, 411 bp, Mus musculus
  source 1..411: mol_type = other DNA
agctcactttgtcaaaaaaagaaaaagtaggtatcttctaggaggcaaacttacaatgtaactttctggttgacacctgagaaagaatgtttcttataggaaacatatgaaatgacgaataatgtttagatggaacattaatatgatcgtatgcctagctccattttgctactcatagcaggtgtaaagcttgtattggttcacaattgctgagctcacccatggagaaactcatcaaagaacttctagagcagacctcattggcagcctcacaagggaactggactcagaccaactaagtttgtaattgcccagtagaactatttctatacagtaactcttgtttccggcagcctctctactgccagcaccacacctgtgtgatgtgccatgagccctcctgacacatct

SEQ ID NO: 47784 - DNA, 342 bp, Mus musculus
  source 1..342: mol_type = other DNA
ccttcaccaggcctagtaacaggattgtaaccctagttgtgagcagttgtcctgcacatacatgttggacgttccttaaatagaataggttgttttagggaatgaaggcatttctttcatgttgtggatacacccccagcatgtgcccccaatctgtggatagaggctgggtggcttccagagcaaacagcactgaggcggtatgctcggccagccctgtgcctgaggccctgacattttcattttgggaactctgaaaaatggaaaactgagtgagagcacctcactgagggattttctgaaggtcagataacaacttagtttacccttaaaccatttgta

SEQ ID NO: 47785 - DNA, 243 bp, Mus musculus
  source 1..243: mol_type = other DNA
cctgtgtacagcaaagcttttcaattgccattggctaacgtattgtgaccagaagtttgttcagggcctgcgttcgaggccagcctggtctacaaacttgtcattatttaatctgactgagcagaagtaatggtcactgggggtttgctcagtgagaaaagctttctttacaggttccagagcagcctggactatatagaggcaaggcccgcgccaaggccaagtcgcggtcttcccgggccg

SEQ ID NO: 47786 - DNA, 229 bp, Mus musculus
  source 1..229: mol_type = other DNA
gagggcttgtgcgtctcaccagaaggtagcagggacctggaaccctgtggggtccctgccttcagctccgaaaggtaaagatagtatagttaacactggtcacctcaaggtgagtaacagtattaataagaatccgctcatagatatctacccaagcccagtttgctctggggaccagcccgcgaagctctagtttgggccccgccccggagggcagtggcaaaagttt

SEQ ID NO: 47787 - DNA, 519 bp, Mus musculus
  source 1..519: mol_type = other DNA
cacgcttttgctgggagcagccccgtgcagctggccgctcgctccatcagccaagcgttccaccccaacctcggtctccagggcccgcgctgcgtggctgctgctctgctgccttccctctccggaaaggctgtcctgggactcgggctcctcgtcccgctcgggggaccgcggctcgtgtgctatgcgcggcagtccgcgccagggccggcagcagcagcgcccgggtggatgcggcgagcccacggaggggcatccacagcctgtcggtgagcggcagcggcggcaaggtctcggcggagcccgcggcgagcccctacctggtgtcgggcgaggcgctgcgcaaggcgccggacgatgggcccggcagcctgggccacctgctccacccggcctgcgtggcctgtcgtcggccgcccgggagcgggcaggagcgcggctctcgggcagctgcagcgcgcccagcctggcggccccggacggcggcagcgcgacccccgggtcccgcgccccggccgc

SEQ ID NO: 47788 - DNA, 175 bp, Mus musculus
  source 1..175: mol_type = other DNA
caggatagccagggctacacagagaaactctgcctgggttgttatatgtaacttgctgcacgaaacaggggcagcggagggcaccttaccctctggaacgctccgcagccccaggcgtctcgtgccgctccggcccccagagccccggagcgcacgcgctgcgagcaatccgttg

SEQ ID NO: 47789 - DNA, 345 bp, Mus musculus
  source 1..345: mol_type = other DNA
aatattaagctccaaatgaggatattacagctttattgccagtttacttcctaaataactttggattcacaagtcacaaaaagtctagtggttttgtgtgggatacactagcttgaaaaaaagggctggtgtttaattctaaccaggagcagatgctcctggaagctcaccactgagcaggtctgccggagtctccctcctgcactgcatcagtgcgggcgcccagagcctggcctccccagtcttccacgtgcggctccggaggcccgggacgccgagcacttccggcagggaaggcctccgtcgcgcctcggtgacgtacgtcctggcgccgccgcgcaggaa

SEQ ID NO: 47790 - DNA, 429 bp, Mus musculus
  source 1..429: mol_type = other DNA
cagacttccacatgtgctgtaatgtgaatgtgcccacacatggacatatgcaataaataaagtcttatttacttttttaaacatctgaaaagaataatacgactttccaggctggtcttgaatccactctgcagccacagatgatcttgaattctggatggagcccagggccttttgcatgccaggcaagctttctaactgagcctagtgataagttttctgtatggactctgctctctcagtatgcttagacatggctgtggtggctgagtgtggcgacacacacctgaaagaagctcgtacggactacttagcctatatgtctatgtgaggttgtcagatcttgagctataggcctgatttttttttttttttaaaggagaaggaaagaaaagagaagtgagcaagcaagcgcaccagctgacccag

SEQ ID NO: 47791 - DNA, 315 bp, Mus musculus
  source 1..315: mol_type = other DNA
agtggtaatgacaccccaggagaccttatgaaaggacaagttcagggcatgcattggaaatgtgctaaaatgtcattcttttttaaagcttttttaaatgttttgggtcccaggaatcaagcacctttactcactgagtcatcaaaatgccattttgatgggtacactgtcactgtctttagacacaccagaagagggcatcgatgccattacagatggttgtgagccaccatgtggattctagtttgcgctctgagaaaataagtcagggcggggcagacactgccagcaccttcctgttcttggtggcagttg

SEQ ID NO: 47792 - DNA, 361 bp, Mus musculus
  source 1..361: mol_type = other DNA
catgccctgttaggtcaacccaggcacttagttttaggagacagggtcccttactgaaatctgagtctgacttcggattaagtaaggcaggctggctggccagtacaacaaagcaccactgtctgggtttttttttaatcataggttctggagcaccaacccagaaagattcctagatcataaaggtaagagcccagcatctctggggtcaacgctggtgaccccagagcatggggcacaggggctgaaaggatcaaaaggctccttttgctaatctcctctgttttcaagagaccagacaagagcccctggggtctggaccaggagggagagggggtggggcctgcacgctagccccgcg

SEQ ID NO: 47793 - DNA, 398 bp, Mus musculus
  source 1..398: mol_type = other DNA
ctaagtgacaggctgtgtcgacttgacagaatctagagtcacctggagacttgggctagaccattcctgggtacaggatcctggacctatgagccagagcaaacccagttttccttagcttgtttttgtcacagctacaggaacagaaaccttgcccagtgaccaagtcttattgcgtggtaaacacaggaatccactgtcctttcaacggaatgatttttgattcatttaattttcagaaaattctagtctcttccagaagctttcggtagagggcagctgaagcacagggccaggcgcgcgtgcgggcggtcgttgcactggaggtgcagggctctggacattgcactgggggtgcggtgcacagggcggtgcggggcgcagggcagctgacagcg

SEQ ID NO: 47794 - DNA, 591 bp, Mus musculus
  source 1..591: mol_type = other DNA
gttcccggagtctgaaccccggaacctctggggtttggggcacagtaggtgcgcacccagtggcgggggagcggcacgctgctccgacccccacgcgccgggcaaccccgcgaccccggctcccgacggggctcggcccaccccaccggcggcaggtggacagacgagccgcgtgtgccggcagcaatctgctggtccctgctgcccgcgtcccacagcgatctgctaggggtaggggtgggggatgggagggcttagaccttgcagccgcgaccccgaaagtctgcaaacctttgactttaagtttcggtttcgatgtaacaaccctataaacttcaaactgaaacgtatcagcaaacaacgtactttttttttaaactttttccttttaaggacttacaaaaaaagaaaggcgatgcaggctccagtctgcctggtaacaccctgacaaaagcggcagatttgaggctgggccttctggcacgagccgcaggcctgccgcctcatttgcatcagaaagcgggcgctggccaatgggagtgcagcctcccgccagctggcggcggcgcgccgagcctgtctataaaaggg

SEQ ID NO: 47795 - DNA, 339 bp, Mus musculus
  source 1..339: mol_type = other DNA
ttgtaattcttttataggtagatgttcctgtccagcgcttgagcagcttaaaacctaagtgacaggctgtgtcgacttgacagaatctagagtcacctggagacttgggctagaccattcctgggtacaggatcctggacctatgagccagagcaaacccagttttccttagcttgtttttgtcacagctacaggaacagaaaccttgcccagtgaccaagtcttattgcgtggtaaacacaggaatccactgtcctttcaacggaatgatttttgattcatttaattttcagaaaattctagtctcttccagaagctttcggtagagggcagctgaag

SEQ ID NO: 47796 - DNA, 361 bp, Mus musculus
  source 1..361: mol_type = other DNA
tttttagggcttaaaagcccaagttcaggctgccacgtcaggtgagccccttacatggcatgacatcctggcagatggcaccacatggtgggacctttgataacaattcactgtcaaagtaactaactcagttcactgagacttaacttagtcctctgagatagccataggctggtgcctaaatgtgccacagagagctgtgtcaactcagtcacctatagttttataggaaattaagttttataagaattatcaagaattacagtacatttaaaatgatcattagtaaatcgtcaaaagccaggttgtgtagccgtgacaatcctggtcaagaatcgccaagatcctctttgactatgaa

SEQ ID NO: 47797 - DNA, 438 bp, Mus musculus
  source 1..438: mol_type = other DNA
ctttgggcaaaagccgctgcctggccggttcagcagtgctgacaagctagcttagtgattctgcccggctcagctcaggttcaccgtgctcatcagctgagagctacttgagtacgttaaggatcccaggggtacttcccagcgcggctggcccggctccgttctgggcgctgcctaaccctgctgagccgggcggacgggagaactggggacccgggtgtgccaggaggacgcggccacctgcccaggtaggagccactccgcctcgccgcaccctagcaaagggcctcggccacccccaggcgacagccttggctaaactaggctggaccgcagttttgctccagtgactgcggctgagcgcggacccgccgggctccggcgcgcgggaccagaactcccgcctgcaaacgcgcgcgcccggggcgcggggagtgg

SEQ ID NO: 47798 - DNA, 269 bp, Mus musculus
  source 1..269: mol_type = other DNA
ctctggaacttgatttacagacaacttagagcagcaagtgctaggagacattctatctcttcctttaaaagataacagggaagagaggagggagtcccgacagggtttctctgtctctgtcagaccaggctgggtgtgtgccaccaccgccaggtgggagtccccactgttaaagaccttgtggattttaacaatctgatgatacacaaggggccaaagcgaccgacgcctgtcgtgtgcgtgcgcggctccaagcggggggcggagcc

SEQ ID NO: 47799 - DNA, 385 bp, Mus musculus
  source 1..385: mol_type = other DNA
ggtactcacacatgcatgactgtttgcctaatatgttcctttcaaatatttgaagtgatatttgtctccagtgtgttcttgggatactccaggacccctcgcctgatcctcccaaggggcttggcaggacgcccatggggcttgcaacactgctgcaagaggctccacctttgtgcctagaagtcccggaggcgctggcgggagggcgggtgctgcaggcggctccctggacgcaggggcggacccggctccttcccgctcgctgcccttgagtcactccggcagagggcgccggcgccggcctctctgcccatcggggcgggcgagctggggaccctgcctcctgcgcgcccgcccgcgttccgccccccctgtgctcttcccg

SEQ ID NO: 47800 - DNA, 671 bp, Mus musculus
  source 1..671: mol_type = other DNA
atttccttataaatgccctccgtggcttgctctagcccgagcaccgaaagcgggtaggtttcccagccggggacaccgaggccgcggactctcaggtcctcggagacagccgccacctctccacgtggtcggggacacagaccaaccgggtctagcttggtttcccaaccgtgttacgcaacaacttttgcggcgctgcccgggagaggagcgggacatttcagtagcccggctgccgcgcccctttcccggtctcagaggggaccgtgggcacaaggaggccaaggtccccgccacgcccgtgtcccgggttctattggcaacaggtagcccacggagcgagcgcagcgacccggagggcgcggccggcaaagggtcctgggctcctcttaggcgtgcctcgggttgctccgcggtgcgtcccgttgcgcaacatagcgctcggcctgggtccccacggacagcgggtagcagctgcggccgcggccagagaaggacgcggactgccagtggcgccgcggcggagaggacggggcggggcggggcggggcggtggggagcccgcccctgtcggcgcggccagtggcggcgggccgggggcgggcgcgggcgcggcgattggggcggccgccgcccgtcacggcggggctggcgggcggcgacgtagcgcg

SEQ ID NO: 47801 - DNA, 333 bp, Mus musculus
  source 1..333: mol_type = other DNA
aaaaagtaaaattgctgtgtcaatggcagttctcaggaaatgcaaattggtgtgcagataacatttgttatctaaatgtaaacttttacatatctgtgatttttttttaataattacttaaaaggctatgtttcgttattattattattattattattagttttgtccctgactgtctgtagaccaggctggcctcgaactcagccggaactcaggagaccctccccggcctaatactgggcccggacaaggaccacgagctaattctcctagcacaaagaggaggccccgccccacttccggcagtccctcgcgccgcgcactatttgacac

SEQ ID NO: 47802 - DNA, 256 bp, Mus musculus
  source 1..256: mol_type = other DNA
gatacagacagacacactcaatgggcgcgcgtgtgtgtgagcgcacacacacagaatccaaattcagttcggaatctcattgcctggtctaaccaggtccaaccgagggctggctgtgccaagctcccccatagtgtacttacatatagtaaataaataaatctttaaaaaaaatgggtggtcttctattaggagttgcactgcctctgggcggggccgcgcgtcgtgagcgcgcgtcgtggccgcgctcctgggg

SEQ ID NO: 47803 - DNA, 344 bp, Mus musculus
  source 1..344: mol_type = other DNA
acagtttctaaaacttgtcctgtttggacagagtatgaaatggagatcataccaatgggcgctgggtctgctggtgcacacctacactctcaacaccatcttaaggaatgagttacagctaatgtcttggaacactaactatttctattagtaaagatgctgctattgttttccattatagttacaaagatacactagtttgagctcatagtgggagctttataaatgttccatgccctccgcagatttccaacattctcaggcggccccaagcctctccagggaggccgagtctcccacttcccctcggaggacaggctgggctcccagcgcgcccctgccgg

SEQ ID NO: 47804 - DNA, 225 bp, Mus musculus
  source 1..225: mol_type = other DNA
caaggactgactgagtccatatctggtcccaactcttaaataagtatttcatttaatttttacatcatttctgagcatcactgtccacacagatgttgttctcagaggctagagcgcggaagacctgcctctcaccgtccagattctggcagaaggggacagggaaaagcagaggccctgcccagaggccccggcagagggcgccgggtacctcgcgggtcacgg

SEQ ID NO: 47805 - DNA, 209 bp, Mus musculus
  source 1..209: mol_type = other DNA
agtaggggtccccctgttcccttctcttccctgggcttaggagggaaagcgctgcaattttgcagcagtctttctgcttctagcagagagcagttctggagtgagcgtggacactacagtcataatgtgacagtggactgtctagtccagctgcagcgtgattggagggcgccttaggcatccgcccgcccgcggcagcagcctcggcc

SEQ ID NO: 47806 - DNA, 214 bp, Mus musculus
  source 1..214: mol_type = other DNA
ctagtgcttgccacaagaacttcaggagtgctgtgctaggcactggagtagcagcctagctagggaggcaggtggccagatgagctgccccttggaacagtctacctggcaagatcttccaggattttctcagaaaagctggttcttccaatcaatgtgcacacaggtgggcagagtctcaggccagggagctgcccacgaggaagtgggtgct

SEQ ID NO: 47807 - DNA, 340 bp, Mus musculus
  source 1..340: mol_type = other DNA
cagcctgtgagttccagggcagtcagggatacactgagaagccctgctctgtatagccctggctgtcctggagctcacgttgtagaccaggctggcctcgaactcagaaattaaaggcgtgcgccaccacgcccgcacgatgaggaccttacagtgaaaatctagaaaaaagatattttacatgcaggtaaactggaggatttatcttgactctcttttttgaataagcaaggctaccgagttagaggccagcctggtctagagtgagttccaggacagccagtgagaggcgccagcgcggagcgacgcggcgctttttcggcgcatgtgcagggcgacg

SEQ ID NO: 47808 - DNA, 443 bp, Mus musculus
  source 1..443: mol_type = other DNA
tcagtattgcacatttttaaaatagccatgggccctattttgatttaatctctgatggggatacaattttgctcacagcattggagtatacgggcactctgggacctcatagctgtactagaaactcaacaaacacagtttaaattaatcggcacaacttaagacaatttggtaccatttgtcaaatagatttgatccaataaatgctccttctgccaggtgcaggctccactacactgtgatcggttgagagcggcggcggacaacctctcaacctcagcgtttttcccctctctctccttctctgagggaaagggagcctggctcctccagggttctgtgacactgccctgacccgggcgcgcggctgcccccgagataggcggggctccgagcgggaccggtcctctggaggcggggcggccggcggggtactaaccccg

SEQ ID NO: 47809 - DNA, 324 bp, Mus musculus
  source 1..324: mol_type = other DNA
tgggtcacgacccacgaaggcgccttcatcagaatcagactttgtttctgccacagttggctagcccacctagggtggagtcttccaatctaggtagcagcttcctgcaagaagccaccacctgctaacaggctgcctgagcttgctttcctgataaagcaatgagagtctaaagtgggggatgggtctcccccctttaaatagaccgactgcggtgtccttgggagccagatctgcaagtgcagtaattactgttttaactgacccgtggaattcccttttagagttcaacactcccagcatgccccgcggatcttcgagtca

SEQ ID NO: 47810 - DNA, 238 bp, Mus musculus
  source 1..238: mol_type = other DNA
taagacctgtgcagcgatccgggtgcgcagggcagccgccgtccccagacagcaacaggtcgggtcctgcaggtcccttaaggatgtagcagcacacttacctataggcaccattgggttctcacgggtcttgcgaataaacttttccttaaagccctcctctggactcaccccgccttctgaagcacgcaggcgccattgtagtaagtgaatgtggaggcactaactactaaaacta

SEQ ID NO: 47811 - DNA, 170 bp, Mus musculus
  source 1..170: mol_type = other DNA
gccagcctggtctacaaagtaagttccagcacagccagggctatatgtgtgtccatggccaaccccatctccgcgtccacccgtgcgcgcaaggattcttgggatgtagttttagtagttagtgcctccacattcacttactacaatggcgcctgcgtgcttcagaaggc

SEQ ID NO: 47812 - DNA, 221 bp, Mus musculus
  source 1..221: mol_type = other DNA
tttttaaaactaagaaacaaagccgggcaaggccagcctggtctacagagtgaggacagccaggagctggacactgggacactctctcccgcagttcattgctgaggttggaatagattgggtttaaatgccaaactagactatggtgcgcaacttctgaaggtcagggagtggaagatccatcctggaccaagcgcagccttcgctggcagcgagcagtg

SEQ ID NO: 47813 - DNA, 321 bp, Mus musculus
  source 1..321: mol_type = other DNA
caggaaccaaaaaagatactgtatttttgaaaaaggccagcctcgtcttctaattgcaatgtgcaatgcgagtttggcatacaatctgctgtcacaatacgtatattaatagttgccttactcagtcctgagagaacaaggctctgctgtgcgcgcctggcactcaagtacgcaggaagagccggtgccagcccagtgctgctggcacgctctggagccgaaggtgggcttcgggggctcgaaccgagggcggggcgaccacccagccccgcgggccccgccctcggccgctgacgtcaccgcattcccgccgcgactcct

SEQ ID NO: 47814 - DNA, 385 bp, Mus musculus
  source 1..385: mol_type = other DNA
tggatgaactaataatttagtttcccatcaacgtttttattggacaatattaggctaagaagttgctcttgagttcaagatcttcaagtcttggccaccgcccaaggaatcatacacacttaaagtcaagtttccttgactcagaccaactatcttatctttggtctgtcaaatcccctaataaggcagctatttcgtgaaagcaatcgtttcctgagaaatcttcaagaatatcgtagataatttaaaaaactcgagctcctggaggtacactgaccctccgcgaacgtcgccctctggtggcgagattcggaagggggcggggagggtgcccgcgagttagcgcgcgcagacgcagttgagtcccggcggcggttccttccgg

SEQ ID NO: 47815 - DNA, 407 bp, Mus musculus
  source 1..407: mol_type = other DNA
ccagggctatacagagaaaccctgtctatgctgatacaatattcagttgaaattgataatattgttacaccttgttagtaaataatattgggatgcatccacaaagtaagtgtcacccatctgtagccacagaggtttaacaaatgttgtggactctgtagtagtccagttactacagaccggcctagttgcttatataatcgatgcagacacggggggggggcatcctaaggggacaccgacgtctgccccctctcgtagaccaggctgttctcgatccgccggtcctggaggagtgactcttctgtcgttgagaagcttagagaactaacttccaccccttttcccgggccgcgctaggggcggggtgccgagaaaggcgccagctatgaggtcatcgcaggcct

SEQ ID NO: 47816 - DNA, 646 bp, Mus musculus
  source 1..646: mol_type = other DNA
agaacatcccctttaaagcgctcttgtcaagaggaaaggctttaaaagccttggggcaagccccagggcaaggtctgtaggaatacaacttccggcatgcccggcagcgcggcccgctgggagttgtagcagggtctaccccctcctctggagtctgtggagtatctgtctcaagtgtccttgaaaggccacagagtttattttacaggagaaatagggccggccctcatgccgggtcaaagaggcactgagagcgcgacggctcctacgcgcttcgcccgcgcctctggggtcgcgccaaggggaagtgtccggaagccccgccccaccctccccgggtccgcgatggtacagcccgacgggacctgtgcgcctcagggggaggcttcccccgctccgcggtggtgaggcccgccccgcccattgcgcacatcccgcggggagttcactgagggggcgtgcccggaagccccgcccgagctctccccctgacagcgctggctcggtccggccggcccattgcacgctgtgaggcggggcggaccattcggctggggcgcgtcgtccctgcggtccccggaaggtagtccccccccacgatggtgcggcccgaccagcccatagcgagcactggggatgggggagg

SEQ ID NO: 47817 - DNA, 495 bp, Mus musculus
  source 1..495: mol_type = other DNA
gggggggggcatcctaaggggacaccgacgtctgccccctctcgtagaccaggctgttctcgatccgccggtcctggaggagtgactcttctgtcgttgagaagcttagagaactaacttccaccccttttcccgggccgcgctaggggcggggtgccgagaaaggcgccagctatgaggtcatcgcaggcctgccgggcttgtggtgacgtcatctccgggaagtgtgcgccgagctaagagcggtcctctcacctcggctgcgtgagaggctgcgtgccccacagaggccgcggccctaagaaggtaaccttgacctgttagtgcgtgccacggtccccgtacctgggcgccctggcgacccgctagtcacgtgccgcccgcaggacgcgattggccgacgcgcggcgcggggcggggcctgcggggcggggcctgcggggcggggcgggttgcttgcgcgtcctggcgcgcccccgcgagccgcctcccgcg

SEQ ID NO: 47818 - DNA, 285 bp, Mus musculus
  source 1..285: mol_type = other DNA
ccaggaaggggcgcacggctggtgagctgcaggacctgttcccccgagggaggccaccactgggagtgtgggagcccctccctggctgccctggtgggatcaaaggttctttgagataacatcttattatgtctggtttaaaactggttatagagaggacatatccttaccccttcatgccggcctcggggcttggcctgagggctcaagggcttgatagctgtcaagtctcttcatccaggagaggacagaaggtcctgacatgacctctgactgtcaccacct

SEQ ID NO: 47819 - DNA, 531 bp, Mus musculus
  source 1..531: mol_type = other DNA
tctagattttcttactgttattaaggtaaggtaaacagataatggggcttcagaaagttgcaacccaaaagtgcgcagactcacctaaaagtcaaattttagctctgtgtccctgtctaagattttcatttgcattagtaatctagcaagtggcttcacttccaagatatcacagagttcgcatctgagaagtccaaggagtcccactcctctgcttcagcggttcactcaagtggagcatacccagaccagagagggtgggcggactccccgtcggggaggctgctgcagggaggacgccgagcgcctcccagcccagggccgccactcgccggagcgtgggcagcttcctcgctgaggcagcaggcaaatcgggaagaccggggtttcggtgcggccgccgcccgtgcgcccgcggtgctcccagctgagcaccaggcgggcgcgcggtccccagggccgggcggcgtctgccggccctcgcgcgcccccgcggcgccccctcccggctcccgagtgcacccagcgcgc

SEQ ID NO: 47820 - DNA, 429 bp, Mus musculus
  source 1..429: mol_type = other DNA
cattgttttgagattttttttggaaacaaagtaagctgatcaagagggctcagatcaagattacaggcagtgtcgctactcatctagattttcttactgttattaaggtaaggtaaacagataatggggcttcagaaagttgcaacccaaaagtgcgcagactcacctaaaagtcaaattttagctctgtgtccctgtctaagattttcatttgcattagtaatctagcaagtggcttcacttccaagatatcacagagttcgcatctgagaagtccaaggagtcccactcctctgcttcagcggttcactcaagtggagcatacccagaccagagagggtgggcggactccccgtcggggaggctgctgcagggaggacgccgagcgcctcccagcccagggccgccactcgccggagcgtgggcagc

SEQ ID NO: 47821 - DNA, 202 bp, Mus musculus
  source 1..202: mol_type = other DNA
cagcccagggatggtaccactgtcaattgagaaaggccttagaggcattttctcaagggaagctcctttggtaactccagcttgtgtcaagttacttttgcaaagtccctaaacattagcaaatggttacccttttgttttagagccagttcaaattcaggctttcctgagtggtgatgaacggttaccttctaacaggtaa

SEQ ID NO: 47822 - DNA, 309 bp, Mus musculus
  source 1..309: mol_type = other DNA
ctgagctcacagggtccccatatgctcttgtctgggtcttgagcaggttgcactgcatcctgactgcccgtcagcatggggaagaagtaaccctgtatgattcaagcagccttcaaaaggtgaggtaggtagttcaagatcccacagctactaataggattggaatcgctctgaacttccaaccccggctgcacgtcagaggccctcccctggaggctcgcctgctctggggagatgtcaccctccccgccccctgtcagtcaggcggagggggcggcgcggccaccaggggggagtgctgagctcaga

SEQ ID NO: 47823 - DNA, 298 bp, Mus musculus
  source 1..298: mol_type = other DNA
tgacaggcgtggcatggcacgccagcctgtttgtattcaactacactgtgtgtgaatgcatggctgaatcttagactggagatccactgtaattaacacttggtcaccagctttgccagttggctcatctggggcctctggatagccaaagcctggcccagaggcagggtcttgggggctcagaactgaggctgagtagggcggagctccaggagcccggggctccaagaagaccgagccttgctgatgagggcaccgcactccgggtgtggctgtccgagcgccgtgggcggtgcca

SEQ ID NO: 47824 - DNA, 126 bp, Mus musculus
  source 1..126: mol_type = other DNA
gagacccaagactgtatttcaggaaaacagtctttccaaggaacttgtaacacgaacagcgctcctagcgctgctgagaggtttgtagggaagtgccctttcctgaattagcagatttcggttaag

SEQ ID NO: 47825 - DNA, 582 bp, Mus musculus
  source 1..582: mol_type = other DNA
ccctgtgcacaccgagagagtttgtagctcccaaaaccctcgcccacgtctccagcgccgcgcgcgctcggggcgcaaacaacacgcgctgcgccagctggggccacgctgctacgcttgcccctgaagcccaccaggctgtcttgggcggtgggggcctggcggctcctgcgcgccggctgggccccgggacctctcctgcagcccacggcgcgctgacgatctcggagcgcagcccggaggcaggggtgcaagcagggactgcagcggaacctgcctggggcactccagagtcgagctgctctccgcaggctggcgctgcgccggggtcgccgcagcccggggcccctcccgggccacctgtgcgccgactggcggaccagggtgatgccagatccggaaaacaatccactccgggatccagagtcctgtctctgtccctggagactgagaggggtggtgggaggcctccccgcccactaccccagctcctccctgggggagcctcaggcgttgcccgaagggatccccggtgcagggggtggcccgcgctcgcagcgccgcccggcccctcctcccccg

SEQ ID NO: 47826 - DNA, 538 bp, Mus musculus
  source 1..538: mol_type = other DNA
aagagcagtcagtactcttctctgtatagccctggctgtcctggaactcactttgtagaccaggctggcctcgaactcagaaatctgcctgcctctaatcaaaccttgagttttatttgttaaattttattgtaggaatatttcatattttattcctcaaggaaatggactttctggagcatatatttcaaggaaatatatgttgtagaaatttcagtattattattattattttagtttttttgtaatctctccttagcagagagcaagattcagtatttttgtgttttaggatgcttaaattccgctaagacgatcagacattaattaacattataccatctgagagtttctaactagtcatgtgaacatttaatttgaacgtaattttggattcatgcaaataaattaacccaggaactgtgtgagcatacagcggcccacagggctccgcgcctgcgcgccccgcccctcgccccgcccctccccgcccctgccgcctcgcgccgccgcgcgggctctcctctttctaaagagt

SEQ ID NO: 47827 - DNA, 319 bp, Mus musculus
  source 1..319: mol_type = other DNA
ataattgcaccacatccaacttctctaaccttagtctcccaaattttggaatagcaagtatgagccacccaataagctaagtaaaacatttctagaatcctgagttcgaggccagcctggtcttcagagtgagttccaggacagccagggctacacagagaaactttccacatggctcaccttgagcaaaactgaattcactggactcctaaggcgccagaggaaccaaaacagagcctctgggccccgcctcctctgggccccgccccctcagggccccgccccagcgggactctgcagagcccacgcccaccctgca

SEQ ID NO: 47828 - DNA, 511 bp, Mus musculus
  source 1..511: mol_type = other DNA
accagaggaagtattcttttaaagcattatttattttatgtattccactgtagctgctctcagacacagcagaagaaggcatcggatcccattgatggttgtgagccactgagtttaaggccagcctggtctacaaagtgagtccaggacagccagggctataaacaaaaaaactttttagagtgaaaatttaaacttttaaaaataaaagcacaactttttacaaattaaagtttaaagttttttcctgttctagaactcactctgtagaccaggctggcctcgaaccgagatatattttaaatatcctctgatctctgatgttctgtgatttcacggaaaaccagagcaagttagaccttgcaggttggacgtggggccccgggagactgggcgatccagtcccaacggggagggtaccgggctgacatttgccgggtctcggaccacgcctctcagatcagaagtggtccaggagaggtgggcggggcaggagggggcagccccccgc

SEQ ID NO: 47829 - DNA, 712 bp, Mus musculus
  source 1..712: mol_type = other DNA
gtagcctcggcctcgggtcgaaaccagcggggctgagggcaggtgccagcccgggctgaggccggggctgacgcgggcctgagagcaaggccggcgggccaggcctcagccaggcaccatggtggctccggggccaggggctggcgcggcgccccgaggtaggtgaaagtcatgccacccacgacgcccgcaggccccgacactctggggaggcgcgcgaggccccccaggggagtccgcctcaggccccgcccgggcagctgggccgacccgtaggcccggggccctgagctagcgcccagggggaagggaggggagggggcggcagcagcagctccgctgattgggccgcccgacccggccgctcgctcgcccgacttcacccggtgcgcgcgcaggaaggggtgcgcgcgcagggaggagggcgggtgcgcgcgcacccgggggcctcggtcgctcgcacgcgggccggtgcgcgaggcgctctcctcagcacgcgccgccgccgcgggggcgcgcgcggtgggggtgtgagggaataggccggggcgcaggtcgcgttcgctgccttctcgcccggggagagagacgaggggggggagggggggaggcgagcggctcctctctcggtgtcctccgctccgctcgcgccccggtgtaatgagggtcaccccctccccccagctggcccgggagggggcgcggggcacgg

SEQ ID NO: 47830 - DNA, 395 bp, Mus musculus
  source 1..395: mol_type = other DNA
aggagtctccgggacagtagcttctggtccaggagcctgctcttgactggaatctgtgatctgtgcccgggttcagaattagagtacactgaacctatcctcaggatttctgttggactgcaaaatagtctattcttcgaggacttaactgtggccacagttccgcagataggcgactcgctctacccaacgccacgtacctatagggattcgggtagtcccaggactcggagcacgctctggcccgtcccgacccggacgggctcagcacccgtgcagcatcaggggcccgggggtgggggggacgtggctaggcgcacgcccgccaggctcgcagcttccggcgccggatgcataggatcggccacttccggcgcccgcgtcacgtgaccggg

SEQ ID NO: 47831 - DNA, 440 bp, Mus musculus
  source 1..440: mol_type = other DNA
gcttcgtagcgctcggaacctggaggggtgaaaggagttaataagctcccctcctttttttagacgagtaaatgggtgcaagactctgttctcccttcctcccatgcctgctccgcaggggtgcactcacgttctgatagggccccaccaagaactgctccctgggccgcctcacccacttcagggtccgcgcggcccaggcagagcccaaccaagggcctcgcacctcgcaggcccctggcgcctcggcccggggcgctccgtcctttgcagagccgcggcgcggggacgcggacagcgccctccaccgcgccgcagagccctgcggtgctcacccgcgcgaccgccgctgcgcccgaagctccgctgcgccggggttaccagaggcgggacgcccggtcacgtgacgcgggcgccggaagtggccgatcctatgcatc

SEQ ID NO: 47832 - DNA, 544 bp, Mus musculus
  source 1..544: mol_type = other DNA
gcctcttccgaagtaggtatggctacccctagtggctatccaggagcctccaccggatggctagcagagatgccaccccgccccccaggggctgtgcagtcagaactcagggtgagacagtgtgtttcatgccctggcttgagggcagatacggggcggcccgtaccgtgtcctgcgtccgcgcccccaacacaggcgcgtgcgctttcaaatttgaaaccggcagcttttcccgcccgagtcggggcccccgcggcgggagaaggcggggccgcgcatcaaccaacccagtctccgaggctcgcggcccgcccggaggatgtggccgcgtcccgcgcgcacgtgtagcccaggccggcgcctgctaggaccggcgcgattgcctgtcgcaggagtggggcagcttgcagcgcccggtgtccgggctgcctgacccggcggagggcagcagcccagttcagcctgggcgggaagaggcgggctgggctgggcaggggccagggcggggcgaccgggggcggggcgggccctgtgcttgtggcac

SEQ ID NO: 47833 - DNA, 561 bp, Mus musculus
  source 1..561: mol_type = other DNA
atgcataaatagcacatgtctttaattcccctcctgaaatcaggatttctaaggtaaatttaagctccttttttttttttaaaaaaaaataaaaatagtactggcaactaaactttttcctaagtagattaataggtacaattatctgggctagagaccacagtgttcaactatccggagccagttgtcctgggtccttccacacacacttggtgtgtcaacaagaactgataggaggtcctcaaataactggcctcttttaagtctccagaggcgtggtactagcttgaggtggcctaaaggatttgactccagtgaggctttcccactgtactggaaaggtcacttcaaagtcaccatcttttcagaagcttaggactgagcagggtgctcggcttgcacaagcagaccgccgttggcctgcaagcctaacgtgctgctccctcggccgtggccggctgtcaggcgaccaataggaggctggccagccaataaggctgccatcccgctggcggcgaggcttgtttggagggcttccggccggagaccattagaaaagac

SEQ ID NO: 47834 - DNA, 544 bp, Mus musculus
  source 1..544: mol_type = other DNA
agttccaggatagacagggctatacagagaaaccctgacaaacttttacaatttgttaagtgttacatgtaatctagagatgatttaaagtatattggaaggcatgcataaatagcacatgtctttaattcccctcctgaaatcaggatttctaaggtaaatttaagctccttttttttttttaaaaaaaaataaaaatagtactggcaactaaactttttcctaagtagattaataggtacaattatctgggctagagaccacagtgttcaactatccggagccagttgtcctgggtccttccacacacacttggtgtgtcaacaagaactgataggaggtcctcaaataactggcctcttttaagtctccagaggcgtggtactagcttgaggtggcctaaaggatttgactccagtgaggctttcccactgtactggaaaggtcacttcaaagtcaccatcttttcagaagcttaggactgagcagggtgctcggcttgcacaagcagaccgccgttggcctgcaagcctaacgtgctgct

SEQ ID NO: 47835 - DNA, 484 bp, Mus musculus
  source 1..484: mol_type = other DNA
taagacagttctgcacagagtatggatatacccaatatgtgtgcatacccagcccctggggtgtctgactatacataggcatgcctatcatatgacactatctatcttattttgtttacatttagatatagatacagacatagtatagatccagattgagtttcctgtaactaagtctgacctcaaactgtgccctcgtgacacagcatgcccacatgcatggtcacacaggtgatgtgattacctctttgctcacctggctatcagatgacagcctaggactgcctgagctagggttgctaagcatgcataagccacttggactcggaacacatgccccatgtcgtatgagcatgcacttcagcatgctgacacatccttggagccttcagattgaacactccaggtacctcgctgggcaaaaggaggctcctgctggtaggaagagacattcgctctcttagaccctatagagacacttcct

SEQ ID NO: 47836 - DNA, 338 bp, Mus musculus
  source 1..338: mol_type = other DNA
agcactgcaggttcccaggcccagggtgagggcagaggcagctctctcagcatccacacagcagccccttctccaccgaggagcagcctgtggccagctgggcccagtcctttgagcggctgctgcaagacccacggggtctggcttacttcactgtcctcatgccaggagttcctgaagaaggaattttctggaaagcctgcgaacgtttccagcatggggactagggcctggggcataccccctgacctttccctagctagctcaggaggcgctgagcccacaggcctggcttagtgaggaggtgctggcccagccccggccagatatgttccgag

SEQ ID NO: 47837 - DNA, 188 bp, Mus musculus
  source 1..188: mol_type = other DNA
ctactcgcttagagatgacatcattcagaacttaggatctaagatgcagcctagacatccagatgcatggcaaggtcaccagatgtctgggtctcctgtccattcataagccaagaataggacagtctgaccataggctcccccctagttcattaaggactttgcccttgacccgagggtataaagaa

SEQ ID NO: 47838 - DNA, 349 bp, Mus musculus
  source 1..349: mol_type = other DNA
gggcctgacccaatcggatgagccctgatattgcttttaattcttaaaattaatttatttattctatgtacaatgttttccctcatgcatgcccatgcaccatgtgcatgcctgagcctggatcctttggatctaaactggctttaaagttagagtgagttctgaccaggacctggggggggatctcactttagaggctccagagacttcagcttgaacctcagcgttctgatttacccatgggtcgaaggaaggtcacataagcattctgtaagattctgaaagcaggtttaaacacctacagcgctgttctgctgggtctcccatgaagcccttgctcctcagaccc

SEQ ID NO: 47839 - DNA, 435 bp, Mus musculus
  source 1..435: mol_type = other DNA
accatgtggttagaagagcagtcagtgctcttaaccactgaaaatgtgtctttaaaaaaaaaaaagttaaaatttcaagacttttgagctggtgagaagagcacccgactgctcttccgaaggtccgaacaaccacccgtaatgagatctgatgccctcttctggtgtgtctgaagacagctacagtgtacttacatataataaataaatcttaaaaaaattttttcaagacttttaaattgcagaggcaggctgagttcgaggccagcctggtctacaaacaggacagaaaacaaaaacaaaaaaaatcaagacttttatgtgtttctgtggacatggcaggtgcccaagcaagccagatgcacttattttattttaaatcttgtcagatctctcgccttacgtcacagccccgccctgcgaacttcgggcatg

SEQ ID NO: 47840 - DNA, 386 bp, Mus musculus
  source 1..386: mol_type = other DNA
gtatatatatattttttttcaaaaatgaatgaatatggatcaaaaacatgtagttcacctgtacaatgggtgtgaactcatcctcaacgacttggggtggttgcgctgccttataagggccctctgctagctttggaagcgcgcccttctgaagcagcaaagctggatggtcgacgtggttcccgagaggccccacctccgatttctcggcagaggctcggccctctcggcatcctacgaaggcctagaaattcgaacctaggggccgaatgcaacggggccctccccctctccgcagggagcgagttcccggctccgtgggcgggggcgcggggagcgtccgctcgcccattgactgagccaagtaaacagagggcggcgccggt

SEQ ID NO: 47841 - DNA, 328 bp, Mus musculus
  source 1..328: mol_type = other DNA
acatgggccaggctggctttcctgtggcagctctggctgcctgtcaggcaaacaagttctgtttctgggagacctgccttgcaggcgggctcagtagtagcgagccctacttatgattagatggagcgtctattagagcctcccagtggccctctgaggggatggaaggctgggggagagcagggctcgttcaccttgctccatgcctgaacccagtaggcacttgaactgccaggggcaggctctgtctgggaaaacctgtgtttctctccccatagggatctaaagccagagaatatccttcttggaagctaggcctatcagtgaa

SEQ ID NO: 47842 - DNA, 332 bp, Mus musculus
  source 1..332: mol_type = other DNA
ggcggttgtgtggagtatctttactagagctactgggaaagagcttaaatccagctgttggagaccacccatacctacgtttgaaacgcctggaaccaactgtgacatgagttccaccggggtgctgattccatcgatcagctgctccgctaagcatccggcgtctatggccgcaaagctgccagtgtggccttcatgccgcgtctgcgtgcggcaggtgggtccggagtcccacccaccccttccctcgcagcagccttggcggcgtgagggggggggggctctgttggctgcgcgcgcgcgcacgccaggctcagcacgcgcccgtgcgc

SEQ ID NO: 47843 - DNA, 447 bp, Mus musculus
  source 1..447: mol_type = other DNA
cttcagtgttctccctggaagctctgtgcagccatgtccccatagagaagtctctgaggcccagtcccttctgcactcagagcagaaagttctccctggaatggctttggaggagccctgccttggggaccctacttgggcttccttaggaggggaaaagaaggcatcatttttttttttttttttttttgatacccatctgggaggaagaaaatgaccaggcctggtctgatgaggaactgaatccgggcagggcatgggactggccctgggagcagagcggaagctcagtgtccggtgctggccacgccccggggcaaactgggaagggggggcgggcctccccctgggccgggccggggcggcgctaggaccgagcgagccgagggagtgagccgggcggagccagcgccccccgccccccgccggccggctcccctcccccgg

SEQ ID NO: 47844 - DNA, 405 bp, Mus musculus
  source 1..405: mol_type = other DNA
acagtttaatgagactctgtctcaaaataagcattgacaaaataagaaaccagattctattttcagttcatcatgaaactgaacttcttagtgatagcagcttaatttatgtgggtttaaaaagagcaccggtttctcttccagaagatctgggctgagggcactggaacatccacacacataaaaataatgtgttttgtttttgttttcttttttttaatggctttaaaatatggcattggaacaatacctagtccatgggccatattcaggtgtgacttaagctagctaagggaccaggaatattctgagtgatcccagatacctgcaaggcctggctggccggtcattgtccctttggtttttgggcggggctggctcagactgctagccccgcccagctct

SEQ ID NO: 47845 - DNA, 413 bp, Mus musculus
  source 1..413: mol_type = other DNA
ccacctgaagaggatttcttcaaggatgacaactcccataagaatttatggagatcagcttgcccacccttggctaagaccgaggctaaagcaggggctccttagctatctcgcttctccagttcctagagaatctgaaatctgatgatgctgacaatattgacctctaacagtattgttaccatgccattttcctctacaagagaatacggtcgccagtgggaggcgcaaggggcttgggcgagagcctgaagcggggcacaggctgggcagcgacccgactggcgagggtaagtgcccgatctcaccttccctctccgggtggggcctcccaccgaccccgggatgtccactcgtttggcctggggagggcgtggcctagggctccgcccccttccgcgggctcaaaaggc

SEQ ID NO: 47846 - DNA, 390 bp, Mus musculus
  source 1..390: mol_type = other DNA
ggggcttcactctccagccttggagagcagtcagggaaggcctccaggaggaagcagctacctgtggcagtgcccagaagggcctcatctgaagaactgcacttcagggagttgctgatatcttagcacacgcaaggccctaaagagaaggggccaaggctgtgcactcccctcctcacggtacacagctggctgggaatgggggagagttcggagctcatgactcagggtgtccaccctgtggtcagacactcagatccggctgatccaggtgcatgtgcaagaggaggtccttgccctgcacctcaagctccccataggcaggtatggtctccttggagcagcaccctccccctggccctgcagctgtctctggacagagggaggggg

SEQ ID NO: 47847 - DNA, 424 bp, Mus musculus
  source 1..424: mol_type = other DNA
gcatgcaaccacctgtaattattcttcaagagaggctacttgctatgaatatcacgaaaattgatttgcacttcctttgtgatttcatgctaggtattgtgattatacacaatcccagcactctttgaagccaacctcttaggttaaaaaaaaatcattttatttctcccaagaaggagcagccagcactagctctgtctttcccctgagatctctgcagatgccccaaggaattctgagatgtatatcatttacacacataacatacaaggttaaaaaagaccttgaccattattttacttctgcgagcaccgcttgcagggctgaaactcctggccgccagagggcacaacgctccccgggagcgtgaacagactttaacccagccgcgcgcgcgctggaagaagattgtcccggttcgcga

SEQ ID NO: 47848 - DNA, 423 bp, Mus musculus
  source 1..423: mol_type = other DNA
tcattgaaatgcagccaaatttgaaccttcattagtacctctgatccaggtttttatagattcttgtctataaagaaagacctaggatggttagcataccttacttttattttgttatttttaaagatttatttattttatgtatatgagtacactgtagctgtcttcaggcacaccagaagagggcatcggatcccattacaagtggttgtgagccaccaatgtacactgtagagtgcaggagctttgtcaactagtcaccagatccctgtcctagtgactaacagatattagtaatccgcttttcagggtagaggctggacattgctctgtctactgtgtgaatatgaaaggtaaaattcaatgttacctgctgaaataagacttaagatccaaaacccatacactgtttttttttttttt

SEQ ID NO: 47849 - DNA, 584 bp, Mus musculus
  source 1..584: mol_type = other DNA
aaaacaataagataaatagagcaatttttaaaaattgatttacttcttggtagtcaaagtttcagattttgttctgattgatgttatcaatataaattccacgtgtaactactaaaaagttccagttttggaaacttaaaaaaaaaatacatatatttttttgttccatgtgcctgaatttttctccccctgtgggaagaaaatgggtggagaatattaacaactaaaatgctgagctattaaaacatttctaattttgctttgtgggttaaagacctctctcgcacataccaaaaaaaaaaaaaaacattgccagagtatgtgctttaatcatttctgagtctgggtcctgcagttctgagcacagaacgtggattgcaaaatgggaataattcgtacctgtttccagattagtaactcactcattatttaatggataattaagctcctcttaggacaggatctcgcccggggctggtctcctgcgaagcccagcgaggtggccttaatggcgctggcggcttccgtggcgactgcggcggcgcggactgagtgtgccctctgacctgttggcagcaggcggg

SEQ ID NO: 47850 - DNA, 438 bp, Mus musculus
  source 1..438: mol_type = other DNA
ctaatctcagcaaccacatggtggctctgtacttacatataataactaaatcttaaaaaaaaatgagtagcacaaagtaaaacttaataaatgttaggtacttattagaatattaaattttgcctgaaagaacagacatgaagtctagtaactgcctctcttttcccaggtggggaagaggggaaaaattatcagagcagtgttagtcttccgagatcagctccgaattctgaactgggtaggaatgctgcgatgataccaagatgtaccttatcccagacgttcagtgagaacctagctaggtcccgccatcggttctccagacagcagaaccttataagctgtggctctgaggtgcagccggcccaaccggagggacggactcggcggaccggggggcggggcgggggcggagacgccgcgtaggctgggcaggcc

SEQ ID NO: 47851 - DNA, 346 bp, Mus musculus
  source 1..346: mol_type = other DNA
agccccttttatagagccaggactacctgactgttgccaggtaactgtggggcggagccggtctacctatcaaggtcagagccaggcagggcatgtatctacttagtataaacaacacaatgatagttataaatcttattaatgattaaattaaatgtaagtggcataaaccctacaattaaaagtcaaaaggcatgatctaattgcatgttgcccctaagaggttcattttggaatataaaggagtttgcattgtaaattccatgacaactattatcagtcatcgcggcggaactcgcagtcccggcaggcactgcggtggcctccgctgggctacgtggctcgg

SEQ ID NO: 47852 - DNA, 371 bp, Mus musculus
  source 1..371: mol_type = other DNA
aggcctaattggttttcatgaaaacatccttttcctaggaaggcataggagcaagagggaggcccgtgctttttgtgttaagaactattataatccttagtgcagtttatctctgttctgtagattctaagtcttcacatctcatattgaagagtctttcctcttcagtatgatgctccttgtgtcgaagacacatcactactattagttgtcaggatctggcatacacataagtgattgggagagccgcaggctgcatagggtggtctgcagcgaagaccctttgcaaggtgctgccggcgcagcccgcgccgcgcggcctccagtcggttggtggcgctctggagaagcagccgcttccttccgcccgc

SEQ ID NO: 47853 - DNA, 463 bp, Mus musculus
  source 1..463: mol_type = other DNA
acagttaattttaactgctcaagcttgcacttcccgaaatactaaatctggctagtattgaacgagaactcagaatgaacaagctggttcagactgcaggatcctttgtaatatataataataccgccgaaggcaggcggatttctgagttcgaggccagcctggtctacagagtgagttccaggacagccagggctatacagagaaactctgtcccgagcccaggcccgttgtctgctagagagagagctctttctgcagctccatattgtccagacattttcagtaaaacgctcccggagagcgtcgcacccgcgcttcctggcagagaataaaatggacctgctcctcactggggaacccttgaactgggcttgccctcactgaacatggcggcagagcctggcgcagccgattagcgcatgctcacgcttcagttcccgccccttagagggcgggatta

SEQ ID NO: 47854 - DNA, 462 bp, Mus musculus
  source 1..462: mol_type = other DNA
aggcaggctgtcctggaactcactctgtagaccaggctggcctcaaattgcaaggattttcaacactgaggtaaggctgggagctccaccttacccctgagatgctagctgcaggaaagaagcaagctttactatgatgagtcacccgtgtgaaactcattttatgtatatgagtacactgtacaatcagatccctttacagatggttgtgagccaccataagagcagtctgtgctccgtgagcaaacatcgttttcaaacagctgtgtaaacggcttctggacaactgcagcgggcttcaaacgatgcctgcgtcacggagtgaccctgcacgagccgactccgctcgttggcgggactggagctccgcacagggaccgtccgcttcgcgcgcgcctgcgcactccgttcgcgggccgcgcgaagagtctcgcgatacttaggcgtgcctgcgcctgcgca

SEQ ID NO: 47855 - DNA, 331 bp, Mus musculus
  source 1..331: mol_type = other DNA
agacaggagcccaggccagttctggaattcatgatgtagcccagactggcttggaacctctcctgccagaactcttgaagagcagtcattgctcttaactgctgagcgaagttcaaattttttttttttttttaaaactcttcggaccttcggaagagcagtcgggtgctctaagctagtgcaacatgctgaagtaatacatcagagttctcatggctggctagaggccgaccgcccgactccaagatggcgtctgcagcgtcggccaggagtcaagatggcggcccgcggccacgcctgcgctctgggctctcctccccgtagtctccct

SEQ ID NO: 47856 - DNA, 555 bp, Mus musculus
  source 1..555: mol_type = other DNA
aattgcaaggattttcaacactgaggtaaggctgggagctccaccttacccctgagatgctagctgcaggaaagaagcaagctttactatgatgagtcacccgtgtgaaactcattttatgtatatgagtacactgtacaatcagatccctttacagatggttgtgagccaccataagagcagtctgtgctccgtgagcaaacatcgttttcaaacagctgtgtaaacggcttctggacaactgcagcgggcttcaaacgatgcctgcgtcacggagtgaccctgcacgagccgactccgctcgttggcgggactggagctccgcacagggaccgtccgcttcgcgcgcgcctgcgcactccgttcgcgggccgcgcgaagagtctcgcgatacttaggcgtgcctgcgcctgcgcaggcggcgctcacattccggggctgtggcggcttcttcctcccgcgtccggggccccgcggtgagggctccagggagtcgggcgctggcgtggccttcgccgccgccgccgccggccctctgccgtgactggacagggc

SEQ ID NO: 47857 - DNA, 533 bp, Mus musculus
  source 1..533: mol_type = other DNA
agatctgagttcgatccctgtgttccacacggtgggagaactggcaaattggtaatattaatgtgctaatttagaaaaactaacacgtccaaaatccccagcttctgggaggtggagatggatgttccagagcactgaaccacatggtggctggctcaaaaccatttgtcataagatctgacgccctcttctggtgtgtctgaagatagctacagtgtacttacatataataaataaataaatctttaaaaaaaatgcaacattttactcaaaaggttttaaaatgaattttattgtcagttacatcgcaagaaaaaactccacccgtcctgggtgggtaatgcacttgtgcatgcagcatggtcgagctgcagagaggagcgagctcagcgcggcgttccgggtcgcggcagccgggtctttaagccctgagcacagcagcggtggcccggcgcgcagagggcgctcggtctgcaaagagttcccgcgggcgcggcggccatccccttcgggggccttcggtgcctgcgccg

SEQ ID NO: 47858 - DNA, 424 bp, Mus musculus
  source 1..424: mol_type = other DNA
atatatacacatatatatacacaacacatatatatatacacacatatacacacatatacataccacacacacatatatctgtacacacacacaattgtgtgtggtagccttcatgacatgacgaggtcttcgtcttctggcctctgtgtcaacacagacacaggcagtgaatcctccaactatatatattctatatattctatcatctataacaaaatggattgtcttcatcatatgatttgaaataggccctgtgacaaaagaaagaaaaattcttcaaattatccaatactttaatagaaaaagagagactagcgtgtctgagacaagcccttctaggcaatgcttccgatgctgtagtgaaaatgttgggacattttccaaattttctgtaaggtccttggcacctgaatcaagggaccct

SEQ ID NO: 47859 - DNA, 258 bp, Mus musculus
  source 1..258: mol_type = other DNA
aagcaataaagctttgccgcagaagattctggtttgttgcgtgtgagaacgcgtctaataacacgtgttgttccaagcgtcccccctgctgccctccatctaaggaaggatggtgagaggcagggcagtgtgcgtgctgtgcagagcaactaagacaaaccaggaaaggaattttgttaggcctttgcctgccaaagcgggcacatcatgagggaaggccttcacatctctaaagatctcttctggagcattcctagg

SEQ ID NO: 47860 - DNA, 400 bp, Mus musculus
  source 1..400: mol_type = other DNA
aggctggcaaggcctacctggtggctgccaggcctggtggggctcttggggtctccagtcccactatctcccattagagctcgcaggctgctgtcactcagccggccccgaaggaggggcccgtctgcccctcgaggacgacaccaccgctgggagctgcagcaaccgggaaccggccccccggctctgccactgactgccctggcgctggctcggaggcgccggctcagagcgatcctgctcgcgaaacaagtcacttggggcccccaaggtgtgcaccagccgcccggggctagctggccagatgcgcggggagggcgcggcgcgggcggctcgaggctggattccgcccgcgcccgctccctccaccacccctggcgcagggactgctggaacctgg

SEQ ID NO: 47861 - DNA, 393 bp, Mus musculus
  source 1..393: mol_type = other DNA
ctacagcccagcccagggttgtgagacatcagtcacctggcctaccaggcctctgctgaagcgagggcagaggctggcaaggcctacctggtggctgccaggcctggtggggctcttggggtctccagtcccactatctcccattagagctcgcaggctgctgtcactcagccggccccgaaggaggggcccgtctgcccctcgaggacgacaccaccgctgggagctgcagcaaccgggaaccggccccccggctctgccactgactgccctggcgctggctcggaggcgccggctcagagcgatcctgctcgcgaaacaagtcacttggggcccccaaggtgtgcaccagccgcccggggctagctggccagatgcgcggggagggcgcgg

SEQ ID NO: 47862 - DNA, 396 bp, Mus musculus
  source 1..396: mol_type = other DNA
aactacactcaagtttatgcatggtgtgcagaatgtcccagatatttacttgaaataatgaatgcatatcaactgtttaaatcaaacgtttgcttggtggaggtagctaactgatcaagggagttgagctacggtaacacagctgccttgtatttaaaaagcgggcagaagaagatccctggtcacagcaattgttctaccctttctgaggccggacccctgcagctcccgcgcgcagaccgatgcctgggggcggggggggggggcggagagcaccaaggcctgggtacaaccgaggctggcgtcgttggcgtccgcggcccgaggcaggccggggtcaaggccggggcgccgagtggcgcggggccggacgcgcgaccggcgcggggaatcccg

SEQ ID NO: 47863 - DNA, 428 bp, Mus musculus
  source 1..428: mol_type = other DNA
ttaataatacatacataagtgtttatgtattttaaatacatatagaatatatacaatgaagcccatcttaagatgtcatcattgtttcttcagtgacagagcaccaactgctcttccatggtggctcacagccacccataatgagatttgacaccctcttctggtgtgtctgaagtctgttcttacatacaataataaataaataaataaataaataaataaataaataaataaaaagtacagtatcttaaatgtcattttaagaggtggccttctgcatgcaaagtgccgtctcttctgagactccctagagcctgtcagcagctctctgccctcagaggacagaagaagctgatactctgtggtctctgaggctgaggcccctcctagaggcaccctccttctgcaaaaatacttcaatttcattc

SEQ ID NO: 47864 - DNA, 402 bp, Mus musculus
  source 1..402: mol_type = other DNA
ctattagcttgatattacagagacattattattcttttagcgattatacatgaaatcagagcacgtgtaccattccacctagattggctttaataatacatacataagtgtttatgtattttaaatacatatagaatatatacaatgaagcccatcttaagatgtcatcattgtttcttcagtgacagagcaccaactgctcttccatggtggctcacagccacccataatgagatttgacaccctcttctggtgtgtctgaagtctgttcttacatacaataataaataaataaataaataaataaataaataaataaataaaaagtacagtatcttaaatgtcattttaagaggtggccttctgcatgcaaagtgccgtctcttctgagactccctagag

SEQ ID NO: 47865 - DNA, 548 bp, Mus musculus
  source 1..548: mol_type = other DNA
gacatttctctggactaggcaaacatctctctcctggccagaagctaagtcccttagccagctggcactggggtgagcccctgaggctggcaccgggggtctgcacacccccatattagagtggggtcaagccccagctcaggggacatctatccctcctcaagacgtgtaatactggtcctgtctgtttagatgcgaatagtcaatcagggatgcgccaccccagcgagggacacccgcgcgcccctgggaggagtgtgcctcggcccgccgctaatcgcccccggcccccgccttcgcccgggtttcccggccagagacgccccggcctccctcgcttgatccggctcccggagcaggccgggccaccgattggccggcggtaattacgggcacgctccaggaggggggctgggcgggggcggcctcccgcgagcataaatggcgccgcacggggctgacctgccgcctctcgccattcacccgcgccgcctcgggggcggaggtggccagggagggggcgcccattgttgcgcgccgtacttaag

SEQ ID NO: 47866 - DNA, 377 bp, Mus musculus
  source 1..377: mol_type = other DNA
taagtaccatcgtctgagcatggttggacactatgacaacccaagagagtaaacggaagccgtttaagtggaattacatccaccaccgtctggtgcagttcacaaggtggggcggcctccctcctgttacgatgagcccctaatcccacctggccttgagcttggaccacgagcaacaccgcagggggcgggcctgctggcatctaggatttgagccaagccctgtgtgttctgagaagtgtccacaggaaacgctcccgcctgagcgccgctgggatcgcgatgggtccggggcgggcggcagggcggtctgggagatctcctccccccaccatctcagtgagtcaccgagtttaatgagctcgctctccgagagg

SEQ ID NO: 47867 - DNA, 210 bp, Mus musculus
  source 1..210: mol_type = other DNA
ggcatttgtatgggctctgggaccccaaactcaggtctaattatatttgatattaattcacctgcttcccaccttaatttgtaaaatagttagatttactgcaacaccaaaccttccgttagtaagtgcaggacctgttaaacagggaccggttcctctgggggcgggttgtcagccacccgccctcattcgctgacagcccgagcgcgg

SEQ ID NO: 47868 - DNA, 450 bp, Mus musculus
  source 1..450: mol_type = other DNA
agtttatatatgaaaattctgattcagaaaatgttaattataaataaaaagtatgtctccaacaattgacaaattgttttgtggactttttttttcagaaacagagtgtgtgtttgtatcattattacacaggcaacattccactttttgtttggaagatttaaagaaacaatatagtatatgatacataattttagaagtgctttttcattcaatagtctatttaggatctaactttattaatatgtatatagtctttatttaagctcttatactccattgaatgcctatttcatgggtgttaatatccaccattataagcatttaaaagcacatgtaatttatggaactggcagtgttatctataaatcttacatagatgaaatctaattgactagtcagctctttcctctgcatccagctttatcatttggccggccgaggtctcag

SEQ ID NO: 47869 - DNA, 421 bp, Mus musculus
  source 1..421: mol_type = other DNA
ataaaatcctgaggataattataatcagtacatcacagaagtgtgctgtctggtcttagtgagaaaatggcaacttagtatccactggcaacttagtatccacctcacttggtgtttatttacataaagtgtagtacacatgtatacatggtctgtgaagattccaaggatcctcaagatgctagctcagaggtgtatgtacgaggtagaactaaaggcaagtcttgctttgggaaaacacagaccggctttcatggaaattttgattctcacaaccagaattcctgctttttctgaggaatggtatttcctggcataagacagcctttgtcaagtgactcagactgatttttttttcaatatctcaattggcctcaacttacagagaaaattttcccggtttgaagagctttaaatacag

SEQ ID NO: 47870 - DNA, 530 bp, Mus musculus
  source 1..530: mol_type = other DNA
tcaatttgtaataagaacttcaaattaatctaaaatcaaaagtatttgtcagttgtcattacaatgtgtggcttgatattttgaaacttaaaaaaaaaaaaatccatagctcattgtgcattctttttgagctggcaggctggcagctcacaggtgaccttctgcagtcctggcctgcagctcaggacctgagaggcgatcattgcatcacggtccctcaagcatctgcatgatggtaaaacctggaaactcgaactgttagtttgggtcaagtggtcagttatttaactgaatattcactaagcatactgcttatcccggaccaccaaaggacttctagaggcctaggaacctgcatgtgctaggtgagacctccagctccaacagagcggctggggctcacctctcggtgaaccccgaacttaaacttagcgtttggggttaagaggcagccacttccgggggcgaggctggagcgagactcccgggggcggcgcgggcgtggcgcaggcggggcctggcctgtgatg

SEQ ID NO: 47871 - DNA, 294 bp, Mus musculus
  source 1..294: mol_type = other DNA
agcggccgctgcccggttctcccaagcactgagagctcacccctgggattctcacctcttcacagatctttattgaagccaggtgagggatacaggaagacttactcctcctctacagtgtatcagcagggctgatgcatctggactgcagaggcgagggagtcagcacagaccctctggcttcctgcagtctgctagagagctatcttcgggctctaagcatgaacaccttaagaaactgaaacttgaggaggcgtggtctgggaggcgccggctgcccttcccctccctcca

SEQ ID NO: 47872 - DNA, 391 bp, Mus musculus
  source 1..391: mol_type = other DNA
tttatttaatctcttccagtccaatagttttaaagacctttaaaaataaacacgaaactattttaaaaagctttcccttgctgtccaagctgaccgtttggacctctaagcctccacttgctgaagcctgagagctcaaggcgctcccggcttccagatgtggtgtcctgagaaatggccactcgtcctcagctccgggttcagatcaatgaaaacgtagctgaagatactttttaacgctttagattggctagaaaggtctccagctctccagagcgagaaggcgggtgagcttggctaacccaagtgccacttgctcgctgcggacagcagaagccaggcctcggccactcccgacgcgcatgcgccggccgccgcggccctccgccgc

SEQ ID NO: 47873 - DNA, 669 bp, Mus musculus
  source 1..669: mol_type = other DNA
agttttaaagacctttaaaaataaacacgaaactattttaaaaagctttcccttgctgtccaagctgaccgtttggacctctaagcctccacttgctgaagcctgagagctcaaggcgctcccggcttccagatgtggtgtcctgagaaatggccactcgtcctcagctccgggttcagatcaatgaaaacgtagctgaagatactttttaacgctttagattggctagaaaggtctccagctctccagagcgagaaggcgggtgagcttggctaacccaagtgccacttgctcgctgcggacagcagaagccaggcctcggccactcccgacgcgcatgcgccggccgccgcggccctccgccgccgccccccctccccctcatcatccgggtccccggcgagcgggcgccgagcgcttgtcccggggccgagctgcaagttgcggcgcgtgcacagcgcggcgacggcgtgaggagagcgcgcctgggcggcggtgaggggccccagggcgggcgctcggggcccggcggagggacaagcgccggcggcagcggcccgcgtgaggctggaggcctagaggctccccacgcgggacctgacggcacgggacggggctccgcgcagcgcgggaggccccggtgctaaggaggccccgcgcggccgacga

SEQ ID NO: 47874 - DNA, 342 bp, Mus musculus
  source 1..342: mol_type = other DNA
agagcacgcttgccataagtgaccttaagcgcagtgaacactgagttctcagggcagtgtcaccgaggtcctggcctgaactgcagaatgcattcagcccaggggcaaagtgatcccaggcctggaggagcccttgccactggggtctgaccccaaggctctggcggaaagagaagagagggctgggtcaaggccagctttctccttttaaagggccgactcttggagagagtctcctctctccaccgtagagattctgagacggtcccaagcacttactcgttgagaccggatgggaccgctgagcgccaagtagccgccagggggcgccagaggcctcgg

SEQ ID NO: 47875 - DNA, 421 bp, Mus musculus
  source 1..421: mol_type = other DNA
gtgagcaccatgtagcaaaaattctgttgtctagtattcacaagtaattagagagtagctagaaatagctgtgtcttaataatcataggatgatgctaaattaattgtatttatatttatcttttatgaaaaattgtggcttatctaatttggcacatatattgagatttcaaagtttgtactacaattgtataaggtaaaaaatataagtccttgaattattgtttttcttataaagttcaagataccttggtgtttgaatttcctttcaatatgtgaaaagttacatataaagttaatcattataaagtctcttcacttgtttaaactcattaagactcttcatgttgctttaaataactaaatctgatagaaaagcagagttgttctctccctttcaaagctacgtctggaagagggg

SEQ ID NO: 47876 - DNA, 678 bp, Mus musculus
  source 1..678: mol_type = other DNA
gtcagcctggctcaaggctagcgtccgcaggagctcgctgctgagttcacagggcggagcatcgccagcggctaccgcaggcctggctcgggcctggtctgggaggccgaggccctccatctttgtgccgcccctaggggagccgacgccgggtgcgggccggcccccaacagtcaagtttttaaaaagtccgcgcgggggccacccgggctgatccgttgggaacggcccccgccgaagcgtgcgggcgacagagggttccgcacgggaggcgccgggccagtgctcgagaggagcgcgcccgtcccgcggcagcggaggagcagccgctgattggccggcaggtcacgtccctcaaggggctggcgcgaacgccactgcggagctgggcagccgcgcggtcgccaggaaacgctccacggagacgcgcggagggctctggcgggcggtctcccgggccccgcggccccgcggccccgcgtcgagtgcgagcgcggaggcggaaggagcggcggtcgccgaggagccccaggcccggaccggggtggtggggaaaccgcggagggcggggaggccgcgaccgagagcggcgctgcggcgcggtgggcgggaccaaggcgagcggccaggcgattggccggcgtcccggcgtcgcttgtgacgcaccgcgcggggagg

SEQ ID NO: 47877 - DNA, 300 bp, Mus musculus
  source 1..300: mol_type = other DNA
aggcttgagcaagcagaaatccatgtggattgcagtgtcggggaagagcaacctgtccctgtcctggctgggagtcccttctgagcctgctttgcaggctccctccaggagagtcagtgttctgtccccttgggcagataacagccaatgatgtcttctgagagagagagagagagatctcccggcccactccgtgtccttttcaggacatgatgacctgcaaatgcctgcagatgtcctctggctgcagcgcccagcggtcagcgctggagatgcgggggcgtgtcccgtgacgtcagg

SEQ ID NO: 47878 - DNA, 403 bp, Mus musculus
  source 1..403: mol_type = other DNA
ttcttacatgattaatttgcacttgtaattaaaaaaaccaaggaagcagggtggctcccttggtgctggcctatctgataggaatcagcaaagcaatactcatgtccctgggcattgggtttcagtcagttactataaatatttatttgtagagagttttctcttaactgtaaaaacaatattcacttttgggctatataaaaacaaattgtgaagcttgccaaattgtcttaagatatttttaaactttagagtgtggaaaagctaacttgaaacttcaaaaatgaagaattaaatagttggttaacacagttccttagtaactagtactggttagcaactttatttagctatgaacactaagatgtaaagtcacaatatatactgtgtcttaaaacataaa

SEQ ID NO: 47879 - DNA, 450 bp, Mus musculus
  source 1..450: mol_type = other DNA
ctgctaagaagtgtttatgcaaccacagttaatcatagaagagttcacattgcttaatataaagtgctggactgtattacacgttatctttacgaataaatgacgtgggatccatatgtgaaataacttatgtgtgcctacattatgccgaaaatactttttcaggcggtgcccccacgcagcttggaagacagacaatatgggttgccctatctgaccaaaccggtttgactccagggagggaagccttattaaaataaagtagctcgccgctatttcataaccccgtttgcatttctttcaacgaagaacgggagacgcgaagtgggttaaggagcccgcgcttcgtccgccggctagaaaaggatcgagcgctgccatgcatgagtcggctccttggccaacgcgctacccggcgtgcctcgcgcggccggccgccaggagtcggcg

SEQ ID NO: 47880 - DNA, 555 bp, Mus musculus
  source 1..555: mol_type = other DNA
atctctaacatctgcaggagttacaaagcaaaaaaagccttcatttcttccttcaaacggatcccgatcccccacgtctacacccgcggcggtgactcgcgcgggacatcgccgggcagcccgcacggctgggcggtagcggacgggtttgccggtaagccgcttaactttgcaaaactaaagcggccccggaggtgctcccgcgggaacccaaggccgtcgactggaggtccgcctccgcccccgggcctccccacagcctggcgatcccgccgcgcgccgcccgcggcggcctaagcctcctcccggaaggcctcccaccttcccggctccgcgaccccgaggaccgcggagccgccgcctacgcgagccgtttggaccctgcgcggcccccgtagcgcggctcctccagcggtcccccgcggacctctcctcggcgtcagcgtccgccgcgctgcgaccctcggcaaagaagtcccgcgcgccggccggccacggcgggcgccaggcttgcgggtccgccccgccccgccccgccccgccctccgcgcgccg

SEQ ID NO: 47881 - DNA, 347 bp, Mus musculus
  source 1..347: mol_type = other DNA
acgacactgattaacagttgtgtagactcttagagtatacaacactaatagtgaatgctcatataactctgaacgttgggtaataaagagctctatgagtgagcatggtggctcacgtctgtaacctcagcagtcaggctgatgactgcaaattccaggctagcctgggctacatgtttctcttaaaacttaatccacttaaaaggaccccctttaagtgtctgccagggctacacagagacacggtgtctttcctgaggcgtctaggtttggcataacttggccagccaaaatcggtcagctctttactatctaacttgctgcttgtatatggaagtcttcctgct

SEQ ID NO: 47882 - DNA, 417 bp, Mus musculus
  source 1..417: mol_type = other DNA
cataaccaatgtatcttaagtatgttaaatagagatgactagtcacacagtttataatcaattgaaagtctattccagctggctgggaccacacccaggtaggtattcagagacctaggaggtactttgctttgcagcaagatcttttagctaagataagttagctgacctttcagattctagttaaacctggattttgcactgtcttgctgtgacacaccttgaccgtcagaactgtctggttcagacagttcccttgatttagtctgacagacaaacacaggcatactgtactgttccctcatgcagtcaatgttccagtgactccttgagcggccctccgaggcacctagcctcggggtggcgccgggcagcaaccagagtccccccccccagaggccggccggaagcttcccg

SEQ ID NO: 47883 - DNA, 721 bp, Mus musculus
  source 1..721: mol_type = other DNA
cccttcccctggtggggcagccatggcggggcagtgtgcctgcgagctttctcagggagggtcccagggagcgctgcagcacggacgcgcgggcattccctacgcggcgttcccggggggtctgcatcgcaccggcccaacacggaagtaagccccgggctccctgggagcgggcgccgcttccagccctcccccgccctccccgccgggggagccgttagcacagcgggtttcccgggcgccgcggagggggcgcagagcccgcagcgccggggagtagctgcggaacccgggcggagcaccgaccgacctgctcgcctcgcctcgcaccgcagcgtgatcccagggccgcgcgccgctctccgggcgctcacggggcgaccgtcctcccggcacacgtgagcagcgccgctgaagtctcgcgagaggtctgtcactactcccctccccctcaggcgacagcgctgcagacgccattatcctctacgtcgccgtcgtgctcgtctcccacttcggggtagcgagtccccggagcgggttggcgccccgggatggcggcttgggctatccccatgcccgagttttctcaggcccgcggccttccagcccaaagggagtcgccggcggaaggcggggttctcggcgccgtaattgacgcggccacgggccaatcgcttcgcgctcgcaccaccgccgaagcctgggcagccaatggggcgcg

SEQ ID NO: 47884 - DNA, 531 bp, Mus musculus
  source 1..531: mol_type = other DNA
attcccaaagatgtaagtatttttaatttagagtatttttaattcggggaatttactgaaccttagatcaaatggttcttaaaatacacatatgtaaaatttatttcaggaatttaagactgacgttctaaataaattactataaagttattacattttgtcattgataaaagggagtaaaatttctttcaagtcatcataaacacttacaatcttttcagttgcaaattcgtcatgaatctggagcatcaatcaaaattgatgaacctttagaaggatctgaagatcggatcacagtatttgctgagctttatgttagtgtacacatactaaaacctttaaaaagcttttcttcccaattgatgaaaaaatattctaattaatagtaattttcttctgttttcttactaaaatgaagacattcaatcttgctggaagaagccttaaccaagcaatgtaataatttatacagagcctgtagaaaatgtagaagtagtgattttgttgtttttagataactaaaacgacaac

SEQ ID NO: 47885 - DNA, 719 bp, Mus musculus
  source 1..719: mol_type = other DNA
gccggccactccgctaaacccccggccgcgggggtaaatggatcccgcggccgctgttcccacagcgcgctggtgttaacaggtccgccgagcgagaccgaccgcgcgcgctcgcctcccgcccacgggccgggcctggaagcagcggccagcgaccgtcgccgagcggcgagcctctcctcacccggatccgaggcccgcgtaatggcgactacgtgcgactaggcggagtcgcgcgagacccccctcccccacccagcacgcgggctcgcgagcgcccgtcccccgacaaagccgccgcggccgccccatcggccccgccgcgcagcaccccccaccccggaggtggggtgaggagggaggcccagcgagtccaccggacggcccggcgctccctccacacggggcgcccgcgtcgcgcacgccaaccgcaggggcacgctcggggaaatggcggcggtggggggaggggaacccgggcaacgttccccggcgggccacggccgccccgaacgccaccccggacagccgactacggcgtccgaccccgctcagccagcgcgacccgcccgtcccgctcaccgcgcgagtccgccgttgcctcccggccgcgccgcctccgacggtcggtcactgctagacacgcgccccattggctgcccaggcttcggcggtggtgcgagcgcgaagcgattggcccgtggccgcgtcaattacgg

SEQ ID NO: 47886 - DNA, 601 bp, Mus musculus
  source 1..601: mol_type = other DNA
gatggctcgaccgctctgtaacggagcgatttacaaggtaggacagggtgcgctcgcacacacgcctcgctaactggaggtcacccctacaggctgacatccggacatcagccagagtctgggcgaggcgagcacccgcagtgaccctcccttcccctggtggggcagccatggcggggcagtgtgcctgcgagctttctcagggagggtcccagggagcgctgcagcacggacgcgcgggcattccctacgcggcgttcccggggggtctgcatcgcaccggcccaacacggaagtaagccccgggctccctgggagcgggcgccgcttccagccctcccccgccctccccgccgggggagccgttagcacagcgggtttcccgggcgccgcggagggggcgcagagcccgcagcgccggggagtagctgcggaacccgggcggagcaccgaccgacctgctcgcctcgcctcgcaccgcagcgtgatcccagggccgcgcgccgctctccgggcgctcacggggcgaccgtcctcccggcacacgtgagcagcgccgctgaagtctcgcgagaggtctgtcactactcccctccccctc

SEQ ID NO: 47887 - DNA, 233 bp, Mus musculus
  source 1..233: mol_type = other DNA
cactcaagccatataaaaatgggtagtgggttggataggcttcatgaagaggatcattctagttcttcactaatgagaagctacatgaccatatggttcatttaaaatactaagaagtataagctctgcaggccagacctgagcatgcatactgtatcttccacatgtctggcgtagatgcagcaacaaaacggcggttggtgggcgtgctcaaaaagaggcctcaccccgcc

SEQ ID NO: 47888 - DNA, 302 bp, Mus musculus
  source 1..302: mol_type = other DNA
ggctgcatcctgccaggttaagggaacccacagcgcggccggcgcgctcccttcccacgcagggctctctctgtgtccttggttactaacgtacagcgctatatatttccccttcctaagagcatttttttcagagcctaaccaaacagggcttccatttaaaaaaggctgcattgcacacccgcacagctaccccgccaaggtgtgtgcgtgcgcgcgagtgtgaactcccacatgctgctgtctgcgcctggccgctggcaccacgcgcgcgccacttcgccagcagtagcagaggcggc

SEQ ID NO: 47889 - DNA, 519 bp, Mus musculus
  source 1..519: mol_type = other DNA
gggcgggagtggggcagtaattactcctcccttcctcttcggggtttttccacaaaagacacggctcagtgagtagacacttggtctgatctcaccttgctcccaggacgcgtgatggaaggagaaaatcagctgtaacccacacacatacacaataaggtgtgtgtgtgtgtgtacgcgcgcgcgcacgcacgtgtatgtgtctgtgtctcctggacaaagatgtcttagctttggggttctgtgccttgccacagcagcaaaggtcggccgaggattatatttctatccctatgacatctatgtgaaaatcttgctagattgataggctgtgcgaagaggtagcaatgtgcacacagcgcggcggttgcgcatctggagctgcagtgcgccggtagcgcagttcctaatgcggtggtagcaatggcccgaggtaccggagcgtgctgggtttcttctccccacgcgggggcaccagagccctcgaaagtgtcaggcactgcggcgcatctaccagat

SEQ ID NO: 47890 - DNA, 512 bp, Mus musculus
  source 1..512: mol_type = other DNA
tcctaagagcatttttttcagagcctaaccaaacagggcttccatttaaaaaaggctgcattgcacacccgcacagctaccccgccaaggtgtgtgcgtgcgcgcgagtgtgaactcccacatgctgctgtctgcgcctggccgctggcaccacgcgcgcgccacttcgccagcagtagcagaggcggcggcggcggcggccgccggttagagcccagtcgctgcttcagctgctgttgctgcttctgcagcgctctgctccctgcgcttgctacgggaggccggggaagccgcgcggacagtcctcggtggcctgggccggcactgtcctgctaccgcagttgctccccaggtgggatgtgccgcgccacctgcccacctcccctctccccccgcgcccagcggccggggaggattctgcagcatcattggggccccagcgctgccgcagcctctttggagggtccttggcttggcctatgccatggaatctgctgcctcggcctcaggct

SEQ ID NO: 47891 - DNA, 443 bp, Mus musculus
  source 1..443: mol_type = other DNA
gaaaaccaacatttataaaatggcagtcttttgttgaatacgttttttgaattacctccacaaacccataaacagggagcatggtcgatgctccttaaaaaggcaaatgatgtctttattaacaatgtatctcagagtatttaaacacagtccaaggttttccataacatcgttttgaaatgaatgggcatgacattttgttcgcagtaccatcagataatctcattttcagggtgtcgatctgctagcgggctaacacgttagggcgcgcaccgccggttgcccacgccagagtggagtcctttttccctccaggcgtgccgcccccgccggcgggcacgcgccccgcgggccccccccccccccgacgtcccgaagcgcccttcccccacgcgcacgcgccctaccgggcgcacgcgagccggccctcggagccgtgagtt

SEQ ID NO: 47892 - DNA, 459 bp, Mus musculus
  source 1..459: mol_type = other DNA
atacctatttacattcagtctctacctggtagaagctatggctggcatacccggcccccttactccagcacaggggctgggctgcactgccccccagctgccttttaaatatttttattttttcattaattaaaggacctgctttatgtcaggattattaagataaaactaaaacatctgagacgtgctagcaagctcgtttcctttacaaagtgcttgcgcgctgaatgcaagacagagtttcccaggaagcactccaggctccgcctctctctgggttccgcccacggccgggtctcggccggaggggaggagtctcgcgatgtgctataatcccgcgagaagagaggatgcgcgcctacccggatgcggcggcctagcggagtcccgaaagtcgggagccgggagcgcgcgcccagggcgtacgcatgcgtgcacgcggccggcggggcggggctg

SEQ ID NO: 47893 - DNA, 333 bp, Mus musculus
  source 1..333: mol_type = other DNA
accatcatggagctgtagatcttacatcttatccacaaccaccttgggtttgtgaaacctcaaagtccttcttaagcagaaacaaccacaagttgtctcttccttattgtttattcaagaaatggtttccttacctagaacaccagtgttcagggtcagaatttaggaccgtgcatggcaataaccaatgattggtagaccagcctgttccatacagcgagctccagacctgcctgggttttatagaggctgtccggcaggggtcaccattggggcggcgccgaggggccggggccagggctgcggctccgccggaagtgcccgcccgcccgc

SEQ ID NO: 47894 - DNA, 368 bp, Mus musculus
  source 1..368: mol_type = other DNA
aaagcatcaattcttctttaaagcaggtgtagatgaggatgcgcagcaacctccgggttatttaaccctactctgactggtcacataatcaaaagccttaatgcaattaaatttttactaactgcagaaaaaaaaatacacggtatacagttatatcctgaccaaaaatatatgctctaacatgatttagtatttgtatcagttttatgacttaactgtgttgctatgactaaaagacactcaagctcggacatttacttctagatattcgagaagataaataaatataatattctgcagatagcgcatatgttgcgcttgggggtgggggaagggctggagacacaccctcctctccaccctcatga

SEQ ID NO: 47895 - DNA, 297 bp, Mus musculus
  source 1..297: mol_type = other DNA
atgttgtttataagacttttggtcatggtactttatcagaacaagatcctctatgaacttagtcctgcatccaggtccagaacactgggcctggctcacttcaccaacagccggtaaatgatgtctgtggcagacttctgcactctgtcctctgcagacacttgtcatgcaggccagtggttccctgggtgaggagtgtaatgtctcagtctcacttttgcaattaaatgctatagaagtgctttaacagtcacttctgtgacctgaaggatttccaaatgtcacaatgaacagtga

SEQ ID NO: 47896 - DNA, 182 bp, Mus musculus
  source 1..182: mol_type = other DNA
atctgcccgatctaggcacatagcttataaatataactggattgtaagcacaggcatgtgcacatatcatttggccaattggggataatttgtgaaaagactatcctgggacagtaaatgtcacggcaaagtatgggggtgggggaagggctggagacacaccctcctccccaccctcatga

SEQ ID NO: 47897 - DNA, 215 bp, Mus musculus
  source 1..215: mol_type = other DNA
atttgcctaccaaaatagatatacaatgtatccgtttgtataccttgcttatgggttaagactgcagctaggtggactgctatctgatcatattcaaaagaaggcttgaaattttcactatgtatatcccgaatttacacaaaagttggtcattgggcatttgtgaattgtggggcggggcggggactgagggcttagcctcctccccgccctca

SEQ ID NO: 47898 - DNA, 48 bp, Mus musculus
  source 1..48: mol_type = other DNA
aagactaggcgacaccagtggtggcaccaggcactattgtgacactag

SEQ ID NO: 47899 - DNA, 589 bp, Mus musculus
  source 1..589: mol_type = other DNA
actaaaaatagagttgaaaacatggtgtgcccactctttgtaaagctatgaagaaagggtcagaacattttcttagctcctgggcaggtggcagaatgtacaatgtctgtcttactctgtcagtgttccagcatggcaaagtccccatttcggacggggaaactgccccttctagtcagaccagtgagatcgcactggaaaagaaaacacttgttctttccgtctagggggcgatcagggggcacggggccagctgctgctccgagataaaggagctcccgttcttacgtcatcacgggccgcgtgcacggggcccgggatcgggactcaagaaccgatgctaacgtagcgcccagggcgctcgctctcagaggctcggatagagccaccatgcccgtgcttccatgcgaggctggtagctacgtacgttgtacgccatacggaaggagccatcccacttccgctagcgcagtgaccgcgaagcccgcaaggtcacaggtcacctatcggcccggcccgtcactcacccggactgtccaatggtggagcgggacgggcgacgggaggcggggcctgtggcgcctgcgca

SEQ ID NO: 47900 - DNA, 575 bp, Mus musculus
  source 1..575: mol_type = other DNA
ggaggattctactctattctcagtaagatgagcatagtttgcacaagcggattccgcggtggcgtctggaccgaatgaatcccggtctgcgttccctgcctttctccgggaacgccgtgacctcggcggcaaactgccgtcctccgccccggccgcccggtggcagcgcacacagcccgtccgccccatcgagctccgcgcgcggcccgccgggagaccctagtccgcgtccaggctcgctctgcaccccgggccgccgccgccaccacctccctgcggacgccgaggtgactcaccagtgtgagggccgcccgcgtgggctgcacggtggcgcggaccaacgacgccgacatgtccacgtcgcggcacccgcagcctccggctggagcgtggggactcaacttctctccatggacacggcgggtttgacgccaagctcctgcgcaggcgccacaggccccgcctcccgtcgcccgtcccgctccaccattggacagtccgggtgagtgacgggccgggccgataggtgacctgtgaccttgcgggcttcgcggtcactgcgctagcggaagtgg

SEQ ID NO: 47901 - DNA, 304 bp, Mus musculus
  source 1..304: mol_type = other DNA
gtgtgtgtgtgtgtgtgagagagagagagagaggagagagagagaacccgtgtgtgcccgcgcgcgcaatctgtgtctaagtttttaaagtcttacaatgaattctcaaaaaagtgactttcgatggctgagccggatgcaggcagctggccctaagccctgcccgctggctctgtgcgcgagctggggttcggtatcccagcctcctgaagacaagcctggagcgcgcggggccagggctcggcgagccggatgcataatgagggggcgccgcggcaccacacgggggctcccggcccacttt

SEQ ID NO: 47902 - DNA, 548 bp, Mus musculus
  source 1..548: mol_type = other DNA
acaagttggttgtagaatatcaaccttcaatttacagttttaaagacagtttcttggaatagcaaaggtatgcattcttcactttaagactgttagaacccaatggatttaaatttatactttgtagaggtagaaatgaaaactgccttattttttctgaggctttcaaggcataattagaaaaaaaaaaagcaactctgtgttgtttgctaagtttttgtttttctggtctgtagaccaggctggcctcggttcttaaagaaaaaaaaaagttgaatctctttctacccccaggtcgagcttaatccagaggtttaggccgctgaacttccttcaaggtcgttcacaagtgaaacttttgggcgtcgggggaacccgatcgcaggtagctagggagcaaccccggacctctgcgcccgcacccgcggcgcgcccccggcgctgggaggaacctgggcggcgcgcgcttccggtgcgcgcttccggccagccgcggagcgcggggcggggacaccgcagtcttccaatcgcgcacaatgagacggcgc

SEQ ID NO: 47903 - DNA, 471 bp, Mus musculus
  source 1..471: mol_type = other DNA
ttgaaaatagtggacccagagtgtctgcgcagactggccagtcctcgcgagtgtaactattttaataaagttttatttaacccgataggtccaaagcaccatcattttgtaatataaagacacacatacggcgattttcgttctttttttttttacacagtcttaaacagtgtctggtgtgtattgaaagcttaatacagctcaagctggactcgctgtgtttcagttgagcaaccacagtactgacagccttctcagacagctcaaaacaagcggcgggagacgccccctctgatgaggctcctctctcggtttttgttgtcaacacagaagaacagagcgacctccttgggttcacactctgagaggacgaaagcctccggcttcttcgaagcgggcggcagagggcagccgggcgccgagtcacaggtggggcgcgcgctcggtgcgggcgagggggtgcgcgcggcg

SEQ ID NO: 47904 - DNA, 642 bp, Mus musculus
  source 1..642: mol_type = other DNA
gcgagtgtaactattttaataaagttttatttaacccgataggtccaaagcaccatcattttgtaatataaagacacacatacggcgattttcgttctttttttttttacacagtcttaaacagtgtctggtgtgtattgaaagcttaatacagctcaagctggactcgctgtgtttcagttgagcaaccacagtactgacagccttctcagacagctcaaaacaagcggcgggagacgccccctctgatgaggctcctctctcggtttttgttgtcaacacagaagaacagagcgacctccttgggttcacactctgagaggacgaaagcctccggcttcttcgaagcgggcggcagagggcagccgggcgccgagtcacaggtggggcgcgcgctcggtgcgggcgagggggtgcgcgcggcggggcgggagcgcggaccgggaggagccgcgagcggaggaggtggtggctgcgtccccgcggggccgagctgcgcccgacgcaaggagcggaggccgctcggagctgccggggacctggacccgccgcggggctcagggcgcacgaagcgacagctgcgggaccgggtgagtggccgccgcagggcggccggggcgccgggcgggggaacaggtggcg

SEQ ID NO: 47905 - DNA, 377 bp, Mus musculus
  source 1..377: mol_type = other DNA
tgtcttaaattctgatattaagactcatgaaggcaagttttctagaattaaacttctgaatgatttttttaagtttattgcacactatgactgtcttcagacatactaggagcagttaactgttaactgctgaaatgaaagccatttgtcaaatgtctgtcacttttctagatgactcatatttcatgacttatttgataaagcaagggggagatgatcttctgttaagactcttagacatctatctgtgtcctacctaacactgaagaatgaaaccactttctctaaaggaaaagtgctaaaattaaacagagaattatctgtaaacatttttttttcttgataaaaattgtcacattgcctgtgaatgtcaaggt

SEQ ID NO: 47906 - DNA, 426 bp, Mus musculus
  source 1..426: mol_type = other DNA
agcatatgcatttttttagaaaagtattatctatccatccaattctttctgtaatacacattcaataatcttcaaatctcaattatatgacagacaaggaggaaaatggccatgcatctactgatttaccttttatatgttatagcaaaatggaaacaaacttctgatcacatgtagaaatttgttctgctttttaatcataggcccaactatgcttaaccctgcaggccatagagctttgtatgcatcaggcataacactgtgaattcctgagttgagacactgacattccaggtatgtctgtcttgggctgcgtttctaacaagacagacacagacaggatgctctctctacagatgcagaatctgatgtaggactgtgagacactcattgtcagagaagtctcatgcttcctgtatgactcag

SEQ ID NO: 47907 - DNA, 280 bp, Mus musculus
  source 1..280: mol_type = other DNA
atcagttggcatatgctatccgtttggtagctcagtatctgagagatctcaggggtcaaacaacttttatttaaacagtgtattccctaaaattttagttaaagacagttgggagctccaagtggggaactaaattctgagatctacctggatccaaaccagatatcagagaaggacattagacttgaatatgctgactcatactgctccagggtgtttgacagcattggggtaagaacacaaccaatcataaaagcattagtacttatgggtggtgctt

SEQ ID NO: 47908 - DNA, 257 bp, Mus musculus
  source 1..257: mol_type = other DNA
tgtctgagagatctcagaagcaacttttatttaactttgtttatgttctcaaagaggcaaaacaattaaattcaggtcttaagatcagtaagtgctctatgtgagacccacctggataaactcagacagtggggaagtatcatgaggtctgtatttcaagagacattaggcttgaatatgctgattcacactgctccaggtgtctggggcccaatgacacaaccaatcataaaaacattagtacttatgggtggtgc

SEQ ID NO: 47909 - DNA, 418 bp, Mus musculus
  source 1..418: mol_type = other DNA
tcagaggaaaatggccatacatctactgatttaccctttcatatgttatatcaaaatggaaacaaacttctgatcacatgtagaaatttgtattgtattttctcagccaaagacactgcagtcttttctgactcctgcaggccacatatgcttcaggcatcttttgttctgagctgagacactgagtgataagtgtgtcagtcttaggctgtattttaagcaagacagacaccgagatgctctatctacagatgcagaatctgaagtactgctgtgagacactgtagcttgttctctaacaattgttatctataaaacaccagacagtgagtcttggcattctcagaaaagtcgcatccttgcataactcactagcgaagctggcttgtgacgtctgctctgtgggccaggcagaggc

SEQ ID NO: 47910 - DNA, 437 bp, Mus musculus
  source 1..437: mol_type = other DNA
gtaagtcattattataggataatatacttcttaatggtactttttaatactgctgcaatggaaactatgtttctttcagactcataagattactgcccaaagcttccttgtaaaggaaattcttctaaatgtctctccgtggttacaaaactatatgtgggcccctaaggacaccaaaatgtgtcctagacacttccagttgtgtgttaccacaatgaagaattgtagatgaaatggtaattctagatggcagctcaatttaatctccagagtttcatgagatccctaatagcacactcattcatagttcctattatggttcagtagtcactgtctcttaaaggatctcctttgacaaggtcaacatttagctcagggtcaaccttccagcgtcaagctcaaccttctatcgtcaggatgaaagcctggaggcagtc

SEQ ID NO: 47911 - DNA, 297 bp, Mus musculus
  source 1..297: mol_type = other DNA
aaagtatggatacttcgtccctccttagaatggtccagccccatctggggatccatcccataatcagtgatcaaacactgacaatattgcatattccagcaagaatttgctgaaaggactctgatagggctatgccagtgcctggcaaatacagaagtggctcacagtcatctattatgtaacagaagatggatttgaaatgtaaatgaagaaaatatcatctagtatattgtgatccgaggtagcctacagctatgtctgaggggcgggtccaaccctacagatacttcagattta

SEQ ID NO: 47912 - DNA, 385 bp, Mus musculus
  source 1..385: mol_type = other DNA
agaaaaatgtgctagctgttattttagataatttatctcttaatttcaatactggtgaaatataacccatcaggatttgtattggactgcatacgattaatatttagtgttcggagatatctcaaagagtaaatcctttcaaatatctcctggtactgcaaaacaatgttgtatctcaaaactgtaaatattagaacttccagttgtaagcctctattgttttagagtttagctgaaagaaggaaacagagtgtagggtatctcttacaaagtctactgtataggctgtctaattttctcagacaaggttaacaaaataatagatacagtctgagattatatctcagaaagagcctgaggtaggagtgcctgaaggcttaatcca

SEQ ID NO: 47913 - DNA, 270 bp, Mus musculus
  source 1..270: mol_type = other DNA
ttatttttttattgagataccttgaagaggaaaacaaatgttaaatatagaacttccgttgtgtgtaccacaattaagaatgatacataagtggctgttctcaaatactatttacaactttgagtatcattgtctcctagagatttctgcaagaggctgctaactaaacacaaaatagaatgtattaactaagcccatgtaaggttcagtaaccaaaaccttccattttaaactgtgagaattagattatatatctaaaaatgaatttgg

SEQ ID NO: 47914 - DNA, 419 bp, Mus musculus
  source 1..419: mol_type = other DNA
tactgaggactaacttatttcaataatggtacagtggaaattacctctatcatggctaccatagcttgaagacagggattacaagatcattgtgtccacagttttctgaaaggagatgaaatctttcctaagatatacttagtggtgttcacataccaatgatgatgtctcaaaagccattgtaatttttacttaaaatggtaatattggaaatttcagataatatatgtgccattgaatcaagtctgatcgaggttagtaatggctactcaacttaacctcaatatgagacagttaggaacactaattgtgttcctctgtgacaccagaaagaatccaatatacctatatattaagcatgaaatacaagtgtagaatatgctgactcagtcattataaagtaaagaaagcagatccat

SEQ ID NO: 47915 - DNA, 457 bp, Mus musculus
  source 1..457: mol_type = other DNA
catgagatccatattctcacaggatccctctgcagctgtggactagtcatgaaatactagaatagaacatcctaatcaaaataactggttgtattggatagttttatgtcaacttgacatcaactaagaaaatttatctataagattgggctatggccctgtagagcattttcttaattagtaacatattgggggagggaatcccattatgtaccatgatgagcaagccaaaaatcagcacttcttcagataagcagagcaaaccctttcctcaacactaagacattgttagactaaaattccatacagctttactaggaaagcatttttcttaacctgttacaatccacagggtcagcttcaagctatctattgagactgcccacactcaacccttcaggatagatgggatcaaatctcattcctggttcctggcctgaaactgtatttaaagctc

SEQ ID NO: 47916 - DNA, 465 bp, Mus musculus
  source 1..465: mol_type = other DNA
caatggtggatccatcaggattcacaactggaagatttagatttaaaagcttataccacaaagtccttgggggtgtggatctgagtcagagattctccatgagataaaaactggtcaggcatttcccaccagtgcttgactgagctggcataaacacaaatgattgagactcgtttttttgtttctccatttaaattgaagtaactccgagaactaggaaattcactttgttaagcatgaatttccaatatagattcctatcaaagtcatgtctggaaaaagtcactcccaggtgtgtttttctatgttgatttatcaggaatgtggtattggtttataaagaaaaccattttttctttgagccactcatcaagcaaaatgtcacatatgaagtgattaggtctgaagcctgaaggctaatcattgactagccagagacttgcaatttaaaacctttataaagag

SEQ ID NO: 47917 - DNA, 179 bp, Mus musculus
  source 1..179: mol_type = other DNA
ccatttaatgtgggaaaatttttaaatataaaactactgttttaaaacctttactaatatagatatgttttttttggctaacaacagtgcctaaatgagaggagcaaacatcatattttatgtcctaaaaatctcttgctccaagttgaataatgggaagaagaaattcctgctgagtt

SEQ ID NO: 47918 - DNA, 410 bp, Mus musculus
  source 1..410: mol_type = other DNA
atccatctaataaagcttacacaattgtggatctctgagtcagagattctccatgagataaaaactgcaggcatttcccaccagtgcttgtctgagaagaacttctccattttaattgaagtaaagaaacaatgaaattcaccctaaagaattgagggcaagaaaattcactcccaggtgtgtgttctcctaggatctcatccaagttgttgatttataatgaaatgaggtattggtttatgaagaaaacaatttttctttgagccactcatcaagcaaaatgtcacatatgaagtgattgacaggcactcctttgggacaagtaccatatgatagagttagagcctgtaggtctgaagcctgaagcctactgactagtcagagacttgcaatttaaaggctttataaag

SEQ ID NO: 47919 - DNA, 122 bp, Mus musculus
  source 1..122: mol_type = other DNA
ctcttagagctaggctggcctcgacagtatcttctacacatgagattctcttttctatatttttatcctccttaaagaaatcgattatcttcatgagataggagatgaagctcacctacatt

SEQ ID NO: 47920 - DNA, 277 bp, Mus musculus
  source 1..277: mol_type = other DNA
taacatgggaaaacccttttttaatctggaggttttggttgacaagaaaaaaaaaattataaggaactactgttttcttcggaaaacctttactaatacagatatgttttttgaagatgtgctgctaacaacaggccatagtgattggaatcgtcagtgtaaaatgagagaagcaaacatcacattttatgtcctgaaaatctctctttaaacctatagtttattctgctccaagttgaataatgtactagaagaaattcctgctgagtcttgcaga

SEQ ID NO: 47921 - DNA, 263 bp, Mus musculus
  source 1..263: mol_type = other DNA
gggtttttattattttcaccatttaacatgggaaaacccttctctggaggttttggttaacaagaaattctgctgatataaaggataggaactactgttttcttcgaaaacctttactaatacagatatgttttgtaaaatgagaggagcaaacatcatattttatgtcctaaaaatctctcttaaattatccttgcaacctatagtttattcggctccaagttgaatactgtactatgcaagaagaaattcctgctgagttc

SEQ ID NO: 47922 - DNA, 299 bp, Mus musculus
  source 1..299: mol_type = other DNA
atttctagcattaaggctccatctttggaaaaaataaataaaggcactactgtatttgcatacttaaagatatccatctggaaaacctttactaatacagatatgttttttcagtgctggctaacaatagtgctccatagtgattggcgctagctgcgattttcctgatgtcagtgtaaaatgagagaagcaaacatcacattttatgtcctaaaaatctctctttaacctatagttcattctgctccaagttgaataatgtaaagaagaaattcctgctgagttctggatgccttcag

SEQ ID NO: 47923 - DNA, 324 bp, Mus musculus
  source 1..324: mol_type = other DNA
attggacatatctgcaaaggagtcccctctacttaaaagggtatgaatttgtatatgaatttatgtgattttatcaagagaagtacaaggcaatgactcctccttagagaactttcataggaaactttttagaagaacttggaaataaagattaaagacatgtttaaaagtgtcccgcctttcttcctgtgacttcaactagcaggatggaagttagagcagcccagttttcccctgtctttttaagaggaggctctaaatacccttgcctcagaggaactcgggcaggtcagcttcctccgctgcctgaagaggaaccaagaa

SEQ ID NO: 47924 - DNA, 359 bp, Mus musculus
  source 1..359: mol_type = other DNA
agatgggaaaacccttctttaatctggaggtttttattgagaagaaaaaaattaatctaggccagaacttctgctgtgagcacatatatatatatatatatatatatgtaaataaaggatattgaagggaaaacctttactaatacagatatgtttggccaacaacataatgaatggcatcctgatgtcagtgtaaaatgagagaagcacattttgtgtcctaaaatctctctttaattgtaaatatacttgaaacctatagttcactctgctccaagttgaataatgtaaagaagaaattcctgctgagttctggatgaagctcactagccaatcagggcctctggataggcccgcca

SEQ ID NO: 47925 - DNA, 348 bp, Mus musculus
  source 1..348: mol_type = other DNA
tttaaacctcaggcctgaagaaggaggaggtcccctcgagaccctcgaataactggacctgctggacgggtcacctggaggtcactatgttttcaaatcaagggtttttaaaataaaaataaaaacatgcttaatagaagcaagcctgaaagaactcttagatctgagagtctcaaccgtgcagaatgacacacagtggcggctagctgcagaaagccctcttgcttcccataggaggggcttcttaggatcaaacaaaaggccagcccttccctgtagcgcagtactctgcttcttgcactgtggcagctgccaccgtcagggagggaggccagggaagtttccttg

SEQ ID NO: 47926 - DNA, 262 bp, Mus musculus
  source 1..262: mol_type = other DNA
tgctagctgattgcactagcctggctggctaaccagtcccacagccaaagtggctcctgtagcaaactgatccatggtatgtttttaagactccttgggctctgacctcaacagtaattaattgttctacaaatcagtgacttgtttagttttctctgcggaagacacttagaaactaagttcttccaactaatccatttcccacacctcaccctgaatttgcttagtattttaagcaggagtccatcatgccttcctctct

SEQ ID NO: 47927 - DNA, 238 bp, Mus musculus
  source 1..238: mol_type = other DNA
gccaaagtggctcctgtagcaaactgatccatggtatgtttttaagactccttgggctctgacctcaacagtaattaattgttctacaaatcagtgacttgtttagttttctctgcggaagacacttagaaactaagttcttccaactaatccatttcccacacctcaccctgaatttgcttagtattttaagcaggagtccatcatgccttcctctctacctggagactataggctc

SEQ ID NO: 47928 - DNA, 335 bp, Mus musculus
  source 1..335: mol_type = other DNA
ccggacggtggccggctgtctgcggcccgccaagggtgctgcctcagcggctattgattttaaccattctgacaggtataagatggaatctcaaagtggttttcatatgttgaacatttaagtgtttgagacatctatttagatctgtttagatatatacacatacatacatttaaaggacaacatttaattgaggctggctcatggcatcatcccatcaggccaggcaagcatggtgcatatggttgtgagccaccattatatttttaatattagtcctctataaggtgtgtagtgggtaaaaatcacttcacacactgtaggctggatctatt

SEQ ID NO: 47929 - DNA, 469 bp, Mus musculus
  source 1..469: mol_type = other DNA
accgcttaatatacgtaagatacttagcaaatgaacatgcattttaggtacagaactgactagtttttgtttggtttacatttctggaaatacaaacactgcctgttctctttgtgtaaagtactccatggcgaagttgcctttgatccaaaccttttgatcataaagagggcccgacagacttttttttttttttaaaagaaatgtgataaagttaaagggccagcccaggcagcacagcagcctctcctcaggcctggctggcacactgtggaacaggaggacgactccctaggtcacctgccaccttggtggctcggaatcccgagctcagggtccctccattccgtaacccgagcctctgactagacccgggaatgcatgaaggcaggccccgccccgcccgcgcccgccggcccgccagcccgcctgctcgcccgcccgcccccgccgaggtgtcgcgcttgtg

SEQ ID NO: 47930 - DNA, 433 bp, Mus musculus
  source 1..433: mol_type = other DNA
tgcaacagagtatttaaataagagctatttattacaggcatatattctatttttaaggcactaagttgtggtcttattacaacgaatggttcttaggcactaattaaatctgagttggaggccagcctggtctacaaagtgagttccaggacagccagggctatacagagaaaccctgaccaaaaaaatctaaaagtttaaggttatcctgactaaccatgcagatctaaatttgaaaatctttaagatgtaatgttaaaaattcaagaatagtgcaactttgaaccgatttgaacctgaactaagcagtacaagcgatcactaaccacagacaaaactcgtttgtggttgggcccagcacactcggcgccgcgagttagctatagcccgtcttcctccaggatgccgcgggagcgcgctgggccccagagtg

SEQ ID NO: 47931 - DNA, 608 bp, Mus musculus
  source 1..608: mol_type = other DNA
tgcaaagaatggagatctctttgttgaataggcatatagtatatacaaataagatctttgtgtctctaaatccaggaacccatacatgttatcttacatgtcaaggggccttttctgatagttatgagtgtacacctgaaaataagattattctggtgagctcaaactatccttggctggagtggagattcttccactttctaggaaggctacgagacccatgaagaatacatttggcttcaatgttgggacaggcaaaatccattcagctcgtgcgcagaacgctgtgctggaggcagcaggctgcgtggtgtgtgcttctctctcagggcgaggcacagtcgctgctcttctcagatggcgaagaaaaccgaaccccaggggttgccttgtttgtgcacggcaaacagtgtcaatggtctgtgcagggctcacactgtccacacctcaggtcgtggactccctcagcgaagagggtcgaggtcgccgactaatgccaaatctcgcgatatttgggacgttcgcgaactgcgcgaggctgacctggaagggaagccgcttccgcccgctgaaagtcttctcgcgatgcgagcgatggagcgcagagg

SEQ ID NO: 47932 - DNA, 520 bp, Mus musculus
  source 1..520: mol_type = other DNA
aggagataaatttttaaattaagttatattaaatttaaatataaccatatatagtgttgtatcacacaaagtttaatatttaacagctcataatcaatttactaaaatgattagctcaagctgtgactttaatatctatctatctatctatctatctatctatctatctatctatctatatctatccatatacatacatatacatgtatatatatacatacatatacatgtatatatatatacatacatacatatacatgtgtgtgtgtgtatatatatatatatatatcttagtttgtataattttttttgtttggtattagataatcaattggttagtaaggaaagactctttccaagtggccagtgttttcctctgaacactgccttcccatgggactgcaggacgggatgcttttatgcagagacctcctttggagatcaagtcacaagaccaagtctctttggagactcccagagtgctcctgtaaagatattattaagaatacttgattcagat

SEQ ID NO: 47933 - DNA, 365 bp, Mus musculus
  source 1..365: mol_type = other DNA
gtccaggttgagctgggcctatactcaattttgaaacactggtgtgtgcagtcagaactcaaaaaaacactattttgaaacttgagagtcgttctacagctttgcacaagaaccagggatcctggggctgccatggcatttatggtggatgccagtcttgcgttccgcacgagcacttgtcttgaagtatgcctggaagcatttttagtaatagttgtaaattgggaattaccatcatgccaacactatactttttaaaaacggcaggcagtttttcggctttcccgggaggcaccagtgcgggcgggccgtggtcggagttcgcgcccaggccctgccgcaccctcttcccgggccgctggggg

SEQ ID NO: 47934 - DNA, 415 bp, Mus musculus
  source 1..415: mol_type = other DNA
gaaattacaatttgagacaaaaatcacttttgatttctttgcacagagttttttaacacctgtatttaattattcctttcacatgttctatgaagtaaaacatatgttctatgaagaaagtgtaatgacataaacatgtatatatacacacacatataaacacacattactttgaatgctaacttacaaaattaattttcaggaggggtcagcacccagctgaggacgctgcctctgtggcggtgtgcaaccaggctccccactggcgcacaccggcaccacgcccacaggctatagagtgggaggggatggggcgtgacgtcacagacaccggtctcccattgggtcttcgtgcgccccggggccgaagggcgtgtccaccagcgctcattggctggggcgcgcaggccgggag

SEQ ID NO: 47935 - DNA, 423 bp, Mus musculus
  source 1..423: mol_type = other DNA
cgtagcagggctggtcacgggactatgcccttaggcaggagtggtgactcacgtctttagtcccagtcgaggccctcctggtccctacatagggagttacagggcagccaggactctatagagacgggacgggcgcggcctcagccctttaaactggctgcgctgggtggggcgatggggagggccctctccactgcaatggtgggggagggacccagcatgctcgccccgcccaccaccttcgcaggagtcatccggccagggtggggctcccgacgggtgtgtcaggacaagacgcgcgctcctacatccgccccctccggacggaacacagcctggacccggctattggctctcgcgacctgtcactcgtcgcggtggccagccgcagggtcctcgcggtgactggttccgcccaggcgc

SEQ ID NO: 47936 - DNA, 388 bp, Mus musculus
  source 1..388: mol_type = other DNA
tcaaattcttggcacaggaaggactgtgtcatctggctgacatgtgaaaatagttacaggagcttttaaaggctgcaaacattgtgacattttctgcataaagagtatttgcaaatagcttatcagagcctctcttaagtgtgtagatgaagcttcaaagtgtaagaacagaaatgagaaacacatgtttgtcacaggccacaaaacagtgaggtttgtctagaagggaccctcatgtttgctgttgtttcattgatttaaaaaggatcttgaaatttatgtgtatttatttcacatgtatacatggaagccaggcaaccacgtgaacaccagagatcaaagggctttgtagcaagcgctttcacctgcaagaccatcttgctacagg

SEQ ID NO: 47937 - DNA, 400 bp, Mus musculus
  source 1..400: mol_type = other DNA
tgaatggttgctaggaagcacatcaactgttttcggagtattacatttattttaattaaaaatttgtgcgccctacccccactgtgtggggaggtcccttttacctgatgaggggagactggccgaactctggtgcaagagcccaggtgcaggcctgtctgatctgagctgtgactccggggagtgccccctggtggcaggcgccggcctggcctctaaatcctttatcacgcgtgcctgggtcgtaccggccagccggttttgagctggcccagtgtccaaagctagcgcctgcccgtgggcctggccccttttgcaggagactggcccctggctgccccagggacgtcctagagcacccgccagggcgtttccgtgcccatgcatgggcgcggccctt

SEQ ID NO: 47938 - DNA, 361 bp, Mus musculus
  source 1..361: mol_type = other DNA
tacatgtagcaatacatgaaaatacatgttgctgtttacaactatagaacacaaggtggtatgtttatacaattaatctcatagatacgtattttttaaattggaatcactgctgtttcttataaattgctgtttaaaatcaatgcaacaaacttcttgcagccgcatgacagggctttgtcctttctaatcacaaatgacctttgatcttttcaccagctcccacacagggtgggtgggaggccagttgggctcctagggcagcaagtcgctcctccagccatcgatcacctcggccatcagaggggtccctgcgcaagggccgcgcccatgcatgggcacggaaacgccctggcgggtg

SEQ ID NO: 47939 - DNA, 430 bp, Mus musculus
  source 1..430: mol_type = other DNA
ccttccctaggggaaggaacttcgtgaaatttatccctagatgctaccgtgaagctgggctcttcaaaatggcagctagaaagatctgatatcttttaaaaggccgtttgctcagctggccacatgcgaccgtggccacctcggctacccacagcgagagctagcgcgctcctgggttccgaggtgttcaaaccaccgcggtaaatcgcatctccaggtgaagcccttatcgatccgatccgatcggataggtgggaaatctgaacttctaagttctgaggtccactctcacagagctgagccatgacaaggctctctcaagaggcgtcacccaccaagggggtcgccagcacgctttctgccctgcctgtaggaaggctccagttgcgtgacgtcacgccgcactgaccaatgagcggcccgagccggt

SEQ ID NO: 47940 - DNA, 358 bp, Mus musculus
  source 1..358: mol_type = other DNA
ctagaggcaaaaccaggatgctgtctgagttcgaggccagccttggtctccagagtgagttccaggacagccaggttcataatgtaaagtaggaaaacagtctccatgagaaatccagcattgttgtgggttaaacagaaacttttaatctacaactttcatacaaaaggaaaggtatggctgaggtggaaattccacagcaggcctttaggcaccacgctggcgtggaccctccaaagtacgacccggcggcgtcacgcgcccggactcccgcaggctccgccccgaggcaggcatagccaatgacggggcgggggcgggccctgtcggggctgtagcctgagaggctttaaagcct

SEQ ID NO: 47941 - DNA, 364 bp, Mus musculus
  source 1..364: mol_type = other DNA
cacacacaaaataaataaaatgtaatttaagttttatttgttattttttttttttggctgtcctagacctgtcttgtagaccaggctggcttcgaattcagccatctgcctttaatctaaaaattttaatgaactgttatttttaattttgcagatgcctgcagaatccccaagaaagtgtctacctctttcagagtaggcactctgaacagtgcctactgtgggtgccagagtatcagataccctgagactagaaagccagggacgactgtaaagaatatgatttttatgggagtgcctcagccgcacccttgtggccacgcctccgaagggtcggccccgcgtggccccgcctccaaacccc

SEQ ID NO: 47942 - DNA, 278 bp, Mus musculus
  source 1..278: mol_type = other DNA
gagatctcttattaagcaggacaaaggcttttgtgctagtaagctttttaaaaaaggtacttggattcatgatgccctttggggaccaaagaccatactcttgctgtctggaagcgagtcttctccgagcagcctgcagttgaatatgctcctcctgcaacataggatgtgctccctcctttgataacaaaggatgaatttttgaacatattaaatgctgtccttataagagttactttggtcatggtgtctgttcacctgactgagctcagcactgg

SEQ ID NO: 47943 - DNA, 257 bp, Mus musculus
  source 1..257: mol_type = other DNA
catattttatatatatatgtgtgtgtgtgtgtgtatgtatgtatgtatatatatataaatatgcctgaatgtgcacatgtacacaacaacacacatatgtggtgcccaccaaatccagagggtgtcaaatttcatggaattggagttcgtgctaggaatcaaacctgggtcctttgcaagagcacaagtgttcttaagcactgagcgcaaatctaagatatattttttaaaggagcataaaactgatcttaaaagac

SEQ ID NO: 47944 - DNA, 286 bp, Mus musculus
  source 1..286: mol_type = other DNA
aactctcttaagttttaacaagtaactttcaagtgtcatgacatttttgtgtgtgcacgtgtgtgtgtgcacacttccctgctcaccctgaccttagaaatcaagattaataatattttagtgcaaatcatgtgctgaaaaaaatattttagtgctggcaaagattaaatttaattatagatatgaaacagagcagagtcaacacttaaggtgataacacctggcctttgcaaacagctgtcctagtatggcacgctgagggctcgtacctctggcaggagcagag

SEQ ID NO: 47945 - DNA, 343 bp, Mus musculus
  source 1..343: mol_type = other DNA
cacaataaatttaaatcacgtctgtgagattaacaatataatttacaaaaatgacagaaatctgtaaatgtgcttgacttgtttaaacattcgttatatttaacaattaagaacaatgtccagtgtggtggcttactaccactgagcaatatattctgatttctttttataactatcatcctaggaaaggggataacatttgaaatgtaaataaagaaaatatctagtaaaaaatcatttacttggggtggaaagaactcagttcctatgctacctaaggacccaagccgggtaggagtcagtccctaggactccgcagtctgggcggagcttgcccgagctt

SEQ ID NO: 47946 - DNA, 533 bp, Mus musculus
  source 1..533: mol_type = other DNA
cagatgtatacataccactatttccaggtaggaaaaagctgaaatcttggtctagaggtttgaagtttgtatacacatcttttagttcagcctgtccttctgactgaagcaaagtttgctatggtatattcacaaaagtaaatgtatgaggaaatacttttgttgtatagctttcggaaaaagagccattctgtagagaagaaatattatatttgagcagtggttctcaaaccataagattatttctttctataactgtacttttgctactgttattaatcacaatataaatatctgacatacagaatatcttgatatgcctgtgcaatttgatatccaagggggtcacaaccctcaactttgagactgctgatttgtgcctgagactaaatatctggcccaaagctaaacttcaaggcatccttttggacactctagtctggagaactgaatgactccggggagggaggatctgagggctcacccttctctctgtcctctctgtgatgcagacctaggcctacagtgaggcc

SEQ ID NO: 47947 - DNA, 421 bp, Mus musculus
  source 1..421: mol_type = other DNA
agatagaaatattcacctacagaagtttaatcaatacattaggcatagcaaattattaataacttataacttaaaatatgattaataacataataaagcagagtaacattaattatacacagtaacagttatttaataatatcgagttctttatttttggtatttaccacttaacttttaagacatttattgcatttatttatccatctataaattgtgtgtatgtgagtgaatgaatcacaacttccaggagtaagtttctccttccaccatgaactcaggtcttcaaggcttgatgtcaagttcagtgtcagcctactgcctacccttatttatacactcttttaaaatgtgagatagttatggcacatgcatccgtgcaatctggagtttatcaggaagcctatataccaatgagagg

SEQ ID NO: 47948 - DNA, 309 bp, Mus musculus
  source 1..309: mol_type = other DNA
ctgctagagcattgcttcaggcagtcggaaggaatcaaaataaaagcaccttcttataatatttggtttttttttttttcaagaaaccaaaattctagaattttcactacatcccttcctctgctggggaaaactggagaggacatttagtgtagcctaccatatgtaaaattttaattccacacggagatgcttagcatcttagtagcctccttcagtagcagacgcttacggacttcggcttacctgccgccgctcgacgtccgcgggggcgcctgggagttgtagtccggaccccgactcaggggc

SEQ ID NO: 47949 - DNA, 272 bp, Mus musculus
  source 1..272: mol_type = other DNA
aagaaatttcccatcaggaagttccagattcttggataacctcctttccactttcctgggggcaggaaaatagatgatgttcagatccacatttaatctaggctatagtttcttttggcaatctacatatattttaaaaagcctcttgttttctaaaattcctttttaataatgcagctagattaatgggctattcaagctactcaccttgatttcaggaaaaggtctagcctttgacaggtctccaggcagacatgcctgtcagacaaaga

SEQ ID NO: 47950 - DNA, 473 bp, Mus musculus
  source 1..473: mol_type = other DNA
gctatagtttttcttggcaatctacttataaaaaaaaaacattgaacagggtagttttttttttttcttgtacttgccctacttttttacaaaacaaaagtgacttgcttctttctatttttaaaactggtattagtcagtacttatttctttaaaattctggtacatacagagtatcagctgtaatatcctgtaacttgaaatcaacaagtccttgattttgttaatttcagacattatattaaatactttttttgacatacattgagagatcattctctctattacttgagatggccactgatgaccatgttagctaacagtagtgctcaacagtgcggtgaaagggacctgcaatttccctgagacaagctgaagtcacaaacaatcctgttgttttctaaaatcaatgtaactagagtaatgggctattcaagctactcaccttgatttgccatcgccaggcagatatg

SEQ ID NO: 47951 - DNA, 422 bp, Mus musculus
  source 1..422: mol_type = other DNA
ggtataattattcttggcaatctacatatataaaaaaaacattgaatagggtagttgttttgttttttgtacttgccctacttttttacaaaacaaaagtgacttgtttgtttgtatttttaaaactggcattagtcagtacttatttctttaaaattctggtacatacagaatatcatctgtaatatcctgtaacttgatatcactttattcagacattatattaaataatttttttgacatacattgagaaatcattctctctattacttgagatgtttaacagtagtgctcaacagtgcttgatacttatcatctggtgaaagggacctgcaatttccctgagacaagctgaagtaactaacaagcctgttgttttctaaaattctggccaatcaaggtcgccaggcagacatgccagt

SEQ ID NO: 47952 - DNA, 156 bp, Mus musculus
  source 1..156: mol_type = other DNA
ggaagttccagaatcttggataacctactttccactttcctgggggcaggaaatctatagtttctcttggcaatctacatatatttaaaaaagcctcctgttttctaaaattcctttttaggcagctgctgggcctcctgaggtctggaaaagctc

SEQ ID NO: 47953 - DNA, 511 bp, Mus musculus
  source 1..511: mol_type = other DNA
aggctatagtttttcttggcaatctacttataaaaaaaaaaaacattgaacagggtagttctttttttttttttttttttcttgtacttgccctacttttttacaaaacaaaagtgacttgcttctttctatttttaaaactggcattagtcagtacttatttctttaaaattctggtacatacagagtatcagctgtaatatcctgtaacttgaaatcaaccagtccttgattttgttattcagacattatattaaatactttttttgacatacattgagagatcattctctctatgacttgagatgtttacctagagatcctgttgccactgatgaccatgttagctaacagtagtgctcaacagtgcggtgaaagggacctgcttccaagaagtcacaaacaagcctgttgttttctaaaattcaatgtaactagagtaatgggctattcaagctactcaccttgattttcactggccaatcaagttcgccaggcagatatgccagtc

SEQ ID NO: 47954 - DNA, 179 bp, Mus musculus
  source 1..179: mol_type = other DNA
gtccatcatagagggaacctgggcgttggcacacgcctttaatcccagcacttggcaaggcctggtctaaaaggtcactgcctgagacctcacaggtggtcccatctgggtgatgcttcatgcagcccagaaaggtgggcagaggtcccctcaatgcacctgacagcagatctcagagc

SEQ ID NO: 47955 - DNA, 378 bp, Mus musculus
  source 1..378: mol_type = other DNA
taccttaaagttaatatttttaaagcttatccaacctaactttctactaaaattgtttgatagggatttgaagcccgaatttgaaactggatttctcaattctagttaacaacaatgcccttggataacttattgaacttttctgaggctttcaatactgatagcaccagtaattaatttacttccaaaatagtgcagtataacagttttatattctgtattaaagtaatcctgaggtgatttaaagaatgcaatagtgtatacattatattaaaacattagaatgttttttgtaacaaggcacacaaaaagatccggtcagagcagcgcctgccctccaggacgcctgcgtaggagcccggcgtgtcctctaggact

SEQ ID NO: 47956 - DNA, 447 bp, Mus musculus
  source 1..447: mol_type = other DNA
ctaaattgttaacacagcagtgattataatatcgattaatatttacttaacaaatgtgtcagaaggaagctggcttacgtaagtaaagaatacttttcctaaaattgtgtcaaatgggtaaaattaatgctatcagtattgtttttaaagactattccaggcactctatctcaaatttgttctagtgcctacattaatgccaaggttaacctgaaaaagtcttaggacctcctcacctccctaagctgtcccaaggcggaggggaaggaggccgaacccggtcagccccgctgggctccttccggcagctcaggcaggcccgacctggctcagcgaaacctgtcctttgagctcttatcacaaactagctatttagctaacctgtgaagcgctgccttctgggtaagtcctagaggacacgccgggctcctacgcaggcgtcctgga

SEQ ID NO: 47957 - DNA, 481 bp, Mus musculus
  source 1..481: mol_type = other DNA
cccccgcggcgtcccttcccgcgccgccgcagatggtctcgcccattcgcagcgcagcccacgtggggggcggtgccggcctagcgtggcgaatcgccggcttgcgaagctacggtgcaccgtatccccggcgtaggttgcacggtcgctgtgaagcaggagcgcgagaccgccgcccggccggattactgtccggcctacctgtacccagcagcgtccgggagcctcgcggctcgggctcgatcggtcggtacctaaacactaaggccccgaggatgtcccggcttcctgcggaagtccttcctaaggactgcggctgcgctgcccagaggccctttaacctagatcggctcttgttcctattcctaacaacaaaggcgttattcacgctgcacagactatcaatcattgacattgctgacgaacattattagtctttagcactcagatctttgaatgcaaatagaatttaacagagtct

SEQ ID NO: 47958 - DNA, 312 bp, Mus musculus
  source 1..312: mol_type = other DNA
aactaagttgacagtcaagtttacgtatgctattctagaaaaaaacactggtccactctcagcatcaaagtactttttataatgttggggaaataagggctctagttctagagtctgtccagaatcaaattcaagactctgttaaattctatttgcattcaaagatctgagtgctaaagactaataatgttcgtcagcaatgtcaatgattgatagtctgtgcagcgtgaataacgcctttgttgttaggaataggaacaagagccgatctaggttaaagggcctctgggcagcgcagccgcagtccttagg

SEQ ID NO: 47959 - DNA, 473 bp, Mus musculus
  source 1..473: mol_type = other DNA
gtggatcacccagctaggtgacctggtgtggcccttgtgtccccgagcttgcacgcgtggtccccgtcctgccgcggccccggaggccccggccctagaaggctgggaccccggcagcgacggaccgcagcagcgaaggtgcctgacgctggggcggggtctggcaccctgagaagggtgctagcccagggaaggacccgcgcgcgagggcggggtcgcggcgccaccaccgcgtcccggagcagggggagaaggcagcctcagcctagtagggcgagctctcaccctccccacacggagtgactgatcacgcggcgaccagctccagggcctgcaaaccccaggccagctctgtcccggtcccccgcggcgtcccttcccgcgccgccgcagatggtctcgcccattcgcagcgcagcccacgtggggggcggtgccggcctagcgtggcgaatcgccggcttgcgaagcta

SEQ ID NO: 47960 - DNA, 568 bp, Mus musculus
  source 1..568: mol_type = other DNA
cgtgaataacgcctttgttgttaggaataggaacaagagccgatctaggttaaagggcctctgggcagcgcagccgcagtccttaggaaggacttccgcaggaagccgggacatcctcggggccttagtgtttaggtaccgaccgatcgagcccgagccgcgaggctcccggacgctgctgggtacaggtaggccggacagtaatccggccgggcggcggtctcgcgctcctgcttcacagcgaccgtgcaacctacgccggggatacggtgcaccgtagcttcgcaagccggcgattcgccacgctaggccggcaccgccccccacgtgggctgcgctgcgaatgggcgagaccatctgcggcggcgcgggaagggacgccgcgggggaccgggacagagctggcctggggtttgcaggccctggagctggtcgccgcgtgatcagtcactccgtgtggggagggtgagagctcgccctactaggctgaggctgccttctccccctgctccgggacgcggtggtggcgccgcgaccccgccctcgcgcgcgggtccttccctgggct

SEQ ID NO: 47961 - DNA, 369 bp, Mus musculus
  source 1..369: mol_type = other DNA
atgtataccaaacatgtttcaaactttctatatgtctataggtgacctctgggattttcaacatgtaaaaccacacttgcttctatacaatcatctttagtttgaagttccagttattttctcattttaagaattgtcttctcaaaatattagctcatttttttaatggtggccaaccatccataatggtgtgtttgagcagtgtacttacatataataataaatcttttttaaaaacaaaacaaacagcctcagagacaggttgagttttaaaatcacaacccatactcattttgaaaatttaaattggcttcaaatcacctaccacggctttgtgaaactcgcttctcgtccgcggcgacgtcacaa

SEQ ID NO: 47962 - DNA, 188 bp, Mus musculus
  source 1..188: mol_type = other DNA
gagacaggaaatcacctgagtatgtgatccctcatttcttctggattccatctaattctagatgtagtcaagtaccaagttttattttaaatctagtataattgagtcaatgagttttcaaaagactctaggaaatcagagtaagaagtaaacctaataaatttgaccagtgacaggctataaatagt

SEQ ID NO: 47963 - DNA, 376 bp, Mus musculus
  source 1..376: mol_type = other DNA
catttcccgagtacattataacgtaaatgtattatatacctgtatatgaaatatgaacttcccagtatgtctgctcagaaattaacatgtatagagtttgtacaccatgctgcaaagtgggtttgtagcttcccgggaacatatttctgagaccacggtattcagggaataatttacactaaaagagcagctgccaccaggtggctgccgccgaacctgtcacattcgaaagacgtagcgcccatgttagttttttgtaattatctccaagtaaaaattgagtcaaatgaacgttttcctacagttgtaaggtttcacattgactttccattacacagacttatgggaaatgtagtctccctgtgacgaaagggaa

SEQ ID NO: 47964 - DNA, 462 bp, Mus musculus
  source 1..462: mol_type = other DNA
gtgtaactcctttaatacagtgatctcattagacagtattatgaatatttctgatatctttgtattcaagaagaaaatatctcagtgttctgtttaggagaaataacactaatgttcaaatattgtcaaatatgacctggattaagagttagtacacacgccgggcgtggtggcgcactgatttcgaggccagcctggtctacagagaaaacatctgctggtcttaagcgactaggatggtttcaatagaatcgtaactgcttccacattcttaaataaagcagatcatgaaagcatgaattttccatttgttaataagatagtttttaaatcaaaatgttttatcagagataacatgaccaaggactgtacccaaattccctgtgcatgtccatgtgcacctgctctctcagtgggttcccggaagtccttccaattgatttgttgacggcatcagagctg

SEQ ID NO: 47965 - DNA, 415 bp, Mus musculus
  source 1..415: mol_type = other DNA
gtataccactttaaaatgtttgtgctctgtacactcttgtttctacagtacaactcaaagccttgtgcagtctcatacatgacctgcttttattcacacatgcttgggtgtggcatggggatgtcaaatttttgctcaaacagcatgtgtggaattgtttctatatattcaaaaagtagaaacacaaacaacagtatacaagtttgttggggcagacaccaagccagctttgtatcccaagtccatttgtcaaaagcttcaaacattttataaagttaattgctttgtttatttaacgaacaactaagtgaagtagtaatattaaaattactactagaaatgacttgtaagccaaaagtttctgtcaaaggcttgactcacagacttctgggagatgtagcactgtgaccactgg

SEQ ID NO: 47966 - DNA, 588 bp, Mus musculus
  source 1..588: mol_type = other DNA
acaacatcaagagactttgggctttgactgtcttgggactattaaagtctatgggcgaagtgaattgtctttcttagaaacagatgaaagtgaaactctcagaggctttaacgtatttgattgtcaaattccaataaacttatttgatatttctgatttgtttttgaaataatcatttctctgtcctgattttgagaaactgaggttagttcagggcagatgctttgactttcaaaataataatgggccagtggccagtacacataccagtgtgtgtgtcctcccaaggggcaaacatacccagtggcttatgtgtacctgtgtttgtgaacaacctaaaaaggaatttcttaaatatatattaacattttaaagttttaactttgttaaatgatctatactatatacatcctaatatttacacaaaactgtttttcatgaaggaacaagtattatttatttatttgcaatactgagtattatgacagagtctacattagagttttaaagtaggccaagtacctaccatagtacctaccatagtataatagtaaaaggaatagcttcgcaaagacttctgggatatgt

SEQ ID NO: 47967 - DNA, 466 bp, Mus musculus
  source 1..466: mol_type = other DNA
ctcagtgttctgcttagaagtgagggaagttcaagacagataacaaatatttaaatcgtctgaaacacagtgtaccaagagtcagtagactcaccagtgtgatcccaggagctctgcacctcctgctgggagatggggaggaggaactgtctcagagaacacccggtttttttttttaattattatttatttattatatgtaagtacactgtagctgttcagacactccagacctttggaagagcagtcgggtgctcttacaagcacctgagatgctgcatgtcattcattaaagaaatgcacgtcctgcttccttatttttaagtaaagcagaccatgaaagcatgatttcccatttagtatgatttcataagtaggtttgagctttaaaatcacgttttagcagaaatacctggaagtcctttgcactgacttgtgggaaatgtagtcccaacaattatgacat

SEQ ID NO: 47968 - DNA, 376 bp, Mus musculus
  source 1..376: mol_type = other DNA
gaatagggactctgcacagtctttgcgctgaaacgggctttgactcaagtaccaggaataaaccttcccatgaaaaggtagggattctcaatcagtgacttatttgacagtaatatgaacatatatctgatacctttgtattcaaggagaaaacactcaagtgttctatcactaatgttcaaatattttcaaatatgacctggtgactagatttgatctccaattcttctatcttaagcgactaagatggtttcaatagaatcgtaaagagatactgcttccacattcttaaataaagcagatcatgaaagcatgaatttttcattcgtgaatgattctgccttcagtgggttcccggaagtccttccaactgact

SEQ ID NO: 47969 - DNA, 250 bp, Mus musculus
  source 1..250: mol_type = other DNA
ttgaatcataatatatcagggaagtatgaaggtaactttgactcaagcttgaacttgggaattctcaatattacatatgttcaaatattgccccaggagctctgctcctcctcttgggagagatgcagaggaattaagcacctgatatgctgcgtagcaggcagggtcaccaaggatggtttcaagagcaccttaaattagctcttgcttccatatttttaagtaaagcaagtcatttaaaatcacagaa

SEQ ID NO: 47970 - DNA, 362 bp, Mus musculus
  source 1..362: mol_type = other DNA
tctttaatacagtgatatcatttgacagttatatgaacacatttctgatacctttgtattcaagaaggagttatgataccactgatgttcaaatatggtaaatatgaatgctgtgcccagggatagtggcctagccttggtccactgtgcatctgcctgcccccttccccttgggagagatgcaggggaggggtaattagctgaatttttgaggatggtttcaagagcatcttcaagagataatgttagcttccatatttttaagtaactgatgaattttccatatggtagtaaaatactttaaattcctttaaatgctgcgaccaccggactttaagagtccaaatgcccgttcctggaag

SEQ ID NO: 47971 - DNA, 525 bp, Mus musculus
  source 1..525: mol_type = other DNA
tcaaagtacttcttgctgcagcacagtaatctgtgtcaatacatgcatctctgcatatagtcatcagctgcacccttaaacatgactgactgagcaatgacaatggctcatggttcctgcgggaattagcctttcccagggctgagtataacaaaatactgcattaatacataaattcctgatgtcatgaagtggtgaaaaaggaaaagtaacatgactcattttataggtaattctgggactttactcaaggaattatgaaaagtgggtcctgaaataccaaattcttgaaataataaactagcatcaggaaattatttcataaagttacttttgttattttaaggaaccactaagtcaactttttttttttccaagaagaagtaatattaaaattacaactagaaatgacttgtaagccatatgttcgttgtggttctgggatccgaaaccaatcagaagtcacctaacctgggttctgggatttccgtcgcacagacttctgggagatgtagtccgcaccac

SEQ ID NO: 47972 - DNA, 469 bp, Mus musculus
  source 1..469: mol_type = other DNA
atttaaaatgtttgtgctctgtatactcttgtttctacagtacaactcaaagcctttgcatttatgtctcaactacatacaacaagttggagaaatgactggatgtgtgactgcttttattatgtcaaattttatgtaatattagcaatgaggaattatttctatatattcgaaaagtagaaacacaaacaacaagtttgttggggcagaaaccaagccagctttgtaccgcaagtccatttgtcaaaagttactaggttggtttcaaacatccttttataaagttacgattgctttgttattttaacgaactactaagtcaacgttttttgtttttttgtttttttcaagaagtagtaatattaaacttacaactagaaatgacttgtaagccatatgtccgatgtggttctggggtccgaaaccaaatggggtcgcattacccatagcttttcagacttctggactg

SEQ ID NO: 47973 - DNA, 402 bp, Mus musculus
  source 1..402: mol_type = other DNA
gatatgtcactgccattgcctgcatgaacccactgtggttaatagcatgcatggatgagttcattcaaggtacctactttgactgatagtcttttcctcttatttagaaagaaggtgtacttaaatgaaaatccctttttaaaagataattttcatctctacatcagcgtagtgcttcattatttttttaaagtacaactgagtcaacatgatgtttgcctaatatttctgtgaaaggctctactcacatccatacacatggcctcagaaggcattcttcccgatgctgtaaactgcaccgcgagtgcagcctctgtgcaggcgggcaggttgtcatagtttccaagaagaaatccaggtagaagttgccctacctggactccaggaagttcttctcgctgt

SEQ ID NO: 47974 - DNA, 446 bp, Mus musculus
  source 1..446: mol_type = other DNA
tcccagtacaggcctttttttgcaagcttaagtaacattttataatatgtagaatgaagattaaaataaacatattgatgagcagattcacaaatatcttctgtgggtttcactgtgtagccctggcaggccagggactcactgtaaacaaggcagcctggaactcagaggtgcagacaccgcaggctgtgaatcttgaatgtcaaaagcagccgccgggcacccgctcttaaattactaaaagataagttcctggcatccagaaaattgtaaaactcttttgaaatgattaaggtttctgcaaactagcttattgccacttaactggcagtgagctgtaaactccacggaaattaaggaattaagaactttacagtgtttcctaagtaggtgacactacattgcagaacttgacggtgacgtcacaggtctgcacttttagtaaa

SEQ ID NO: 47975 - DNA, 366 bp, Mus musculus
  source 1..366: mol_type = other DNA
agcaggcagatttctgagtttgaggccagcctggtctacaaagtgagcactgtctcgaaaaatctaaataaataaataaaattgttcgatgatttagtctgtttgaatggattccaatattcacatgaaaacgatttcctgccgtgattgttacctaaaatccatggcattgggaatatcaaaagcttagcataacctcagttaagtccatcagaagctgattccccggcggcttttgctaaagctgtataagccaaagccttgaggcagtttcctcaaatagctgtaaatttcaccggaaatgaagaaattaactgggctcagttccgcacagacttgtgcacagatcggtactttggtaaacaa

SEQ ID NO: 47976 - DNA, 361 bp, Mus musculus
  source 1..361: mol_type = other DNA
caatgctaagaactgtgcctcataaaattaaagttcttatgcagattaatacatgtaaatgtgagggtagtacttagagtctaatgcatgtatgctcacaggcttgtcaaagttgagcattaaattaagtcttccttcattctcctttcattttaaacaccgaagttgatgtcaagtttccttattttaaagtacaattaaatgattgtcaacttccaattttataattagtagacgagtttttaaactacagttatgttctagcacgtccgttttacaaccggaacttttaaagcatcctccgctgtcagtagggagaacacagactctgtgacgtcacaagcagccgctctgcgaaccg

SEQ ID NO: 47977 - DNA, 438 bp, Mus musculus
  source 1..438: mol_type = other DNA
aagactttccttctcagctgagatttagagactcttctttctaaaaaggtttccagcttttaattttgttctataattttaaatcatatttccagctgtggcaaactggttattttatttaactacaggacgagattgtctattgtagtggtgtagcatagaataggctgattgtaaaatcatcttaacagaaagtggtcatttccatacaattttttgctgatttattttaaagttaaattgagtcaacgtgaattttacatatggaataaacctcataataagtagactttgagttttaaatcagtacagattgaccagaaatcattagagtcaaaggctcgactcacattcaagtgaacccgggattttaaaagcagctgcagaggtgaagaaacacaggaaacacacacgtcaccagcctgttttcctggcgga

SEQ ID NO: 47978 - DNA, 360 bp, Mus musculus
  source 1..360: mol_type = other DNA
ggcatcataattcccaatggaattggatgagttattcttctccagtacagtgcaggatcagtaatttttgcaaagctagaatagtgatcattaagtattcctatttaaaacggcagtccataaatctctgttccaatgaaaatgggattacaaactaaaagtatttataagagccccagcaggcttccagacgctgtggcccagcctaggtcagcagggctcctccgccgcctccgggccggacccgccctcggtccctccgacctgcagcggtatggtgcactagtgcagtcgcaatgcggaagtgccgtttccacaatggctccttgtgatccgccaggaaaacaggctggtgacgtg

SEQ ID NO: 47979 - DNA, 307 bp, Mus musculus
  source 1..307: mol_type = other DNA
ggagctctgcccctcctcttgggagagattcagagtcagaaaacacttggtggtgactcagtttgatttctaattctgtcttaaccatagcgtcttaaagatcatattttaagtaaaccatgaaagcataagtagttctgtactttaaaaaaacaaaacaaatcgaagctttaaaatcacaatgttttaacagagatgctcagctcacagtttgtagaccaggctggcctcggcaaacaaagacttttttaagctgcccacagctggactgcaaggcaggcaatgcaccgggtcctgtgacatcatc

SEQ ID NO: 47980 - DNA, 388 bp, Mus musculus
  source 1..388: mol_type = other DNA
gtaatgccatttgtagctttaactcaagcatgaatcattttacagtgatatgaacatatttctgatacctttgaaggagctctgcccctcctcttgggagagattcagaaaacacttcgtggtgactcagtttgatttctaattctgtcttcagcagatggttttgatagcatattaaagtaacttcctgctttcatattttaaataaacaatgaaagcatgaattttccattcggtagtaatattccataaaagatcgaagctttaatctcacaatgttttagcagagataacaaggaaatgtgataaacattactgtgaaactcaccaaagacttttttaaaacagtccaacttcagctgcccacagctggctgaagtccttccaa

SEQ ID NO: 47981 - DNA, 357 bp, Mus musculus
  source 1..357: mol_type = other DNA
gggtcaggagtcagttcacacaccatactgagagaatctggtgaagctctcaattgtttacacggatatctgggacttataggtaagagacatctgtgttccctagtgtacacatttagtgtcataatgggtattaaacctcttctgtctcaaaccccagagtagctgagatttcagaatatttccaggaaacttggtttcaaaaactatccttgctccgttattttaaagtaaaattgactcaatgtgattttttcattgatcagagtaagaagtaaatctaatacatattaccgttacatattctcaaaatgccctttgtaaatttgggatttttaaaagcagcctaattcagac

SEQ ID NO: 47982 - DNA, 438 bp, Mus musculus
  source 1..438: mol_type = other DNA
gccatttgtagctttaactcaagcatgaagaaaagatgggaattctcaatactccaagtttccagtcctcgttttacagtgatatgaacatatttctgatacctttatattcctaggagctgtgcccctcctcttgggagagattcagaaaagcaagactcactgggatggtttcgataacatcttaaagagataatgcccactcttacattatcttcctttttcatattttaagtaaaccatgaaagcattaattttccactccgtagtaagatgctaataagtagagatgtgctttttaaaaaaccaaaaacaacatccgagctttaaactcacaatgtgaaactcagctcacagcatcgcgtgctgtgaccaaaccagagctgggctgcaaggcaggcaatgcacaagatcccttgtgaggtcatcagaaagggc

SEQ ID NO: 47983 - DNA, 495 bp, Mus musculus
  source 1..495: mol_type = other DNA
tcaagtgttcaggtgaatgtactgcttgactctagtttctggagctgtatccctgggttcacatagtctctgttctgaatcagtttccctgtgaatcagaatgcatcacagaaacatgaaatcttccttgtgcaaatattaaatagtctgcacagtgtaccaagtactcaccagtgtgatcaggagctctgcgcctcctgctgggagatggggaggaggactgtgctcagagaacacccggtaagcacctgagatgctgcatgtcattaaagaaatgcctgcttccttatttttaagtaaagcagaccatgaaagcatgatttcccatgtgttagtatgatttcataagtagatttgagctttaaaatcacgttttagcagaaataactagcatgtataattaacattactgagaaaggctggtcccaggcagtgcaccgaactcctttggtgtgttcctatttgtgggagatgtagtcccaacaattatgacga

SEQ ID NO: 47984 - DNA, 319 bp, Mus musculus
  source 1..319: mol_type = other DNA
tgttgaaaattttgaaaaaataaatatactcagatagtattatagtgattttaagcttaagtgtaaaatccataattatttggattgtgccaacataagttcaaaacaattccaagattattctgtagctacatagccttgtattgttaggaattcctactccctggaacttccggaagttctgtaagtgctgggactcagactacaatcaagagcaaagtagaatgctcccttcagcatctccgcacaggcagtcagcagactaggggcagtggccagatcgtcataattgttgggactacatctcccacaaatagga

SEQ ID NO: 47985 - DNA, 558 bp, Mus musculus
  source 1..558: mol_type = other DNA
tacaaattagtggatgaacatgtgtgcactatcctgagataaattcaggatttcttcgtaagttaacatcagagagctggatgtttaactttgtccaatgatttaaaacagctgtgtatggaagtttccagtgttcacatgaaaacgttatccatcttatccatgtatggctcacacaggtgaacaaggagtagttatgcatatgtaatgcttggtattaagccaagcctccactgtagtcaaggaaacaatatagttattttatagtaatattgaatcagtgtgaactttacatgtagaagattccataataagtacacttttgagtttaaatcgcaacatattgaacagaaataagttgcaaacctattaaaggttactgccaaaggctcaatttacatttaaacgtgtcctgtactggaccaggctagcctcgaactcagagcctgtctctgcctcgtaaagctagtgcccggtttaaatttagcattttaaaagccaactggctccctgtggttgtaccaggacacaaactctaagggatttctttcgcataga

SEQ ID NO: 47986 - DNA, 376 bp, Mus musculus
  source 1..376: mol_type = other DNA
agaatataatatctcagaatacactcagattcaaactgcctatgtgtttgtttctatttgaaggaccctcattccagggaccctcatacttgactgtggtgctccgcggcaatctcttatgatagaaatcctatgataatccggtaaagctctggcacagctctctcaaatattaaattgtttacacggattattatcggtaagagatatctgtgtttccttcagtgtacacaccaaaattgttctgtttatgttaaactgtctcaaacccctgtttttaatcagagtaagaagtaaacttaatacacattactgtaacatattcgcaaattgccctttgtaaatttgggatttttaaaggagcctaattccagtt

SEQ ID NO: 47987 - DNA, 534 bp, Mus musculus
  source 1..534: mol_type = other DNA
aatggttagggtactattgcacagaatcgtgactgtgtgtgacagtcctggagtgtgtatttcagaagcctggaagacaggcttttgagcattttaaatgtaaaattatttgtttcaataacatgtttaagcttatttaaaaaccatgcaaagtaaacacatttatctaatgttatataatcccttattaacatgtaaatccctcatttttataagattatcataaacagtaaaactattactaacctcatagatcattgtagaaatttatacactgatttaagatcaaggccagcctggtctaaaaagtgagttccaggacagccatggctaaccctgtctcgaaaagagagagagagagagatgtcatgtattgataacactagacctttgaagcaattgagtgtgttagaattgcacttagtgtatttaaaggctaggctcacatttagtgtaaatatattccaagtgctatttttcctgtttgaaatgtgcaaatgtgtaaaactcttggtgcacttgtcttcactccac

SEQ ID NO: 47988 - DNA, 386 bp, Mus musculus
  source 1..386: mol_type = other DNA
tcctttaatatgtttaaagttggctgctgattaaatcagttttcaaaaaaggctattttttgagtaatcagaactcatgccttactttaagtcctgcctggaagagctggaattcagattctacctccaaatctcgacactcacgtgatgtgagccgggcaacggcggaggcaggcgccgcgcgaccggaccggagcccacggagcacgagtggggaagcccgggggtcctaatcgctccgggcaggacagacacggagcttccgagccctgggagcgtccgtacacggacgctgccggcgcgtgcgcggcactaaggcccggcgatcagcgattggcccaggtccgcccgcatgtctgttggcggtcgtgcggagcatgcgtgct

SEQ ID NO: 47989 - DNA, 419 bp, Mus musculus
  source 1..419: mol_type = other DNA
gctcggaaatttttcttgttgcaattaaccagaacgtaggtacatccaattcaaattgaaatatgatctgaatctttatataatttcatgtagtctgtgaacacagctgcgaacatgtccgtatccgggcgtggtggcgcacgcccccaggactcgggagtctgagttagaggctagcctggtctacaaagtgagttccaggacaccaaaaaaaaaaaaaaaaaaaagttttgattttattggagagtagatttaaaataaagcaacagcagtgtctgctgcttccaccacacatgtgaatttctgattcatgaaaagccaggtctccagggttcggctccccacctcagagggtcagcgggtaattgtgcagtcacaatgaggcggtttcttgctttttgtgacaaaataaaccacct

SEQ ID NO: 47990 - DNA, 506 bp, Mus musculus
  source 1..506: mol_type = other DNA
tgtacttacatataataataaataaacctagtatactcatatatataaaataaataagtaatctttaaaaaaactgtaactgtacaatgttcacgtgatcaaagatggcatcattgcatctatcagtagtcagcgtacatggactctccgccattctatccagtggctaacgctgaattatctttttgagtgaatcaactctagttagttttggcttatccgctggggagctaggaaaaccgaaaggtggcggagccgactcctcccaaccgcggtccgcccgtgaaccccaccgcggtccggaaaactcagcggctcatccccactgcgcaggcgcgagtcccggctcccccccaggcgcgaattcccgcgcggaaccccgtccgacaggcacagtccgggagcactgcgcacgcgcgcggcacagcacgcatgctccgcacgaccgccaacagacatgcgggcggacctgggccaatcgctgatcgccgggccttagtgccgcg

SEQ ID NO: 47991 - DNA, 415 bp, Mus musculus
  source 1..415: mol_type = other DNA
aatagtcatattatttttttatttatacatgaaaatatcagcagtttatgtattagttcctttaaaataattgtatagataagctttgatcatttttctaagtattgttgcaagcttactgttccagagcgtccattactcaggaaggcccagaaccttggcttcctgacattataagttacaactctgtatttttagtttaaaaatagctcaacaatttcagtgtgagatgagaacatgctgacactctgagtgtctgagttctagttcagcctggtctacaaagtaagttcacacatcctgtgtttgggtaagcagcagcttctctccctctgagacagaaccgggaacagagacggctatgttgactctcgcaaaactttggggaagacccctctgtaccggttagctccct

SEQ ID NO: 47992 - DNA, 456 bp, Mus musculus
  source 1..456: mol_type = other DNA
ctgccaaggctgcagctattgctcaggaggctcctgcagtcaccacaggtggacaagtcctgcctcccttacctcaggaatggggttcctttaaggtaacagcacacttagcaaacaccctcatgagtgagttcgaggccagcctggtctacaaagtgagttccaggacagccagggctatacagagaaacccttggcaatattttcaaccatgggatatgaccgtgatgaataatgagattcaaaacaatgtcaaatgtgcctacaaatattttgtaagtttatgagaattttgctgcgagttaaaaaatattaatgaatcttaagatgattttctttcccccttatttaaaaacacaacagggtcagcgtgattcttttttaaagtaagattaaaattacaacatatggcccagaaatgacttgtaagggttacagaaatcccttcgcacggac

SEQ ID NO: 47993 - DNA, 243 bp, Mus musculus
  source 1..243: mol_type = other DNA
tgcaaggcttgcaaagggcctcagctgacctctcactctgtctttggaaaggctgggagtactttcatggggatgataacattaacaggcatgctacgggagaaaggcgataactggagacaagactaaagcccttgagactttggcttcggaggacatacggccccctgtgacccagggcctggcagttcctacctggaaagccaggtctctttcagggtgtggtgaaaagaacctagaagg

SEQ ID NO: 47994 - DNA, 571 bp, Mus musculus
  source 1..571: mol_type = other DNA
tcatatatataaaataaataagtaatctttaaaaaaactgtaactgtacaatgttcacgtgatcaaagatggcatcattgcatctatcagtagtcagcgtacatggactctccgccattctatccagtggctaacgctgaattatctttttgagtgaatcaactctagttagttttggcttatccgctggggagctaggaaaaccgaaaggtggcggagccgactcctcccaaccgcggtccgcccgtgaaccccaccgcggtccggaaaactcagcggctcatccccactgcgcaggcgcgagtcccggctcccccccaggcgcgaattcccgcgcggaaccccgtccgacaggcacagtccgggagcactgcgcacgcgcgcggcacagcacgcatgctccgcacgaccgccaacagacatgcgggcggacctgggccaatcgctgatcgccgggccttagtgccgcgcacgcgccggcagcgtccgtgtacggacgctcccagggctcggaagctccgtgtctgtcctgcccggagcgattaggacccccgggcttccccactcgtgc

SEQ ID NO: 47995 - DNA, 572 bp, Mus musculus
  source 1..572: mol_type = other DNA
gactctaatagtaaatatctctaataaagactagtagtgccactgaggagctgctggcagtttacttcagagaggcagcctctgagaagctaatttttttaaagaacatggtttgatcaaaacacattatgtgcatgtagaaacaaagtaatagtgaagactcaatctttcttacttattaatatatattcttatacgttgatattgtttcaatggcttatttttaaagagcattaatttaactaaacaaactgatcttttttttttttaatttttatgacttgttcccagaatacaaattttaaagaaagacattcctgaaagtctccttttgtgctgttaaaaacatataactaggttgatacactttaataatgatagaaatgtccagttgtgtctttcttaaattaaacagaaaaaaaatcatgagcaatttgatgggtatttaaaagacgtggaaatatgggaaatttttgaaattttgtgaatgaacaaatttgtgccaccagaaaagtcagtagactgaatagtattctctcggaactcaaaacagcttggggttccagaatgga

SEQ ID NO: 47996 - DNA, 537 bp, Mus musculus
  source 1..537: mol_type = other DNA
cagcctgtccacgagaggcccgctgcctgaggaccacaggtgtctccagtcacgttcgtgggggccattctttcaaaaggactcccacaagtttttgctaagtaggcatactaaagagggtggtcagggatatgggaccccctctccaggctggggggtattaaagcatggcagccttttacactgctgccttgtgagactggcagtcaggtgggagactccaggagcccaacagtagccctcaggctgttctctgctgtagtggagaacaaggctgaagcgccccactgtgcagcctgcgacaggctggagggcaaggactcggtctgaagctttctctggagcccagcctggccgtcggggggcggtggtgggcgcgggccggcgccgcccctgcgcggaggccggtgcgctgcgcgcggggtggggcgaggcgggccgaggggccgggtggctcccgccctcgcgagcggtggtggcggcggcggcgcccgggagctgccctgaggccgcccccggcccccgcccgcgcgtcag

SEQ ID NO: 47997 - DNA, 508 bp, Mus musculus
  source 1..508: mol_type = other DNA
cacgacagtgcagggtggcacagtcctgtgcagcctgagtagtggccacacttcatgtgtcctagctagcacttggagggtaaagttgaactgctcttacttaattttagttaaaatttaaatggccctttgtgcaactttatgttttacttgaaatagtttaacttggtaagttactgaaataaattgaaactctgcttagtaagttgctatggagaaagctctagagttctttctgcagtgcagcccaggagtaggcaggcaggctgcaggtgtcacacatctcctagcagctctgtgctcaggattcctggaggctagtgagccctgccagaggcaatattcttgtgtaaacccagtctagattagctaaaatagtctgaccaagaggtctgcacttgtgcatattgctgttgctgagggtaccctaatgagaacaggcaaatacagagcctgcctgtgctgtgcttcctctgtgcagccgcgtcctgcagaggggcgcagggag

SEQ ID NO: 47998 - DNA, 926 bp, Mus musculus
  source 1..926: mol_type = other DNA
ccgcgccactgtctctccgccgccgcccggagcgcgcagtgcgcaagcgcggtaaccaaggcggcgctgtctagtgaggatttgaaatccccgcgcgtgcgcactgcgccgcggcccgcgagggaggccgcgcccccgcgccgccgcccccgcgccgcctccccgcccctcattggagctgaggcggcggcccccatccctctccgttcccggccgccgccgagggcgtctttccgccgccgcgccgcaggagcgccgtgactgactgacggcccgacgctctgggcccgccccctcggccggtcaccgccgcccgcacgctacgccgccgccgccgcggccccctcgccctccccgcgccgcctgagccaccgggaccgcagctgcgccgcgcgccccaccgagcgccgcccgcgcccatccgcgcgcaccggagcgcggcccaggcccgtccgtccgtccgtccgcgcggccggcccggggcgcggcggggcggggcgcggcgggggcggggcgcggcgggcgacgcgggccccgcgggggcggcgcgtggatggatccgcgcgtggcctggatccagccggagcagaaggggccggccaatgccctgtggatgcagatgggagacctcgcagggcgtgggccgtggcggctccggcttcgcgtcctactcaactcgccggcgctggacacggcggccgcgcccggggcggcggggcgcgcagcaccagcagcaggaggcccggggccggcgcccgccgcctcgtccccgccgccggcgcccggccccgccgcgctgcccccggcgctgcttaccgcgctagggcccgcggcggacagcgcaagacgcttgcacaagtccccgtcgctgtcgtcgtcgtcgtcctcgtcgtcgtccaacgccgagtcgggcaccgagagtcccg

SEQ ID NO: 47999 - DNA, 406 bp, Mus musculus
  source 1..406: mol_type = other DNA
gcccacgagcaagctccgcacgcgcgagccgccgtcgctggcgtcttcctcgccctcaggctgcggcggctgctggaaccgccggccccgcgcccgccgccccatggcccacgcggctgcacacgcggagcgcacttccggctgcatcccgaggaccccgcggctgggtcctagcgctccgctgtggcgctgagggggcggagctccggcagaacttttcgcgagccaaaggagctctcagccaatgtgtgtagcgctccaagatcgggcggggctctgaggagcggggctcgagactaaggcgccctccccccgaagaggcgtggctccctgtgtgggcggggtccgcccgagcaggtggctcgcccctcccctgggcaggtacaccctgctggagcgctggccc

SEQ ID NO: 48000 - DNA, 334 bp, Mus musculus
  source 1..334: mol_type = other DNA
ggctgcaggacggatgcactcgtacagcggccaggccaaggtcgcgcgggcactcggcggccggaccactgcgaggagtagcggcagcagcgggccagcgctccagcagggtgtacctgcccaggggaggggcgagccacctgctcgggcggaccccgcccacacagggagccacgcctcttcggggggagggcgccttagtctcgagccccgctcctcagagccccgcccgatcttggagcgctacacacattggctgagagctcctttggctcgcgaaaagttctgccggagctccgccccctcagcgccacagcggagcgctaggacccag

SEQ ID NO: 48001 - DNA, 431 bp, Mus musculus
  source 1..431: mol_type = other DNA
attctcagtgtggctgggagaggttctcggagtgactccatgaatcacgatcttgagttcctgatagtagtgctcgccctgccaggaaccgcgaacccggcccacgagcaagctccgcacgcgcgagccgccgtcgctggcgtcttcctcgccctcaggctgcggcggctgctggaaccgccggccccgcgcccgccgccccatggcccacgcggctgcacacgcggagcgcacttccggctgcatcccgaggaccccgcggctgggtcctagcgctccgctgtggcgctgagggggcggagctccggcagaacttttcgcgagccaaaggagctctcagccaatgtgtgtagcgctccaagatcgggcggggctctgaggagcggggctcgagactaaggcgccctccccccgaagaggcgtggctccct

SEQ ID NO: 48002 - DNA, 385 bp, Mus musculus
  source 1..385: mol_type = other DNA
gagctaatctgaaatagattttagttggaattttcaccagatcaagcagccctgggaaagtcctttcccgctcttagcaccggtcagcgccagagaaggcgtctggtgttccacgcacagcctggccatggaaagccgaaacgctgcggccagaccttttccggaggttaaatgggatataaggcccggacctcaaacacagcattcaggttttagggtcccaaagaatgcagtgattctgagctggcggtgcgggcgcgtaccgctgtctccccccagcggccgtgcgtgtgtcgccgcaggaacctggcggcgggggtggctcggtgcagtcaagcccgcggctccgccccgcgctccccctcccggccggcagtgccgcccc

SEQ ID NO: 48003 - DNA, 401 bp, Mus musculus
  source 1..401: mol_type = other DNA
aaatcaaattcaccaccccttttaattgaattgtgaaatttaaaagtgtctgcagaagtttgaaataatttgttctttaatgtttgattaatttaaaaagtgagttgaaaagtacctagggcttaggtatttccttcttaaaaaatacattttcttatagctatagaattctgttctctactgggcccagataattatcttttaaagaaaattgcttacagattatgaacatacaaggtccactgtatctaaattctttctttactgagaaaagctaggttgttttccaggttaacattttccaagcgggttttcccttcaaagggcccatagcgcccgggccccgcccccaggaggccccgcccccgaggaaacggatgtgggcttccggaagccggaag

SEQ ID NO: 48004 - DNA, 334 bp, Mus musculus
  source 1..334: mol_type = other DNA
ccacaattaagatatttgttgtcaaagaaattagtaagaagtccaagtaataacagattgctatattaatacttttaagggctttgagtcacctgaagagatctctcttacccgtgttctccagggatgtcacgcacatcccaaagtcttaggcgcatatgagtcagcttggagcatcaaatgctcctgttaaaagatatcacctatttcccaggccactgggcactgagagggaaggcttccagactcctgggaaaccagaatagtccacaagtcaaaccttcactgtcactcacggttctccagctgctgaagaatctcaagtgtgagatct

SEQ ID NO: 48005 - DNA, 339 bp, Mus musculus
  source 1..339: mol_type = other DNA
attaaattatccttccttaacaatgcagaagtgtcaccataataaatttttatttttggaagctggtggtatgtataacaaacacaatgtgcgaagttactcaattttattatattctgttacttctgacttactgattctataagcaactttctgatcacagaaaatttggtacagaggccatgtgtttcagctggaagttgatttccactgtgagggcaagggagacagttgctataaaaagggatcctttctcccatagtcatcctatgtacacagatgaggctgcctgaccttgacaagcgtgaataagtaaatatgctattttataaagcttgt

SEQ ID NO: 48006 - DNA, 147 bp, Mus musculus
  source 1..147: mol_type = other DNA
taagacactctcagtcactgtagacctggtctggtctaggctggggctcctagacttcctactaggatgctctgggaacccagtggcctcacacctgcttgaaattggccactgctgtcccttaagtgagaagccacagagctgcag

SEQ ID NO: 48007 - DNA, 548 bp, Mus musculus
  source 1..548: mol_type = other DNA
acaggggactggcggctgtcctgtcctgttggactggctagtcgcagcgccacctcaggtacctgagctccactcgtgttgactctccgcgtctgcacacctagtggacaaacgcaggctttcaggcttctcccaaactggaagagggtggtttgcggcagcgacctcagctggcttgcccattttaaaagtttttatatttggagaagctgggccggccacaaccctatccgaggtgtcaagccacgcgtagattcagaggaaaggctgttcgctatagactgtcccctggccccaaacgcaatccccgagttgcttttgttaaaaggggatgggggaacagatctccgttgcaaaaccgggtgtcagacagctgtaaaccggtgtcgacaggttgtcaaaagccgcgggggctggttgggaaggagcctgcggcctccggacccacaccagcagacgggccgtgcgcgcccaccggaggaggaggtggcccggcgggcgcggggcaccacgtgctcgccgtgaggggcgggagcggccagcgaggg

SEQ ID NO: 48008 - DNA, 367 bp, Mus musculus
  source 1..367: mol_type = other DNA
caaaaactctttttggaccagagtttgttgaagcgagtcactcactggcgttccgggtagatgcttggcagcccaggcaccaggagcaggagaccggacgggcagcctcagcctggggatgcccaggcaactctgcaggtgtctcctgccctggacaccgcatgcgacctgggctgcctccaggtggatcggacctggcccgctaggcgagcaagagcgccggcagtgcccgccaggctgggcttcaccgctgcaggctgcgggccggggcgggagtgggactgcccctcccccggcctcagcggggcctcggcggcgggcggagcaggggagggggacagctcggcgttccaatgtccctcggaaa

SEQ ID NO: 48009 - DNA, 599 bp, Mus musculus
  source 1..599: mol_type = other DNA
gtggagtagcacttcgcacgagctcaagggaaatcagccgctggtgactttggagctgccacccgcaacgcgtccccgtaggacgggaagccggcagccgcggcggcggcggcgtccgccgagtactgcagcgggctgccgaagccggttgccgcctgcgctgtgaaggccgccgagccggggtacgggctgaacgcggagcccgacgccgaacgcgccagctcctcgctgcgcggcgccgccagcgcggacgcgccgtacgcggggcacgagtagagcgccagcgagccgggcgcttggtacaggtagccctgcgggtaggacatggtgggcgcggggcgcggggcccgcgtcacacggagcagcgggcagcgcgcgcggcgccctccatccacgcccggccggggcgcaccgaggccgcgggccggagcaggctgggctggtatcggcggggcggcggtagcggcagcgcggagccggtgggcgcagccgcgcgccaggccggcggtcgggtttccgagggacattggaacgccgagctgtccccctcccctgctccgcccgccgccgaggccccgctgaggccgggggaggggcag

SEQ ID NO: 48010 - DNA, 432 bp, Mus musculus
  source 1..432: mol_type = other DNA
gagacctttgtagggcagcagcctggacctaccactcctgtcttgggctccagcctcaggctaaagaaaccagtgaacatctgtcctcttttgtgttccaggtcagaggcccagctggatcctgatagtcctgagggattcctcttgctcaagtctgtgaggaagacttgctgcccaaacagccaagagccaggttggttgggactattgtgaccacaagaccagaactgcttgcccaaggcctctggatccacagggcaggcctgggctgtcctcttagggcccaggcattctcgccaagaggcccccctacacccgcgcacccggtgcgcggccagggcggaggggaagggcgcccgcgggggcggccgggtgggagcaactcgctcgctcgcccacgtcacgccggtgcgggctcggctgacgaccgcg

SEQ ID NO: 48011 - DNA, 420 bp, Mus musculus
  source 1..420: mol_type = other DNA
tccggacagctttccaatgctgggtaaacttccttgcagtctaactggaaactgaactactgcagcgaagttgactgcacaaactgtttcttctgctgaacaacttacttctttactcaaaacaaaaaatctgcattttctccattggcataagcagctgtgcgcctgcgccggcacttggtacgacgcgtggggtcaagggtcaccggcaagatggcggcggtgctgaccttccgccggctgttcctaccggccaggtaacggccgcgcccgccatgcctggaacccaagaggcagcaaggtgtgcttctgccaggctagcgcgcggcactactgggctcaccttgtgcaacccgctgctccggttatctttatattaagttcaatgttttaacaaatgattgttgtcggcatgcaggt

SEQ ID NO: 48012 - DNA, 434 bp, Mus musculus
  source 1..434: mol_type = other DNA
cctgctgctccctaggatcaaggagcctacgggaagagccccgggcctagtttggaaatgcgccttgggatcgggacagtgagctgcccagcgcagtacctggcttcaccgatcctgaaagtgcaggactccagagtagaattcttctaacattctcagcgcgaggggcccgccgggtttgcagggcccatgtccttcctccctgggcgcaatgcagcgagggcagcgggcggctgcagccagcgcccggctaattcttcactgaagactcactcgtgtgtcccttcataggtctcatttgtaattgagactaatgattacaggagcagctgctcgttaattaatttctaattaaaagtcgcagacatggatcgtgcgcccggcccctgtgacctgtctgaggccaggccaagccacagagtgggctgacgtca

SEQ ID NO: 48013 - DNA, 480 bp, Mus musculus
  source 1..480: mol_type = other DNA
cattaagtttgctcatagtccttaagcgtcacgtgtccaataagaagctttgaagtgacaagatctgtgcgagcatttttctttcatttctgtcaggagttatcagaggctctggtgaatttagctcctttttcctgcaaataaaagcacctggtgttgctacaaaaggcatttctttagtttttcaaatgtatacattttgatcagaaagctactttgtatcctattttaaaacaggatacaaagtacaaaaggcatccagtgagtcaaatgaatacattttatccgttgcgctgagaagtgggcctgcccagttcagtcctgcgacccaaaatttaaggtctccctacacatgcaaattcgcacgcgcaggcgcattcatagcccagagcggtctgggcggggcaccccgttggccccacccacgtcacgccgcccctcccgcgcctgcgcctccgggcggccgcgcatcctaggccc

SEQ ID NO: 48014 - DNA, 380 bp, Mus musculus
  source 1..380: mol_type = other DNA
cttcctggccctggcattgccctgaactagggcatataatccccattgatggccgactaggtcatcctagggtaacaaatacagaagtccttaatgacaacctactttgctatacataaaaataagatgggtagatttaaatccaatgtatatgaattaactgtagaagccctatatataggaattacctgtacgcacacatatatacatatatacatgtatatatatggaaattaactgtagaaatcagtaaactagagcagtgtctgcacatgtaaacatatgacctgtacattttgtagatctgcagaggcggataaagaatactgagacaaggaaggctttatctgctccttagtcgtcctctgcacagcacacgt

SEQ ID NO: 48015 - DNA, 259 bp, Mus musculus
  source 1..259: mol_type = other DNA
tggagacataagcctgaaatcccagcatgagtgctaggttagcctggcttacagagcttaaggctagccagggcatccggacagctttccaatgctgggtaaacttccttgcagtctaactggaaactgaactactgcagcgaagttgactgcacaaactgtttcttctgctgaacaacttacttctttactcaaaacaaaaaatctgcattttctccattggcataagcagctgtgcgcctgcgccggcacttggtac

SEQ ID NO: 48016 - DNA, 307 bp, Mus musculus
  source 1..307: mol_type = other DNA
ccaggaaaatcggtttctgaagcaggctgactggaaggagccggaactttagtgcctaaggtgctcacgggtcagggcagtgggccacctccacagcaccgggaggtgcgtcccaactggggagacccgggtgagccttgggagctccgcacagatcgtttctgacaaccttgctgaaaccagttgagtggtgcaggggcgctgcccagcccgtcctccgcccaccctgggcggaacagaggcggagccagtgccagtgggcgcccccgacggcgggcggggctaggcggaccgacccggaggcccg

SEQ ID NO: 48017 - DNA, 371 bp, Mus musculus
  source 1..371: mol_type = other DNA
gggctgcctggtacccagtggagcctccccttctcagagaaggggagagggtctgagtggcctacccccttctgagatgagaaggaaagtgaataaataaatttaagaacccagatggtgttagccaggattaagatttatattacgcaagtgacctgtaaaaactctttttgaccttttaagagccaggatcagggtcgtccccgccatcatcctggggcgccgccgtaaggctgcacgggtgccgccaaggttggtggcggacctgggctcccacaggcatgccgggagtacggcgcaagaggctgacgtcacgcgcgcgcgccggtcgtgcggtcgtcgtgagggtgcgtggcggagcgtctggctcc

SEQ ID NO: 48018 - DNA, 276 bp, Mus musculus
  source 1..276: mol_type = other DNA
atatttgttagcatttcagtgtttgccaaactcagctagcagagctgccatcctaaggtcgaggtcgccgctttggctgtgtgcacaggcaagcgccctcacccaatggccctggccttgaaaaagctaacgcagggcttttacctagtccccaccacaataaagccttaacctatatagtagaatttcagctgtaatcattcactgtctgtgtcaaccacagcaggctggagcagtcagctcaggactggtcctcatgcaccagcattgtgacca

SEQ ID NO: 48019 - DNA, 431 bp, Mus musculus
  source 1..431: mol_type = other DNA
aagaaattttttgttcttcttgacaaactcaaaccatggaggtttagaattataaagattaagcatgtggtaagcatttctctgactccatgtctcacctcattgcagctgtacctgcgacagcccaacaggactggtgcagtggctgtgtggcttggatagtagtataccctctaggcactacatactgctcattagggaaacccaaagtagactgtatactccaagtccatgggccactggggtggatgagcaattggaccataacacaccatgtccacatgttgccatgagctacaaggtattattattacctggaggaaatggaaagtgtaggttttagtggccaactgaacaagttccagttgctcactgatcacatgtcagttatcaattaactgggctcctttaaacaaatggataaatgcctc

SEQ ID NO: 48020 - DNA, 334 bp, Mus musculus
  source 1..334: mol_type = other DNA
acatagatgagcacttatgtacaaacaagtgtgcacatgcacacgtgtgtggtgtgtggatgcagatgtgtgggtgtattcacaagtgcccatgtgtacatgtgaggctatattcatgtgcacaaacatattcttgtcctcagacagaggctaggtttaggctccatccagtggtggatcctgcttggcatcgagaccactgggaaggtgcagtatgcaactgatcatgacaggctgtgtctgaagggtgccaccaacctacgggtgggcctttaagaatggcatccactcctggggaaggagatagcttcttcctcagtggagggggaagctg

SEQ ID NO: 48021 - DNA, 251 bp, Mus musculus
  source 1..251: mol_type = other DNA
tccttggcccttgagaagctcagggagggcatgccccgcttcgaaggctgagtaagtgccagtggcaacacgagcatagtctagggagaatcagtatcctgctggtctgtacaggacatcaacagacaccatctatttgatctattttccacgcccaaccctggcctatgtctgggtttgtgcaggaggagggccttcagcaggatctcgcagataaggcattctgcaggacgcgccctgaggataagagc

SEQ ID NO: 48022 - DNA, 350 bp, Mus musculus
  source 1..350: mol_type = other DNA
aaatgcacaaggtcctgaaattccggaagatctgtgacttccaccatgtcccttggagccaaagggaggaactgccaccctccaagtttgggctgcaagggttccccaggttggatcgtggaacactcctgccagcagagtctcgggcttggctggctaggcctgtcccaaccccagggctggcctaggttagcagcctgacctggtcagggcctgggcccagatcaccagcgtaccctgagactgggcgtggtcgttccggaagcctcccgaccccgccccgggcaaacttttcccgagccgtgggggcgggcaggtgaggtcacgtggcgggcaagggcgggccgggc

SEQ ID NO: 48023 - DNA, 324 bp, Mus musculus
  source 1..324: mol_type = other DNA
ctctaggagttgaatgttctagagcagactatgtgaacacatctctgaacagagacaggctactacattcttgatctgtgtgttacagagctctcagcgggccaggactcactttagtcaagaaggttgtctaagacgtaggtaactctcttccagggttctctctttcaaaggaggattcctaataccgactcttgaatttgggaatctcaaggtaagctctgtctgccctcagggatgccctgtgcgagtcgttgctcagagcaggcactgcgctacggtccgcggccgcggggggcgctgcgagaacccctgttaaagccc

SEQ ID NO: 48024 - DNA, 376 bp, Mus musculus
  source 1..376: mol_type = other DNA
tgccaggccagtcagaacttattataacttccagggttcacagctgtgtaaaactgtagataactgtgaagtccacaaacatgaagagtaattcattttctctgtcttacattggggattgaactccaggcctcaatgatcagatttgataagaataatccttttatttcacttattggtcaaaattatatgactggcatttattttagatctctacttttaggaaaagttgaactttggggccatcgcagttggaaggtcaaatcacatgtaagttgtacctctagccttattcaagagggcaatactttcttaagccatgatggtttttcctcttcggatggtaccaaccaggaagcagctgataggagatggc

SEQ ID NO: 48025 - DNA, 206 bp, Mus musculus
  source 1..206: mol_type = other DNA
cctgtacactctggacagcagattcaggttagaatgaacctgccggtggctttctggtggtgatgcagccctaaacttaagctaaaatttcagacattgaggaaaaaaaacttcagtagtattgtattgaagcatgtgcatctcagctttaatagattgcaatagttttctagtgaaaactcatgtaaagccgggagtccccacgg

SEQ ID NO: 48026 - DNA, 446 bp, Mus musculus
  source 1..446: mol_type = other DNA
tatgaaaattaataaaaattcagtgtttgagacaagcctgaaacattgtacgtacataatctttgacatggagctcatcgtggctgcccggagtcacgcgtggtggggtcggatcaggtcgcgccccgcgtggtcggactccgtatatacgctaccttccgctgcgctgcagaacctccacatggaccgcgggcgattcgtcgcccaccgcctcgtccatggcgccgccgccgggagccgagggaatgccgccggagtgaggccgcggtcgcctccctgcgccctgtgcgacagccttctccgatgtaggaggatccaccttggctaagggccggccaaatccacttccgccgcccgagccgctcggcgctttgcaacccgccccgccccaccgagcttcgaatctgccgcgcgctgcgcaccgccccaccctgacccggaagcac

SEQ ID NO: 48027 - DNA, 292 bp, Mus musculus
  source 1..292: mol_type = other DNA
ccagcttcagaggcttctccagtggcgtgtctgtataatctgcacacagaccgtacgtagggttcccctgtgatctagacagaggagttgtcaaaaccacagactatgtaatctcaaactgacagattggtgatcaccactgaggatgcttcttgtgcttagatagcacgggatccggtgagaagcggctgccggtagctcgacctgcgccagtcggaagtagcgccttcgccaccgccaagtgcttccgggtcagggtggggcggtgcgcagcgcgcggcagattcgaagc

SEQ ID NO: 48028 - DNA, 452 bp, Mus musculus
  source 1..452: mol_type = other DNA
caagaattagaagtaactttttagtcattgtgggccccatttctgaagtttcaaaacaaggtttcctcaagcatgagttaatttgtcacacacacacacacacacacttactcagtgggtgacttggttagagtctgagactgaagagtctattggacctcaccacagagtcagcggggtggagagactctaaggatccttttcgtgcaggtaacccgagtggccagcatctcagtctgcgactgcgcctccctacttgcgactggccgcacgcccggggccccagggccaggtgtgccctacagcgaccgcaccctgggtcgagcggcgtccataggctggctgtgcctgtggcagccttgtaaggcagtggctgcctcgggtgtcagggccttagtgcgcgcctaggcggtgccggagggcggggcccggcggacagctctgagagctcg

SEQ ID NO: 48029 - DNA, 365 bp, Mus musculus
  source 1..365: mol_type = other DNA
ttaaggactaaaacagcttaaatgcatgtaggttttaataaaccaccggaaagagtacttggtagtaattaatcattagcataaccttttactgaggccttcagtgaagatgtaaaacgttagtaaacagaaacgttacttcccaagtttctactggcgtccctgacagaccatccgtctccccaaggtcccacttggactctgatcttggtcagagaatgaggcgccacatgtctttaaagctttccaatgcctggaagttattagtagaccccagtttgatgaaaggactttcaatgaatgccccgggcactaacagctgtttccctctgtccgggcccgccccttgcaggcttggtcccgcc

SEQ ID NO: 48030 - DNA, 395 bp, Mus musculus
  source 1..395: mol_type = other DNA
ccatttgaaatgtgaatgacgaaaatatctaataaaaaatttaaaaaatacacacacacaaagaatactgtatatatgcaaagttcatagcaatttttaattgtgatggaatggccagaggattgagactactctggaatgagaagcttcgggtgcagcgtaccccgcaactaaagcgactgccagtgggctagatgtcactcgaggaggagcggcctcgaatccacaggttctagctgctggcttaggagcccacagcacccagagagcccgggcgtgagcagggcaggcgggagtgcttctaacgcagcaggactgtttgcgttcacgtgtgcgcagcgggggcgggaaggccccgccctggcgcgggaggaggcagcgggattaaaggccac

SEQ ID NO: 48031 - DNA, 231 bp, Mus musculus
  source 1..231: mol_type = other DNA
aagggagggtctgcatctttaaaagactgacttcatcatataacacaaccaaacctgtcagggtagggttgtcatacccgccaaaatttactaaaagttcgtaacagtgtggggaaatctctagattccttcagctggagtaattccaccagctgctggctacgcgagcagctatcagcaggcaggtagtggaatcttgaatcaggcctgaatctgtaatccctgatcctg

SEQ ID NO: 48032 - DNA, 324 bp, Mus musculus
  source 1..324: mol_type = other DNA
ctatagctgtgctaaataatggatgattatccacatggaagtttcagatgtacaaggccatactcttgttagttatggggtaaacaaaccccccataaagacagcatagcagttcttattataagtctctgtttgagctattcacagtattcagatttgctatgcattttcccatttagggacattccaaactagtcacaactccagagtgcacaaaatgcactttgcgtttcatcacattcgcactaaatcaagtgaaagctttcaccactttccgttacaggtcgagggagctcacccgccgcagcttcgggctgagacaca

SEQ ID NO: 48033 - DNA, 321 bp, Mus musculus
  source 1..321: mol_type = other DNA
tcagctgtgcacagaagaggcaaagtaccttttacttctgagattcccttgtagggaagagaagagattccaggagtctctgaaccttgtgcttgttagtaagagtcactgcctatttctcattcttggtaaattctgtgtcagaaagtagcaaactaatactttatgctttgcaaagtataaacatactgtatctttaatcttttttattttcctattctctggccccaggggccaaggggccccaacccacaaggactccctgttggtgcccgggggcagggacaaggatgtgcgtgcgccccgcttcgggcggggcgg

SEQ ID NO: 48034 - DNA, 536 bp, Mus musculus
  source 1..536: mol_type = other DNA
ttccccaaatatattttatctgcagttggttgaacccaccaacgcagattttggggttataaagttcaaggaaataattcaaaatataaagtgttgtgcatgaatatattccatatttccttatttattaataaaaaaacaaagaaataaaatgggaacggttcattgtaaacttaaacaattcaaaataatggtcaaaaccttaatctaatattaactgaaaattcaggaaacaattacgattattggtttactttttatgctatttaattccaccgaacatttcagctatactcactagaaaaatagaaaaactattgacaacggccgggcctccagcttcccagctgctgtaacgaagacgaaagctttggatatagttgaacgggctcttatggagcttgcgatgcgttgctgccaccctacctcagacgtgttgccaccgccgcgtttacagggcgcaggcgcaccaccactcacgcgagccaggaggggcgtgttgcgcaggcgcagaatcttccaagcccgacacccgc

SEQ ID NO: 48035 - DNA, 436 bp, Mus musculus
  source 1..436: mol_type = other DNA
aattatcaaggtttgaaaatgccttctggccttgcaagaataacatttcattgaacatgcattttaatatctatttcagaaaatagacagggcctttactttgtaattaaattgttaagtaggtacaacctgtcaaatttagtttacgttaattcttcaaatatctctttgatatttaaaaacagctcatcacttataagtcttagtgtccagaatgcaacaggccggtccctccctggccagactccacgcccgcgacctcggggtcgtgaccttcgccggaaagcagtcggcttcggcccactgcaccatttcgtggcactaactccaagccccagcgacagactgcgcttgcgcaccgagtcgcgcgggtgtcgggcttggaagattctgcgcctgcgcaacacgcccctcctggctcgcgtgagtggtggtg

SEQ ID NO: 48036 - DNA, 411 bp, Mus musculus
  source 1..411: mol_type = other DNA
acctatgctagggctgtgaacccacagcctataggtacctataggtacctgcatttatttgcgagtgtcactggaaatacatatcacatttatttttagatttgtttatttatgtatatgagtacagggcatgggattccattacagatggtcatgaaccactatggaagagcactcagtgctcttaaccatttctcccacttctgcaatgaaggatcttggggataaaagatgatgcagcttcatggccagtattcttaaaagagttgtctgagatatcactcctaggtattaggaaaaagaccccctaggtattaaatatccatttgtattgtaagccttaggctacttgtgcaagtatctagagcctcttagtggtcccacggcttgagtccagaagcagcagcagct

SEQ ID NO: 48037 - DNA, 209 bp, Mus musculus
  source 1..209: mol_type = other DNA
tatctgtactaattaatacaatacctttttggtgaaaaggacctgcgtttccctgctacaaaacaaaactcttgtatcctaaaactggcccatcaaggcccccaggcggacctgcaagtcagacagcctgagcgacgatagtggatcctcttccagggctgcatgggaccacagatagatgaggtccgggcggaactgccagtcacaca

SEQ ID NO: 48038 - DNA, 346 bp, Mus musculus
  source 1..346: mol_type = other DNA
taaaactggctttaaatttatttatttaaatgtaggagtgctgcctttgatcccggctctccaggcggatcggcaagtatcagactgatctacagctagggctgtttcaagacagctagggctataaatagcaatcctctgtagtgtagtgtcttttccttattaggggtagggaagttctgggggccacctctaatctccccccccgagcactcagaatttgacttcccaggttcagatgaaaacatctgcatccaataggtgtccttccaagttggcaggccaatgccactgcatttcttccgttagtgaagttagcaaacaaaactcagggtccctaactttg

SEQ ID NO: 48039 - DNA, 397 bp, Mus musculus
  source 1..397: mol_type = other DNA
gcagcacttaatttcatgcttcactagagtcactgcagcccaataccaatactaagctattattgttgttgttattaactgtttatacataaatgatcaatatcctctctatcatctaaggattgctaggatgcaatcctcatttcagttcagacaagtgaacttgcagagccagcttctgacttataatttggttctagtatcttagtttactaaaatcgagttaaaagttgaaaatcaaatgagttgtgcctgcaattccagtactaagagacagcagaacaactacaagttgaaggccagcctaaacagaaggtgattttaaatatctggaccttttggaacatttttttgacatgctgtcataataacattgaatattactgactattatatt

SEQ ID NO: 48040 - DNA, 490 bp, Mus musculus
  source 1..490: mol_type = other DNA
ctagtacttaagtattgaataggcactcactacttatagtgccacagcagtggctggtgagggggtgcagaagggtgggaacccctttcatcctgtctgccaggagccagagtatttttaaatatgaatacttaatggagttacgggagaaaagtcattgttagttttcttctaaaaaagtattgccattcccttatttaattgtcaacctagaatagcaacataaatttctgaatttacatacgtattagatggtttcaaatttattctttgaagttttcaataatgaaaataattgagtacaattcatattgtgttaaactgttctttttttaaaaatccaatatgcagttttagagatgtttagaatctggcattaacacagcgtgtgtcctgtattacagaatacaatctcaggccgggcgccgcggcagggtggaggagggcgggagccctagaggacctcgccccgccttgtgcgcctagtgcg

SEQ ID NO: 48041 - DNA, 504 bp, Mus musculus
  source 1..504: mol_type = other DNA
tacaaaccctgagcagacagtgttgaattcagggctctctgcagtgagcccagggcaggaaggggagggcctaactgagctgggcgagggctcagggctgggtcggaaaagctgcctcactgagctgtcccgctccaggccggaagctgcgcccgcagcggctgaagcctgccgcctctcccaggcccagtcgcggcgcggcagctcgccacacccaggaggtgagtcgtactccagactgagccgcggggcaagcggcaaaaggcctaagtcctggagtgtcccgccgcagtctcggggcgttgcccctctttgcaccttccagagtgggaaagagatcagaactccatgcctgcgggcaagcagctcctgtggctgggcagaagagttctgacctccgtgtgaagtcagggatacctctttcctaattagctttgggatggggcgggaccacgctagcttgggcgggccctgtcctcccacccggcagctgtgtcctgtgcg

SEQ ID NO: 48042 - DNA, 519 bp, Mus musculus
  source 1..519: mol_type = other DNA
gttaaaagtaataggattaaggttgtctgtgtgccaagcactcaattcaattgtaaattagcaatgatcagacacaaggcctccactcccagtgttggggaggtgaacagaaaaaactgttacttctcaggtaaattaattcagctgactgataaagatttctagccagcttcataattggaatcaaacttactagaagactcagaatctgtgtcttcttgacggctctgtcttctcttttgtgaaaaaatagacagaacctcattccatgtattagttagggggtcctgccatttaaccatggatgccaatgacgatccactgcagcctgacctttagcatcagtttgaccttgaagattataagaccccctttttatttttaaagaagatattgttttaaagttcaccaataccttgtccttgagaattataaggaatcccagtaatagttaaattcattatctgttttaatctgatttggaacatcaacttgctccttcggcaagaccaagatgac

SEQ ID NO: 48043 - DNA, 228 bp, Mus musculus
  source 1..228: mol_type = other DNA
tattccacaaagattcttgctgtattttcgttgaaaatttaaaacatgtttctatgttaaaaactcatgttctccaagtgatttaaaacgcactataaaaatgttgtttcaacactgtgtagaggaagtgcttatttattgtgtctgttttataacaaatgctgatactcaagaaccattataagaattcgtttctcacagctacaatccactcagtcgggagactga

SEQ ID NO: 48044 - DNA, 513 bp, Mus musculus
  source 1..513: mol_type = other DNA
agaaggtctggcatctaggacacagaccaaggattctatacttgatgctcttccttgaacagcaaattaatatagatgaacaataagtccactgactctatgtaatttatttagtgtattttaccttttaaaagacttataaattgtcagatattcacatttactttgtagtgaacatatgttcgtccctggaagctgtgtgttaagcaatatggccactctaaaagtgtggctacagaacttttattgtttacccttaaatcatctgtcacgtgctgtgagagccacttttattaatgcctcaaacagcccccaggaaaagtagatgctggtttaaaatttgtatccagtctttgaattgccaggcagagaattcctttattgcaggccctgctggccctgggtgcaggcaaagaatttgaggaaaagtgttccagatgtttctaatatattttaaagttagagccatttgataaccagtaggttgatgaacactctggtttttcccccttc

SEQ ID NO: 48045 - DNA, 354 bp, Mus musculus
  source 1..354: mol_type = other DNA
agacgtcagttatactcttcaagggcctttgaaagaagaagatcatatgatgagctccagtgcatattctattcctttgaagtcacatacatgtatgagttgattttgaaagtcaaaacacatttaatgcactggtataattttgtgcttaagttttccacacagtctcacacaactactgaagactacagctgacttggtaatttcaagtctggaattaaaaataccttttaaggaaaagctctcttgagacagcctacggtgtctgcaccaacaggttgacctatgtgttaggctcacttggtaaccttggacgcgtcaccccgcccagggtggggcggcccgcagctgtgg

SEQ ID NO: 48046 - DNA, 522 bp, Mus musculus
  source 1..522: mol_type = other DNA
tctcagctgagcaatactgattcctaataaacagtaagaactcttaactgtgtgtgagatgctttgaggcccttttggggcctccacaagcttcgaaagaatctaaaatatccttacattaacatgatccttctttttcagtgagctattattaaataatgtaactggaatgtgtactgaaaaaaatccaagtaaactgctacaactttcttttttttttttttcttttttttttaaaccacacacattaaaaatccatatgccaaatatagcttgcaatagtaaatcaaattaattggtgcgtgaacaaagaaccttttctgcagctgcatccttcttcacaagtacgattttacaaaacagccaaagcgcatgttgtaaattgacaaatgggcagggggctgcctcctggctgggctctcttctggtccccggcgggggccaggccgcccctcccccgctcccggctaaacttgctgcaggcggattggcggcgagctgctcccgggctccggcgtcgtc

SEQ ID NO: 48047 - DNA, 271 bp, Mus musculus
  source 1..271: mol_type = other DNA
agaagtcagtttactttcaccagccctaaggcttttggaagcttagcttggcattagaaaggctcattgttcaccatgaactcagagaaagctttcctgaatggttgtgtttttatttttcaaaacaaccgtgtttccaaaagaagcttggggaggacacaagacagcctgttgcttacacagccagtgtgcaatggtatgactcataccaaaatgaactgactttggggacttgtaactcctcctccaaggaggttccttattaaatgag

SEQ ID NO: 48048 - DNA, 384 bp, Mus musculus
  source 1..384: mol_type = other DNA
ttccaagtgtgtgatcacatggtaaaaagttcactacaagtttgcatacaaattcaggccattaattgactttacagagaatgtctacatgcacatacactaggagtaattatttagcttacaggttcatggaaagttaaaaaccataactaagctgtccttgaagttttatttaaataaacccagtcaatttcatttagagaagcaattaagcagttctgttaaagaggtgtaaatatctttctctgcatcaccatggcttttcacctaatattagcctaatctgggaagggttgacagtaatatagaacttcctaatgtgatttcagaaggttctgtaacaagttctcagaggttccattgtgtagtaataaagaaccccag

SEQ ID NO: 48049 - DNA, 547 bp, Mus musculus
  source 1..547: mol_type = other DNA
aaggatcattaattttaaaaaatccttattattctgtgtgagcagggacatgcatgctacagcatagttagttcctacatcattaaatgagctctggggcccaacacttgggttcaagtgatcaacttcagcccgggttgtgtgccagtttacagagaatgcttgcaaaccttattgtgttgctcttaatgtaacactgaaagagaaattgaaagtgcttaaatctagtaatttttaaaagctttggtatacacaaatacttaacctatttgtatctcaagcaatgagttatttgtgttaaagagagcatattacacatctgagtgcatttaaaatttggataaatttagagtgagtccgattatcgttctttgaaaaaagaaaagagaaagaaagacgggaggggagccagtacttcctagcacgtgacccctgccccgcctcgcgtcgcgcaggcgcaggacgcaggggctgcgggagctgggtgcgaggaccccagcacagtaagttaggttctcgcggtgtctggcacgctgctgcttccggt

SEQ ID NO: 48050 - DNA, 199 bp, Mus musculus
  source 1..199: mol_type = other DNA
cactaaacacataccgctctgtattagatgtgtaaggtgttttattacaattaatctgtacacaatgagagttgagattttaaataaatagcattactcctccttttccgtgtaatgtacaattatatatacctgaaacttatcagtgaataatttgacttgagtaccttttagaagttccgtatctcgcatgcgcctg

SEQ ID NO: 48051 - DNA, 498 bp, Mus musculus
  source 1..498: mol_type = other DNA
ctttcactttccatatgaatttaaatcaaatttaaggtgatgcatacacaaataacttctttaaatcagtgctaacacaagtatagaatgtctagattagtggttctcagcctttctatgctgcaacagtttactcatattatggtgactctcccaaccatacgattatttttgttgtcacttcataactgtaattttgttaggtatgagttgtaatgtaaatatctgatatttccgagcaaaaggtgactcgacctctcccaagggatcgagagccacaggtttagagactggcttctttctactactttattagtatgcacatgcgtgcttgcaggtgtgcgcatgcgggacccggtgctgcgagtgctaacgctgcgaccaccgacaccaacagcaacagcatcgcgggcatggccgttcagaagcggctgctgagcgggtctcctgtagcctgctctccagtcatgagcaggggccggactccaggcgcatgcg

SEQ ID NO: 48052 - DNA, 478 bp, Mus musculus
  source 1..478: mol_type = other DNA
caagaagacgtggcttattgatttttgggtaataagacacccatatattattggtgtattaatgcatttgaaaaatctttaatacattacgttccctcttaagtactttattgatttctgtcattaatgcaaaattgacacattattggtgagatagatttattaccagtgcacacaaactgatcacaacaaacaactataatattgtgtgtataaatatatatgtatatatatatttatatgtataaatatgtgtatttgtatgtataagaatatatacatatatctttaagaatacacctttgggaaatgtagttcacacaaaagagccagcaaatattttctttctttttactgtggcttttgtcacagagaggtaaataaagatatatgtagtttgactaacagtttgcaaagggaaactcttcccctttgagagttgagtcatatcctgtggatctgaagcaatgggtggtat

SEQ ID NO: 48053 - DNA, 562 bp, Mus musculus
  source 1..562: mol_type = other DNA
agataagtcattaagaatataactgaaaataatattagtcttcaaagttccagatgatatgctcggtgttgtcatcttagatgtattatggaaaatatctgtttgtatgcaaataatacatgtaaaaaataaagatacacaaaacaactgttactatttcaaatttcaaaaatatcttgctttacttcatactaatggcagtaacattaaagacattcattcagttcttgaagtgacagtttatgatgaagatctgccgactttctgggcagagtttttgctcaagggggggaaaaaaaaccgtcatttctcaaccaaggtttgtaataagaacactaaaaatttttaacatactcaataatttttcttgacagacttgatcctggtaatgaacaggtacttgtcagaattatcttgaaatagatgtgatttttaatgaataactttggcttttttgtactgctaaagagttcagttgcacgaaagcagaatttctgtcattcctcattttctcgaaaccttgatgtatcctggagaatgtgctcctggcactgcctggcac

SEQ ID NO: 48054 - DNA, 505 bp, Mus musculus
  source 1..505: mol_type = other DNA
tcctagctgcctggaagccagtcttcaagctagcctcaattaaagcaaggctggcttataggtgctagggacactgtccccatgtgggtgttagttccctcctcagggaagtacagctcataccttatgaccactgtccttaagaggatcattattaatcactctatgaatgtaattcttaaataattactccagcaatttgttgtttgctgttctgttgaactagagaagagaataatacatgatggaagtacattctataagcctgttgttatgagtgtggctattgacacagtggagttagctccaccgaaactctttgtgcttttgttttcaattttaaaacagccttatacttacagaaaagctgtaaatatcccatatttctctatggttagtatcttatattaataccagtacacatagatcattttgtgtggcaaagtgcctgccacactagcgcaggtgagctcattggccaggctgactagaccacatcaatgaa

SEQ ID NO: 48055 - DNA, 434 bp, Mus musculus
  source 1..434: mol_type = other DNA
tcaagaaagagtaacactttttgcgtctttgaataaatgagcatctttcctcgaactagacatttgtcaaaagcaatttctctttcctgaactattcgcagtgagttcatagtaaagtcagaacattccttactgcctgattctaatcaatgattataggaatgatgcgtctcagtaattttttaattaaaactgaaggagaaaagttcaattaattgaaaatcaggaatgtcccattctgaatgcatgcaaaagccgccgtcttcagctgccagtattcagtaaagggtacataatgtacttccacgttggaggtcccagggccttctccagcctcaaggaggatcaggcgagagggaaaagtcacttaccaatccctgacgcgctggccggcagccctggcgaccgctcgagagccttccgggaacgccgag

SEQ ID NO: 48056 - DNA, 708 bp, Mus musculus
  source 1..708: mol_type = other DNA
gggtcgtgattgaattcaagtcatttccaatgtttcaaaggaatttttttcctctgtagaggatagtcatttttcacaaaagagcttggggaattgaaaatcaatttcgatcaaccacaggtcccaaatcccgatttggagtattaaggtaaatgagtatcaatcctggtgctcaggaaccccaggaacacaaacccttcctttaggagaggtgctcgcgcgctgctgagataaaaagctcattttcatttcggtgtgaaaaacaattctactcgagagaaagaatgtctcgtttttcatcttaatgaaaggcaggccctgggaatccctgccaccttcatggaagctaaggtttgtagcgagcggcctagcgcccggagccccggcagcgggcagcggcctgggcgcgctgcggggctcgccagggacctgtctgcccagaagggccgggcaggccgagatcggagggcccggccatcggcacgggcgcgggccccgagttcgccaagcgcctccgcggcccagagaggacggccgggaagtcagaggcgcctgagaacgcggtaaatggcgtcttccgagctgaggcgctttacctcccggccgaagcttccggtggtggcggtaggggcgacgactaccaccgtaggactccctgcaaaggttctaggaaacaatttcccgccgcgcgctcggcgttcccggaag

SEQ ID NO: 48057 - DNA, 514 bp, Mus musculus
  source 1..514: mol_type = other DNA
aaatagtgcaatgaatagatattaatttattcaaatgatgtttattgtatatttttaaaaggcaagataaaatcactgttttcatccagttgacattttagagctaaattgcatcactctttgttctgaaaatatactttcaagaattctggaactccctgtctggtaatataacaaatataggtttgctagctaccagacagttaccgagtgtcagtcaaaatgctttgaccttaattggcaaaataatggttttgggattaaaaaaacatcagaataccatataaaatattaaaatcatttgtgtctattggaaggatttttagaccttttttggagagttagctctcaataggatattagggttaacttcctgtcttaattttgtgataaatacaatttttcaaacataggtctcaacttgaatatcattacatgaaccatggagaatattgaaattcctctttcagaacgaggctttaggatagttgagcctcaggaacagatgtagagg

SEQ ID NO: 48058 - DNA, 438 bp, Mus musculus
  source 1..438: mol_type = other DNA
ctatactggggccatcctctgctacatatgcagctggagccagaccctgtgctccatctaatggatgactgcgagcatgtctctcaggagacagctatatcaggctcctgtcagcaagctctgtagtttctaaagctaaagtttgaaacagtgcatttgttttagtttccattaaatattatcattcaaaattctctgtagcttaagcttacttgaaacccaaaaggaggtgacgtcactggacaactgtagactgttcaaagttagtgctttatgttggtcaagatcgccatgaagagcacccgtgcagagcatcctagccagagctggttagcagagtcctggcagtcctctcacctcagcaggaggtgtggggaggtttaagggaacagagttttccaacaatgtaaaagaaatcccttatatttttgactcttt

SEQ ID NO: 48059 - DNA, 321 bp, Mus musculus
  source 1..321: mol_type = other DNA
atttttaaagaaagaaagaacaaaaattatatttgttcttgcagatactgcagagaacatgcttaaagaattataaggcatgaggctgagatcttcaagtcacttcatcatcttctttagaagctttgaatctgatggggcctagagctgtaaacctgatagaaagacttaataagatctttgctcagtgcacacagggaggaaacagtttgctttccaaagtcagtgatcagacaggaggctccgtgttttcaaacccgtgactaagtaagtactccgcccactggggggcggggctcgagggcgaggctagtggctgtt

SEQ ID NO: 48060 - DNA, 238 bp, Mus musculus
  source 1..238: mol_type = other DNA
taagatatgtttaatgattgccaggagataaactttaactataaaccgctaaatatatttgtaagaaaagtgttccatctcatgccacatgaatatgaagcatatccaaattaaacatcaaaagttgtgcttaataaaaaaaaaatctaagctttaaaaatgacactactatgaaagcagggttcagtcacaaactttcctttcaaagtatgggcggccccagtaaaacggttttctg

SEQ ID NO: 48061 - DNA, 584 bp, Mus musculus
  source 1..584: mol_type = other DNA
tatatatatgtatgtatatatatatatatatatatgattttttttggatatttaaaatactaaaaaaagaacatttttgggcgattttttaactagctctgtgtgttatagcagaagaactcccccttccgtcacctcccgaaagaagaaggcagcgctgccttcctgaatggctggctgcgtccggccctggacctggcccccagacacccgagcgtcttgaaaccgggcgagggctcccgccaggacagcggcggcggcacgggcagcaccggcctcggctcgctctcgggctgcggccccgactccggctcggactcccgcccgggcccgggctcctccagcggagcacgcagcggcggccagctcctccagcagcgtctgcagccgcgacctcctcctccgcggccgccgccgccctcgccgcttcggctcagcccgcgctctgcgcgtagccccagcggccagcggccagcgggcgggcgggcgggcgggcgggcgcccggcgcgggtgagcgggcggagggcgagagtgtgcgcgcgccgtggcccatgcccgccgcccccggcgctgcgccccgcgc

SEQ ID NO: 48062 - DNA, 474 bp, Mus musculus
  source 1..474: mol_type = other DNA
atttaaagggcttaacaaaattaagcctcacttatataaaccttatatgctttcctaaggcttttcagtctgttgtaaacattcaaaccgcctcttatgaggtggtaattacgaaaaaggactttttctcacagatccaagtcaacaacgctttcttctatgaacagctcgcacgtcctccgggtccgcggcccaggcgcacactcctggcctggcgccgccgggtccctctgctcagctccgggagcgcgtgcggggccggcgctgcggccgcggcgggggtggcgggggtggcggggggtggcgggggtggcggggtgcccgcctgccaatcgcagcggcccatgcaccgaagtcggcggcgcccgctccacacctactgtaccgggagcgtgcggcaagagccgggcgcgcgccgcgcgggagggagcgcgctggaaggctggccgcagtcgcagcctgcgcctgcgcacg

SEQ ID NO: 48063 - DNA, 403 bp, Mus musculus
  source 1..403: mol_type = other DNA
caagacagcactttgaaaattctttcaatggaatttttttttccttgaaagatggtactggggaaaacgatactccacggctgcctccacccgaagtgggagtgggagtgagagtccctcttaccagccctcaactagggagagcgtaaaagtttgctattaatactggttcccactttaaatctcactagtgagggctttagaaagcgctgggatctaccacttagtggccagtgatatatattttttttaaagagcagaataaagactttcttatgtatgcccttctatttggaataatggagactgcattctgcgtgctgcggcccattgtacgcagaaggggctcctggccttagcctctcagcctgcgcgctgtttatatagaaattctaaattttac

SEQ ID NO: 48064 - DNA, 315 bp, Mus musculus
  source 1..315: mol_type = other DNA
aagcttctttcattaaaaaggaccaaaaatcttagtctttttccttggttcccttaatccttgaagaacttaggtattattacagtaggtaataaactaggtattaatacaatatgatttctagtaattcatcagtgaatgagtactcagagtgaacacttgaagaagggcttcaattacccagcaggtcagcttggacgcctgactgctggaagtccattagtcatggccaaggcggggagttcaccacgacggagtgcggacctggctgcccgctgcgcagaggacagcctgctgccaggacagtcacccccg

SEQ ID NO: 48065 - DNA, 871 bp, Mus musculus
  source 1..871: mol_type = other DNA
aattttgaatattgcacttcttttaaaatagaatgtatcaatgtactaacatgtcagttcaattaaaaactggtatgcaaacaagaatgaactaagtgcattcctgtatccacagaaatgtttatataaatgaatgagaatggaatttaccatttcaaagtgatgttgtcaggatagttttgcaaggttttaaccaagcttcagaaaaataatgaatgaaccaatgctagtgtgattgtattgaatgaaccaatgctagcgtgactctattgaatgaaccgatgctagtgtgattgtatttcaacaaaacatgatactttgttagggtgaatcgcacttttctcttaaggtcaaactcaagtactttacacttaaactaaatattaaaagtaccatcaatataatacctgttaaaagtattctttctaacattttgaaattagaagcaatttttgtcattttacttaataaaaagtaattatatgtacataactttataaatgataaggtctatttattttgctgtgtacctttcaagattatctgaaaatgaaatacattggggatgtggaaagtatttagatttcctgacatagaactataattaaaagtgactcttgtgactccttgaatatatttttctgcaaacattgaaaggtacagatgtctctgccacagagttttgatgatttttaattcaaatagcaactggctttagatctgaggatgggagaatttttttctcaaacctcattaaagtgagtaattacaagtcaagctgaatgaaatttgctcagcggggacgtgcacaggacttggcaggcatccatgctttggagggggcccagaaaggaatgtctggacatgctct

SEQ ID NO: 48066 - DNA, 528 bp, Mus musculus
  source 1..528: mol_type = other DNA
tgtcctttcaagtaaaaggcgcttattgcaatgtaagtaaaatcccctttggaaattggaacagcgttccaaaggctttataattactaagtattctaggcaatgttgacctaaatgggtaagcatttagtcgcataaatacaaacactgtatttaccacttcggcaaattgaggtatttatttcactgccatagatagtgcaacaccaataagtaggttagttacaagttgttgacaactttgtcccatcaaagtgcagctccagggcactgtgagcttagcttggctaggtggctcactctgctgacctacagacccaaggcgagcattaagaaatgcacagcggctctccattggctggagtccaacacggcccggcggcccccggacgggcggggctagaggcggggctgaaatcaggccccgccccggccgcatcggcgcgcctgcgtgctggcgtgggcctgcggttggccgcggggttctgggttccccgcctccgcccgcgcccctccgcctactctacg

SEQ ID NO: 48067 - DNA, 500 bp, Mus musculus
  source 1..500: mol_type = other DNA
taggtttttctttttaaagaaaaattttatcaccttctcttgtaagaggatctttggggaggtagggatacttcccaaagtcactccagaggggctttcatgaatgttgaacgggatagcttccagttacctgctagccaagtctccagcccctccagcaaggagccgcagattctacctccggagtagcgcgccccacaccgcacgcggctacggcgcagcagagcgcactgcttggcaggcgccgtagtcagcctcaggctctcactctgggctccggcggcgagtgcacagccccccgctgcccgtgtgggggcggtcctgtggcagtagaaccccgagcagggcagcattgcccggtgtctcctccccgcttcagcagcctgcgttactgccttggtgctgcggctgcagaagctgcggcaactggggtgcagcctgcgctctgcggctcggacgggagggcgcggaacaggtgatctgggcagtgtcgcagcgtc

SEQ ID NO: 48068 - DNA, 757 bp, Mus musculus
  source 1..757: mol_type = other DNA
ccatcctgcagaatgagggtgggttgccggaactgcctggccctccagccagggctgggcgcccgcaccacctcgctgtcagaaagccaggtcacggtcgttgtccccgcgagccagggcctcggcctcggcgcggtgcacagccacctggtctggaagtgcacgtgggtggccacggccagcagtggccggcgtcctgcatcctcagaggagtagaggtactccggaaggctgcgcagccccaggccagtgtcaccacgtcctgctccgagccgcgcaccagccaaatgttggcccggttgcctgactcgtagaaccgttcttgaatccagaagagccgagacttgtgggcataccactcgagcgccgacatgctgctgcgcaggggtgcggccgggctgtgcctcccacaggcagtccaggactcgctgctgctgctgctgctgctgttgctgcagagccggaggagctactctcagctccggaggaggacgctgcgacactgcccagatcacctgttccgcgccctcccgtccgagccgcagagcgcaggctgcaccccagttgccgcagcttctgcagccgcagcaccaaggcagtaacgcaggctgctgaagcggggaggagacaccgggcaatgctgccctgctcggggttctactgccacaggaccgcccccacacgggcagcggggggctgtgcactcgccgccggagcccagagtgagagcctgaggctgactacggcgcctgccaag

SEQ ID NO: 48069 - DNA, 352 bp, Mus musculus
  source 1..352: mol_type = other DNA
ctcaagatcttcaaaccaagatccagataaggatcttcggtgagtccggattgtagttcatttcaaatattgtcaagttgacaaccaggaatagccactacagagaccctgtgctcagtttaatcgatgctggcagaacctcaggagacagctatatcaggcttctgtcaggaagcacttattggcatccactatccacagttgtgacagtgactggatcacccttctaagaaggacgaaagtatccacactcaatatccacttattagtgagttcactcaggatgatattttctagttgagttaggaactttctttaaggggatcaattatatctcctttaaaggcctcta

SEQ ID NO: 48070 - DNA, 290 bp, Mus musculus
  source 1..290: mol_type = other DNA
aatacctcattttatgcatcaaatatttatggagcacctaagttccagatattttgtttggtacaaagtggtttggctagtctcattgtaaatgacctaacacttgactgaactaagaataatcgcctttagatttaagtttctcaggtgcaccggccacctaaaattgtacatcttttcgcagaccacgacgccgtgcatgtcacgcgtggggcctcgccttgcctgcctgagtctcgcgtggtgactctaatacgtacttgattgacatgaatctaggccggctgttg

SEQ ID NO: 48071 - DNA, 470 bp, Mus musculus
  source 1..470: mol_type = other DNA
acagctcaaaagcatctttcagaaaaatgtctttaggccactttaacccatcttaggacaaagattcattttctaaattttaacaaagctgtagtcaaatgtacttttataagagaaatccatattattcatgtcatctaagaatagacttgattttggacagcttataaattctcacaattcaaaaaaacaaccataaaacttaaaagattacttttgcactgtaagctcaaaatgtttttagattatacatttgtaaattccactgatattagccaggcaaaatataaaagcgtgatgtttaaaagtgttttaactctcacttaacatgtaaacgataggttaaacgtcttaaaactctggagaagcttaacgtgtatgcacgttctaaaagatggaagctttaaacctcaaacccttacgccgtcgggctcagggacgccggcccagtggcccacgtgaccccggct

SEQ ID NO: 48072 - DNA, 358 bp, Mus musculus
  source 1..358: mol_type = other DNA
actctcaaggccaaaagctttatacattctgggcgtgggcgcgctcttagggtcgcgctccctttcctgctagctggcttgcagcctccccgggggagcgagcgcgcaggagcctagcgtcctctgtagcggcggggagagaggcagggagccgccgctccccgtgttgtcttccctttcatgcaataaagaattgtcattaggtttgcgtatggcatgtgccattaccccaagatgcaattatcatttaaaagtgcttgattgaggtactgatgttcagtgatttattctgcataccatatacataattaaagtagtgtagtggagtaatttatcaatcaaagcgtacgtgctgctt

SEQ ID NO: 48073 - DNA, 373 bp, Mus musculus
  source 1..373: mol_type = other DNA
tgctagctggcttgcagcctccccgggggagcgagcgcgcaggagcctagcgtcctctgtagcggcggggagagaggcagggagccgccgctccccgtgttgtcttccctttcatgcaataaagaattgtcattaggtttgcgtatggcatgtgccattaccccaagatgcaattatcatttaaaagtgcttgattgaggtactgatgttcagtgatttattctgcataccatatacataattaaagtagtgtagtggagtaatttatcaatcaaagcgtacgtgctgcttttcctggacacagttggacgcggcttcggtgcgcgcgcgaatgcgcaagcccgcgcgcgcctcccccttgccccgcgcgcgc

SEQ ID NO: 48074 - DNA, 354 bp, Mus musculus
  source 1..354: mol_type = other DNA
atcccattggggggcactgtctagacggtcgtgagttgaacatgcatatggatcccaagcatagccatcttcacggtattttgtaattaaaattcagcttccaataacaatgtagaaggtgcctagactttctttatatgaaaatattaactaggtaaacatttttgtcttcccaaacatgtccgcctctttttcactgaaatgaaagaattgccacctttccttgtgaaaagggcaaaggacaaaaagaatattaaatgtttacagtgtaattaacaggagtctcataaatagattcccaaactcttcttaataaaagagacattagtggataaggtttccttatacttgccc

SEQ ID NO: 48075 - DNA, 346 bp, Mus musculus
  source 1..346: mol_type = other DNA
gcaaagctgctgctgccgtcgccgccaccgctgccgccgtcgccgccgccgtcgcctgtgctactcctggcagcaggcgtggggcagtgatgcatatcaataaccatgtacttgagatttctcatgacatcatcacctttgaccttgccgggctggtccacaatttggcggtgaaagcccctccaatgatggcccttttccccggggcagcagtacgccagcaagagggcatgctcctgcctttcatgatccggagcagatgttggaaactgccgatggctttataagagaaggacactgctgctcaccaatttctgatactcataaacagatctcattcttcata

SEQ ID NO: 48076 - DNA, 562 bp, Mus musculus
  source 1..562: mol_type = other DNA
ttttccaagaatggttccttcatgtgagaactgtagtatccagacgaagcctattgtacataatgaaagttctcagtctgactgagcactactatatgtagtttaattactaataatcttttgaataggttactacagtaataataatctctttctctagcaataatacttgaaacaaaccatagagtatagtttatgtataaaaattaggttaataaatatttatactaaaaagcagaaattaagcaaaagttatgcaccgggtggactttatacaagtctacattttatgaatttaacacttcagttactgaattgaggaaaacaaaataaaagtcgaattaggtttaaatttccatctcaatgatatttcatttcatgtgtgtgttcatatttgcacatacatgcatgctaatatatttgcatatgtagttctaaattttttttcctcattgtgttttaagaattaaaaaaacaaacactttccttggcttcttctaagcacagtgtctttgtgttacaagtattttgaatcaaggtctaagtgagtaagcgcttaggc

SEQ ID NO: 48077 - DNA, 304 bp, Mus musculus
  source 1..304: mol_type = other DNA
caaatagggctctgacaccgcgcgctctgctgctgtgctgggacagagcacccggacccgcggcagcggcggcagcggcgctccccaccctccaccggccacagtgtgcacaccacagcgatggtgactccaggtgtacctctctcgcgcgcgtgcacatgcatttgtacaaacatgcatgctcatacattcagcctgctgaattaatccattcggcccggaattctgtaaccagttgaggaattctgcaattattcacaaaatgtgctgaaatttcacctcaagaaacgtaatcttgctatat

SEQ ID NO: 48078 - DNA, 343 bp, Mus musculus
  source 1..343: mol_type = other DNA
gagatgtacaataggaaattacaaatttttcctttcaagttaaatctgttgggactttaaaagtgacattgattttcagtgccaattctttccaaggagacaggcaagcgtgcaatcagtgggccacctggcgccacaggacactcggctgtctggaaccccggcggcggccgcgcgcactctgggaaggttggggtcctgccagagcagggacatcaaccgacagtctagagtccccgggaccgtccaggtcttccggctcggccggaagtcctgcccgcatgggacaggaagttcctccctctccggaccgccagcgaccccacgccacgcagagaggagg

SEQ ID NO: 48079 - DNA, 196 bp, Mus musculus
  source 1..196: mol_type = other DNA
ttcatagttgcaagtttgtgcaaccttgactgctgaagatgaatttcctaatttatgtatggtattaagtaggtaggaaatgtccatactgaattttcaagtttctgaatgatctcagcatgcaagaagcgggcatgccgccccgcctcctctctgcgtggcgtggggtcgctggcggtccggagagggaggaact

SEQ ID NO: 48080 - DNA, 549 bp, Mus musculus
  source 1..549: mol_type = other DNA
gaatcccaaatttgcaatgagcacaattagcaatccaaagatgcatgttaatttgtggtctaatattttctacacttccctaaattaaaaataataaatatacccttttcttgatgagtctaccccagcaaatgtacatttttttgtgggtaaagtgataacataatatatgaggataacataataaatacaacaatagctataatatataggaaagaagatcataaacttttaaaaaagaatttgaaattttataataggtattggtgtttattgaatacaagcaattgtgcaggattttttattaaaaagattgtgtaaatcaaaacaaacatgatcaagccctgggctgtggtttttgttattgaaatactcacctatactttagtggagggggggaaacccccacattttataaaaattcaataaatggagaacagaaaatttaatgagcttttaatggaatgcaatgctcagagtagtaaattatttgttagttgacgatgcaatcagcatgctgattaaggttgcttggatttttactaaaca

SEQ ID NO: 48081 - DNA, 412 bp, Mus musculus
  source 1..412: mol_type = other DNA
aagacatttgtgtttatttttttaaaaagcactgaaaaatttccagttaataatttatgtcttggtggtgtccaatgaaacagtatttacttgttccttttctaggaagactagaatgcattttgtttgaataatctccaattagatgcagcaaaatttgaaaccaccatgaactaaatatggatttctagtatataatgagcgtgacatcatgtcacgtcaccatccatatatatacatacatacatatatatgtgtgtgtgtgtgtgtatgtgtgggttcataactgtctgaaactcccattccaagggatctgaagctgtggaccgggcctgggagccccgaggctccgcccctccggaaactccagagcagacgctggcacgtgaccgggacgtcacgcacgcgtccg

SEQ ID NO: 48082 - DNA, 536 bp, Mus musculus
  source 1..536: mol_type = other DNA
tctctgacagccaaacatgtgaggtatataatggtagcattgactcaaggatctaggcttaaattatttcacctaagttatagaaaggaataaactatgaatactgttttgatttttgttggagcaccgagcccggtggcgtggagggacggccgcaccacacgtcccgcaccctgggaagctgtgccacgcctccgcgcgcgcccgccgcttcctgtgtccggacgcgctcccggaaggcgcctgcgcagaagcccccgctccgccgtttcgctccggagagccgcaggtagcccgcagcggagtcgggctctgcgggcccgcccccttcctcggccccgcccactgctcccgactccagccggcggagatgaggctacggtggctctggcataggcagccccactggtggctgcggtgggggcggccggaacccgggcgttgaggcgcggcggcggcggcggccgaggcggcgctgcctcagccgctgcagcgggcttcccttcctctttagcgtagccaggaagtttggcgcc

SEQ ID NO: 48083 - DNA, 479 bp, Mus musculus
  source 1..479: mol_type = other DNA
tttatgactcaaattgtcaattctgtaactttttttgaaacagcaagctagtcgatatttaaatttagacatctcataatctagagttttgtgattttaaaaagtatagcaatacaacgtttgtatttattctttataacaatataatggtaaggaccttgaggaaagtccctgcatagtctacacattgtactgcctagagtagccttctcatgtactttgacacaatatctgttatggaaagagtttacagcattgcacaatactgctagcagctacatttaagtgactgctaaatagtgacgcctctgtataacttttgtgtaatagaatgtgagagaacatggagtcagctctcttaaagataactatcactatacagggtaactgcctggcatctatggcgagcatctcacaattgtaaatacttgcaaatggattacatggtcatttaagtgatttatttcaaaggcaacatc

SEQ ID NO: 48084 - DNA, 448 bp, Mus musculus
  source 1..448: mol_type = other DNA
tctaaaaattataatttttaattataatatgattacagcattatacataagtaatattatacagactgaaaaggttatatttatatatttagagatacacacagtgacccccttttcaaacgatattctcacaataacatttgaaatgcaaataaagaaattatccaatttaaaaaaaaacaataatctacgagtgtctagtagccttggctaatgttgatgctccatgaaactgttatgttcagcaggaataaaccaattccatctccagaagtcagaaggttcttgatatactcacaagaaaataattttatttcttgttccattaacttgaacacacatgttaaagcagctttagtttcttcaataaattgtttctggaaacaaatcccatctgaactcataggatcaggtcccattgaatcactaaaggtaagttatcacttgg

SEQ ID NO: 48085 - DNA, 261 bp, Mus musculus
  source 1..261: mol_type = other DNA
tttcctaggcccaatcaaaggtggctctgtttttgaaatgcgaagccgtttcctctccaaaccccttctcgagttataaataaatgtctattttgtgtgtgtgtgtgtgtgtgtgtgtgtacacacacgtacacgcgcgcgcgcccatgtcctggtccagttgtgggttaaaggaaatttaatccaacaattgtgtagagctgaatcctccggatctgagcagagggagtctctaagaaaggtctgggcacagagctgccc

SEQ ID NO: 48086 - DNA, 489 bp, Mus musculus
  source 1..489: mol_type = other DNA
ataaatttttgtcattattctaataataacaaaataaatgatatttagattatattaagagttgtgtttacttgtaaatgggaaaatgtgcccaaattatttaagataataattttgtaactcaacagttgagtatgtgtttatgaatttatatatacacacaagtacgggaaataaaacttgcagatttttgcatacaaactaggacaaaatatattggtttctctgacagccaaacatgtgaggtatataatggtagcattgactcaaggatctaggcttaaattatttcacctaagttatagaaaggaataaactatgaatactgttttgatttttgttggagcaccgagcccggtggcgtggagggacggccgcaccacacgtcccgcaccctgggaagctgtgccacgcctccgcgcgcgcccgccgcttcctgtgtccggacgcgctcccggaaggcgcctgcgcagaagcccccgctccgcc

SEQ ID NO: 48087 - DNA, 358 bp, Mus musculus
  source 1..358: mol_type = other DNA
aatggtgactcggatttttcagtgcaaaataagcccatttattttagttttggtgaaagcgaaatttgatccacctgagtgatgtctccactgagagcagatgagcccacaacctttctcttcagccctgagcaaactgatttgcaggcagaacaacagagcagcctgtcttgcctgtctggcttgactcctgagaaactgagacttcttttagcagtcttgggtctcaccaagcttgaggctctgaagttcagtggtttgcatcttaggtggagagggtgtggctgcggctgcctccctttctcttccagcagaaggagccaccttccaaggggggcgggccgccgggggcgcccaa

SEQ ID NO: 48088 - DNA, 194 bp, Mus musculus
  source 1..194: mol_type = other DNA
ctcgagttataaataaatgtctattttgtgtgtgtgtgtgtgtgtgtgtgtgtacacacacgtacacgcgcgcgcgcccatgtcctggtccagttgtgggttaaaggaaatttaatccaacaattgtgtagagctgaatcctccggatctgagcagagggagtctctaagaaaggtctgggcacagagctgccc

SEQ ID NO: 48089 - DNA, 432 bp, Mus musculus
  source 1..432: mol_type = other DNA
gtcaagtattcctttattacattgtgactcagaactagaacttattaaatccagaacatttcattttaggcttttatgtgaatgtttttgccaaaaacctagcttttccgaattaaatttactagcagggtccagtctaagatactcaattacagcagaattaattttgtctctggctaaaatttcaaaacgaatgctttgtctcattttcatgccaagatttgacttagaataaatcatcacttttcctccttttaaagcaaaaaagcaagagaaaacagtattttaacggcttttaacttgagtaatagaagttggatccgctccagcttcagctagcctttggagctcaggagacacgccagccgaggccccacccgggttcagcccagccccgccccagttggccgcagccgctggagacctaggcta

SEQ ID NO: 48090 - DNA, 262 bp, Mus musculus
  source 1..262: mol_type = other DNA
cgttaggcagaaaattctgcaagaagacgcggatttgtgtcagagaaaggattctctttgaacaagggattgcttccgcgggctccccattgggcagttccctagggagacaggagcattgagcctgactaaggactgaccatactcctttcccctaattcagaagtagcagcacttctcatcagaggtgggagtgcctggccagggaggcaggcggtccctaccgcaggctgagggagctcctttctgtcacaacccgcat

SEQ ID NO: 48091 - DNA, 269 bp, Mus musculus
  source 1..269: mol_type = other DNA
ttcaacgtaacggaaaattcaaacatcgacgttaggcagaaaattctgcaagaagacgcggatttgtgtcagagaaaggattctctttgaacaagggattgcttccgcgggctccccattgggcagttccctagggagacaggagcattgagcctgactaaggactgaccatactcctttcccctaattcagaagtagcagcacttctcatcagaggtgggagtgcctggccagggaggcaggcggtccctaccgcaggctgagggagc

SEQ ID NO: 48092 - DNA, 463 bp, Mus musculus
  source 1..463: mol_type = other DNA
actaagtaaggttttctgaggtttaaactattaaacaatcaataataaaaagtgagtgaaatcattaaaaacattcgtttgcaaagaagtgtctttagaattgcggcttagtggaatgccaccaagtcggcctcttggcgaggggccgagtccaccaccccgggatgtgcatcgcggccgcatgactcccagcctgtgcaccctcggatccccggagaatcacgctagcgccagggctcccgcgccccacagcgcccgcaccatccccgccgccccgcacgagccgcggccccgccgagatgaggccggtgctggtccagccacatcacccttccgggccggggcggaagaggatgcaggcccgctgtgcttcccgctcgctccagcggtccggttggacctatcgcggcgcctccgccccgacgactcgcaaaccacggtattagcggattctctcattggg

SEQ ID NO: 48093 - DNA, 270 bp, Mus musculus
  source 1..270: mol_type = other DNA
atacttcttctaggtcattaagttaaagaatgggtaacattctgaaacaattatttaaacacacaggatttccataattttgatacacttggaagagtggggaaagtgagaatcattccaagaatgtatataaagaggtgatcgtttctcacccagaagtcaaggccagcattggctggtggcccaatgagagaatccgctaataccgtggtttgcgagtcgtcggggcggaggcgccgcgataggtccaaccggaccgctggagcgagc

SEQ ID NO: 48094 - DNA, 475 bp, Mus musculus
  source 1..475: mol_type = other DNA
tgcacagacgtatatgcgggtaagacactcatacccataacataataatttaaaaaattaaagatagcctctctagtacttttatcaagttctgaagcaacaaaaatgcctatgtttcgttttgaaagactctcagtgttatataacagcatagaaaatactggacgttgttctgatatcttttagggagaacttccaactccagagctagaggtcctcagtatctctctgaagccctctcaggtagatggaaagttcacattcaacagggaactgtgacctagagactgttttaccaactagtttgccttaaaaatgtctggaaaaatacatactttgtcgattttgcagcagtcacccaatagggtaacttcccctagtgttttaatgcaatgaataattgaaaagctaaatgctgcgttaaaatagtgcatcctgggaaagctattttgtgctgggcaagaacagtccagcc

SEQ ID NO: 48095 - DNA, 490 bp, Mus musculus
  source 1..490: mol_type = other DNA
taataatctctcagttcaattgacaagagaaccacctttcacttctggaaggctgtatcctatgctaaatataggctcccagaagcttcatttttctataacatttgtcagtgtgtaaagatatttttttatatttataggctctgtccctttacctagaatataaacttaacgagaaaaatcttcgttctcttaactgccaaatatccagtgcaaagacattaaaattttcatttttatgtgactcaacaataatcgatttttcatcactgaatcattgcctcactaaaatttatagcaccgcccagccctgggcctgaggtgtgggggggtgggtagccttgtcatttgcctgaaaaggaaataacagcgtaaatgaaattgctttggatttgatacatattaaacaaaactctgtgtctcggtacaggcgccgcttggacagccgcacggggccttcggctgggcggggcttcccgcaatgccttgt

SEQ ID NO: 48096 - DNA, 486 bp, Mus musculus
  source 1..486: mol_type = other DNA
atgtcactttttttggtttttgttttgacaaacaaaatagtggtttaatcatcaataaaacacagatctatgttctgtccaattatccttttatttcgaaacaatatggacttacaggaaattgcaaaaccattacctagagtcccaggaatttattagctacttaacatggtaatcttacactacttgctcaagaccaaaatttcccttgtttcttttctaagaaatactgtactgtttaaaggaccagatgtgctgcaaatgatacagttactagcatgggtggcagtgaccacctcatttagctggccaggaccctggctcggggttgcccctgcctggccgagagcaccaagcgctgctggcgcccgggttgcaggaaggtctcgcccggacgtcaccgtgcagccccactgcgcatgctcaccgcagcgcgggcagagctcctccgctgccgtgtcgctcctgcggtcccggccccgcccc

SEQ ID NO: 48097 - DNA, 662 bp, Mus musculus
  source 1..662: mol_type = other DNA
agattcctaaaagacttttaattctctgatagagataactgggtataattgctttatataaaaacatgtatttggtccaacccctagtattatcaaaagtttacttttaaaaagatagagaaaggctatggtttaaatatattctacaattttaaaatttaattttacacactgccatgctgttccattacatatgcaggaaagggaagaaaaatgtttttcagagttgaaaaaaaattaatccacatttcttggcatcgacagataatgttatatttaaaatatacatatataatgtgagacccattatctaataaaagtcacgaaattcattttgtgtcttataataattggaagttgatcaaagaaaactacttccatttttatgacattgttgctatttttgtggacaaaaattttaaatgtatgataaaaatccaatatacaataattgaaacatacagagctttgataaatctgttccattttcagtgttgctatagtgaacagtgttgacacgaacagaaactatcttgtagcatttctgctgttgaatgcacaggtcatttgaacagaacaataattcaattctcttaataatggagtttgaaaaattaaattcttaaaaagccaccatgctctcttgtcaaaatagcacctaa

SEQ ID NO: 48098 - DNA, 337 bp, Mus musculus
  source 1..337: mol_type = other DNA
ctcagagttctgaaggctgtcaggtccaccagactggtgaaaactaagatctaaaagacttagtgccctgagatcttagtgctggagcttttaaatcatgaaaagcatgaattctttgctggcagtaaataatgtagttgtttgttaagaaaatatagtaacatgtgcacatttgtgtgtgtgtgtgtgtgtgtgtgtgtgcgcgcgcgcgcgcgcgcgcctatgagactacaaagacttagtcaataaactctatctttagaattttaaatatggttaagtacagatatacgcaatctatataggagttgaaaggaatccagccaaataaacacgc

SEQ ID NO: 48099 - DNA, 590 bp, Mus musculus
  source 1..590: mol_type = other DNA
tggtctgctgcaggtctgtgcagagtactggggaggtagggacccaggccttgggccactgcggtcccacgagtagcacctcagcgggcgccccaatgggaggcacggtgcctcccagggagagacagaggttcgctcagtccttgagccagaaggtcgagggttcagagcgggcgtccccggcctgctggccctccgggaacgggattggggcgacacccccgcgggtacggacccggggtgcctgaggttggcgggaccccggcgccgggtccgcgggtccgcctgtggactcgccgggcgccccgaagtctggggccgccgcgactcccgttccgcagtcgctgccaggcactccagcctccccgcgccttctctccagtgaggagccgggcgcgggcggcgcggggggcggggcggcggtttaaaatccttctagagcagtttctaattcccccctagcgcccgggttcggagggggaggggggagactgccgcttaggccgagccgccgccgcgcgctccggcaggccggagggaggggaggcctgtcagtctcgcgcgttgccagggcgaggagggcggagctc

SEQ ID NO: 48100 - DNA, 272 bp, Mus musculus
  source 1..272: mol_type = other DNA
ggctgagctcgtcagtgaggtcccaggacagtcaggaggccctggttcctgccacctcgtcctgatgttttaggtagtacaaagccagtggctgacactctacaaagtatagcacctgctagcatgtaatcagtttcctaacaaaatgatcttacagcaaaggctctgccctctccggagagcatgcaggctggcgtactcttaagcacctggcagcgggcgcgggcagcgccctttggagcgggggcgggccccaggggatcgggatggcc

SEQ ID NO: 48101 - DNA, 246 bp, Mus musculus
  source 1..246: mol_type = other DNA
attttcaaaagttcacttgtgtaaaacatctgggctctgcccagggaggcttcccgaattttattgaaaaatggagcaataggtgctccgaaggtctcttcagacgctgacactgcctactatttcaaattcattgaaatatattgtccaattcaaaggaccgtgtaaggaagaccttcctcccacattctgggaccgcacagactgggcgctcattatctttgtgtccggggactcccctgccgg

SEQ ID NO: 48102 - DNA, 357 bp, Mus musculus
  source 1..357: mol_type = other DNA
ttacatcaacattactttaaaaaataaccgctcctttaaaatttgtaataatgaagaaataccttagagccagtgagaagcccacaggcgctcagaggctggctctgaaccagacatggaaaggaccttaatttcctgcctagatgggaaagatcctttaagcatgagtaagatttgggccaagatggggcttcagccctgaaggactaactctaactgggtagaggcctagtcagagctggggatccaacctagccagatcgcccttcaggccctccagggcagtaatctctctgctcgggagcaggctggaggcaggctcagcccgcggatgcttcggccagtagcacatgcagc

SEQ ID NO: 48103 - DNA, 335 bp, Mus musculus
  source 1..335: mol_type = other DNA
ttgggtcaagtttaaagacactttagctaagaaggacactgacctgcttagggaccacgattcttgtgctataggaacctggtgagagaatctagtctctgtttcagatatcctgatcttgaacgtgatagtgacgatcattgattgtgacaacaagttgtaaggaggccttcctgtttgcttctaacagctggaaatagcctttcccctccgagagaagtgttttgagctgcagggaggaactccctcagaccagactggcagtcaaaggtctgcccgttcagggagttgaaaaggactccagtcccgcccagcaaagtagccttttctaagct

SEQ ID NO: 48104 - DNA, 535 bp, Mus musculus
  source 1..535: mol_type = other DNA
tgtatatgattataaatgtgtatgcactgagtacagtaaatattaagatagcactaagatatgtagatatatgtagttgcctgcttaagtacaaatttgtaggtttgcgtttttcagaagtgcatactgtggatgtataggaatgtgctatacatgactgtacattgcagtcttatgtgtactgccccatccaggcttggcctggacagaagcagaggccagggtcctggcaggcgctggggtgagcacgcagcgcctccgcggccgccaccgcgccggctttaccggagcgcgttgcccgaggacagtcctctggctgccgcgcgcctcatagcatagcgcagcccgccgcagaggctgggctcccgcaatacttcgggtggagtgacactggtgcgggcgccctcggagggccactcgtcaccgggcttccggggaacaggaggcgtcgggggccgacggtgctggtgctccagcccggataggcgccctaggtctgggcggcgagcggggtgccccgtggcaggcagtctgc

SEQ ID NO: 48105 - DNA, 263 bp, Mus musculus
  source 1..263: mol_type = other DNA
aaatgaaatgggttaagattcttaaactgatttgcaactgcagtaaaatacaggacaccctgaacaagtgtgacacattgccagctcatccatctaaatgcttacactggaaatctgtacagtaaatctgagaaactagccttaatgacagctttcttctagtcagctgggccggccggccagtcctcgccatgcggtccggccctagctccgccccgtcccagacagaacccgcccgggacggccttcgcctaggtggacgc

SEQ ID NO: 48106 - DNA, 320 bp, Mus musculus
  source 1..320: mol_type = other DNA
tttcaaacatagagtattctaagaggatgtttaataaaatctgggaatcgcacaaaaatttctagcaagaaacagagatcccaggggacttgcttcaagcaaacataattctcatgactctttggaagtacttgaactcgttcctgaaagttgctcccggccagggagcctggaggccggtaggcctaccgctcacgcccgtcccgccgagcccagcccggccaatacctgagcggaggccagggtaggtctccaaatcctaccagccttcacgctaggattgccgtcaagtttggcgcgaaatcgcagcccccaaggcc

SEQ ID NO: 48107 - DNA, 365 bp, Mus musculus
  source 1..365: mol_type = other DNA
tctgagaaactagccttaatgacagctttcttctagtcagctgggccggccggccagtcctcgccatgcggtccggccctagctccgccccgtcccagacagaacccgcccgggacggccttcgcctaggtggacgctaggggcgccgcggagccgtactttaccttctctccgtggaggacgcggatcttagccgtttgcctccccgggcctgggccggcggcagtagagcctcccgacgcggatttcccgcggggcattgcagtggcagaaggccggcctgctaggagcgcgagcgcgcggccgcactttctcgcgcctgcgcgcgcgcacgcctcaacctgtgcgggaccggccttgggggc

SEQ ID NO: 48108 - DNA, 593 bp, Mus musculus
  source 1..593: mol_type = other DNA
catatgaaaagctgaaactatctcgtttacataatttttaatacctcaaatttattttgcgaaattttgttagctattccattaagccttaattagagtataatgaaattataaattcataaaataaaaacaaaagctgtcaaagctggaggcggagcctcggagagcatcttctggccccggggcccggactggcccgccgcccccacctgcagcgcggcggagcgcgggcgcgtcactcccagcggaagcgccagccccgcgtctggcgaggtgcgcgcctcgccgctcccgctccagcgcttcgtggcccgcctgtgtctgcagggcaggggcgggggcccggtgacacggacaggggactgagatcgcagtcgccgccgaatcgtcgacagtcacccagctcggacggagcgtccgagcaggatgccgagccgacagcgcgtcccaggtcagtccgcccgcgaggcaccgagggtcgcgaggccgtgtggccgcggtgcgccccgcgaacaggcacctgccgcacatttgacaccgcagctgccagtgtggggaccgcggaccactacgggccaccgagggccagcggg

SEQ ID NO: 48109 - DNA, 424 bp, Mus musculus
  source 1..424: mol_type = other DNA
attgcagacattagaaatcttgcctgtattcgtaggagtactttgataatagcaatttcattactaacaaggctggtggttagaacgaagctctagctaggtgaaacttttggaatgtgttaacacagtacctgctgtaaactgcatgcctgatgtttccacaaaagtatttgaaattttccaggatatataactttcttaaacagcgaaaaacatctagaacgattatcactcatacttggttcaggaataaacaatggggctatattttctggctgagctggaggaaatccagagactaaaattgccactcaagtcagagtgacttaaaaattttactctctgaagggttggcaccttacatcactggcgcagaggttccggtcaggtcatctggcttccgccaggaagacaaccaggagac

SEQ ID NO: 48110 - DNA, 528 bp, Mus musculus
  source 1..528: mol_type = other DNA
cacaaatcattagacttgtggtccacaccttttaatatgcatgctgtgtatatactaataaaactgttaaaaagagatggagaaaagacccatgccttcataaaagtttgctctctcctttctgggactccccaaaggtgtgtgaacaaagggtgacccaccccaggtagtccaccttcttcatgtcctgagaatatgtgacaaatgtttataaggaaccatttcatgccaaagggtctattatcttcccctttggggatggaaaaactacagactagcttgattttaggcaagtatgttgcccaggcttacatatgaaaagctgaaactatctcgtttacataatttttaatacctcaaatttattttgcgaaattttgttagctattccattaagccttaattagagtataatgaaattataaattcataaaataaaaacaaaagctgtcaaagctggaggcggagcctcggagagcatcttctggccccggggcccggactggcccgccgcccccacctgcagcg

SEQ ID NO: 48111 - DNA, 260 bp, Mus musculus
  source 1..260: mol_type = other DNA
gttaccattcagtagaatatttttgaatgaaaagatttctcacattagtgtccaaaaatcactaaagatggagcactttgagaagttctgctttctatcctgtcttagtcaatgttctatgactatgaagagacaacgtaaccatggaaactcttacaaaaggaaggcatttcattgggttctacatctggatctgcaggcagcagagctggagcaacacttcctccttctatgaaagaattcttattcagccatgtgtt

SEQ ID NO: 48112 - DNA, 580 bp, Mus musculus
  source 1..580: mol_type = other DNA
gcttctgaaccccattttatctgtgacagtgtccaacgtataaaagtgaaaatacacactgtactttgtagaattattcttatatttattcttaagattaattagctaatgtaagcgaagcatctcttttgcattgtctgtcaaagaacaggccagtcacaaccaaaagttttgctcttggcaaaaatcagagtttaatctcaactacagttgccaattactgaattgaggacctgagctctgactgtgaagtcacaaatcacagcagcgataacgcttgtaatctctcgaaagcctaggcgagccagcatctttgaattttagaaaactcgagagcgcgcgcgaggcatcgggcatctccttccgagagggtagctggcttctggttttagacagcagccgctctggaggctagtgccgggtcagctgagctgtggcactagtcacctcctgaggccagcccaacggagtcgcctggccacttccggcgcgcccgcgtggactggctcggacccgagcagcgcgcatgcgcatagatcaagcctcccggagggggcgtggcagcgggaagcattctctg

SEQ ID NO: 48113 - DNA, 328 bp, Mus musculus
  source 1..328: mol_type = other DNA
aataactaaagcacggattatcaaaaacagttttttttagtttctatcgttttgtgcctgaggatcagacgctaggctaggatatgtttatctgaaatactcttccaaccaaaaaggcattggtgtaaaaatcatactaacagaaatggtttatgttggaatcctccaggaccccaacctaggttcccagatcgactctcggtcagagttccgggcgccctcgtggagggaccagcggccgcacctcactccggcggaagctgcccggaaaggggcggggccatagccatccgccgggccgctcaaggggcggggcctaggatatggg

SEQ ID NO: 48114 - DNA, 477 bp, Mus musculus
  source 1..477: mol_type = other DNA
ggttaaccacccagctggtggtagatatagaaatcctctgaagccctctgcactggggctctgcctgggaggaagaggggccactccagtgcccctgcttagcttcaaactgaacctttagaaagtgttgtgctgcccaaggtgggtgcacagcccttttgcacgcattaaataaataaataaataaataaataaataaataaatcaatcctttcctcactctttctgtctcaaaacttggtggaaaaaaaaaaattcatcatttcaattgttcaaggaaagcttgtagacacgtccaagtgatgtttctctaaataacataaaaaaggctaggggaccagaagaggcctcctccgctgtggccctctcccgctcttcctggcaaatgggggatcctggccaagggggccgccctgactcggtcctcccccgcaccctccccccccccgccccccgggcggctggaccataaagcgc

SEQ ID NO: 48115 - DNA, 369 bp, Mus musculus
  source 1..369: mol_type = other DNA
aagtgcagagccctgaatgaagagcctttctaaacacaagaccttctgtgtcttctgtgaatatggacgctggaagaaattcatgattttgaaaaagctaagtttaactcaaaaaaaaaaaatctttttatgtgtgtgctttgcctgcacgtatgcaccacgtgaagggctagtgccggtacaggccagccacactaaacttagtttggggagtaattttgaatgaggttgaatcacattaactgtcagtttaaactacttttgtacagatttatatataccttcaagttttgttgtacattaatactgaatgcaataaatacttggaggtcccgcccccctccattccacgtgctggagagtgggcgg

SEQ ID NO: 48116 - DNA, 382 bp, Mus musculus
  source 1..382: mol_type = other DNA
aaatattgttagtattagacgtgtggactctaaataattctaaattttgagttagtttgaaattgtaactggagaataatacccttagtttccatctcatttaacaattgtaagaatctgcgatgattaaaataaaggtttggagatctagccgtctttctaaccgttgtactaaacaggtctcttttcagaaacacttaaaatcaaaagactgctttgaaagaattcacttgatactgtgtaaatacctgatttctaaaagtggattagtcacaggttaagcactggctttactctgccctggccacaaaggccgctgaagagaagctccgtggcgctggcttggggcgaccccgccccgcgcgccgggaacccaagcagc

SEQ ID NO: 48117 - DNA, 449 bp, Mus musculus
  source 1..449: mol_type = other DNA
gacctcagtttgtgaattaaggtagaaaaattaaaaattgaataactattgagttcgaggccagcctggtctacaaagtgagttccaggacagccagggctaacaaatcattactttttgtttacagatattcatcaataaatcaagcagtttagacagttctctcaatgagcaagaaacgttgttgaggagaacatcacccacgatttcatactgatctttccagcaaatcctggaaggccctccatggacagaacaggcctcctggacacgtaacttaggaggcggcgccagcggagcggggtggcctactgccctgcggaagggccgggctgtaccttcagcagccgccgcagactccctggctggaccagggtggggctgtgcgcctgcgcagctcagcaaacgcgctctccagtgtcggctgccggaagcccccagccttccac

SEQ ID NO: 48118 - DNA, 680 bp, Mus musculus
  source 1..680: mol_type = other DNA
aaggagaagcgagagaaccgggagcaggtgggcccggagcagctcgctcagcccgcctcccccagccccgcacaagctgacgtgagcggtgcggcggacgaggccgtggcggcccagagccagcgcaggagccgagcgcactgcccgtccgccgccggccgctaggggaggggaaggaaaaagggacggaccgacggaccggccagctcatcccctccgcagcgccccggtccgagcccgggccccgcctccgccgcgccccacctcctccgccggcctgcggcggcggcagcgctccgcccctcgagccgggagggccgcgctctccgccccgccccgccccgccccgccgctgccgtgctcgtctcacgccggcggcgcggaccgggaagcggcgccctcggctgcgctcggttcggagcccgctccgtggagtcagaggcagcgacgggcgccaggccgcccgggccgacggagtcagccgctgacgagccggggtgggggcacgagccgcggctgccgtgcctcggacgagccgccagcctctcgcctcagcgcgcggccgccgggagcttgggggctgggtgcaggggaccgcgctctccgccgtcgggagcccgaggccgcgggtgctgcgagggcggccgcgagcggggctccattgtgctcggcgggggccg

SEQ ID NO: 48119 - DNA, 399 bp, Mus musculus
  source 1..399: mol_type = other DNA
acccagggatcgattgctcttgcaagtggtgcacatacgattaaaatttaaaggatgaataaaataaaaaattaaaaatgaatttgaatttgcccctccaaaactcaagtgacaccataagttaatattatgtgacctttaaagtttccttacttacttggctaaatatccaaaatttcacgtggataaggaaatttatatattacagatggactataatagaatttacatttaccttaattaaagttataattagggagtaaagaaattatttttcaaaccaaaataaatgattaggtagaaaaaatacagttggcagagtctgtcaaagttgcaccagcagttttaactggacaaatagataattgcatatgtaatatgaaacctccagaagccgtg

SEQ ID NO: 48120 - DNA, 471 bp, Mus musculus
  source 1..471: mol_type = other DNA
gttttagaaatgtggcttaaagtaaaagaactaattcctattatacattagtgcctaagtggattataaacctactagacaatattaggaatgtttcaacacaatttagtatgaataattggatttacaagtggctgccttgccaggctgataaaaactttttgtttgtgctttctgggaactgaagtattgagacaaatgttcacgctctttaggatagccttgtaaagcgggctacatcaaggtccttgaacaaagtctcagagtccctctgcccaaagcaacctgtgcggccgggcacaccagtctctcagccacagactccgggccgggccaggaacgcggcggcgcgcaggcgcggctggagggacgcggaggggggcggggcgccgccgggcgggcgggacgcgcgccgccgctcccgttgccgctgctgccgccgccgcgtcagcagcgtgccgcacgtgcccg

SEQ ID NO: 48121 - DNA, 350 bp, Mus musculus
  source 1..350: mol_type = other DNA
aaaaagctgtctcattgtatatcattcatacatcactttaaactcaattgagaccattgttccgcaggaggaaaatagcctccagttttttaaatatttagggaattatcatgaatcgccaaaggttaaatcagcagtccgctgcgctccactgcactggaggctgctgctttaagatcttcagagaacaaacccactacttggaggattggcactgagtttacttgtgccagatgtaggtcatgcagtttactcaaatatggtcatggatacctgaccccagatcaaggtcagaggcctgctattggacaaaggaggccatgtgttggacctggccaaggctaggggag

SEQ ID NO: 48122 - DNA, 395 bp, Mus musculus
  source 1..395: mol_type = other DNA
taaaatattgtctgtcacttgaattaatttcaattccatttttaagtttttacatatttatcagagggaaatggacttgtaaaaaagctgtctcattgtatatcattcatacatcactttaaactcaattgagaccattgttccgcaggaggaaaatagcctccagttttttaaatatttagggaattatcatgaatcgccaaaggttaaatcagcagtccgctgcgctccactgcactggaggctgctgctttaagatcttcagagaacaaacccactacttggaggattggcactgagtttacttgtgccagatgtaggtcatgcagtttactcaaatatggtcatggatacctgaccccagatcaaggtcagaggcctgctattggacaaag

SEQ ID NO: 48123 - DNA, 474 bp, Mus musculus
  source 1..474: mol_type = other DNA
gacgtcaatttcacaggaaccttgctttcaaatatttccctaacaattttctttttttttaaattgaaaacaaaaagaaaagaaaaagaaaaacatattgtccaaacatatttgcattaagaatgtctgattcactcagaagcagtctaaatattaatgagtagactgcttcattataatataaagtattgataaaatgaaaaatatagaataatctcgaggacatattaatcattaaatgacctgcacacactgcccgctggtgacaggccagggggcttacctggtagttagcaggtaattccaggagaaccccactggggggtactcacccttcccggaggccagcggagcttgggcgcctgggggagccccgcagcgcgaggccccgcagccgcagcgcgcccgggcggagcatggcgaggtggcagcacggaggggcgggctccagcagcgcagcgcctccaggaccgg

SEQ ID NO: 48124 - DNA, 363 bp, Mus musculus
  source 1..363: mol_type = other DNA
tctgagacctctcagtcctctctcacttggagctgttaatggctgactaacaagtcctgggaggccagaagtcctcaaagctgtgggaagctgcgtgtctgctgaaggcaacagccaccggcagacgaaccccctggggatgctgcctgcgtgccaaaaggatccctcttctgtgaacacctggggataccagggaacgcagcgcccagcccccttgctgagctaagttaagaccttagcgacttgactgacactcaccttcttggctttccagctggtgccatgtcgccgccgctgtacaggcgcgggtcccggtggcaccggtcctggaggcgctgcgctgctggagcccgcccctccgtg

SEQ ID NO: 48125 - DNA, 320 bp, Mus musculus
  source 1..320: mol_type = other DNA
ttcagcatattaatggacaggaattacagtgaaaatatgtaatccatgttatccatttgatcttttgaatatgtcacattctgttatgaaaatattcagtttcagaaaattggggcccaatatttgagactagatcacttgtttctgaccccctgatggggccccaccagacgacattgatgatgtccgccttcttcaagacaggaatcatgagattcgatctaaatcagactcaaaaaacaagtctcagatcgatgcagtctctgaaacaggtgcctcattccctaggacccatgtggtgggaggagaggagagactct

SEQ ID NO: 48126 - DNA, 392 bp, Mus musculus
  source 1..392: mol_type = other DNA
ttaaaggtgttaatgaatttatacatgttgcaggtgtgctctcccagaactgaagtgcttctctgcaggagaagcacacacagtgttttaccttaataaatatttgaagtgtttcacaaacaagaatctcatgtatgttatgtaataattttaattacataattgtgtttttaaaaaagtaacaagtaactttgctttttgcgcatcaattcaggaatccaatatttagttctaaacctgaatatgtactcagttaagaagactactttacaccacataaaagtgttctcatatttcctaaattagtttgagttactctgaaattatttttcagtctgccaaaattagagattttttttttcagggaaacagagcgactttgcactagaggg

SEQ ID NO: 48127 - DNA, 400 bp, Mus musculus
  source 1..400: mol_type = other DNA
ccaggacagccagggctaacagagaaaagaattttttacaaatgcagaaatgaatacatcatgtgatttcatctaatttattagtgagaaaccgataagaaattaaaattggttaataattacttttcaagggtatcattcatccagagcttctaaagctactcccacggactcggcctcagccagagagggtgtgtccttcaggctcttgaaatgaaacttcaccatttcattttagattctgggcagacagaatgaatggctaactatagtgcttagctgtcaagtttaccggctgagttcgcccgcgcgctctgtgcggctcctcccccggcccccgcgggaggcggaggccgtggacgccggccctccccagcccgcggcccgcccaggtggatgt

SEQ ID NO: 48128 - DNA, 367 bp, Mus musculus
  source 1..367: mol_type = other DNA
tgcccacgggtttcaaaagcccatggatttggaaggttctgtcctaacacaatgaattcagacaattccaagcatccatttggagtagaaatcaggacctgtaaacttgtcgccggcgagaaccccgcagggctccgggaccccttctcagggatcgcgcgcgtcgcccacactctcccgggccctgtaggaccctcccccccggaggccgggcttcgccgacccctccccgagcggcggccggaggcggggatgctgagtggcagcggccggcctgggctgcgaggttcggccgcctcctcccgctgcgcccgcccctcggcctccgccccggcgccgccgaccctcgtctgctcccgccctcgcc

SEQ ID NO: 48129 - DNA, 298 bp, Mus musculus
  source 1..298: mol_type = other DNA
gggagcagagttaaacttctctgtagtgctaaaggtctccatagctctgtacatgtctggtgatatataaatatcctttctctcagagaagtaggcagtagatgactgagaaactatttgcaagagtctgctgcttttgtatactgttttttttgggaaagcaataggaatgagatcactcttattgtcttattatgaatcataatggaccaagtctgtagagtattgttttcaaggcacttttaatcatgaacgttaggttgtgtgcattaggtgcctttcatgcctcaggctctgt

SEQ ID NO: 48130 - DNA, 367 bp, Mus musculus
  source 1..367: mol_type = other DNA
gcagagtcctctggtcatgaagtcatgtgtcctcaggagcaactttatgttgtcaacaagtggacccagctgtaatgacacctagttaaaataatgttctcaagtcatgacctccttaaggctttttaaaaagtgtttaactcacataaattaacttctctaaaataatgtgaaggaaccaaatactttgctggtaatttgatttccaggcagtggcagtcagggcgttgacaaagttctctgcgggcccgggagcctgataaggttccccacccggggccatctggcgggtgggggtggcgcggggcggggcggggcctggccagccgctcaccctcctcctctctggacataggtgaggctgctg

SEQ ID NO: 48131 - DNA, 504 bp, Mus musculus
  source 1..504: mol_type = other DNA
cagaaggccctcaaaaagctatggataattaaatctgggtttttccagttcttagataaaaatatctgggttcacccaagtgcccttctgttccatgtcctctctgactgatatgtcatttactgtagttttcaataattgtattctgcatccaaatgcctgaaaataaacgtcagaacgtgcccccaccccccattatttatgagtggggagggaggatgggagacagaggctgccccccccccctccccgcgcgaagccgctcacgtgggacctgcgcactaggtgggtccacggcccggggcttggaacctgccctccgcctgcgctcgcccttcggtcggaggcagagcccggagcgcagatccaggcgggaagggacggccggatggctgggcgccgcgggcctccgccgcaccgggcatgctcagtggcacggccggctcggtggcccgcgagctgcacccggatctgtgcggcggcggcggcgacgtgagcgcgcag

SEQ ID NO: 48132 - DNA, 524 bp, Mus musculus
  source 1..524: mol_type = other DNA
aactttttacaaaaatcagtatacacggttggtgcttatttttaaaattcatactatttgtaaagaactagaactgggtttggttcacaacaacactctatttaaatattatctagaaaaaataagtttgtcatttatacttatagggtgtagacctcaaattcactagaagttcaaaattcaaagaccacaggcgccgccttgggcgtccccagacgtccggcgggcacccacccacccaccgacccaccgcagcgggggcggcagggaggttccccaggaaccgagagcagcccgggcggccgcctcgcgtcccggcagcgctcccgcacccgagggagagatggtcgaggtggcctcctgcccgagctccgccgcctcctcgcgggcggtgctggccagcaggcgggtacggatggctggcgttcggaggacaccgaaccaaactagttctggggcggagggggcgcgcgccggcgcttccgggctcgtcactgctccggctgaccgggcggcccaccccc

SEQ ID NO: 48133 - DNA, 483 bp, Mus musculus
  source 1..483: mol_type = other DNA
ggagcgtgttttccgagagacaacgcaagctgcagggctgcaggtattcagtccttgacagaagggttgcagttctgcagccagaaaccatcccatcaggcggcgctcggaggagagcgcactccagcttctggcccaggcttagctcgcggcagctgactgcgggcaggacgcaagcctcgaacttcaagtaagaacctcgagcttgcaggcggatgatcgcctccgcgcagatcctgaaagcctcctccgaaggaggagctttcacgtctagccactctggctgtgagccagcctcgagggctgagagcttgtggccgctgaagcctctgagatctgtagcttcccggcagcccctaacacccggagcgcgacaatctagcgcaccgggagcggcaggcgcgggcccgcacggacacagtgcgcacgcgcagggggtgggccgcccggtcagccggagcagtgacgagcccggaagcgccg

SEQ ID NO: 48134 - DNA, 434 bp, Mus musculus
  source 1..434: mol_type = other DNA
attagaaatggtcacttgtgcaaaagcactttaaattgttcaagtagtttaacacatccaagaggaaaataaagagcggttaactttatttacttctggaggaaggctcacttcatgaagtctccccctcccccaaagcggacaggggaccttggcggggtggtgggtctgggtctctagagaagctgtccagtgtcccctagctggcacgagcaggggcagcgggggcgcgttccagggacaccctagctctgatacacagagcctgtaatctctgctgaccgaggctcggcccagaggcccagggcgaggccaaggtggccgctgctgctttagcggctgctggaggctggagctgcctgggctgcggccgccgcctcctcccggcaggcgcaggcgggcgggcgggcggagtgggggactctccgggcgct

SEQ ID NO: 48135 - DNA, 393 bp, Mus musculus
  source 1..393: mol_type = other DNA
ctcggagtcccccagtcagagattctctctgtggatattaaaaaacaaaaaccaagcgtttatttcatacacttctgtgtatattttggtctcaggccatcaggctaggaggaaagggctgctcccctctaggccaagaaggtgcaatgctgtatctccctgtctcaggggtagggccagcaatttggaatgtaaaaaaaaaaattaaattaaaattaaaaatttcttttgactgtctgcattatggtattttatttcatcaaacacagatctctttctccatttgacaacagacagtgaaaacaaaaattatccttgttaatagtttctaagttcactttctcaggaacagaaagtttcttaacaaatcctgtcgcatgcgcgcattctgcg

SEQ ID NO: 48136 - DNA, 501 bp, Mus musculus
  source 1..501: mol_type = other DNA
tttccagagtggttgtacaagcttgcaatcccacctctgctgtcacctgatcttagccattctgactaaggatgttgaacattatatatatattggatatcaaactttgatttctatgtgccaactagagattgcttttcctagtctacattttcaaaagtgtccaggtaatttttgatacgaagccaggttgtataaccagtcgtgtaactaaaaatttagagtttggagctagaaatgtctccagggaacggattccttactctttggaagacagtccaggcaatgtgtaagaaccggtttcatcatggccacctgctggctttgtggcacacaatgttggctgcttggtgtacaagaacgccactagattcgtccaggagcagaagtctactgcaggcgccgtagctacacagacaagcgctggtcctgcggcgacatggccgcagcgcacgcccactagggggcgcccgagcgacctgagctcttgcgccaaccgcg

SEQ ID NO: 48137 - DNA, 390 bp, Mus musculus
  source 1..390: mol_type = other DNA
agatgcattccacagaggcagtgcactcccatcaccacatgatggtcagcgatcagtgctgccctgcttggtgctgtgcacagtacctgacgcctttaggcatctgacatggaatgaattcataatacagtgtcttacacttactggctaagtctgtgatgccggctactttccatgcatcatgtgcttggcttctttgtcaaagaaccagcaaacagactatagacagttcaggtgttgtagcttctgtgttctcaagagaatacacagcacaggacagttaagcccttctctctccaagagacagagatggatgctggtcctcccccagggaagcctggaccagctggatgaggtggctgctcttgctgccacagtccacgacgtgga

SEQ ID NO: 48138 - DNA, 440 bp, Mus musculus
  source 1..440: mol_type = other DNA
tcactattcccctgtgggaccccttaactcctcaagtgtgttgacaaccaagtcaatgggctttggcctggagcagggctagtgggccctgtggataaggagctccccaagggacaaggcctctggacagccaagaaccggagggcacctaggcgtgctgccaggcactgcgcggcagggaggcccttggggacccagaggaggacctgagccggccggcgggcgggcgccctggccggagtgtggggagctgggcggcgcgggccgaggcgcgggcggagcagagggcggaggcgcggggcgcgcgtttggggcgctgcggcggggagggtggcggccgctggggcgcgcgggccgtgtgtgcgcgctctgccgctccgggaggaagatggcccgggagggaaagttggggtgacgcgcgctgcccccggacgctcgcc

SEQ ID NO: 48139 - DNA, 282 bp, Mus musculus
  source 1..282: mol_type = other DNA
ggccaagctggcctagaactcatgaagatcagactggcttagaactatagatgtaaactctcatccccagagtggatgtcagaagtggagagatgtctctcatgttttgatttggcagtcagaagacatcatcagacatcttcctctgacaactctgagttgatggttttgaactggatactttgtattttgcgaaatttacacagcagcttggccttcactgatattcccctgtgggaccccttaactcctcaagtgtgttgacaaccaagtcaatgggct

SEQ ID NO: 48140 - DNA, 233 bp, Mus musculus
  source 1..233: mol_type = other DNA
actaggcctgatacatatgcagctagagtcaagtgacttcacttgtattagaccaatgacatatttttatacctgtatgtagaagctgcttcttgctgtagatgctaattaacacagacccacagctcacaccttccccgaggctctgggactctgtgggagagtagtgagatattgtctaccaacccacaccaggatgggcctcatgctcacggtagttctgctggaaggac

SEQ ID NO: 48141 - DNA, 411 bp, Mus musculus
  source 1..411: mol_type = other DNA
catgtgacttactttgactaatagaggggggcggggagtcggttaccgccgatccatcgccactaaattaaaaagcaacaaattagtgacttttgttttgtttttatgcgttaagagacttccttgcgactatttatagattaaaaatctgtatggtgggaattctctttccacctggagcggcggctctcctaaaggacttctgactagttccaagggcttggaaggttgcaaacgtgcagagccacggttaaaacgctttcagcatccctgcgctattattgcaccgtttaaaaacctccgacagatttcaattcctcccggaccggatggtttagcagcggcgccccggcgtccagaccacgcgtcaccgccccccatggacgccccgagacgcgcaaattgagcgct

SEQ ID NO: 48142 - DNA, 589 bp, Mus musculus
  source 1..589: mol_type = other DNA
tcatgtcataaaaataattatctttatccttatctatttatgctattagcagatcagataatatagataaatgattttataaatctatacaaaacctaggaaccatgtgtaagagaaaacacatggtatttgcttttcttaattccgtatctccagatatatctatttgtaaatataaaccattttgctacaaataacttaattttattttaatttatcgtttaaaaatacattgcgtatatatgccatatcttccttaattcacaagggttttgtaacttagctattataattaatatgccaagtctctgggagacatactgactatgtataaaagtaaggtttttttattcatattttttttttttttaaaaaaaaggcatcctacagaaccatcgcgattataaaggagagctcataagtagtcctccagtaacaaagctatgtaaaggacatgctcttaacaaagctatgtcgtcaatgttaaagttcccattataaggcgaacttacaaagtgcacttctaagaatacttgtacaggccgttgtttgggcacattagcgtttccggctcagcccggaactagag

SEQ ID NO: 48143 - DNA, 420 bp, Mus musculus
  source 1..420: mol_type = other DNA
acggctgtctctatactgtccccagctctggacaaaagcagaagccatggtctagtgagcttacacaccactcctgtgtggattccctcccagtaacgcagagtcctggctacagagcactgcccaggtgtccagagcaccggaaaccagaagtctgcagattcttgctcttcattaaggaaaggccgattttatttctgcaatattctataaaatcaggctctgtcaaagttttgaggcaggggaatgatagccgtactgatacatatgtgtctgacatgtctgtcatttgcttttataaaaccacctcgtgactgaagtgtcactcttgatgaataaaccgaggcagggtaacccatggtaactaagctcagatcagttaaggggcagagagcctcccctctactgctctataaaaga

SEQ ID NO: 48144 - DNA, 188 bp, Mus musculus
  source 1..188: mol_type = other DNA
acaagttgtggacaaatttcagtcatagacttgagcttggacatttcatctcctattctgtaaaatggactgacccagaactggtgggcccaggctctaaaaccctgggcaggcgactccagcagccaagtggacgctggccagcacacgggagctacggtcaggctgtgctgggccaggtggcccgg

SEQ ID NO: 48145 - DNA, 419 bp, Mus musculus
  source 1..419: mol_type = other DNA
ggtgtttcatggcagcaatagaaacccacttcagagcgctaagctgtgagaacatctttctggtgagaaagccctgggcgttggggcctgtggctgaggctctggcttgggtccaagagtggtgaaggaagaaaaggctatccatctaagctcgtttcgagtccacatatctggggacacccaacttttagctaaactccaaacttgtgtgcagccgagaagagacttggagcaccaccacgggactgtcccaggagagtcattgaagcggccgcaggcgctctccgaagaccccgaggggctgagtcactcccaggcttgcagctcaaccacaccgggtgggccgctccggagcgaggggctgcgggcacgagcggagactgcgggcacgcgcacagcccgcggagccccgccccacg

SEQ ID NO: 48146 - DNA, 238 bp, Mus musculus
  source 1..238: mol_type = other DNA
aaaaatcccactgaattttggtgtagggcctaccttgacatgtgcctagggcatccaggccggtgggagccccagtcccccctgtgcaggcctaggggcttgaaaagcctactgttacacaggattgattcaaagctaattgctttattccaagcccctggccccagagaggctcagcctgagtcatgtcctttctctgtagaggcaaggacgagtccctgcccacacagtccaggct

SEQ ID NO: 48147 - DNA, 422 bp, Mus musculus
  source 1..422: mol_type = other DNA
tgttaattaaaggtgactagtgtcgcgatcacccacatgccccacgtttgtgaaaaagcagtggcccatgtttggggggggggggctcccacattcccgtgcttttaaaacagctacttgtggtttctgtctcacgctgggcctgagcaagaaaggggcaactttcgtttctctgtttgtctctcagtcactgagcaacacccaggcgaactgggtgcctgtgggctgggctccagctgcaggggtccagggtgcctctcagccccttcctctcgcgggaggcgggtcctcgcaaccgggcgctgcgctgtgcggccagtaggggtcgctgcacggcggcgcgctcccaccgcggtgaataacggggggaggcggtacggcccgcgggcgggcgggcgggcgggcgggcgaacgagcgagcg

SEQ ID NO: 48148 - DNA, 214 bp, Mus musculus
  source 1..214: mol_type = other DNA
cagccccagcgctaaggtgaggctaagtgagaacaagagcaatattctcatcagctactcctgacttacggaaagcctcggtgactaattcagcacggcgggagctcgcccagcccgccgcccgccactgcagcaccgaagggaggaggcgaaggaggaggaccgcagcgtggccgccgggagccactttcccgcccaggagtcaccactgcgc

SEQ ID NO: 48149 - DNA, 445 bp, Mus musculus
  source 1..445: mol_type = other DNA
tctgttttaatatattaactcattttatctcctaatgagtacttactaaagccaagttttaagttgtaattaaaagtttctgtttgcagcttacagcagcagtaaaacttagatagtaaacaattttacagtattaaattacgttgctatggatttagaagtgaattacactggtattttagctgagatgtcaccaaagttaggatctatgtttaaatttttgaaaaaaaacttaggctggcagtttgttaagcagctgccgggccagtggccttgcggcctgttactcattgttgaaaataaacagcactcagctttcacagatttgcgaagataattaaatttgtctgcagtgccgcgtagtagtcctcaggcacagagcagcaccgagcatgcgctctgttctgggaactgattgctgaagctgtggaccaatagttagggc

SEQ ID NO: 48150 - DNA, 441 bp, Mus musculus
  source 1..441: mol_type = other DNA
caaaaaatgtccttatttggaggacctggctatattttatggttataatcagcagttactaatgaggctgcttggaggctgactggaggctaaccgcagagcacagttttgagctgagtgccacttagctcaggcactaagtgaaagcaatgccttgcataggtggaattcctgccaagccttgaagccattcctgggagagcctggaaaggttgcactcacctgtacctgagtcatagtgtctcagtgtctgtgatttaagcagcggacacttcaccagctttcctggaagccatttgttgggtcttcctaaagaggggcagatcgcccacagtttctcctccacctctcatcacatcaggatgaggagttttggattcctttctttaaataattgtaccaaatcaccaaccgcatgcggacagtaacgggatcccctcc

SEQ ID NO: 48151 - DNA, 605 bp, Mus musculus
  source 1..605: mol_type = other DNA
ttctactagtattattgttttgatcataatatcctactataaagattaggcctttttttttttaagttctaaatggaatttttcccttgatacatcgagaaacactgatttgaatttaatactgaaaatttggtgcacagtaattaaagcaaagcaagctttaaatggacatcgatatcatatatattttaaattcattgtatgtgagctgggttgagccatccagagctggtgctggaattcaaactctaggcttctgcaagagtggtaagtgctgctgagcactgagtctttccagccctaatattatataatttatattaaaatgaaacactcataacagaaaataaaagtcattttacctcttttatttgaagtttattctgaattattttaatttctaacagacctggtaatttcatgactatcaaatgaaaaattgagtctttttttttcaaggaggaaattctggaatcccaactaggaagtatttaatattgaatttccagtaatgagtatggactataaatcaaacccagatatttttaaactgtacagcttgtagatttctagaaacgtttccttttgtgtagagccaaacccta

SEQ ID NO: 48152 - DNA, 576 bp, Mus musculus
  source 1..576: mol_type = other DNA
cccgccccgggacagtcggtgcctccagtcccaccccaggtcccgagcggctccccctcgcctcgcggcaggtgagtcccggcagcggatccacggtccccgcggggcagctcaccttgctgaggaccccgcagcgctccacaggcggcccggactccgtctccggatcctcctccgagccagctctggttatatggagacgcgacagccgagcaggagaccggcccccgctccgcgagctgcgccagtgcaggcgcctagtccctggggtgacaccgccaagagcccgctccgggagggacgaagcgcgcccgccgcgccgccgccgccgcgcctgacaccgagcggaccggggaaggagcagccgtcagccgccgtggccgtgacccctgcgctgcgcccggcgccgccacctgaactcggccccctagatgccaacctcagtcagggagggaggaggccgccccgggcccctcccggcggctcgcgacgctccctacctccggccctcccgggtgacgacgggtagggaagagccgctgcgctgcattctgggaaggctggcgctccgtccgc

SEQ ID NO: 48153 - DNA, 476 bp, Mus musculus
  source 1..476: mol_type = other DNA
gaatttcaaagttggaaatgatcaggaatttgatagctacctattgcctaattccttattatttagtaaaactcgcattttgatcttaatgatagaaagtttctatccaagttatcctgtcttccggggaggaaaaagatggttaacatcaggatataatatgaccctaatttcctttttaagaagttctttaaacgttatttaaaaattctataaattaacagtgagtaaaggaattcaagtctacttccgaagacatagacagtagtccttcggaattaaaaagatgttcccgggctttccggaaagcagcgtttgccttcagaaggttcccctaggcaaccagcaggaggctgcgcggcggacggagcgccagccttcccagaatgcagcgcagcggctcttccctacccgtcgtcacccgggagggccggaggtagggagcgtcgcgagccgccgggaggggcccggggcgg

SEQ ID NO: 48154 - DNA, 323 bp, Mus musculus
  source 1..323: mol_type = other DNA
ttaccatgagaaatatctcttcagactataagattacatttcaaataggaatgtcaaacttgttaattagccagatacatacatgttggctggctgtaaaagtttaggagccttctacatctaacacatttaaagaagtatagatcagaaaagatttctggtgacagccactttctgtttaactaaaaagtgggacaaggagttactcttgaaacttaacttaaaggaacatttgcatataagttgtttaccagtctcactttccaggattatgcagaacgctggaatagtcctgtacacttagggctgaaagtgagccccat

SEQ ID NO: 48155 - DNA, 410 bp, Mus musculus
  source 1..410: mol_type = other DNA
tataattaggatttcaaaatttaaagtgggtaggtatatgtaagttactctaggctaacacagggatagttaagggcttgataaaggccttcagccagcgagccattagcactgatgggtatgtcacagggggttgcctcccgtggtcttcccacgggggcaagaccctgcaggtcaaactctgagttcggggtactccacccgcggcatcccctgttccccgcgcgggcggcgtccttgcaggcgcccctcggctcggagaccaataggaaggccgcggacccgacgtgcggtgcccgttctccgcccgggtgcgagcagtggtgacgtaggccgtcaggctgagcagccgcccgacgattggctagggacggcggcccgctggcggcctggagcgtgcgtaagcgcag

SEQ ID NO: 48156 - DNA, 352 bp, Mus musculus
  source 1..352: mol_type = other DNA
aaggaacccatgccactggtctggcggagttcctgggtgcctgggtcccgctggtctcagggacagatgttgtgtcctcacctctgtccgacacttcggaattgactgaatctggattctgagtccgccaattgcgactgtctcaggaagtctccctcgaaggccctttggggtgaatcacttcctacagtgcccaaggccccttaacaaggaccctgggagtcatcaccctctttctcaccccccgccggaggggaaagaggaagcgacaactttgtaccctaattagtcgcctggctaggcagcgctggccgatgctggcctcgccctggagagcccgctgcatccgacc

SEQ ID NO: 48157 - DNA, 438 bp, Mus musculus
  source 1..438: mol_type = other DNA
agttaggagtctagaagtctcctcctgccaggagcttctctgtaaaagccactcttaaagggacagctagaaaaattaagaattttgtctggtttaaataagtaaatgtatgcagccatttcataaaagtataatatgttgtagctcataagttattgggtatgattaaaaatttgtaacattggtaacaggacagccagggctataaacaaacaaacaaacaaagatatgtctaaatttatgtaattcttttcctagaaaccagacttataaaagataggattgctaactgcagttcaaaaacacttaactttgtaatgtgaaagtaatacttttgatgttcattttaaagagaatcgattgtttacacttttaaaattggaaaactgtggttgtactccggtgttacaagagaaacttaaaaattacagttaaact

SEQ ID NO: 48158 - DNA, 167 bp, Mus musculus
  source 1..167: mol_type = other DNA
tatatatccagtgttcttcctgtatgtatgcctgcaggccagaaaatttaacctgtgagctatctctcaagcccccagggtctcattcttaaacttgagagcctgtgtcaaataataccatgtatatctggtatagctacattgttggcaagcaacagagaaaactg

SEQ ID NO: 48159 - DNA, 666 bp, Mus musculus
  source 1..666: mol_type = other DNA
gccactgggattatcctgggggctcagaaatgataatccaggaattatataactttactcattcatgattagctatggttggaatccaactattcaaaattcttgcttggatattaattcattgttaaattccactaaaaatagtaaatgtatataactcaagatttctagtaataatttattgtaaataaacacaacagatgtaaggttgattgtgtaaaaaagaaaaagcctttatatttaaaaaaaaaaagggggggcttaaatagatctatatgaaaaagcattctttgaagttaccaattagtgaatctttaaaaggtcagtgttgtgattagtaatacttcccaggaataggagtaattttaagcttttctgaataactgaaccataatgccattgctattagatgaatttctcagaatttaagggcaaaaaaaaaagtcttaaaatccaaaattattgctgtgcatctatatttctactaccgcatatattatttaaagaaaaaagaattatcatcctttaaatgccagtgaacttatttttctggaagccggcgtccccaggttccttccccaccgggaggtccggaggccgcacccacccgggcgatttttccagaggcccgaggcggggatgccgcgcaggtcgaccttaaaggag

SEQ ID NO: 48160 - DNA, 321 bp, Mus musculus
  source 1..321: mol_type = other DNA
agagcacccgactgctcttccgaagctggagtgtctgaagacagctacagtgtacttacatataataaataaataaatcttaaaaaaaaaataataatgggcgtccacaaaaaccaagtaccttttgctttcctggcctggccagtagttttattttccatataacatatctccgtccgtgacccggcagacggggcccggaggccggggagtgctcgtctggaagaccgcggcacgcacagggcgcctggctggttctgctagtgtccgccggggggaacggaaagacgtcacggaactgctgtgcggcgcttgcgctcc

SEQ ID NO: 48161 - DNA, 649 bp, Mus musculus
  source 1..649: mol_type = other DNA
taaaaaagaaaaagcctttatatttaaaaaaaaaaagggggggcttaaatagatctatatgaaaaagcattctttgaagttaccaattagtgaatctttaaaaggtcagtgttgtgattagtaatacttcccaggaataggagtaattttaagcttttctgaataactgaaccataatgccattgctattagatgaatttctcagaatttaagggcaaaaaaaaaagtcttaaaatccaaaattattgctgtgcatctatatttctactaccgcatatattatttaaagaaaaaagaattatcatcctttaaatgccagtgaacttatttttctggaagccggcgtccccaggttccttccccaccgggaggtccggaggccgcacccacccgggcgatttttccagaggcccgaggcggggatgccgcgcaggtcgaccttaaaggagccggctcgctcagcgcgaggcccccgcggcttactcgccggcccgaccgagcgggcgtgctgcgggcggcgacgggcgagcgagcgggcagcgcgcacctgcgggcgagcgggcggccgcggccccgaggcggggcggctcccggcgaggaggcgccgcggcgcacgaggccggccggccggcggggcggggggattcgc

SEQ ID NO: 48162 - DNA, 429 bp, Mus musculus
  source 1..429: mol_type = other DNA
ttttttccattggtgattaggaataaagttgtaataaatatagatgaattcagacctttgtgttttaaattgtttcattgttaacaatgaaactgtagtcagcatctagttagatttgaaccctcaaaaggtaacaaaacccttatgggtgttgttttcaactgctatcacataaactttgcagcaactacaattagtataatgagaatggcacaaagaatatagtatactgagcattaaaacggtgtgatgcgactataaagttattatcacaagtctcaaatttgtgttccgggtccagaagctgcatccccgcgtccgaggaggccagccgcggagcaccggtccgcgacctcccgggtctgagcctgcctcgttcagcccggagcgcaagcgccgcacagcagttccgtgacgtctttccgttcc

SEQ ID NO: 48163 - DNA, 467 bp, Mus musculus
  source 1..467: mol_type = other DNA
tttatttatttatttatttatttatttatttatttatttatttaggatacatcttccctaccaggaggaggcagcgtgtctgctccttctagcggccctgggcgattggttgcgaaacacgtgggccctcaggacccagctggggttgctgcggctccagctccgagcgagccgcggcttcctcaccaacttggggtggagaaggaagccccccacaagagtttggagtctggcctcttgccagcaagtaacccaattgctcctgcgggaactaggctctgcgctggagcggtggatccccagcttggcctggatcccggcaccctcgagcgcaggaaagcgcctagggctgctttcccctgagttgggtgccccagcccccgacctgaggaggcgaagaccctccgagcctcgagggctgcagctgcccgttgctgagcgaggccctcccgggcgcaacttatagg

SEQ ID NO: 48164 - DNA, 216 bp, Mus musculus
  source 1..216: mol_type = other DNA
gaaaaccaacacagagtaatgcttagttttgtatttatctttatccattgaacactattcatagggcattgacttccgctgccccgcatgcccctgtggacactcgggttacccggcagtgtgactttctgtgatttctgctctagatatctcgattaagaaataaatgaataaattgctcgaaaaaaaaaattaattcaatttcatcgagtgcat

SEQ ID NO: 48165 - DNA, 421 bp, Mus musculus
  source 1..421: mol_type = other DNA
gatcaatcttgtgtctcccagcctcaagatctggatcacaggtgagcttctagattgtagttcattccagaatgggtgtacatctgtgtaccacatgcgtgcctggtaaccgccaccaagtgggtgctggaaattgacccccccccccggaacagagttcttaactgctgagccatcttgattagacatactgtaatctctgattacaccgttataaaggtccttggaaaactatacatcgaattacagaaatattctctttgtatcactttaatatttatgtgggaattctgactcgggaggtttagacaggtcttgcctgtgttcctcaggcgtgacaggcgtgagccacaccccagctgctttccgggccaatcccctctcggaggcggagcccgggcggggagctcggtcatctgac

SEQ ID NO: 48166 - DNA, 391 bp, Mus musculus
  source 1..391: mol_type = other DNA
tgtcgccatggttacctgtggacagattagttaatttaaggatattatcaaatgtgtatatctgattttcattttcattatctgaaaatcgtgtatatacatatactttacttatattccatcttagagccattttcataatgtatttgaagacttttgctcaatattcataaagccaaatgtatttgccaggctattatgtccctgcataataggaggcttctgaggcaggactgggctgccttgccctggctctgggagcgcactacaggtaacgtgcctttggcttcgatcccagacactgtcactgcccttctctttgaatgtcagggaaataaagtccatttaggtgccaagaaatcttcccgatagagaggttgctatagcaacc

SEQ ID NO: 48167 - DNA, 358 bp, Mus musculus
  source 1..358: mol_type = other DNA
atacaggattgttagagttggttacacaacaatgtgatctgaggggttttgcaaatcaattaaaaaatgcaactggccagcatccaggaatttctagtaaaatgagcagatctttttatattaagcaatattactaaatggagattttacacttctctacatgtttactctaaagaatgttaattaataattatatattcagatggctatgtagaccaggttgacctggaactcagaaatccatctgggattaaaggcatgtgccaccattgccaggtggcttttacctttcaggagaggctgtctggaatgaagaatgagtcacatgctcaggtggcttcttttgaaccaatcccct

SEQ ID NO: 48168 - DNA, 243 bp, Mus musculus
  source 1..243: mol_type = other DNA
gtttatctgcaaaaaccattattctatttttcaagaaatgaaaggtttttgtagaattctgtccttggccttggagaagatgatctccgggggaaccccagaacagaccagagatcacagtgcctgggccgccaccgggagccgccatcgcctacctccgcggggccccgagggtccaccgaggcaccgatccggcgcgtcgcgagcgcgccctggtgggcggggccctgggcggggccccgg

SEQ ID NO: 48169 - DNA, 752 bp, Mus musculus
  source 1..752: mol_type = other DNA
ttgggacgggaacttagaaaagtagacgcttaattttatctttaaagctggaataatcatcttaagcttattttatagtaagctgtacaatacttttcactcgggacaactcagtgctaagtgcctcagtgcaagatagccttgtaaaagtggctatggctttctcaaaaacaaacaaacaaatgttggtgccgtttaggcacctgtttgcataaacgcaccatcatcctcatgaattagagggagtcggctgttttaaaatagtacttcctattgtaacagacccgggcactattatgtcccgggtggctttgagctgaggacaacccgagcctccctctgcctggcacggctccctttaggagccgaccggccagctccttcctccggcgccactagggcgtggaggcccccggggcgagcgggcgccgccgccgctagggtgcaaccctgccctggcccagcaggtcccgctccgtgcccgccgccggaggaaagccgaggcgaccggccgccgccccgcgaagggagggggcggcggagccgcagcagcttcaggtttcctcctggagctggtggcgggcgcggccatgtgatgaggcggcgacgagcccggctggccagaggtgggcaggcggggaccagggggcgcagggggtggccccagctgtgggcgcggcgggcgggcgaggggtggggtggggggagctgcggctccgcccctcggtgcggccagcggagcggaggggcgt

SEQ ID NO: 48170 - DNA, 522 bp, Mus musculus
  source 1..522: mol_type = other DNA
ttctctttggaatattcaaaaacatttcgtagctaagattggaaaaaggcttaagcactaatcttcatatagggattttctaaggttatcttaaaatttgtctgggaatactttggagtttcaaattcatcttggaagaattcaaggtaaagtttgctccatcgtgaatgcttcatggtcgaatccatgacgattcgagaagggttaagaggttacaaatcttgttaccctgtttcaaccttgaataaaccgaaaagggtggagatctggaaagcattccgaacatgctttctagacatacccaagtcacttaattttggaaagcaacattagcctggctgattcgccctacggggtgcgcggcctttcccaggaccgcggacggcgaccgcgggtcccagctctccggtgctgctcccggcccgccgctggacgaaaggaaagaaacagccgcggaccggcccccggctgcgcatgcgcggcgacgccaactccgcttcctgaattctggaggaagtggcg

SEQ ID NO: 48171 - DNA, 436 bp, Mus musculus
  source 1..436: mol_type = other DNA
ttgggtctgataatttattttcaacaccaactaattcgatgtgctagacatgcaaatcacaatggggttaaaatagtcacctctttgcggacccctatagaacaataggttgctcgccagccagacggcgacaggtgtccgggcgggcgttcccgctctacggccgcggggtgacacccgctcccgctccgacgcggcgagcggatccggggacaggggccggtcaggcgggtggtacacgcgccctgagctcagcgggagagcggctctggcctggcctagccagatcggtcccgagccccgggcctgcttcgggcccagagcttcggtgaaggcgagacgactcccagggatcgaactgccgttccgggtcattggagagcggcccggggccccgcccagggccccgcccaccagggcgcgctcgcgacgcgcc

SEQ ID NO: 48172 - DNA, 468 bp, Mus musculus
  source 1..468: mol_type = other DNA
ttcatgattgtttctttcatctacaaagagagaggaaaaaaaaaacgcaggagaacgtcgtccccctcgggctgaggcctggatccccaattcacccctccaggctcgccggggcgcacagggcccctcgcccctcccccgcccggcccggcccggcctcgggctcagccccacggcgaccgagcatcccccgctccccgccgccctgcccggcctgggccgaggcctcgccacggcctgcccggcccggccactctccgcaggcctcgcggtacctgagactcccgtcctcggcttccgccgagagggagagagggcgtcgcttcggccccgggccagccgcccctggctcgccctcgcccccgagagtccgcctgggtgggagcgcccgtccgcgcgcacgcgacgccacttcctccagaattcaggaagcggagttggcgtcgccgcgcatgcgcagccgggggc

SEQ ID NO: 48173 - DNA, 333 bp, Mus musculus
  source 1..333: mol_type = other DNA
gtgtgtgccagcagcatatgtctttctgagaggaagagtttactagatgctagcatgctgatattggctccagaaaatctctggaactgtgaaaaaaataactctcttttctgtgtgttttctgttagcaaataacctaagagacttatcttctgaagtatggaggactccctccatattgcaggcagggctgccattgccgtgtgtgtcgttgtcatcgtcatcattatcatcatcattatcctggataaatgaacataaaatagaaaggcagattggtactgttcctctttctggaagccacttctaaacaaagttcagccctgtgtatgt

SEQ ID NO: 48174 - DNA, 296 bp, Mus musculus
  source 1..296: mol_type = other DNA
gtttttttttaaaaaaaagagtataaaaagcatttaatgtattttccaaaataaaaaattgatctcaaagttcatctttgcttgtgtaagttataataattccagtatttagaaagtagtgtgaaatgctcctttagaaataccttttattgaaaagtatagcgctctttttcctaacattttattaaaattcacaggcggagactggcccagtccagactgcagttgtccccagtgggatgactcctacaggccactgggtttccaatatagccaatatcttggcaagaaataga

SEQ ID NO: 48175 - DNA, 386 bp, Mus musculus
  source 1..386: mol_type = other DNA
ctctggcagttggatagttgtcaagtgtcacggggcaggttacaaatagttaacacgagctaggctatcatgttgaatggttagcatagactcctgggggtccacctgccctcggactggagacctaggctgctaagggaccagctcctgcagccccagctggactcgctggcacccacaacttggtggagcgtgcccgccgcgaagctgaccctagttctgtgctccggagcggcgcgccggtgcctcaggagggcagcgcccggtggcggccagatcctaccggccagccctgccctgccctgcccggccgccgcacccgcgagccgggctctgcctggctctctgcacacggaggaggcccgccctccgcgcccggacgcgca

SEQ ID NO: 48176 - DNA, 595 bp, Mus musculus
  source 1..595: mol_type = other DNA
cgtgaatatttctgaaagatattcttataaaggcacaacctttgtctggttatcttttgctatcgactatataaaagatacatgaaaagtgtttacatacatcgtttggggaggcaaataatttcctttgaagaaagtgctacattgtccatgtttgaaaacgatcatactgtagttaaaactacactctaaagttttttaaacttttggaaagatggttcacgcctgctctcggcaggcggtccaggccggctggctcccttgaccgactgcactgcctgagtcttgcaggcgacactgcttagtcccagtctgccaggacctgggactgctggagatcctagaaggccaggacgctggacgcgagggggcgtggccctattagctccgccccccgggcctgcgggtagctcgactcccgccagccccggaggctcgcgtgcgaacgctcggacccggacaggctgcgcgcacgcgcactcgggagcgacagtcaggctctcgccccgtggtggcggcggccgcgcctgccgctaggtggcgcatgcgccctagagggcgcgggcggtctctgggaagaaggcggcggcggcga

SEQ ID NO: 48177 - DNA, 441 bp, Mus musculus
  source 1..441: mol_type = other DNA
attcacaactttctgtatcttcagtttcagaggagaccttttaaaatagtatatggaaatagcatctttccatagctttacgtgaatatttctgaaagatattcttataaaggcacaacctttgtctggttatcttttgctatcgactatataaaagatacatgaaaagtgtttacatacatcgtttggggaggcaaataatttcctttgaagaaagtgctacattgtccatgtttgaaaacgatcatactgtagttaaaactacactctaaagttttttaaacttttggaaagatggttcacgcctgctctcggcaggcggtccaggccggctggctcccttgaccgactgcactgcctgagtcttgcaggcgacactgcttagtcccagtctgccaggacctgggactgctggagatcctagaaggccaggacgctgga

SEQ ID NO: 48178 - DNA, 421 bp, Mus musculus
  source 1..421: mol_type = other DNA
gctagaaagggctctttctagctgagactgctaaaccattgtatagtagagttgattaacaatcctctccttcacctttcgttattaaaaataattttacagtcaatccttgactttattagttaagttagttttaatgaagctgtcattaacgtgatggaatttatttcacttactgagtttgtaagtaattttttccattgaagttctacaaaggttgcatttaatgtttttaagatgtggttcagtgcctcaaaaatttatttgaacgactaatatagctttgtatattaaattgaagtgcaactgtttttattcatttaaaataataatccgaatcagatttcgacttgcaaagagcagccttcgtgtaagcagcctggctgcccgtggcactaggacccagggggctcccgtgagc

SEQ ID NO: 48179 - DNA, 664 bp, Mus musculus
  source 1..664: mol_type = other DNA
gaccaccttgctgtgcatatttaaaatactcatacgtggtaagtttgtgtaaaaataaccaggcagggaagaacgattcttccaagaccgggtttctcagtatagccctggctggccttgaactcagaagtctgcctgaccctcccaagtggcttgaaaagtttaaaattcacttgaagttagagaggagagcttattatctccaagctgtagaaacatacctagagatgtaaacctaattttctaaatcatttcatttggttttatatgccctgtgttatcaagggggccgccgtccgcccacaacagttcccgggctctgggctcggcggtctcccgggggggacacgagtgcactccgggcacgcacgtcacctgccgccggaagggccgtgcatctgggcgtctcaacgggctgggcagcggaggccgcgactgagccccaggctggcttgtgggggctgcgtgaggcgggcacggggccgaggcgtcgaccccgggaccccgcttggtgaaaaccgctggggcgcgccgcccgcccgcccgccttcccgacgcaggccagcaggcccaggcttcccagccccgtcgccgttgccaaggcgaccgccgccgaagattcccgcgccgggctccgccccccggccaatcggaccggcgctcg

SEQ ID NO: 48180 - DNA, 275 bp, Mus musculus
  source 1..275: mol_type = other DNA
gcaaaaagaaaagctctccttcttctatggcctttaatgtggccaccagcagaagatggtacccaatttttgaggtgtgtccgatcaagaaagccctcacagttctcctgcacagtagtagcagcgttcatccctctctgcgggcatgcagtgggactgattgccaccagtctgatgatcgtgattggctatccactgtcaagtcatgaagtaaccagtataagatcatttacccattttttaaacacgtctttaaaactctttattacttcata

SEQ ID NO: 48181 - DNA, 459 bp, Mus musculus
  source 1..459: mol_type = other DNA
aatgatgttctcattgtagaaacagttcatatcataatctaaacaataagatttgaattcttcagttggctcctaaggagccaacatcatgaaaatgaaatggtcgactctttttatttccccacttggggtcagcaaataaaaatttctgtgtgtatgagacaaagagagatgtgtgtgtgtgtgtgtgtgtgtgagagagagaaagagagaaactttcagaagttggctctctcaacttaaatgtttagtatgcatgtttgtgtaagtaatgacttacacacacaaaaagctaacattgtttttgttttgttttcctagattaaattgtataggatggttgcaaattactatggaataaaaagcagagagcctgaacactctccttctcagcttgaggctccctctgaggtctgttgctatgtgtctgtgacataggaaagtaagtacctgtgacac

SEQ ID NO: 48182 - DNA, 369 bp, Mus musculus
  source 1..369: mol_type = other DNA
tgaccctagatttcatctaggctagatctgcacaggtgccagctgtgccaactgtgccaactgtgataactatgccgcttagtttttatcagatttactcagggtctccttaagcactcagggacacgtgacaaatgcaggcatacaatttgatacttgcctagcctatccagcggagacttgacacatctatatcttctgtcctctctgaggaaagaaattattcccaaagcttggcagagccctgagaggttactgccattgtgaacaaatgaattccatgagcacttgcatgcatatgagtctcacaggtgcacgggttttatttaaaaaaacaaaaacaatctgttcccactgaacggttctgtt

SEQ ID NO: 48183 - DNA, 329 bp, Mus musculus
  source 1..329: mol_type = other DNA
actggggttcacaataattaactgtggctggcaacgccacactaagtggcgacacacagagcccagtgagcactgggcctgggtggccaggcactgtgccctttgcccagactttccctcactgagagtcagagttgacacgttggacaggacagagccactcaggggttttcatgtcctgaaagctccacattttgtttaagagaaaatgagatgtctatcttctgtttccttattttcaggaaagcgaagggttgccttccttcttcccgaaggtactcatctgagaaaaagagaacggggtattgttcctgttctccttcttaagt

SEQ ID NO: 48184 - DNA, 548 bp, Mus musculus
  source 1..548: mol_type = other DNA
gagtctgattgaaaacaagcagcattgcaaacatccaacaaggattacgagattgtaagcactacaaactcgggttttgcaaaaacttcaaaacgtattttcggctttgagtgattatgtgattcaactcaagccatcaaatcgctctgcttgtttacctactggtggaaaaaaaaaaaaattttgcccaggggaagaaaactgttctagcccacggagtgaacatatttgggtttttcatgatcaccaagaagtctactaatttaatacattaaacttgcaagacacttcccctacttttcaaaagtttggaatggcgggtactagcctttttcctttctggggcaaccggatcccagacgcacttatgcgcttcctggaagcccatcacctggagctgcagctccaaggcagcagccaggcgagacgcgtctagtcgcccacaccgcaccatgggagccgccatcttggagcgcaccaagtggggcgggcgtggggggacaggcacagagcccgcctccgccggaagtggtcctaccacctcagag

SEQ ID NO: 48185 - DNA, 565 bp, Mus musculus
  source 1..565: mol_type = other DNA
actgaagatagcctttcagatctggactcagtaaccctagatcagaaatcactgaccacagatcagccaaaaatagttgtttatgaaaaggcagtcagatctgggtctttaacttcctattctgtaaatgaagaagggtactatgtgtgtgtgtgcgcgcccacattataataattttattatcaatagctcagtctttgagaatgtaagcagcacagcttgggttcccatacttgctttgcaagtgcaccctagctgccctttgctttccaggcacagagcagaggggttcacagtccggaagcaaaccgggctgctcacagagaggccgcggtgggctcacgctcccttcgcgtgcggccgctcgtacctccgagagtgcagcggcagcaggcggagcctgagcccgtcaccccgggatgcagcgaaggacgcggcacccgcaggcgttccaggggccatgttgttccgggccgggctgcaccatctgcgggacccgggcaggggggacctctgaggtggtaggaccacttccggcggaggcgggctctgtgcctgtcccccc

SEQ ID NO: 48186 - DNA, 488 bp, Mus musculus
  source 1..488: mol_type = other DNA
ttgtatctacagtactgtggcaaaattttcagatgaaaaactcagattaatatacaattttgcttccacagatcaaccaaacttggatataaaaaaagaaagttttcacattgcatctatcttaggtaacatagcagtttctgtatcactgatgtactaacaataagtaatctagagattatgtttacaggtgtagactatatgcaaatggtatgccattttaatattttgtagaccagattggcctggaccacacaatagaagggaattttgataagaccaatggatgtcatagatgtacttccaaattacgtatttaattggaagttgactatcaggttgaatttttccccaataaaaatatagttttaaaaaatcagactctttgggggagttcaatatacctcctggcactgcaggaaaagccacagtaggaagtacagtcctttgccaagcaaatatctctgctagttttagtgagataatgg

SEQ ID NO: 48187 - DNA, 442 bp, Mus musculus
  source 1..442: mol_type = other DNA
ggaggttggctttgacaaacatgtgtttctgagtggtgcaagtgtagccctggctgtcctggaactcactctgtagaccaggctggcctcaatcgtgcaccaccacgttgttttctttaagttttatacactgacaagcaaagttaagagaaagaactgtgtctaagttctctactctgctttgtcggtatgacaaggaacatcaatctttttattcttagtttcaaattacaggagagaagctaagaatgacttcccttcagaataccatgggatcctgtgctacggcaaggcctgccattgctgggtcgacagactcacgggcaggagcccagctctccttcctgctgtgagtgcagcagcaggcgtgggaggagaattctcccgctcctatgatgacatcataacctgaaagtacttccttctttttgtattaaagaga

SEQ ID NO: 48188 - DNA, 491 bp, Mus musculus
  source 1..491: mol_type = other DNA
catcattgtcacacaaaataattttgcctgtgctgcagagacagtgtcagcatattaagaaaagaaatctgtaaccaaaagctccagactagactccaaagtctgaacaaattaggcttaggtcttgcaaagtctcttttaagcgaaggtgataaatattcctgttgtttaaaaaaaatggacaaatacgcctttctatatctacaaggtcaaaaactcaggtttgtgttttgcagcaattactttttgatgcggaatctgactcaggacataatcccgctctaggccctcgggttgcagcagagttctttgggtcccctagagcctggctcctggccctgcccgggccgccggcgaaatgatttgctgcagatgacatcagccctgggctaagggtggaggcaaccaccacgaggacgtgccgggtggtcctttcctcctctcactccccgctcctctcttccgcgcagggagagggcggagggggaggc

SEQ ID NO: 48189 - DNA, 372 bp, Mus musculus
  source 1..372: mol_type = other DNA
gtaactaaggaacgttgtacacacaacttcggttttataagacaaagatagatgttaaaaatgttactttagttttaattatccatatatgtgtaagtatgtgtacacgagtgcaggtgcctgcggtgttgggaactcgagctccagcacgtgtcagcccatcagaaaggttaactttgtgctaaggtacaggactggtgctcagcaagtgagcctggcccctagggaagcttccctggctgcggggcggacagtgcgcagagcctcgttcccgggctcccggagcccggcgggcattgacgtcaaacggcagcggagcgctgcctacagacggctgacccggcacccgatttcaaccggctataagaagcc

SEQ ID NO: 48190 - DNA, 376 bp, Mus musculus
  source 1..376: mol_type = other DNA
gggcgtggcccaaggactagcctagtcattcccagacattctcagccgcgagagctgagctgaaagaagaggttttgctaggctcaccccacccttgcatgcaagtcggcggtggccacggacccagccaggtaaataaaataatttagaacgcgccctgggtggggtcgtgctggcgcgtctccccactcacgcccctggggggcctcgggaccggccggttacggtctcgccgaccaccaccagcaagggcgaggtggacgccgccgggttgccgatgctgcccgatggctccggttcggtggcttccaccaccacggtcgccatggtgttcctctcccgccgctcctctgctctgcggcaggagaaaggatta

SEQ ID NO: 48191 - DNA, 508 bp, Mus musculus
  source 1..508: mol_type = other DNA
tgtacacacaccgtacccacgtctgtacacacaaagtgccactccttctaaattagcaccatttaatatagtagtcctctgtgtgcatgtgcgcgcgcgcacacacacacacacctagatgacattgtcttcaagattcatgttaaaacagttggtttcagacaatgtcattcttcacttagtagtctgtggactcttcacttagtaagctacagaaactttgacaagccttctatcaattgagacagagcgaccaagcctggctccgctgtagtaacacgtaagcataacaacactaaggcacttcgcagagtgtttttaatccttattggtgtgaagatcccagtactgatgtctacaatctgtcacattctaaaaatgatcaggtgtgctgaagctctgcagtcagtgttcctgggctcgcgatggaatcgcgcagctgctcttctgcgcctcattggcggagtagagaggcgtggcgcgcagcgccgaccaattggaggtggtc

SEQ ID NO: 48192 - DNA, 335 bp, Mus musculus
  source 1..335: mol_type = other DNA
atagttaaaacttttttttttcctagcagtcggaactttgctgggattgcaggcacgcaccaccatggatgaaaactccttaatagttcataaaagattcagttaagtaagggatcctgggttcaaaccctagcaccagccgggcctgagttcgaggccagcctggtcgacaggtccaggacagccagggctacacagagaaaccctgtctctctctgtaaccgaagctacagagcgttgcagttgctatggctcccggcgcccggagtctgacgtcatcgtcggcgccgaatgattacgcattgcttccggcgcctttcgcgagccgggacgcg

SEQ ID NO: 48193 - DNA, 371 bp, Mus musculus
  source 1..371: mol_type = other DNA
cctcccaagtgtataccttggtagaattaatattttgaaaaaaagacctttctaccaaattcttcacataagtaggaagaaaattctctatttgatatggaatagccaattagtcatagataagtgtttgtttcgtctctatacttttgtatgttttaaaaatattccacaataaaactcttaaaaactatctcagtttgtagtgtccctccacagagcctgagcttagagctaaagttctgtccatccggagttggagcccgcgaggcgagtgcgcgcgcggacgcctcgctgacaagggacgcgcggggcggtggggcgtggggaccgcgcacgcgcagtggctcaccggccacgccgcggctgttgtg

SEQ ID NO: 48194 - DNA, 366 bp, Mus musculus
  source 1..366: mol_type = other DNA
attttattttgttaaatcctggaacacaagaacccacaaatctcactgggcgcttttgggatgcattccaagatcccctaaattgtagaaaacagtgggttttgccaggctgtgccctgccctgggagagtccatcatagtttgagacaggggctcgccttcccatcttgagggaggtcaatctgtaaatttattgtcgaaattctatcaggaatttaccagatatgccagatgaaggaaatggtcgactccccgtctaataattggtgtgtgcatcaagaaccagcaaacacaggatgcccttattgtgaaggttcatccccagcctaggctataggaggtctctggctgcctccgggccaccgc

SEQ ID NO: 48195 - DNA, 420 bp, Mus musculus
  source 1..420: mol_type = other DNA
tatggatatataaccaaatacatgggatttatgagcatacatatagtctggatagtctaacaatggctatgtgagacatattgtcctatgatgtgtgtgacagtcattgttagagtttagtctacaagactggatgtctcagtggagtcctagaggattcctgaaaagctgctgggagtactccctactgttagaatgagtcttcctccttcaagtagagtttgaattctatttgattgaaagtgtagtaaggttgaaaaccaagattagccatctcacgatgatttgagagttctataaaatggaatacccattgtactatggatcctggttaaaataattttagaaaattgaagacactgtgtctgggcctacactgtggtctgaaaaatacccacacaggcagcttttccagctggt

SEQ ID NO: 48196 - DNA, 275 bp, Mus musculus
  source 1..275: mol_type = other DNA
aacaacgaatttatgaaattcttatcctccttagatcacaaaagaagtcacttgatatgcactcactgttaagtggatattggaaacttcattcctccttataatagggaaatatgccaggaagattttgctgaaaggaccctgtaataggctatgccagtgtctggcaaatacagatctagctgcatatgtaacagaagatggcctagtcagttatatgccccatttgaaatgtaaataaggaaaatatctaataataataataaaaagagttt

SEQ ID NO: 48197 - DNA, 218 bp, Mus musculus
  source 1..218: mol_type = other DNA
gggttattttatcccagcaactaagcctagccttagtctgtcaaggcagggccagctccttctctacagggaaggatcaaagttgacagaactccaggcaaccattgctgggaggggttgtacagtcatgagaactctttatggtcaggaattgtttccatcagatgccacccctgggctaagtgtggcatcctggcactaatcccaggcaggatgac

SEQ ID NO: 48198 - DNA, 388 bp, Mus musculus
  source 1..388: mol_type = other DNA
tgtgttcaaaggaaaattgttttttaaaaaaaaaagtcagagaatttcctagctcagtcttagtttctaagactattttacagagccaaagttatgagtgggaaaagttcgaatgtgtcttacttctattcacaaatatgcttagatgtatttttcacatggcagatagcaaacatctgtaacttcagttccaggggatcagatgccactggaaggcagtgctcttgggcaccatcttctggcagcagctgccctctgccgccggaatggctccagcgcgctgcggaagaattttggcggcgcactcagactgccgggtcgtctcgtcgaggctggtgggtctacgcgaggagacctaccgaggtgcaaagcccgggttggcctcggg

SEQ ID NO: 48199 - DNA, 395 bp, Mus musculus
  source 1..395: mol_type = other DNA
tttgagtcatttcactcttcacccaacttcctgtaaagtaaccttagtaaaactcactggatcaaatcaagttagatttatttagcgatatatatatatgtatgtatgtatgtatgtatatttcaggttgaatttctatcagagcagttagtaatcactcttctagctgggattaaaggtatataccaccacacctggcgtagatgtctccttcaaaatgaaatacatcttctaggacttattatcttcttgggtcctgactaaccatgttaatacaatatagataacaaacagtcagttggggagatggccatcccaaggattcacatactaaaacattttatttaataaaagaaagatgtactggttcttgattattgtcaaatgattgtaca

SEQ ID NO: 48200 - DNA, 351 bp, Mus musculus
  source 1..351: mol_type = other DNA
gtctgatcacttatgccaacaaaggccttgtttcgcaagggtttccttgatgtggcgaggtagttgtgttcaaaggaaaattgttttttaaaaaaaaaagtcagagaatttcctagctcagtcttagtttctaagactattttacagagccaaagttatgagtgggaaaagttcgaatgtgtcttacttctattcacaaatatgcttagatgtatttttcacatggcagatagcaaacatctgtaacttcagttccaggggatcagatgccactggaaggcagtgctcttgggcaccatcttctggcagcagctgccctctgccgccggaatggctccagcgcgctgcgga

SEQ ID NO: 48201 - DNA, 357 bp, Mus musculus
  source 1..357: mol_type = other DNA
tcccctgtaagattagagacgctcaactagaatatgtagacactcaaatttaaaaaaaatatgtcaaatcccttcttcaaattatgtcaaaatgttgattaagccatgatcagcgttccatatgttaatacctagctaaaggatagcttgatgtgacatcactacagttgtggaaaagattttatttattatatatatctgtaaaggtttaaatcctttatttctttttattgatgagcaacttaagaatatatgtcacattttattgacccagtggtaacagaaatctgtcagtctgttaatatatgtgttagacatttcatcatttgatatttggaattttacttttaaaattgg

SEQ ID NO: 48202 - DNA, 315 bp, Mus musculus
  source 1..315: mol_type = other DNA
aaaatacaacccttagcaaccagattggttttgcttgttttgttttgagccaagaaagaataccgaaacggctttaaatccctttagagccgtgtgactcatccgaatcctctgaatcggaaggtgctagtaataagcacttctgacccctcccatcggagtttcaggtgaatgggtcaccgagggaggaggctggccacgccacacctcgtcgctagtctttccttaggcgacagcggtggcggggcacggagcaaccggctaggggctcggcaggtgggtcccagcgcacagccccgggcgggttcggccaga

SEQ ID NO: 48203 - DNA, 600 bp, Mus musculus
  source 1..600: mol_type = other DNA
ctgtgactctgacaggttgaaaatggaagccctgactgaccgagagctggggctgatagaccctgacagtggggatcagccggctcaggaagctcccggtgaacccgcgcaggctgctcagaatgccgcagagacctggtcccttccgctgagtcagaacagcgggagcgatctgcctgccagccagcctcagcccttttcctccaaagtggacatggaagaagaaagcaatttgttaattgctcagttccttatcgtattcgtcacagcaactgacgactgtcatctgcaggtctcaagtactcagtgcttagtatttattatatcaaaatgtgtaatccagaggaaatttgatttataaaacagtttaggatgcaattatgagtataaataaaccttgtgccttacttacatacagtggaatattttagatacttctggaaagtatttacataatttatatcaaaattaaaaacgttggatttcatcttggcactgtctgccttgggtccaggcaaggcgagctggtagcacctatgctatgcctgcttcctggcctcagctaggtggccaggcgggcggggcactgcggctcggcca

SEQ ID NO: 48204 - DNA, 570 bp, Mus musculus
  source 1..570: mol_type = other DNA
tatattggaaggtgcacccatctattttagagttgtaggtttagggacacaaaaactttaaagatgctcaatgatcagggctctttgaaaacagatatcagcagtccttaggtgtttctgcaatcaccagtgagcggagctgacacctcgcaccatggctccaggccagggctcctcacacaccagtccagactggagggcgtatgcgtgaagacacagctgcctcacgcctcaaatcaagcggaagccgcggcgtccttactttccgggagctgcgtcccctcgcgggcggaaaaaagcggagaaccggggctgtacttcgccacccagccctcccggctcagccgcaggctgttggagggcccgcctcctggggaccttcctcacggacggcgcttccgcgacgcagccagaggggagggccagcgcactgcctgacccgaaacgcaggcgggtctcggggcccggcttcccaccattagatggaagcgtaggagcccggcggagggcctcgagggaacctagccgcgtacaggcgcacgagaccgcccctccgcacgcacgcccgcc

SEQ ID NO: 48205 - DNA, 511 bp, Mus musculus
  source 1..511: mol_type = other DNA
aaaatcatctacagaaacctttcgggaagtgtttctcaaaatttttaaaaacggggcagcgggagagcaggagccggcctgccgctctccctctcctcggcgcggcgtctgaccaaccgaaccgccgcctcccgccccccaccccaacggtcgcgagcgccgggtcctgacgcgccagccgacacggcacgccgcgcggcctgcggagcgcccccgggacctcacagccctcggcaaaccccggcccggcccgacccgaccccgttgcgcgccccgctcacgcgcccgccccgacgcgcttgccagggaggaaccggaaagggcgggcgtgcgtgcggaggggcggtctcgtgcgcctgtacgcggctaggttccctcgaggccctccgccgggctcctacgcttccatctaatggtgggaagccgggccccgagacccgcctgcgtttcgggtcaggcagtgcgctggccctcccctctggctgcgtcgcggaagcgccgtccgtgagga

SEQ ID NO: 48206 - DNA, 660 bp, Mus musculus
  source 1..660: mol_type = other DNA
cagtccttaggtgtttctgcaatcaccagtgagcggagctgacacctcgcaccatggctccaggccagggctcctcacacaccagtccagactggagggcgtatgcgtgaagacacagctgcctcacgcctcaaatcaagcggaagccgcggcgtccttactttccgggagctgcgtcccctcgcgggcggaaaaaagcggagaaccggggctgtacttcgccacccagccctcccggctcagccgcaggctgttggagggcccgcctcctggggaccttcctcacggacggcgcttccgcgacgcagccagaggggagggccagcgcactgcctgacccgaaacgcaggcgggtctcggggcccggcttcccaccattagatggaagcgtaggagcccggcggagggcctcgagggaacctagccgcgtacaggcgcacgagaccgcccctccgcacgcacgcccgccctttccggttcctccctggcaagcgcgtcggggcgggcgcgtgagcggggcgcgcaacggggtcgggtcgggccgggccggggtttgccgagggctgtgaggtcccgggggcgctccgcaggccgcgcggcgtgccgtgtcggctggcgcgtcaggacccggcgctcgcgaccgttggggtggggggcggg

SEQ ID NO: 48207 - DNA, 347 bp, Mus musculus
  source 1..347: mol_type = other DNA
ggcgcgcaacggggtcgggtcgggccgggccggggtttgccgagggctgtgaggtcccgggggcgctccgcaggccgcgcggcgtgccgtgtcggctggcgcgtcaggacccggcgctcgcgaccgttggggtggggggcgggaggcggcggttcggttggtcagacgccgcgccgaggagagggagagcggcaggccggctcctgctctcccgctgccccgtttttaaaaattttgagaaacacttcccgaaaggtttctgtagatgattttctttactgaaaaaagttcagctgctgttttgtcaggtaagtttcttggggctttcagattctgaagccagtagg

SEQ ID NO: 48208 - DNA, 468 bp, Mus musculus
  source 1..468: mol_type = other DNA
tactgggctcaggagagctgaagcgccgctggcccacccggacctggcgatcctttcgggtcccctgcggtggtcgtgcagtcacgtggcccgaggacgcgtgggcgcgcgggctgcgcagcggaaggttcgatccttgggacggatgcgcagagtgccagcgtcaggccaggacaccgggaaccctcagataccgatttcaaaaactctgtttctgtcattatttaactattagttttgagccataaagctgtaacgcactaaatgctatgcaatatcctggtttcaatatcttgaatgtctcaatttttgataaatgtaccctgatgctaactttagaggaataggcatagaggtctaaatctttgcaacttattgtaaatctaaaattattctaaagctaaaagttaatatactgtttgatcaacttgtttgctaaaagcaaagtcttcaacaaatatcttggag

SEQ ID NO: 48209 - DNA, 234 bp, Mus musculus
  source 1..234: mol_type = other DNA
caggattagaattttcactgatagtcggatggagtacccgtgccaggaactgaaagggctgtgccagcactgcctcctggttgaggcattcatgaagcctttcaatataatattgcaggttcacagtacttggagttctcaaagtgaagcactggctcctgcgtgtaactccagttctggagggaaagatacagtttaagttatatcctaagttttctcaaatgggacccttcc

SEQ ID NO: 48210 - DNA, 230 bp, Mus musculus
  source 1..230: mol_type = other DNA
ccttatgagacaaaggactttgaggagacttccttgaagaaaattttaagttttcatttgggagtcctgaggggaggcacttaatgaagatattccttttaaggcccaagttttaataaaatcgttttcagattaaatttcggactgtactgaaattagaaactagaaatggtcctagataatttaggatgacgaaccaaatagttcaactggttacagcacaacgttgt

SEQ ID NO: 48211 - DNA, 402 bp, Mus musculus
  source 1..402: mol_type = other DNA
aattgatgacagctaggcttaaagtgaaatcattaattacatagcaaacactgttactatgtgttttaagatttattttttattataactagttacactgtaactgtcttcagatgcaccagaagaggtttcttaaatcattagtttcaaatttttataagaccaaaggctcattctatagcattatcataatcagcctggaggggtttggtgtccataggggcaagccctcacttctgctacattccgaacttagaaacactgactgcagtctagcacagcttccgggtactgtgtgcacgtggcagcggggaagggcgttcgcggcccaactcagcttccgtaggactggccccgcccacagcggaagtatgggcgggacccgtaggtcgtgtgcgtcca

SEQ ID NO: 48212 - DNA, 518 bp, Mus musculus
  source 1..518: mol_type = other DNA
gttagtgttactgaaaattaatgtggaaaatttcactgaagttaataagccttaataaggagttttgcaatagagatctttgttaaataagattttacaaaactatatttttggagtaatcttaaacttagagcaaaattaagcataaggcacatttttaatctatttgcttataataacaggccagcctggtatttcaggacagccaggcctatagagaaacaaaacaaaaaacatttactatgtgtatgtgtgctaacagatagctgttggaacagtcatattaaagaccgtctcttgtattggcacttctatagctgggctagcttggacagcacacaagtgagcactgcacgccatgcctacctaaggcaggtctgacctcgcgaggggtgggcggtgctgccagcggcagcctcgctctggccccgcccccgccccacccccgccgaacttgggatcgcgggatcgcccaaacgcattctacgggaacccactggcaggagcgagcggcccgg

SEQ ID NO: 48213 - DNA, 567 bp, Mus musculus
  source 1..567: mol_type = other DNA
agtcctggctagcttagaattcagtatgtagaccaggctggcttcaaactgcctcttagaagcatgcgccaccatgctgaccagatgtccacaattattgagcaggtacctgtaaaaaaatagcttttatatagatatgtctacactaagtaatatcatttcaaagacaggattgaagaaaatcaatatttttagaaagggaataaaattgtttacaatagcaggttagcctgtacagaaatccaaaaataataatctctttgtgggagtcacaggcacttcaaaaaacttttagctttctcattagaaaaaaaaaaaaaaaaaaaacgcctgaaattcatcatccaggtttatgaggctagcctgggcgaagaagggctaagctctgtttgttaacacaaatatgcattttctaggggaccccctcgagcgggaccttaggtggcgctgcagggacctcttaggggcttctcttgaagacgcggagggggcgcggagccttcccagcggtgtccaccagcgcgcaggcgcaggattggtcactcccccgggagtgagggctgccgg

SEQ ID NO: 48214 - DNA, 354 bp, Mus musculus
  source 1..354: mol_type = other DNA
ctcattacagctagaatcccagagaagggaaagcgcgtccttctctgtcccgtcctagggctttgaaggatgccctcccggggctgtcctagtccccggagcgggggctgccagcgcgtatgagcaagttagttaatcatgaagcctcgagacgtgcgagcgcccgccggggctcctttcttccccggtgcagtagctcgacccagggggctcttctcgcggagccggggacttgctgccggggcggggcgtggggcggagggacccgctgcagcctagccccggggagccggcagccgggctgagagtcgcgcgcccccgccttgcgcgctctactgccggtaccgggcgggc

SEQ ID NO: 48215 - DNA, 250 bp, Mus musculus
  source 1..250: mol_type = other DNA
tagtttttcttcagagtggcctaaaagaaagtaaattcgactttcaccaaaagttttgccatgtttcctaggaaaagactgcaactttctcaaattacagactagaatcccagagaagggaaagcgcgtccttctctgtcccgtcctagggctttgaaggatgccctcccggggctgtcctagtccccggagcgggggctgccagcgcgtatgagcaagttagttaatcatgaagcctcgagacgtgcga

SEQ ID NO: 48216 - DNA, 173 bp, Mus musculus
  source 1..173: mol_type = other DNA
acaactgacttattcacttttgtgaaaccagacaaggggctttcacctgagccattttaacagtcctaagtcactagggggaccaggtttgctgcaggaaagcactctgccctgaaactggcttcaacgcagtgggaagcatcgtagtttttggccaaggcaaaaagaacttc

SEQ ID NO: 48217 - DNA, 438 bp, Mus musculus
  source 1..438: mol_type = other DNA
aaatttaaaaagtccatgagttcttgaacgtttttatgaaatttttacatctaacggctctgccttgcaaggtggaggcagccgtgctcaccccgggagtgccacgccgggtggcgcggtctgggcaggcaaggccaggaattacagggcctccccgctttggcgagcccttctcgcaggcagccggctgggctccagcttcgggcctgggcgacgccccgcaggcgagccagccccaagcacgcagagttagagcgctccgtagcggagggcgcgcgccgtccagtcgcccggggcatccccgagccgggggcgggggcgagggcagcctccctggtagccctcccggagactggcagaggcggagggcgcggctcgggcgctgggcggggcgcaggggcgggcccggggtggggctggcgcctggcgctggagctg

SEQ ID NO: 48218 - DNA, 425 bp, Mus musculus
  source 1..425: mol_type = other DNA
aacttgggaggcaaagagcggcagatctctgagttctaaaccagcttggtctacacagagaaaccctgtgggggctggactgaccctcctacaaagaagaatcgtagatgccagatacctttggcttacaaatcaggcagctgcagctgcagttgcagttgcaggagactatagcttaggcaaagaggccttcgccacagtctctctagagttaggtgttctgaggacccatccgatgtcagttaaacttgcttcaggacacacatgctgtaagtctccagggaaatccctgcccccatgttggtcctataaacagacaggggcagcactggctgatctgcagatgcattttgggtaatcattcaggaaaacatacagagtgctttaaaatcaccaattgttatagaattcctaaggaagaatca

SEQ ID NO: 48219 - DNA, 412 bp, Mus musculus
  source 1..412: mol_type = other DNA
accacaaaggttaaggtgattattctgtttctttctccttgttcttataggaaaggaaaaatgaggccccgacttaactttagtttctaagcagaaatacagaaaaaatgggctgcgtttggatcccctctctcttgcgcgtgactggccgcgcgcttccgttttcacgcgagagactaaagtcccagaccgagttaagtccgcggactccgcgtcggccctgtggatccccgcgccgtggggctgccccgcgcacccagagctcccgcgggatcgggtggcccgctcctggccccacctcccctacctgacgcccgcgcggccagcggctccgcagcctccgcccaccagcgcgcctgcgctgccattggctccgcgggctgcccgtctcctccgctccgtcccggaggca

SEQ ID NO: 48220 - DNA, 668 bp, Mus musculus
  source 1..668: mol_type = other DNA
ttctgttttgtttgttttttctatagataagctaaaactattatctaaagttttagattacaacttgaattccatctgtgctttgaggtctttcaggagagattgtttagctatttatctctaaatagcatctggttgttgtaaatagaatttaccactgaaacaaggcataatgcttttgaaaagttaccacgtgtgtgatttttaaaaatgcagttttaagatactcttaatgaattaatagaaatggtaatatatatatttaatcaagtttgagaaatatacccactcccatttttggctaagaagatagaaaaatatgagttttagtttttgtcaaattgttttaaattcagaaaccaaatatggcagatcatgaacttcaattttttgaaaattcataaattttttttaagttgcaggcatattttcttaaatggttttactattactaaaatgattttactattattcctgttagaaaattacaggcttcataagaaaagcatttataagcgttagttattgttctcagataagtatacatgaactgcatctaaagttagtattttaagaagtttcctgagactagggaaaattttaaatctcaagtaggtagcttcagtaacaggaatagagcaaatttcaattcgcacatatttgctttt

SEQ ID NO: 48221 - DNA, 563 bp, Mus musculus
  source 1..563: mol_type = other DNA
tcaagtgttggtgtggaagagctctgatagctgtctgtgcacactcatattggtgtgtgtgaaaacctgtggaaaattgtactgaagtgcttagtttattatttttggatatttgagattttgcaactgaacatttagaaaatttatcaaatatttgcctactatagtttccagttcacagattgtaaaaaagagctttttagaatttaaaagcttaagttggtatgaaaaaatattttaactgtatatgtaagcatatactcatgaggacagagttaagaattttccaagtaaagtataatatgtatactcagtcaaattggggttgtgatattttatattcatttgaaaaatactcagtttgttctttcaaatatgttacgagactattatttcatattagtgttatttttgttaaaagaaagcagtttttaaacaaattttacgtcttgccttgctgtaagagctaattattattaaaaattttatgtttttccagaaacattcatatataattggctgttgattttgacaattttaatgtacagttaacttagagtact

SEQ ID NO: 48222 - DNA, 818 bp, Mus musculus
  source 1..818: mol_type = other DNA
gcccggcggcccgggcctcgggagggtgggtggcgggcctcccgccgcgcgcctccccgccggcccgcggcccccggcccgcgccccccgccgccgacgtcgaccgcgtagaccccgtgcgcgctgactggctcgcgccggccttcgcctggctgtgggcggttggggcgcccccgcgggagcccgccccgcccccgtcgccgccgccgccgccgcgcgcagcctcggcccccttagccgccggggcggtggcgctgttgccgccgaggcctgtgaagcagaaactccctccaccccggcccggcccgggtccgcctcccctctccgtctcccgctcgagagtgaaggtggcgcggcggcgcgcgacgcagcctgggcccccggcgcgggcccgcgagctcccgaggagaccgcgccgccgcggccgcgaccgcagggaaacgtggcagagacagggccggccggtcggaccgcccgacggacggtcgccttccagcctgcgcggccggtcggctccggctcggagcggcgggggccgggcgggcgcagggcgcggccggcgcactcgagacaatacccgcgcggcgcggctgtgggggcggaggcctagtgcggcccaggccggccgagctccgcgtcctcgccccccgtgggccgcgcgaggttccgcggctcggggcgggcgccgtcccctccccctcggcggcgcggcgcgccaccccggggttccgggttcccgggccccgagctggagcctgccacccaggcaggatcgcacaaaagttttttccttcggcgcgagcaggaagccagcccgc

SEQ ID NO: 48223 - DNA, 796 bp, Mus musculus
  source 1..796: mol_type = other DNA
tcgatcggcccgggcggcggaggcctcgcggggtcgtggggggcggaggggagcccggcggcccgggcctcgggagggtgggtggcgggcctcccgccgcgcgcctccccgccggcccgcggcccccggcccgcgccccccgccgccgacgtcgaccgcgtagaccccgtgcgcgctgactggctcgcgccggccttcgcctggctgtgggcggttggggcgcccccgcgggagcccgccccgcccccgtcgccgccgccgccgccgcgcgcagcctcggcccccttagccgccggggcggtggcgctgttgccgccgaggcctgtgaagcagaaactccctccaccccggcccggcccgggtccgcctcccctctccgtctcccgctcgagagtgaaggtggcgcggcggcgcgcgacgcagcctgggcccccggcgcgggcccgcgagctcccgaggagaccgcgccgccgcggccgcgaccgcagggaaacgtggcagagacagggccggccggtcggaccgcccgacggacggtcgccttccagcctgcgcggccggtcggctccggctcggagcggcgggggccgggcgggcgcagggcgcggccggcgcactcgagacaatacccgcgcggcgcggctgtgggggcggaggcctagtgcggcccaggccggccgagctccgcgtcctcgccccccgtgggccgcgcgaggttccgcggctcggggcgggcgccgtcccctccccctcggcggcgcggcgcgccaccccggggttccgggttcccgggccc

SEQ ID NO: 48224 - DNA, 500 bp, Mus musculus
  source 1..500: mol_type = other DNA
gagtgttattgttaaaacccggcgtttctatttaatcagtacactggtcagggctaagctggaagctcctggcggccaggtggcattaatggcttatttctcttttaaaggcgaatctactccctaggccagagaggttatttcactctctgactaaggacccggggtgggggtggggagagctgtccaacctcctccaagttgcctcagcccagacagtgtttgcagggggtgcgcggtgcaggcctccatctggggctgcgggagacgcaccggctgcgggcccgggggcgtcgggaagcgggtccgcctgtccccgcggtcctcggggcatcgcagagggggccacggctccatgctgccgccgccgccgccccctcagcccacccggctgctcgcaaggctctcggacgacagtgctccgccccaggacggagccggatgcggggcggggctaggggcggggccacggcgtaggcgtgggcctgcagcacgtggga

SEQ ID NO: 48225 - DNA, 378 bp, Mus musculus
  source 1..378: mol_type = other DNA
accaagtcaatttgccaggttaatcgggtgtatattaaacgcctggaccgctaacagaggtgcgtacttgggtctgtgaacccaacaataggtggccccaggttgctgcaccaggtgtccccccagaggcatcctgggtgggtgtagtagggctgcaccaggccccacggctgtcgtcgacagacgaccccacccttgcccacggggtgatcatgggcaggccgggaggccggcagcagctggcgcgtggtcctccggcttggtaggtgcaggaggatctcgagactgaggccgctagccagcgccctcccacgtgctgcaggcccacgcctacgccgtggccccgcccctagccccgccccgcatccggctccgtcc

SEQ ID NO: 48226 - DNA, 347 bp, Mus musculus
  source 1..347: mol_type = other DNA
gcacatactgtattaacttaaacccccatgtaaaatgcgatttaacatctaccttttaagtagatatttgcgagctgacttgtctattgcaataagtgtttaatacaaccggccaagcctgggccacacagtcgcggccaggtctacagccggctgcccggctccgggcttgtttacagcgagggcagccatcctggatggagccgcgccacagctgcctacccagaagcctcggcgcatgccgccctcacgcatgcgcaggatgagaaattttttttttttaagtatggaacataaataaaattttatggtgaaaatgacattcctgtaacaatattttttctcta

SEQ ID NO: 48227 - DNA, 261 bp, Mus musculus
  source 1..261: mol_type = other DNA
aaaaaaacatatcaaatgccagctgaaatttatgctggttcacagagatctctgcggcagcgccagcaggtgctcgcctacgcaggctgaagtaggacttaaattctcttgtcactaaatcctttacggccctagagaaaaaatattgttacaggaatgtcattttcaccataaaattttatttatgttccatacttaaaaaaaaaaaatttctcatcctgcgcatgcgtgagggcggcatgcgccgaggcttctgggtag

SEQ ID NO: 48228 - DNA, 344 bp, Mus musculus
  source 1..344: mol_type = other DNA
gatagagacacttcacagtatctgtgttctgaaaataaaagatttttaaatagatttatgaaaaagttcctagaacagtctttaaaacagtaaatattatctctttaccaaactttaatattataaaatcttgttattattcacgttagtggcaaaactttactatattgttgaaaattcattactagacgagtcagtttgtatcatctctgacagtcaggaagggaggaaatgcagtgaagatcgtcctcactcccgcccgtgggcgtgcttgagatcaaccctcccactcggccggagtagccgtccagcttgctcgcgggggcaagggttgcctccaccgg

SEQ ID NO: 48229 - DNA, 491 bp, Mus musculus
  source 1..491: mol_type = other DNA
tgtagtttacaacatcagatgtaaatcagaatagtatttttttactcataaggaatttttaagtcttaaattgcttaacctgtaaattacagcagatgtcaactccaattgtcctcttttatcttaattaacatcttaaaggcgacaaaaacaggctcatagactatatgctaatcgtacgcaggcccttcgtgaatttctcgcgaaaagaatattctaaatgggaggccaccttataaattacagtaatttcaatatatagtttagctgatagaaatctacttcattctttttaacaaaaagcggctttttcgggaaaaaacaggtaggttgtccgatctagggggtacctgggtcccccaaacccgcgtcaacacagccaagccgcgctgtttacgcgcgctgctcgctgattggaccagctgcgcccaccgcagccacggcagctgacggacaaaagctgcgccgcggctcggggaaacctagttcac

SEQ ID NO: 48230 - DNA, 435 bp, Mus musculus
  source 1..435: mol_type = other DNA
atttatgaaaaagttcctagaacagtctttaaaacagtaaatattatctctttaccaaactttaatattataaaatcttgttattattcacgttagtggcaaaactttactatattgttgaaaattcattactagacgagtcagtttgtatcatctctgacagtcaggaagggaggaaatgcagtgaagatcgtcctcactcccgcccgtgggcgtgcttgagatcaaccctcccactcggccggagtagccgtccagcttgctcgcgggggcaagggttgcctccaccggctgccagggcgccatgtcgtccgaggcgttagaagagacgcgacgaccgagtgaactaggtttccccgagccgcggcgcagcttttgtccgtcagctgccgtggctgcggtgggcgcagctggtccaatcagcgagcagcgcgc

SEQ ID NO: 48231 - DNA, 283 bp, Mus musculus
  source 1..283: mol_type = other DNA
cattgtctaacagccgaggcacatctgcagactgacgtcagtttgttctgcctctgaggaaatgccaaaattttcttctgctgcaattgaagttggcttgggggatgctctgcacatgttatttgcatagcaaaggcactaagctgttttaaaactccagttagcgagactatagggttttattctggctgcaatctctattgtttgaaatttactttttatcagaatttgaagatgaaaacgtaaaaaaaaaaacccaacaacttgtgctttgcttatcttc

SEQ ID NO: 48232 - DNA, 508 bp, Mus musculus
  source 1..508: mol_type = other DNA
agctttttagtaagccagctttgtacatagtgtgtgacccacagccctcatagtctgatagccatttgacagtgattctgtgtcaccctcctatgctggatggggaaactacaaattatatatgtagcattgtaaccaggtaaactaaaaatatagctattaaaattgcctgcatcttaaactaaaaactgtagaatatgtatgattttagcagtacttaaaggaaagctctactgcttttttttttttttaataatgaatgaatgagataacattcttcaaatacttgccagagtttacattaatccttaaaatacttgcaagtaaggaaaaggaagcagtaagttttctaaaacttacaacaacttccccattcccactttacctcctgcagcagaagggctattcttatccctattgcacctgaaagaggttaggtctcttgcctcagggcaagggtttgaaaccccagctttcagacttcaaagcctgctgcttcacaaagcaa

SEQ ID NO: 48233 - DNA, 327 bp, Mus musculus
  source 1..327: mol_type = other DNA
agatctaattcagaaagcactgtgctacaggctggaagtctgctcacatttcgaattttattttgaaatcgtgtgaaagttccaagaatgacagagatgatctttccctatcgtaagccgaccaaatctaaatttttaggccttgccatagggacccggccactacaacttcaccgggcaggggaaggcccgataccgcggagcacacgcggtcggaaccatttcggcccgcttcgggacaatcgcctgacaacctcgctacaaattctctaaagttgtagaggtcctatagtctttcctgaaggacagggaagtcccccctcccgg

SEQ ID NO: 48234 - DNA, 345 bp, Mus musculus
  source 1..345: mol_type = other DNA
gtgtgtgtgtgtgtgtgtgtgtctataatacagacacacatataaaggtagaataccaacctttgtatcatcagcgtgagtgtacaatcttgagataagtcttgaactctttcaaaaatatgctgagacacgtcacccgtgtccaggaggtagcgaatggcgggtctccggcgaggcccacctgttactcccggaccggagcaccgctaaccccgggaggggggacttccctgtccttcaggaaagactataggacctctacaactttagagaatttgtagcgaggttgtcaggcgattgtcccgaagcgggccgaaatggttccgaccgcgtgtgctccgcggt

SEQ ID NO: 48235 - DNA, 239 bp, Mus musculus
  source 1..239: mol_type = other DNA
gctgtgttggctgggaaatatttataagactagaaaaatatccagcaaatgtaaatgagctaatgccctggaaattctgcaggcactagcttccagttttcaaatggtttctgcacttcagaagtgaccgaaagtcttccccttgtatgtttttttaaaacacccacagttaatttttctaagagaatgttgttagtcatttgccatgtcactgggcaaacaaagtgccatgacacttt

SEQ ID NO: 48236 - DNA, 330 bp, Mus musculus
  source 1..330: mol_type = other DNA
tccatttaatccaagttcaattgagatcgcctggatgaattccatcaggaatgtaactcaatagattagttttttcacttgctctgttctacaaaacaagcaagctagattaatgcatactcaggatgcctcagacagaaaggaatcaataatttcgatgttaaaacatgtattttaacaggtgtcctatttttctgaaaaaaaaaaaaaaaaataaccgttggggtctcaacggctgtcaggcaacaagacagccacttcttgccttaggcacagtcaggaaaccatggaccaggccctgcaagtgctgcgcatgctctggctgccatg

SEQ ID NO: 48237 - DNA, 311 bp, Mus musculus
  source 1..311: mol_type = other DNA
aattatgcaattatatctaaatttcaaaaagaaaataatctagactttcttctagttcccaattgagttggtttcccttagcactcctctccgggagcaactgttcaggggaatcggagttgaatgaatggccttacactcccaccttccaaggagggaaaaacgcaggtttgtgttgcagagcctgtagagcctgccacacaaccactgtccttggactctctcaagagagcttccttttctaataatagagcagatgaagtaatattgcaattgatgttcccgggaatgccacgaccaacgtcagccgg

SEQ ID NO: 48238 - DNA, 393 bp, Mus musculus
  source 1..393: mol_type = other DNA
ctttgcacaagatagtttgcttaagccatgtgtcccacacataaattgttcaaaacttttcaaaggactacccactttgttaataagttagacttttaacataagttattggccagaagccatctcatttttataaacagattgctagcagataacactagataagtataaacacagctagaactttagttcaaacataattaataattaactgtggaaatagtatggactagtgtatttctcaatccgattttctttttcttcagtagcagatcaaaaaactgatcaaatacaccctcattcctaagggttcattagcctttgtacgtataaaaactccagcctggaaaggtgaagtagacatgaattcctacccctagcaatggaacttaa

SEQ ID NO: 48239 - DNA, 317 bp, Mus musculus
  source 1..317: mol_type = other DNA
tttaatatccatgaaattaactttattgtgtccttcacattagaagcccaggctgccctgtgggtcataggtgggttccacatgtgagcagttgtttcacttctcaaaggagaaatcattgagattcaagtgaaagcaagatatatatatatatattttttggggggggctccgaacctaaagtttatagactgactagtcgtggttccaccagaatgtagcctagagcctgcactccagaggctctggggggaaactttcccacggccccgcggggccgaacgagcggggcctgcgcggccggcgggtctacgcgg

SEQ ID NO: 48240 - DNA, 322 bp, Mus musculus
  source 1..322: mol_type = other DNA
cttgttaacaatatacaggcaaacaatttctttccatgaatttatttgcttcaaatctatgggaaatgttaatatcattgatatgagagtgtgtgtttggaatacacacttaagtgaatttttaatgttttctttgagtgataggttaatatggtaaatgaacctgtttcttaagaagctgagacccacattctctacctgataatgtagagggtagagtttagaaggttggatagccacactgtgaacctgttaataggtaagaggcggggtttagtatgttaaaacattgatctgactagcagatcagagtagatatatg

SEQ ID NO: 48241 - DNA, 256 bp, Mus musculus
  source 1..256: mol_type = other DNA
atcctctgggtggttggcaacattaggaatgaaagacacattagcttatttttgaaatgcctttggttaactcaatgactgggcggatttctgagttcgaggtcagcctgggctacaaagtgagttccaggacagccagggctatacagagaaacccctatcgatttctccggacctacggttagttacaggggcccctaagccggcgccttgctccgggtaccactgccgcgcgccttcgggttcgaactcgagt

SEQ ID NO: 48242 - DNA, 651 bp, Mus musculus
  source 1..651: mol_type = other DNA
aactttttatccagggataaactctgttaataatttggtaagggttaatttcctcaattaattgatagtaatcagtattttctaaacaaaaaatatttttaaaaattcaaaatattagaatattgtgttaatattttgttcatcctaaattatttactaactttatgttcttttaaaaatcaataagtcttcagtaagtatttgaaaataaatacatgcctttaattacagactcaggaggcagagtcaggcaggtctcttatgagttcaaggcaaacctggcttttatccatgattacataatgagactctgtctcaaatgtttttataaagatcactttattttatatactcctagagaaactgtctgtgagctcagattgtgagaacctagcttaacaaattctgaccttcacgcacgcgtgcaggcatgcacgcacacacaaacacagagacaatatgtgttgttgataactagagacttcttatttagatttttgaatacctcaagttttcagacatttggctttaaaatcctctttcaagttataggaattacttaggtgtatatattaggaaaactgagtgcgttctgaaaaaaaaaatactttcctgagacttcctttcaacaatacttttgaagcacagata

SEQ ID NO: 48243 - DNA, 278 bp, Mus musculus
  source 1..278: mol_type = other DNA
tacagccaggaacctaggctacggaacaggttcttagcagtagcctttgatgaatcttttattctggtaatcaatcccatttacagggttttgaaattgttatagcctttatctttcaataaataaacattgagagcagcatattatctaacgcctgagcggcgcggtttcctctgggaaatccgctaacccgctggagccagccttgcctccggaggagcccagcagccactgggctccggcctgccgctgactgggtgctcgggcgcctagtcgtg

SEQ ID NO: 48244 - DNA, 782 bp, Mus musculus
  source 1..782: mol_type = other DNA
agttagagactagggcaagtaagccttgagctctactgagcaggacaggcccgctggtagcccaggagggcttcgctttgaattgcaatgagctgggaagtaattcgttcctactcagggtggacgacaccctttcgaccctccataattgatgggaagcctgaaccaggcatgccccggccttaataaggttcctcaaggaccggctgcccgcactgagccagttctatcggtcacccgttcctgcggcagcgtgcacgcggagcgggagctctggaaggacgtcgcgagtcgtttcccgcgcctcgtaggccgccgcgtgcggaatcaaacccggcgcgggttcgtacccggccgggccgcgcgcgctcccgttcccgttcccgttcccgcggacggctcagccccgcccgccgccaggccgcagccgagctgggcggggccgcctgcagcccgagcgcgcgggcgcacggcaggaagccgcgggccgccgggtgtgcgcaggcgcgcggcgccccgcctctccagcgtccgtaggggcgggcggcgcgagccctcccactcttcccccgcgccgcctcacggctgcggccctcgcttcacccggacgcccggcgtgcgcgcccgcccgcccgcccgcccgtccgcccgcccgtccgcccgtccgcccgcaggcccggggcttcagcccgctcgtccgccgccgctctcgccgcggccccgctcgcgtccacgctgcctcccggaccggcgcggacgcgggccaccgctgcccctcccgc

SEQ ID NO: 48245 - DNA, 440 bp, Mus musculus
  source 1..440: mol_type = other DNA
tatgtgagaacctgcacatatatgaatgcacacaaacacataggaaactaattctctaacagagtaacagtagaaatctttatctttttcaatactttcattattatatcaagcctgaaaggtgacatcgcatgctttttaaaatatgttcaaatttctttgtcttctaaaacagaaataaatgaaagaaactttgatatctggacatacaatttaaagtatctctggatactcactctgtagaccaggctggcctgtttccttgaccagttaacatagacagaagagtcttgaatcatcctgtgggaacagcccaggaatcagactccagagatgcagatctgagtttattgcacaatgcataaacttatatacagtgtttgtgtcactgtgcatgaggtaactcagaaggaactgggccgttaggacttccggggtaa

SEQ ID NO: 48246 - DNA, 470 bp, Mus musculus
  source 1..470: mol_type = other DNA
ttaaataatccactgccatatttccgtctgtcagacaaaggcctttccacacgaatagaagacttactcttttaaatggaacgttcattttccttactaatgctacatcagcaatgtatccttcccaagcattaccgtgatgaataagaaaggtagtgctaattgtgatcattagtcaaaatgttttccaattgcttcactaattagctattatttttcaataagggatctatgtggatacctgagccacagaaactccagacttgaactctacaggggatcatgtccagtctcatttttactaaaatggttgcaaaatgattttttactcatcaaacattgcattttaataaaattcttacaaattctcaaacatatttaaatgatttttcaaatagtgagcagcaccttagggagcggagagaagacagacactttgttttgactcaaatgttaggaaatgtcacatc

SEQ ID NO: 48247 - DNA, 606 bp, Mus musculus
  source 1..606: mol_type = other DNA
agggcggggcggggcagggcggcgcggccggctcgggacgcgcgtccagcggctgcggggcagcatccgagcgctgcgcgtgtccgggcgctcgatcgactcggctccctggcgtgtcaccgggccggagcgaacccggggctcagggctgggtgcgctgcagttacgcggggcagccgcgccccttccccacctgggtaaacagtggctgagctcagccctcctccctttcccccctgcgccgcagccacggccgagggtgggggaagtaaggaaagcaggcggcctgggccgcgcctcccccgccttcctctcggccgcctcctccgcccagaggcttttccccgcggggccggctgactggggggtggggcatcgagcagtcggcccgccctcccccctccccgccccgcggcgacccacgaggagcgtccacgctcggcggaccgcggaaaccccgcctgagccccgcctcccgccaacccgggtgcccccgccacccccgtgtcctcggcgatgtcgtcacggcctaggccacacctcccgtgcccctacaaggagcggcgggccctagatggcagcgtggcgtcgccacggcgtgtgcgt

SEQ ID NO: 48248 - DNA, 393 bp, Mus musculus
  source 1..393: mol_type = other DNA
aatggttactgttgttatactctattgctttatttggcacatgtgaagtaagttaggctcttaaatgaaaaacccctggacacatcccagccgggctgctgcttggccaaatctttaaatatttaactattgttcaactctgccagtccttccacggcctcgagaaggctctaaggagactgcggggtccccctcgtgtctagctgcggctctctgggctgagagtcccctggactcgccggcgtcccacgcaggacgcgaggccacgatgccccacctgcagcgcacacgaagcggcgcgcggcagcatccccgaccgcggacacgaagcctccgcgcctcgcctcgcctcgccgcgccgccccccgccccgccccgccccgccttcgggcg

SEQ ID NO: 48249 - DNA, 236 bp, Mus musculus
  source 1..236: mol_type = other DNA
tttttatgttagtgaaagtcattattattcagacaaaactttagtactcaaataatttacgtagaatacttggcttctacgaattagaactcttattatactattatagaaagatgtttttactcacaatcttatctaggcctagagtgttttcagctggctaactcacttactcagctagctgttctagctcaaactcctcgccaagttgactgattcaataaactaactttacc

SEQ ID NO: 48250 - DNA, 347 bp, Mus musculus
  source 1..347: mol_type = other DNA
caaaacaataatcttcactgaagcgtgaatatatatatataatttcagtgtaatttaactaaatactacaagccactatataaatagcacgtggttggtctgtacacctgttactcggtttacaaacacagtcagcatgcaggttcgtctgtgcctcagagataagaggatgttcacagtcctgccattggagagctacacagcaagctacaattactgtgacccggaagaggaaaagacacgcgcgtgactcacctccgtgtggactgcgctctacgcaagcgaagaggctgtcgagcaggcctggggctctcattggccaatcagcgatgtaaacgccgggcagt

SEQ ID NO: 48251 - DNA, 335 bp, Mus musculus
  source 1..335: mol_type = other DNA
tttctatactggagcaatagagaaaaggaacgcccccccccccccccggggggacgggtctaggtgtagccctgccgacctcgaactcagagatctatcaagcctggcttaaatcagttcttgaaaacagttttagtttctgaagcaaggcactggcgcaaggcctttcccgatgctcgccaagtcctgggacccgggacagggaccagggcacccgaggcccggcccccaagtacggcggccgccacccgcccgggacgcgcccagctcatgcctgcgccgaactcaaggtctgagactgcccggcgtttacatcgctgattggccaatgagag

SEQ ID NO: 48252 - DNA, 481 bp, Mus musculus
  source 1..481: mol_type = other DNA
gtcaagagacttcttaccctgattctaggctaggaactttaggttttgctatagaagcagatacctctagactatcgttacagtgtttattatgatcataactaaacacaggactagaagactctgttccttgttctgatcaccataaaaaaaagttgcatacacctatttttcaacaattcattcttaataattaaaagggatcgagctgccaaacatgcggatgaatccagatgttggtattcactccaccagtagagcggacgggaaccggccccctactgcaccctgggttgctcggggccaggctctacccgcggcgagggcggcagcgggagaggctggcatgacaccccacccctcggcgtcacctggcggcgacgggcaggcgggccggggggcggtcccgggtgacgcgcggggctgggagagccggcaggtgccaccctaccgcctccgcccctcgcagcctggtccgcag

SEQ ID NO: 48253 - DNA, 317 bp, Mus musculus
  source 1..317: mol_type = other DNA
tgagggtctgaattaatcactagctattgaattaatcactgtctaatatatagtataaagtgaagtcatttgtctctttcaacagttgcaagttggaccagcaattcatgattactgtactttactcactgggctccgaggctgcagagctggtccgagtggactcgcggcagggacagtcccactgtgtgccggcggtacgcggcgcgatcagtcatgtccgcaagcatccgagcgcccattggcgaggagaaagtgttctttcctcctaggtgctgggggcgccccgaagctccgggcttgtgattcaaactgcg

SEQ ID NO: 48254 - DNA, 361 bp, Mus musculus
  source 1..361: mol_type = other DNA
ataatatcacctcccatgaaagttgaggtaggacttgacctgaagtccaggctgcagggtactgcatgccattcaagaacatacagagttaaatgtactaatatttttatatggtacagaaaagtacccaccagttagttttattgaattcaacacttgtgtcacagaaatccattgactaagttaattccctggagagtgttcagcattgggattccccaagaatctaaataaatgagccttctgctttcagcttaatgaagaggtaaaagcccggacctgtgtcttactgcaactgtaaaatgtgaaggttacctccttcacattcgaaaagatgttcaatggatatttaacacatcat

SEQ ID NO: 48255 - DNA, 500 bp, Mus musculus
  source 1..500: mol_type = other DNA
aatttagaaatcctataggatcattattaggatttatgaaagcatcagtttgccttcatagaagtattacagaagagtacatcttcattgatctgtagaaaacctacgggtgtagccaaaggaaatcaattcagcatgctcaagtgccatctacatgcctatattgtggaaatattttcaaaaagtacatgaaggaaatgtttatatataaaaacaatggtgtatttctagccatgcagtcctgttctggttattagcaacataagttaattggatttgattatagcatactatatatatatatatatatatatatatatatatagatatagatatagatagatagatagagatatagatatgtagctatcacttggaacttgtgtgtataatgatttattagtaagaaattgaaagtttttttccaaaagatattagtctaatgcacaatatacttttagtctccaagtaccttgaatatattttcatattctatagta

SEQ ID NO: 48256 - DNA, 492 bp, Mus musculus
  source 1..492: mol_type = other DNA
ctccctgtggccacaggcatggcttttacttcactctggtgacccactaacttccacactgaccttgtaccacaagctttatagttcaaatgaactattctcagtgaagtttatgtcaaggaaatgtgtgtgtaaaataactacattcatttaattaaaaaataaatttttttctgaagtgggtgtggcaatgctcattagaaatcccagcactaacaggctcaaggtgagaatattacaggttcaacatcagcctggtatactctatctttcaagataagtgaaatgaaatgattgaaatataaacactgagatttaagacatccgttcttcaatttatgggtgctgggaaatattgcaaagagtcccaagaagaatgccctagtctagtggagctgacgttaccctagcaacagcacccacagggtaacattcccctgtaatccggcctatccaaggcttacacatgaatcacttgatgctcacctacaa

SEQ ID NO: 48257 - DNA, 711 bp, Mus musculus
  source 1..711: mol_type = other DNA
cctaagtcaccttgcaacccaggacagcagggcctggcaggcggcgctgggatagagggcccgggactccgctgtgcaccccagggtcccccgcggggcaggtgcgcgattgcacgcgcctgcgcgctgggggccaaccgagccccgcctgagccccgcggggaccccaggcggcgggcgctccacgccgggttttccgctgctctggtgcaagacagctccacagcagcgctgccacacacaaacacacagatacacgcgtgcgtggctgcgcctccctccgggctgcgcttcagagcagcggcgccggctgccttggggcgatgccgcggcgaggtggcgggtcggaaccctttcgtaaggagtcgcgggggagccagacagcgccgcggggccgcgaggggcgcaaggggggaaagccagcatggagcggcgctgcgcccgcccgcccgcggacttgagcgacaaaacaggaaacggcggccgcagctgattcattcgcttcgcgcgtggggctcgcggcaggcggcggcgtggagcccggggctgcgggacgcggacgtcccggagccgctcgccggtctgcggggcgagcccctgctcccaccccctccccccgagccggccaccaggggcagcatcccaacgcagggaagcccgtgctcgcgcgctggaggctgacccgcgacgtcaagctggagcatctcagcc

SEQ ID NO: 48258 - DNA, 640 bp, Mus musculus
  source 1..640: mol_type = other DNA
cacgcgtgcgtggctgcgcctccctccgggctgcgcttcagagcagcggcgccggctgccttggggcgatgccgcggcgaggtggcgggtcggaaccctttcgtaaggagtcgcgggggagccagacagcgccgcggggccgcgaggggcgcaaggggggaaagccagcatggagcggcgctgcgcccgcccgcccgcggacttgagcgacaaaacaggaaacggcggccgcagctgattcattcgcttcgcgcgtggggctcgcggcaggcggcggcgtggagcccggggctgcgggacgcggacgtcccggagccgctcgccggtctgcggggcgagcccctgctcccaccccctccccccgagccggccaccaggggcagcatcccaacgcagggaagcccgtgctcgcgcgctggaggctgacccgcgacgtcaagctggagcatctcagccagcctgagcccggcctcagccccccgcgcgccgccgggccctgcaatatgaaggagcagccctcatgtgcgggcaccgggcatccgagcatggcggggtactggccagcgagaccctggaggagctggactggtgtctggaccagctagagaccctgcagacgcgctggggaatcaccgagaaa

SEQ ID NO: 48259 - DNA, 190 bp, Mus musculus
  source 1..190: mol_type = other DNA
aggggaggggccgcttggcacgggcgcccctggcacgctgtcactagaagacttctgggtttccctctgaaaagactgtaaaactactccactctgggtaagtataaactttctcagtctggcttccaaagtttccaccgcccagtgcagctggaggggctagccattctcttaagatttcccagggtgc

SEQ ID NO: 48260 - DNA, 480 bp, Mus musculus
  source 1..480: mol_type = other DNA
ttctatgtacttgaaactaagattaatggtggcatttctcctctaagaatttcttgggtattaaggaatgaactaactactcttacttaacaaaataaagcattttttttctttcttgctggattcagatttctgccactgcctaataaaagatacttgacaagtttacctcatgaaaatcagtcaaatagtataccagagtagtatgcctcaggacgttctttgggaaacctttatttaatgaatgtgatggtgatgatggtatcaataacaattacaacaacataatcttcatatttaaatatggattgttccagaaacaaaaatactcaaggcctatgttattatgagttttaaaacctctttgaagaaaacaaactacatgattgattctaaagtgaacatggtaaaattgttcaaaaaagaaaaatcatctaggtttgacatattaatgaaatatacactattctgcagtatcct

SEQ ID NO: 48261 - DNA, 503 bp, Mus musculus
  source 1..503: mol_type = other DNA
gcaatctgaatcacctagttgaacaaaaagttatagatgacttcaattgtagaattataattggcaacgttaatcgtttttctgaaaaaatccacaggatggcgatcttgcttagacttgttgctccaaggttaagagcctggcctctgacaggggtcacttatcaggggatctgcggctctgcctggtgcccggttccgcaaggccggccactgagcctcccgcctgcggtggcggcggaggtccccaagcgctccgggtctccgggtgccaccccgcggggctcgctggatgacagggtgtggggctgcacacagtcaggagggcggtgccaaccctgcggctcccccgggctgctaccccgggggccacttggcgtaccgccgccttcaggccaggtcgaagcccagccaccccgcacctatccacagcgcggactccggggccggtgggtggagcgctcgccgtgacgtcacgaggccccgccccagccagccggcgcc

SEQ ID NO: 48262 - DNA, 614 bp, Mus musculus
  source 1..614: mol_type = other DNA
ggacaacgctgatgaaataatccatctcctttggagttattagaaataggaattactagcggcagcccttcgcactccgggggaacggtggctgcagccgagcctcgcgcgcctccctaacccggcttccgcgtgttaacgtcccgcacgctccgcgtggcgcgcgactgcggcgcccaatcactcaggcagggccggctccgcccacggagcgctcagggcccgcgccgagcggcctgcgagccacggcgggcttcaggcggagccgaacgaacggcgcccgccgccggccgttccgggttgcgcggcgctgccgggcagactcagaagcgccgcacgccctgcgagcccgcctgcccgtccggaccgcctgcgcttccaccccaccgttcccgagctcggggagggcccgcggctgcacagaggcgctcctcagggtcagcagcagggggtaatccccggctccagctgctcctgacgtcacgcgccgagactcaggcccagcctccggccccttcctctcccccaggcgccgacgtagagggcggagcttctgtggtggaggccctcctcctccttccacgatctcgcgagacttggcccagaacattgcg

SEQ ID NO: 48263 - DNA, 444 bp, Mus musculus
  source 1..444: mol_type = other DNA
tgccccagtacagggtttgaaatgtaaatgaagaaaatatctaataaaaattttttaaaaaagaaaaaatctaataaaaaaatttttgaaaaacaaataaatcactcaaaaacattggcattatgcctttgtgcagtcaacatgggcttatgcatgataataaatttggttattagaaaatataaagaatataatgtggctattagatagtttgtcagaaaaaaatgtatagtggtttacatttttcatggcacaaagtatattctgattattttctttcattaaaacagcttctatcgtgatgacatcttctaatagagtgcgcgcttaagaggagcagcagtgtgtgggttgcctaattacagcaccctgagatacttggtagcctctctttatgaaagaggcctactaatgatttctgtaattatcatcattattagcacc

SEQ ID NO: 48264 - DNA, 664 bp, Mus musculus
  source 1..664: mol_type = other DNA
taaatctccaacctttccagagtgaacctttggctatatgtagagaaagtgaataccgtaactttttttttttaaataatcgtttgtgggacaacgctgatgaaataatccatctcctttggagttattagaaataggaattactagcggcagcccttcgcactccgggggaacggtggctgcagccgagcctcgcgcgcctccctaacccggcttccgcgtgttaacgtcccgcacgctccgcgtggcgcgcgactgcggcgcccaatcactcaggcagggccggctccgcccacggagcgctcagggcccgcgccgagcggcctgcgagccacggcgggcttcaggcggagccgaacgaacggcgcccgccgccggccgttccgggttgcgcggcgctgccgggcagactcagaagcgccgcacgccctgcgagcccgcctgcccgtccggaccgcctgcgcttccaccccaccgttcccgagctcggggagggcccgcggctgcacagaggcgctcctcagggtcagcagcagggggtaatccccggctccagctgctcctgacgtcacgcgccgagactcaggcccagcctccggccccttcctctcccccaggcgccgacgtagagggcggagcttctgtggtggaggccctcctcctc

SEQ ID NO: 48265 - DNA, 467 bp, Mus musculus
  source 1..467: mol_type = other DNA
ggatctgttttcatacacaggattatttcttgaagcctatgcagaaacagatacatctgctaagtctctctctcagaccacatttattgtatgtataatctcaaacaatgttgtttttgctttttaaaaggtttatgactatttgtgattaataactcctagaactggtctttaaaaaaaaagaaagtccgtcgacacccaccggccggtccccgcgctcgcccgcagttcagctggaactttactccagccggggcagagcgccgtgggcgcgcggggcgggcgcgtgcaggagcggcggccgcgggagcgccggacggcgtgggtgtgcgagcgggccgggggcgtcgcgggccggcctgccctataaggggccgagccgcctctgcctccgggcgggtgcctggcgggccgcggcggcggcagcggcggcggcggctgcgattggctcaggcgccccatccggg

SEQ ID NO: 48266 - DNA, 262 bp, Mus musculus
  source 1..262: mol_type = other DNA
cttgatgctcttgtagagcatcagctgtaaccagctccaggggagccggtgccctcttctgggagaacctgcacacgtgcacattagctgtttgtatctaaacatagatcttgaaaaatttggttttgctgggattttgatatgctactgaagatatacacacacacacacacatatatatattccagtagttgtctagtatcatataagtatatatatattccagtagttgtctagtatcattttagatttttcataagac

SEQ ID NO: 48267 - DNA, 539 bp, Mus musculus
  source 1..539: mol_type = other DNA
ttccgtcgaaggggggaaatcccatatacgtatactgcttttctatctccagcacattttctagactctgagggaggtgggggacccgggaaccggcctgtcacctgactgccaggaagagggaccatgatccagcgcttcctggcggggctggcagagtacccgggttggtccctctgcgtagttcctaagagaaggcttcgcgtccgcccgtctgcggcaggcgacagtcccggggcgccacctgcgcttcgggcgcgggccgggccggtgcgcgcgggggcccccccagcaaccgctactgctcaagggtgggcgagctcccgccgagccgctgccccgcccggtctcgcactacctggcggcggcctggttgcagcgcacaacgcccggcgcccggttccccgcacctgcgccgcgcgcccgcccgccgctccgcgctcccgggccccggccgggaggcgcggccccgctcgcgcccgcgcccgcgccctcggcagcagcgcgcgcccgcccacccgcccgccgctccgcccgcc

SEQ ID NO: 48268 - DNA, 519 bp, Mus musculus
  source 1..519: mol_type = other DNA
gtagttcagtagttgaccacttatctagtatataatgtttgggtttaatctctgtactacaaaaaaaaagtattaatagtctaaaatcaaatatctgttagttaaaaagaaaaggctcaccacccaggctcttggaggacagataggagaatcctggcttcctgccagccaacctaggcacccggacaaggcctgggtgtcagggagagactctctctggtaatgtcttcattttgtatttccccctcaggtttttaaccctagaggatgaattttctcgaagcagtatggctggtgacttgtcaggcttcatgcagaatgcagtaaggcacagccttgtgactgcaggctgtttgttgaaccttgaccttcaacccaccctcaaagtctctctgacaggaggaggtcactgcagggagcctgaacctcccccctaactactcagcagggcacgtggactgcagccagcacgcagtctgcgctggcggctttgcacatgctccgtcttgtgaatctcac

SEQ ID NO: 48269 - DNA, 351 bp, Mus musculus
  source 1..351: mol_type = other DNA
agacataaggcaaaattttatatatatatatatatatgtgtgtgtgtgtgtgtgtgtgtacatatatatatgaaatgcattcttactcgatttatatggaaagttggcatgcagtgactctgaacagacactatgtgtagataacacatcagcgtaattcagaaagctcaaaagctggaatcccaagtttgttttattgggtagctataaaaatttaacaagaaaattaagaatgtgctgattttaacactcagcttctggtctttcaggctgaaagactgaatttgattccatactcagccttattcatccctgggtaaaggaaaagaagggtggaagaatctttttgcc

SEQ ID NO: 48270 - DNA, 461 bp, Mus musculus
  source 1..461: mol_type = other DNA
tttgtctcctttagagcaaaacaaaaggaaaatcaatttccatcagtggagttacactgattatatattatatcaattgcactcgcaaattggagtgtttctttacagttacacaatgaaataggtttttccttggtattaggtccccagggagttcccttgcctccagagtcccaagggcctcctagcagtcgccggaggctcgcaggccctctggggaagacagccccgcgggaggcacctgggttgctgtccgcgacccattgctcagcctccggaatcccggacgccgggagccgcgttacgggaatcgcagaggcctgcagtcccgccccttcgtctccggcgacccggagccaatggccgcgcgctccgagactgaccagagccaatgagctcgcggtctctggctccggggggcggggccgtggggggcggagctaggagagcccgggtcagcg

SEQ ID NO: 48271 - DNA, 239 bp, Mus musculus
  source 1..239: mol_type = other DNA
ttcagaagtttaaattcttcatgttttaatactagatatttaaatttctttgaggctattacaaataggatagttttagttttctaaaagttttgaggatctctaatacataatattatgccatctgtaaatacggatagtttgatatcttattacaaagcaccagggataggtaacactcctgtcaatgtaggctgtcaaaggcctttgaaggcccctgaggggtctcctaattagtg

SEQ ID NO: 48272 - DNA, 436 bp, Mus musculus
  source 1..436: mol_type = other DNA
tgaggtctcctttgagctcaacctccaccaagagagaccctcctgcagggctgcatgcagaagagagtctttgctgcctatggatcaagttgtagaactatcagcttcttctccagcggatgctatattttccatcatgatgataatggactgaacctctgaactccatttaaatgttttctctcttcacacccgcataaatttaaatatgaaatcaggataatagaagaccttccgctggttactaggaataaagactgaaagacatgagggacttgtgtcatgataatgtggaaaaaaacattttgtactagtgaggaatagataacttttccactctgtttttaggcaaaggcttaaaatgcctgaagggtttccaggaaattgtgataatatattgtgcttggcatgataaggaatccctgcaaggggttag

SEQ ID NO: 48273 - DNA, 523 bp, Mus musculus
  source 1..523: mol_type = other DNA
tctttaagttccagactgagatatctagaacttcaaataaaaacaagaacatgctttacatatatttgattgcctcaacttcaagatggagtctcatccttgccctttttatggagaggagaagcaagtagaggagtgaagtgcatttctcagatacaaagagagcacttgagacgttcagactcagaatggccaagcctggcactttggagagaaagcaattagatgttccacccctgtagaccaggctggcctccacccagatttttatttttatttatttatatatctattttaacttttgaatgaacacacgtgcgtggcagccccggggatcagctcactcccacaggcctcacaggccatggagccaagaggcctccctgcctcggcctcggcctcggcctcaacaaaggtggagaacgcgcaggccgtccgtccatggggcgggaagtcgcgcgccgcggccgctgattggctggcgggcccggtcgcccgccaatgacgcagtcggcgtcccggc

SEQ ID NO: 48274 - DNA, 296 bp, Mus musculus
  source 1..296: mol_type = other DNA
atgtcacaacttttcggtaaaaatataaaacatgaagtttccaaagactttacaaaatgataaatgtaaaattcttggaattcattactatttgatattgcttttgaatgttagctttctttatagagcaagacaccaacatacattgactttagggatccaagcacctaaagagatctcttctttttctctcttcctaggtagttcgggaggagaagaggtcagatgttcgagcacctgctcagcgaccccgcctccggagctggagggcggggttctgctgctgcagagccctc

SEQ ID NO: 48275 - DNA, 281 bp, Mus musculus
  source 1..281: mol_type = other DNA
aactctttataaagcaattgtcacatcttaattagaatagacagcggggatcattgagatcctctttttacacatttggaaactgagatttgaatcattgatatttcttaagacatagttaactctattgttaagctattggcaagaaggattcttgctagaatgaagcctcctttaaaggaagctggccccgccccgttaaccagcttccagattcggggcgggctccgcaagtcggcggggcggggccgatggcgctgacctgggtttcgtccccgcgc

SEQ ID NO: 48276 - DNA, 422 bp, Mus musculus
  source 1..422: mol_type = other DNA
ctattggcaagaaggattcttgctagaatgaagcctcctttaaaggaagctggccccgccccgttaaccagcttccagattcggggcgggctccgcaagtcggcggggcggggccgatggcgctgacctgggtttcgtccccgcgcgctgcagccggcgagaccgcgcactggccggagcggcgcgcctggggcgggaggagcggtgttcctccagtcctcgagagggcacagggggcgattggccgcgacgagccagcactgagagagcaggcgcctgaggcgacagatcggcggccactggcccagtaccgggtccgtgaagggagtccgggactgccctcggtggcagggcggcccaccgtcagtctaagaggctcgcagtcgcttggggcggccgccatcccgagggcggggctctgg

SEQ ID NO: 48277 - DNA, 416 bp, Mus musculus
  source 1..416: mol_type = other DNA
agatctgacagaacatggagctgagcggctgttctgacagctcagaagccacgctgtaacagagttacttttgtaactttaatggccaaaggcccttagacctcaggtgtggaagatgtgggcttaccttgcttcactcggggctcccgggcgccggtggggacggcgggcgccggcctggccaccggcttttctggctctggaagcagacacggcggcccgcatcgccgcagctcccggcgccctgcaggagagcgctgcggcacagcagaagcccgagcatccgggctccgcggctggggctccggctcaattggcccgtgactccgcctctcggctcccgggagcgagcggcatggctgctgtcgtgcgccagaactgccggactgctctcccattcggcgtcactgtagggt

SEQ ID NO: 48278 - DNA, 379 bp, Mus musculus
  source 1..379: mol_type = other DNA
gaatctgactttattattattattattattattattattattattattattattaatttattttgggaaaactacaacttggagattaaatctgggtgacaagccccgcctcgcaagcaaagccgtacctggcctgctaagctggggttacagccaaagcatggcctaagggcgctgcggccggtcgtgtttcctttaccggcatcaaaaacaagaagaacagctcagaggttttccttacccaccctacagtgacgccgaatgggagagcagtccggcagttctggcgcacgacagcagccatgccgctcgctcccgggagccgagaggcggagtcacgggccaattgagccggagccccagccgcggagcccggatg

SEQ ID NO: 48279 - DNA, 434 bp, Mus musculus
  source 1..434: mol_type = other DNA
gagaaggtgtcacattctacagaaatgccacctgtgacattaaggccctaaacggctgcagccttgggaagtaacttcctacaaactgtctgacagtccttccctgggccagcggaatctgatcttggtccggagctcagaggcggacccacctggttccccggagcagcctttccctttttccgggggcggctgaaccgctcagacggcccatggctcccctaggtggccagtgccgagctcaagcagctggcgccaggacccgggctgcggttgccacggtgacgacagacgcgaaggcgggtgagaggcgggagttgcaacgcctcctccccctgcaaccagcgcgggggccacgcgttgctcgcacgcgaggggtgtggctctgcctccgggaaagcgcggcccgtgggcggctcggggctcagccaagc

SEQ ID NO: 48280 - DNA, 474 bp, Mus musculus
  source 1..474: mol_type = other DNA
agtagactcagattctggaagatgcttcttcctgggagagatttaggggatttgcaaatagcgcaggttggcctatgagccagcacgcagctcaagctagattcaaactggcttcagttcagtactgtcacttttcttgatccttaaaaaaagatgtgcttaggcaccaccatttcaaaatccaaagtactgttcagatttaagggcagtttctgtaatctagaactttgtctttagagtgggaagaagaaaatcaaagaattgctaacttttctcatccccgcggtccgagggaccggccccctttcgcctggcgcggccaagatgccgcggcgccaaagggcgctcgcgggcccgggccccgcgctcacagctcccgggggaagccaggttgccacgcctccgcccgcgcgcagattgtcccgggctgaaggcgccacctctggcgctcaggcgcgagccgcccctcccgca

SEQ ID NO: 48281 - DNA, 418 bp, Mus musculus
  source 1..418: mol_type = other DNA
cgggggcgcgggtaggagggcgggacccgagcgagcaccccgacaccccagacttgacgtcatcgaggcgctggcctgtggcgggaccggttcccgctttgccgccccgcgggctttttaaaggttaccctggggactgcttagcccctgagggggagaagtggagtgtggggcttcttgcagaaggtacgacagcctagtttaaattttgaacggtgtgaaatttaagtttgctttagttcttatgttaatctatttccaaaggagaacatcatgcgggtgctcgccaacggcatgaaagcaaattaattcttgctatagaaggcatttgcaggaattatgggagaattaatacaaattaaaaacctttacagaatctgaagacttaagaaatggggcaggcagtgcattgctagct

SEQ ID NO: 48282 - DNA, 543 bp, Mus musculus
  source 1..543: mol_type = other DNA
aaatatatagctggccttttaaaatgcagtgactaatgtcacctatagagaaataacatttaaaagcctttacattgtgtctttaattcaattgaacttttgttaattcatttttactttgctaacatctttaacttaacattaaatttggaaaacccaagtataagaatacagagttcttagcagaggcaggtggatctcccggctccaggccagcctggtaaaacatcaaaaaccacatttaaagttcttaaaagtttttttttttaaaacatgggtatagcttggtaatataaattttgtttcttatagtttaggagacattaaacaaggtttctctataaatcctcttcagttacagtaaaggcacttactgccatgctatcccaggaattcgtggaaggagaaaactggctccctcagacagctctgcagcagtgtctttctgttagaaacactgtgaaaatccgaacttgccagactcgggtagcgttgggtcaggccagcagccacagctaccctgccactgtgagcggcaccagc

SEQ ID NO: 48283 - DNA, 417 bp, Mus musculus
  source 1..417: mol_type = other DNA
catatgtatacctgtgtgtatctgcactatctcaccagaacaatagctgctatggtttctaatagactggcatctggttgccttcactagatgacgtcagtattataaatattctctatattcatatagtacgtcaataaatacataaaacctttaagttctttgtggtcacacgtcatattaacgaacacagggatgctgagcttctggtaaaacgttttcgtagaagggggcgtcttaaggatctactaaaacgatagaattcttctatcaaaaaaaaaaaaaaagttaaagtgcagccacgttaacaattttttttttttgggtcctcctgctcttcagcagccgaagggtctgtaaccccttccggctctccttaagctcggcgggtttcaagtttcagccccgccttgcatt

SEQ ID NO: 48284 - DNA, 332 bp, Mus musculus
  source 1..332: mol_type = other DNA
tcctccagagacggaccatggaggatgtctgtttcaagaaagcaactgtccctaatgcacaaattatatcgtcttatctattcttataacccaagaaaataggtaaaaagaaatgtgctttgggaccaattttagagtgtgtgtgtgtatacatgtgtatgcatatgcacgaagagaccacactatcttttgagacagggtctctcactaaacctggaggttagatcttcctagtcctttggtggcaagtacttgaacaaaactctgatttctggcttttcaaagagctcctactaagggattccagctctacacctggacatttgaaagag

SEQ ID NO: 48285 - DNA, 476 bp, Mus musculus
  source 1..476: mol_type = other DNA
ttgttttaaataaaagacagatttcgtaaatcttaaaaaaattaaaagttttgtaagttttggtaaatgtatgtttgagcctacattataatgtatgtacttgcatacatggagttgtcatgtgtcagactgatgacatattaacagacattattaagtcattttcaactaaaattgagtcaaagagagtttgagtaaaaaatatgttgccagtattcctctttaataacattattaaatctctaaaaaaaatgtaactaaaatttaaccaaatctggtcacatttaaaggaagtttctctggatgacattcaagtgacatctaaatcacaccgtaggtcctcatgttatagtgactcccaaatattcattacttcatttggctatataatgcaaatatctaatatgcaggatatctgatatgagacgccactgctttagagcaaagaacagctttcaactgtttgaaaccttggg

SEQ ID NO: 48286 - DNA, 324 bp, Mus musculus
  source 1..324: mol_type = other DNA
cagtcattagtttttccagaactgagtaattcagtaattgattaaaaaaaaatgctaagctgtagcataggaagaagtctttaaaaggcttctatccaaatattttccttcttctaagtcttgaaaaaacacaatatataactatttcttcttccaaatgatctcatagctatttattgaggaaaatgccaaattattattattattattattattattattattattattattactattattatcatcatcatttacttgataggactctgagacaaagttggtagacggatgtgagcagagttcatcctggattcagcgctg

SEQ ID NO: 48287 - DNA, 417 bp, Mus musculus
  source 1..417: mol_type = other DNA
ctctagttataactagttctaggacccttctttctctcttagaaaagaggcagccagtcagagccagaaccgagcctggctcctgcgccctgggccctgaagcctgagcactccttgtgtacaagatcaggtgacaagatgaggatcttgtgagttactacacattaaccctggcaagacgtacttatcatttattacaagcttgggttaaggtcattttaagagcatttactctgagaatggctatcgtagatataaataatctatttaaaaacaacaacatctaaacaatttcagataattttccgtagccgccacaaggtggcagcggcggccgcagagtcggcgcaggcacggctgctcggccgtcgcttgctctctgctggggacgtgggcgctccgggccccgcccccggc

SEQ ID NO: 48288 - DNA, 402 bp, Mus musculus
  source 1..402: mol_type = other DNA
tcaaaatatcactttttgcagatgatatgatagtatatataagtgaccctaaaacttcaatgaagtagctggatataaaattaactcaaagaagtcaatggcctttctgtacataatataaaataccttggcagactctatttttatgtagcacatcttgaagaagttccgcggcagctgcctcagtcttgtgcccattcaatagcatgagattcattctttgttgaaccttaatatgaaatagttgaacgctttgcatttaaacaccagctgatgtggttcaggtgtcctttaggcacaatttgattgcacactttgcaggtcacacggtgtgatctagcgtgcaagtgcgatccctgcctggcccacttgtacaggctgtgctataaatagccattcatt

SEQ ID NO: 48289 - DNA, 369 bp, Mus musculus
  source 1..369: mol_type = other DNA
tcgttctgtagaccaggctggcctcgatttttttttttttaatttaggaaacgcacaaggtccaagcatgccaagttcaagttgtcccagggcgtttcaaggccacaggaaggcgctcggggcaactgcctcccaccgccctgggctgctttcttaaggaggggtgggcggggacgccgccgccgctgctcttcaatctcaggcaggctgcttgccgggtctcgagcggactagaggctgagagtcggcctcccggggccgcagcgcgtttccgcccgcgaaccagcaccgtcccgggtcccgcgcttctctgctgccctccaccggggggactgcctgacactccggccaatgagcgcgctccttttc

SEQ ID NO: 48290 - DNA, 376 bp, Mus musculus
  source 1..376: mol_type = other DNA
gatcagtgatgaactaaacctggttatgatggccattggaatggaggctccgccccttttccgggtggggcgcggggggggggcctttggtacatgtaaatccatatgttttagtgtggaaaatatgattattataactacagatgttctgaaggcttactttgggaaagtactactttagtttctagatattccgagttctttgaaaaattatgagttacagtcaatgtaaatgaccaaccttactaacaaggattactttctatagagaactttaatttcttttctaggtcctcaatcgcaaaaggaaaacaaacagaacatgcctctgtttcactgcggccgcattgctttgagaacggaggaagtgagtccc

SEQ ID NO: 48291 - DNA, 442 bp, Mus musculus
  source 1..442: mol_type = other DNA
cgggggaggaggggggcagaccgcctacgtcggcgcccccgctcggggctgcgactccagacgcgacgccgggggcggccggctccgagcccgagggccgcgtctccgcagcgctcggcccgggtggaaggtgcccgggggtcggggttcttagcaacctactccaggccgggaccccgcgccaaggctctgcagggaggctcctgaaactgctcccccggggaagcagctcagggatcctgcggcgggttgcagaagtctcatcccggagccctggagcagaggtgctggggacccattcccggggtcctccggggtccccgcgctccgccggccgcctcgcacgccaccccgggcgcgccggctccgagcggcggcgtgcaggactgaaattgggaagggtttccagaaggtgggaaggccccgtctagatttaaagcgc

SEQ ID NO: 48292 - DNA, 482 bp, Mus musculus
  source 1..482: mol_type = other DNA
ttccgtgaagtaatcgttttatataaaaggaaatttcggcgaagaatgccaggcattgcaggtgcaatcttttttttaaataagagagagacgggggaggaggggggcagaccgcctacgtcggcgcccccgctcggggctgcgactccagacgcgacgccgggggcggccggctccgagcccgagggccgcgtctccgcagcgctcggcccgggtggaaggtgcccgggggtcggggttcttagcaacctactccaggccgggaccccgcgccaaggctctgcagggaggctcctgaaactgctcccccggggaagcagctcagggatcctgcggcgggttgcagaagtctcatcccggagccctggagcagaggtgctggggacccattcccggggtcctccggggtccccgcgctccgccggccgcctcgcacgccaccccgggcgcgccggctccgagcggcggcgtgcaggactgaa

SEQ ID NO: 48293 - DNA, 333 bp, Mus musculus
  source 1..333: mol_type = other DNA
tgtttgcaaaaccacattgaactatgcattgtttcttagcctaagcccagagtgactgtcagttggacataaatatttaaccttaatgtttagcaaccttatcaaaataaatgttgatgcaaatcataatggaaatttattacccattggcaaatctgaaaggtaaggtttttactaagattacagttggattacggttaacccggactgagcgcccagcggctcagaaactcctgagcgccgcataggttagcctggggaaggccaccctgccggccggcgcagtgtccacacgcccggggttgagcaccacccagaaggtggagcatccgg

SEQ ID NO: 48294 - DNA, 409 bp, Mus musculus
  source 1..409: mol_type = other DNA
catgttctatttcttggattcaaaatttccagaatcggaaagtttgggaactcaggaggagagattctcaacccgtgggttgcgaccccccttccggtgtaccctaagatattgggaaacacagatgttacataacaattcagaatcagagaagtagcaacgataataattttaaacgataataatgttgaggtcaccacaacatgaaataaatcaggtggtgcaaaaatagtacctcagggataaaagcagagaagggccgagggctccgtgggcgtccatggatcttgaagcgctggaggagccacagacgctgaggggctgggctccgtggggcgtggcaggacagatccggagtttgcccaggctggaggggcaggcaggggcggttcctagctcagaagctgca

SEQ ID NO: 48295 - DNA, 425 bp, Mus musculus
  source 1..425: mol_type = other DNA
ttcagaaagagacttctctgtatttccatcgccactgtaccaaaggggatgagaacatattagattagcttatctttacttcccatatccctcagagactactgcgctgagtcggccaactttggattctgggattcccaggacatcaatcaggttctctgagccaacaagctcgtcggtctaagccaggcagagtttgaacttcgccattctgaagctggcttcacgctaggtgcagaatgataaatccagcttaaatacatatgtttgcattcacgtacttggcatgtgctcgcacacagggatgtgccgggaaaagcttagcttttcagagcgctgaccgcctgcgtgcgcgcgccgccgacaggccccgcctctctggtagggacccacaacagacttgcgccgggaggcgggctgcgcct

SEQ ID NO: 48296 - DNA, 266 bp, Mus musculus
  source 1..266: mol_type = other DNA
tattagagaagttctcaaaacatcctaatttagcttagacaaaatagtaagggagatacaactgcctttaatcaggagtcttctaaaagaggcaagctctcttaacttaaaggaaagccctccgagaagcttgccggtggccaggatgcctggaggcgagaaggctattctgcgcagctggacacaggaaagatttggttcgtgacatcagtgaaaggcagatgtcccccatgtctcggacagagcctgggtggctgccagtgaga

SEQ ID NO: 48297 - DNA, 244 bp, Mus musculus
  source 1..244: mol_type = other DNA
ttctttgaaattctcaaaagtgctaagccacttgaaaatgactattagagaagttctcaaaacatcctaatttagcttagacaaaatagtaagggagatacaactgcctttaatcaggagtcttctaaaagaggcaagctctcttaacttaaaggaaagccctccgagaagcttgccggtggccaggatgcctggaggcgagaaggctattctgcgcagctggacacaggaaagatttggttcg

SEQ ID NO: 48298 - DNA, 599 bp, Mus musculus
  source 1..599: mol_type = other DNA
ctttagggtcctgcactctgactctagattagaacactttcatgctagacttaaaattaacctcggagttaattcgggaaagctcccctttcctcccaccccaagtctttggagagctcagatcataaaaaaacccatttcttttgggtgtcccctaacgcgtagcgcgctgctagctccagcagatgcgcccttcccgcaggcagcgaaattggccagccctgggctgtgcgcgccagagcggcccgttcccccttttccccggtagggacccgcttcacaggaaggacgagccccgagctcagcgcagcccaaggtccgcggggagcccgcggcgctggaaccccaggacacgacgcggcgcgtccgggaaggcgcggggcaaggaggcggcggccggggacccgggccacccggcgcccaaggagcgacgtggcctcgggaggcttaatcctctcctgcgggctcgccgagcgggcagtggcgcgcggaggcgccggggctgaaatatgataatcagaacagctgcgccgcgcgccccgcagccaatgggcgcggcgctcgcctgacgtccccgcgcgctgcgtcagaccaatggc

SEQ ID NO: 48299 - DNA, 449 bp, Mus musculus
  source 1..449: mol_type = other DNA
gtctagaatcattttcaacaaggaaagacttgttcactttatttttaattaaatgactcataattccttctgaaagtggagtcgccggctcgagtggcagtcgggggtgctgcgcgagccccagcggcgcgcagccgggcccggtgacccgcggcgggtgcgggagggtctgcggctggcgggcggcgctgcagcagcctgggcacggccgccgcccgcgggcgcgagtgtgcgcgggtgtgggaaggccggcgtgcgggccgcgaggggtgtgcgcgcgtgagtcggagcggggctcgcccctctccggcgcctgccgctccacagctgccgatcgctctccagcggtccccggcccccttcgggcccctgttttcctacggccgtcagtccgggcgggggtgggggggtgtcagcagcggcgagcagcagctgggcggtcacatctg

SEQ ID NO: 48300 - DNA, 332 bp, Mus musculus
  source 1..332: mol_type = other DNA
actaagtagggcttgctgagactagttttaataggaaaacaattgttttgaactatctcaatttatttgataggagcattgtattccacaatgtttgacaaagatgaatggccttctgccatacactttgcacatccaaagatgtataggagcatgtggggagttgcaacccctccgggaggtgatggggtacacacacctggctggctccaggagctaggtccctccccaacctgtgttagccagaggggcacatccgggcgcgccggtagcgggctgcgggcagcgtctcgggggtggaggccagggcggccgggcccctcccactcggt

SEQ ID NO: 48301 - DNA, 137 bp, Mus musculus
  source 1..137: mol_type = other DNA
acacagtgcggcatatttatctctctgtgtggttattgattgtataacttatcttaaaaggaaggtcatcttcaataaatttgctcacatgtgtgttgatgttagtggccttcctaggaaggaacccaaagatctat

SEQ ID NO: 48302 - DNA, 249 bp, Mus musculus
  source 1..249: mol_type = other DNA
acacagtgcggcatatttatctctctgtgtggttattgattgtataacttatcttaaaaggaaggtcatcttcaataaatttgctcacatgtgtgttgatgttagtggccttcctaggaaggaacccaaagatctatacaggcgagcggcggggcgcgcgcgggtagaggcggtctgcggccagcagggggcagccgaggggcggcgctggcgcgcgggtgccgagcggaggagcctcgccccgcgccc

SEQ ID NO: 48303 - DNA, 467 bp, Mus musculus
  source 1..467: mol_type = other DNA
atattttttaaaaaagtaatgtcgttctctcattatttctcatatttatatagcagaaaattcatatataaataataatgtatattactcaactgtgtctattatttttattagttttttaattaattattttttataaacaccctgggacctccagtctcttgagggctaggtgctctgaatgaacacagacctggaagtcctctgctgtaccaaattaattgcaacaacaggagtcagctacttctgtccattggttgggtgcaaatatctgcatctgaccctttcagctactccatagccttagtaataatgtcaggtcttgggacctcccctgagattatgggtcagagttttgatggtagccatgggctctatctaaagattcctcagaaaactggaaatagagctacctgaagattctttagaactactatgtcacaagggcacatgttccactatgttca

SEQ ID NO: 48304 - DNA, 390 bp, Mus musculus
  source 1..390: mol_type = other DNA
tgcttccttgcatgcaactgaaaagatttgaatcatattaggctgaaaaataaagtaatagcttctttattaagtttattgtaaagaatcagttcatttcaaactagtaaagagtttaatacacagcaaaattcaaacaaattgcttagtatgatttatttcatgcttgtatattcaactcaaaataaattatattacctcattagcactgaagaatgtatgaaatagttttatgctgatataatttttataattagcaagaataagtaaagacatgttgtatttcataaaatttatagccctggctgtccttagaccagcctggtctcgcctacgagcaaggacttggggtaagcgaatttttatcgcagacaaatactgacaattcct

SEQ ID NO: 48305 - DNA, 334 bp, Mus musculus
  source 1..334: mol_type = other DNA
gttaattctaaatgttaacttgactctagtcattctctgggaggagttctctgacgtcatcaaagaagaagtccctacttcctgtcagcaacatgtgaatgacaacttctttaagtttttcccctaccatgcataaagtaagggctgtttccaaaaaaggaaagaatttagactttgtgggaaaatattgaaagaattttatgagacattcaatacagtttatagaatggataagatgctattatgttttaattctctagaattaagaatgcattcttattatggcactatagtgagtgaactgatgtcataatgaatggacaatatttttgac

SEQ ID NO: 48306 - DNA, 272 bp, Mus musculus
  source 1..272: mol_type = other DNA
ccctgcttctgggatctggaaggcagacccgcggacaactcgcgctggtggccagcgctgcgagcacaggacgccggagccgcaattagcaggagctgcaggctgcggggcggctgcgcccacggaggcggcgaggaagggacccgcagcccccagctcagagctgaggtttgaccagcagaggcagagcccacctctggctgctgtttacaagcggctttcgcagctgcctccagttctgacaactccaaagagacactttttaagtggcc

SEQ ID NO: 48307 - DNA, 307 bp, Mus musculus
  source 1..307: mol_type = other DNA
gttaccaattagaaatcagtaacctgggtccctgaaatctccctgagcttaaaaaagtgtgaactttttacttcaagaaatcaatgattcattataatctgttcttggagagagtccctgcttctgggatctggaaggcagacccgcggacaactcgcgctggtggccagcgctgcgagcacaggacgccggagccgcaattagcaggagctgcaggctgcggggcggctgcgcccacggaggcggcgaggaagggacccgcagcccccagctcagagctgaggtttgaccagcagaggcagagccc

SEQ ID NO: 48308 - DNA, 383 bp, Mus musculus
  source 1..383: mol_type = other DNA
gtctgaacagtgtacttacatataataaataaataaatcttaaaaaaaaaatagcgctgggtaagtttaatcaagaatctaatcactaaccaataactaggtcgttatgttttgatttccttaatcaggaaccttaacaactgcctaaagccaaatatgcacatgtgtgtgttcattttttttcctagagagttagaggaaaatcacacgggcggggctgcgggcctggggccctggcagagacgggcttcagcggccacccggaggggaccagctgctgcgctgtaagcgtgcatctggatcgggccaagcgggtttggcgggcgcgggtccgggtctaggcagccctgtgtcacgtggtcgccgccgccgcctcaaagttg

SEQ ID NO: 48309 - DNA, 366 bp, Mus musculus
  source 1..366: mol_type = other DNA
ctgctgtataaaacacaaggcattctctaaataaggggttctctgtggttcacttatttttaaaagatactgaatgtctgtttttttttttttgcctgttaaaatatttcagttaaattaaaagcgagcacccgactgctctcccgaagtctgaacagtgtacttacatataataaataaataaatcttaaaaaaaaaatagcgctgggtaagtttaatcaagaatctaatcactaaccaataactaggtcgttatgttttgatttccttaatcaggaaccttaacaactgcctaaagccaaatatgcacatgtgtgtgttcattttttttcctagagagttagaggaaaatcacacgggcggggc

SEQ ID NO: 48310 - DNA, 494 bp, Mus musculus
  source 1..494: mol_type = other DNA
gtatgtgtgtgcgcgcgtatgtgcgctaacacctaggcgggcgcagtggcgttctggtcgcaggtcgcactccccgccccccgggcagacgacagggcagcgtcccgggcccccttcgccgccaggcctgggcgttcggccggagcgctctccctgcgcacacctgcgcgcccacggaggtgcgcgtcggcgaaccctggcgcggcgcccacgccccctccccccgggtgagcgaggaggtcggagtggcccggtaagcgtcgcccctcgcccacgacggtccctcacccccgagagcccagacccccgaacgcggccgtcagcggagccgcctgcgggtccggacgccgctcgtccaagcggcggggcgaagccggggctcgccctccagccatcggcgaacgcgagcgggcgggagggcggccgtgcccggggcctccgggccgcggggggccgctgtgacccgcctcggccccaccgcgccgcgggcgggc

SEQ ID NO: 48311 - DNA, 459 bp, Mus musculus
  source 1..459: mol_type = other DNA
gtacctatttaaaactccagatttggagctctggccatatggataatgttctgagctcaccctcatactgagggcaatagtgtcttgtggacagtctataatctggatgcaatactatctctgagacagaccctgttcaaaaaaactcaaacctcagattttagtggaagtattttctcagactctattctctcatagatgtgttttttagtttaggaacactcataactaatagaaattgggctaatccgcagcgtattttgctgaattagaagacattttctggcacctcttaaaacaagtggtctttgtcttcgattacttttaaagaattttaaagctccgctaactgtgacagtgtcgcctggtaagaaactcggcgcttccgtgccgacactgagtccaacccggaaaaccggtcttttccggaactgctctttgcaatggaagaggcgggac

SEQ ID NO: 48312 - DNA, 331 bp, Mus musculus
  source 1..331: mol_type = other DNA
tacagagtgctggattcaggtctgttgtcccagcactcagggaacaattctggtgctgataatcaaggccatccggtctctctccgcgtgtgaaagagctgaagttgcttcgcttcgggttggaaaaagcgcaggagaggtttcgagtccaccctgagcccgcagccccggcccgggactcgatcctccgcctcgcccggctccggctccctctggacgcagcgcggtccggccgtccctccccgcccggcgagccgcggctcggctccacccggcgcgcctcgcggtaggcgggcggacgacggcgccccgcccctcggccgcaccatag

SEQ ID NO: 48313 - DNA, 400 bp, Mus musculus
  source 1..400: mol_type = other DNA
tgcaacctaaatgatataggctatcaggagggtggggggtgtttaaacccccctgaagagtcttcctccccttgagggttggtccacaacagttcttgtcatgatccagccttgaacttcctagttgagatatatcaccccttcagtaaaggagctcctctgctggaatagttcatctctgctggaatagttcatctgaagcgattctgtagccgagcacaaggattcaggatgcattgtatgaagagcagtcagtgttcttaacatccccccgctgacacagggggatgatgctggctgaagttcatctgaagcgattctgtagccgagcacaaggattcaggatgcattgtatgaagagcagtcagtgttcccccgccggtgagtagcaaagccttga

SEQ ID NO: 48314 - DNA, 637 bp, Mus musculus
  source 1..637: mol_type = other DNA
cccttcagtaaaggagctcctctgctggaatagttcatctctgctggaatagttcatctgaagcgattctgtagccgagcacaaggattcaggatgcattgtatgaagagcagtcagtgttcttaacatccccccgctgacacagggggatgatgctggctgaagttcatctgaagcgattctgtagccgagcacaaggattcaggatgcattgtatgaagagcagtcagtgttcccccgccggtgagtagcaaagccttgagaaatccccaaggtgcggtgcgtcctgacaggtcgcgcgatcctgcatcgtctgccctgtggcgtcccgacccacggtgtgccctgcagccggcgaggggcttctccatcccggccgccacaggtgagcatcgtggtgtccgtccggctctgagggctctgagggcgtgcagagctcagggcggccaccggctcaggctcatccagcgagcgacccgcatcccggcgtccgcggggacccggaggactcggccgctctggccggcggcgcgcgcgtctctatggtgcggccgaggggcggggcgccgtcgtccgcccgcctaccgcgaggcgcgccgggtggagccgagccgcggctcgccgggcggggagggac

SEQ ID NO: 48315 - DNA, 438 bp, Mus musculus
  source 1..438: mol_type = other DNA
cctcctagcagctggaagatgccagtcctctctcctggctgcagttgaatcaagaagtagaactctcagcttcttctcggccccaattaaatgttgtccttataagagttgccttggtcatggtgtctcttcaccctaactaaaacatatgtgtatatttaagtaacaaaaaattatgttgttggaagctaaagataatttgtatgacttagcattttgctaatgatgattctcaacagacatgcccatcagaatcattcatgaagctatttgtgaaattcaatgatgagtactaccaactcttaaggacctcatcagctggcacacggctacagatgtgctctccagtctctggcaaagtgagcacacggcaggctgggcattaactgccagcccggaacctggctgagagcctcccagggcggggccacctggcct

SEQ ID NO: 48316 - DNA, 533 bp, Mus musculus
  source 1..533: mol_type = other DNA
ccccgccggtgagtagcaaagccttgagaaatccccaaggtgcggtgcgtcctgacaggtcgcgcgatcctgcatcgtctgccctgtggcgtcccgacccacggtgtgccctgcagccggcgaggggcttctccatcccggccgccacaggtgagcatcgtggtgtccgtccggctctgagggctctgagggcgtgcagagctcagggcggccaccggctcaggctcatccagcgagcgacccgcatcccggcgtccgcggggacccggaggactcggccgctctggccggcggcgcgcgcgtctctatggtgcggccgaggggcggggcgccgtcgtccgcccgcctaccgcgaggcgcgccgggtggagccgagccgcggctcgccgggcggggagggacggccggaccgcgctgcgtccagagggagccggagccgggcgaggcggaggatcgagtcccgggccggggctgcgggctcagggtggactcgaaacctctcctgcgctttttccaacccgaagcgaagcaac

SEQ ID NO: 48317 - DNA, 499 bp, Mus musculus
  source 1..499: mol_type = other DNA
atttgaaatgtaaataaagaaaatatccaataaaagttttttttaaaaaaatgtatttaatgattaaaaaaaggacgaagtaatacagttctgaaccacagtttctgtttggaccaagtgccaaaataatacctaaaatatcgttttttaggctataaaagccaaggtagtttaaattggacacttaagaatacttacaaatttagaaattctgggtgaagcattatgctaaaacttgtgatgcagaagtcacgactgaattcaaatcaagtatttcaaatattttgtggttgctaggcaacctgacagcctcccaagcgggggaggagtgggacgccgagagcgagggaaccctagcgagtccccgcctctcattggctgaaagcggatcggggggcgggcgctcccgagcgactctgagtcccgggattggcagaggtagccgctgtcccgccctctgtcccctcccggcgctgcccgagtcgggtgggtcggtggc

SEQ ID NO: 48318 - DNA, 396 bp, Mus musculus
  source 1..396: mol_type = other DNA
aaagaactcgagttagccagacttgacgtttagctaaactctggagttaaccggacggttaaggatatataaactttgaccaaaatgctagatttttcctctattccattctgggcaatggaagtgactccaacagaattcagctaatcacttgttagcattgcaataacagctactagatggttcaataaccacctatggaacacctactaatttatggtgataggtatcttaggtacaatatagttaagatttgaggacagctcctctgggctctttccaaggccagcctggcctacagcacagactctgtttttctgagaaagtccagctttgactaaataggctcagaagaaaatgctcatcagtcaagtttatgatcctcattatgatgca

SEQ ID NO: 48319 - DNA, 374 bp, Mus musculus
  source 1..374: mol_type = other DNA
agaacttctcacattgctgtgaagagtctttgtaaaattatttaatacactgtctggcaaatagagaaaaataaatacccacaacttctgcctcataaaaattttagatgtcgattatcttcagactgctcacagagctgaacttagactcttaggtctggctcagctattaaataaagcatgttaactccaggaattatcttgggtggcaccctcagaagcacttctttctgcagagcttaaaagccctgctactcacccggaggagctggcagtgggtgtccccttgcctgccatagaaaccagcctgccaggtccaggccggctccccgctcaggattggtcctgttcaggacgctgcgaagccctcggct

SEQ ID NO: 48320 - DNA, 640 bp, Mus musculus
  source 1..640: mol_type = other DNA
aacaattacaattaaaacaattacaatggcattgcctcaaaaacttttgaagtgaatagtctttattgtccaactcattgagattaccgattgcaactgagtggcagtccccagccacttttgagtctgcaggcacgtgctgccaccgccatccccggcgccggagcctgctcgtccccgcggccgccgagcccagggcgcaagtgcgtcggcgggacccctagctgatcgtccgagcgtccctgccgcggaggtgagtacccgagcagctgcgggcccacctccgctccggaaagggggcggggcggggcggggccgcgggatataagcgtcccgggccgccgagccggtattccaccgggtcgcgatcggaagtgcagctacgggcccggtgggggcgggctggctgccggagcgcagcgtcgccagggcctcagccttcccggtgcgcagcagagcccacggaagccttcgaagcgccgcgcggggagccccgaatcccccccgggggggctccctcccccctcccctccttactgggccccaggggcgtggccaggcttcgcagggattggcgctccgggtgcgtccgcgtccggcgtggtgacgcagcacgtcgacgtaagtgacgcgcaggccc

SEQ ID NO: 48321 - DNA, 456 bp, Mus musculus
  source 1..456: mol_type = other DNA
ttaaggattccactcctaaaatgttaaaaagatcggatatcaaaaggaacactgtgaccgtaataccgacctgctgttcagacctgaacctccgctcagactaaagtctgaatgtagaaagcgcgaacaattacaattaaaacaattacaatggcattgcctcaaaaacttttgaagtgaatagtctttattgtccaactcattgagattaccgattgcaactgagtggcagtccccagccacttttgagtctgcaggcacgtgctgccaccgccatccccggcgccggagcctgctcgtccccgcggccgccgagcccagggcgcaagtgcgtcggcgggacccctagctgatcgtccgagcgtccctgccgcggaggtgagtacccgagcagctgcgggcccacctccgctccggaaagggggcggggcggggcggggccgcgggatataagcg

SEQ ID NO: 48322 - DNA, 457 bp, Mus musculus
  source 1..457: mol_type = other DNA
acatctatggacattgatttttgataaaaataagtaaaacccatatgtcttagttagggttttactggcaagtcttataaaaacaacatttaattggggcgctgctagtggaagactgacttcctccagcaaatggtgctgaacttactggatgaaaatagatccatatttataaacctgcacgtaactaaagtctaagtggatcaaggacctccatatagaactgaatgcacgaatgcattagtataggattcaggtccctgaagcttttgtaaggagattcttttgagtttgaaagcacaggcctttaatcttgatctgtaccaagaaagacacatatctttgttattgtgatgggtttgtctgtaatacccatggttgtacgaccaggctactcacagagatccagttgcttgatctaaattcaggccacgccttcagttggaggcctataaaa

SEQ ID NO: 48323 - DNA, 484 bp, Mus musculus
  source 1..484: mol_type = other DNA
tttcaaaataatccccattcaactttgataccaaattattttgacagtcccttaaaaacagatttccaatcttgctgcctggttccctgcaaatatgaatccagttcagggcagcctggagcccagctactcccctgctgtcctgtgcttgttttcataagacccagtgttacatagagaaacactctctttgttatcaacttgattatctctgcaattaagcaaaatccaaaactgtaagtaacttttgcttaatttatagaaagtaatccatacctgtgaggtaggaagacttgcttttaatgcagatctttttgagctcgaaagacaaggcctacgaaagacacacttttttgttaatgtgattgttgtgataaggtttgtcattaatacccgcagactactcacagagatctacttccttgattcaattccatagtgcttgtattaaagaattcaggccacaccttcagctggaggccta

SEQ ID NO: 48324 - DNA, 425 bp, Mus musculus
  source 1..425: mol_type = other DNA
gtgagtttcaagatacttaccattcaactttgataccgaattattttgatagtcttttaagaaactgctttccagtcttgctacgtggttcctggccggtagcgcgatactagaggatggaaatgtgggaattacatgcccttaagttgcacagagaaacactctctgtattcactgttgtcaacttgattatatctacaattaagcaaaatctaaaaatgaacctgtaagtaacttttgcttaatttgtagaatgtaattcatatttttgagataggaagacttgcttttaatggaagcaagaaatacacgtatctttgttaatgtgattattgttataagccagggtttgtctataatacacctggactctgtattcaattccatagtccttgaattaaaggcgcaccttcagctggaggcct

SEQ ID NO: 48325 - DNA, 378 bp, Mus musculus
  source 1..378: mol_type = other DNA
tgtagacctacagtattgccaggccaaaagcatgcttttaccaaggatagcatcagcatggatgcagagattcgaagtcctgaagcttcatctctacggagtagcttctgctctggacagcttggtctacaaagttgttgccttgacactatctcgaattaagcaaaatccaaaattaagggatatatacttaatttgtagaaagtaatcacttctttgaggtatctctaactgcctggattctgtgtgaagcaagaaagacacatatctttgttaatgtgattgttgtttaagccaggttttgtctatacttgattcaattccatagtccttggattaaaggcgtgagccacaccttcagctggaggcctatataag

SEQ ID NO: 48326 - DNA, 308 bp, Mus musculus
  source 1..308: mol_type = other DNA
taagaaatcccacagtgattactaacatctttatgaggatttcttcagtaaatccgaagacgtgggatgcatgtttctaaacgctgatcccctactagtcacctttcagaggagtgtataaaaatctgacagtgattgcaagcacagttattctctaagaacccaagggaatgcaatgcgtaacctcagaaaaattgatagtctgatttcctttcatcgcagcaaaagacagacatgcttcgaacattggtccgatttctttcgttcggggtttgtcaaaaaacggaacttagtggtggggatttccc

SEQ ID NO: 48327 - DNA, 439 bp, Mus musculus
  source 1..439: mol_type = other DNA
gaactgtgagtttcaagatacttatcattcaactttgataccgaattattttgatagtcttttaagaaactgctttccagtcttgctacgtggttcctggccggtagcgcgatactagaggatggaaatggtgggaatacatgcccttaacgttgcacagagaatcactctctgtagtggctattcactgttgtcaacttgattatatctacaattaagcaaaatccaaaataagtaacttttgcttaatttgtagaatgtaattcatatttttgagataggaagacttgcttttaatggaagcaagaaatacacgtatctttgttaatgtgattattgttataagccagggtgatccacttccttgattcaattccgtagtccttggattaaaggcatgaattcaggccacaccttcagctggaggcctatataagaa

SEQ ID NO: 48328 - DNA, 345 bp, Mus musculus
  source 1..345: mol_type = other DNA
tgcagtcactcctctgtttgcaactagatggaaacggaaagatgattgaaaaacttgctagttgcaattttattttcttagagacagttggcatttgagctgtgtctgttttctttccagcccagccagacatctcagctgccagaataggtgcgcccaggggtgcaaagcacagccttgctctgttgaagccaggtactgtcctgggcaattggctcgctcagctcaggaggcgaccacctggagctacaggcacctgtgggcaagggtcacatgcatcccgggctgcctgcctggaggggtcgaaggcttgaggagcctagggctcaccaccgtgccactgca

SEQ ID NO: 48329 - DNA, 328 bp, Mus musculus
  source 1..328: mol_type = other DNA
aacttgcagtcactcctctgtttgcaactagatggaaacggaaagatgattgaaaaacttgctagttgcaattttattttcttagagacagttgacatttgagctgttttctttccagcccagccagacatctcagctgccagaataggtgcgcccaggggtgcaaagcacagccttgctctgttgaagccaggtactgtcctgggccctggagctacaggcacccgccaacatcccccaatgctctggcaagtgggtcacatgcatcccgggccgcccgcctggaggggtcgctggggggcggcaaaggcttgaggagcctagggct

SEQ ID NO: 48330 - DNA, 293 bp, Mus musculus
  source 1..293: mol_type = other DNA
gcatgctttgcttggccggaggctaacactctgctagtcagatgtcacattaagaactgctcatttggcatttgcaaagggatgcttctcacatgtgaattatatgactgatgccaagcaagctctgtgcactggatttgcttgctgataatccactttctcacaagaagctcattccccagaaatatttgtgcttggacatagacgtccttatggagcccctttaagtcccacaagtactgcagcaccagttcagctgattcagttccatcagaaggtggctctgcaggttt

SEQ ID NO: 48331 - DNA, 398 bp, Mus musculus
  source 1..398: mol_type = other DNA
attgaggtttcttctccattccggaagaatttgagaacaggaccatgtgcaagatcccctatgtttgaaagaatagggagttttccttataaaagatagcattgtaaaccagagattttgtgaaacacatagatatatatatacatatatatgtatgtatttatgtatggaaagaatgacaatccaggttttatacaattaaatgtataggagaaagatatttgccttgtgatacaggaaatccctgggaaattatatgtcatatgaattgactcaggtggcatatttatttttgagaaaaatctactacatccacagtccctagagatttggggctaacaaaatctctgggatccgtccatggcagttgctagtgatatcatcagtaatgccttcct

SEQ ID NO: 48332 - DNA, 478 bp, Mus musculus
  source 1..478: mol_type = other DNA
aatgcagtcactcctctgtttgcaactagatggaaactgtctccacgtatgatttcagaaaagatgattgaaaaacttgctagttgcaattttcattttcagagacagttgacatttgagctgtctctgggttttcttttcacaaaatctttcagccagcccagccagacatcccagctgccaataggtgcttgggagcagctcaggcgcaaagcacaaccttgctctgttcactgtcctgggcaattggctccaggctcagctcaggaggcaaccacctggagctgtccttggtgaagcgcaccaccgccaggtgcctgtgaccgcctggtgggcctggcagggggggtcacatgcatcccgggccgccggccgggaggggtcgctggagcaaaggcttgaggagcccagtgctcgccaccgcgccatggagctgcactcatgcggctgcaaggcgtccgaagccagagagcgccgt

SEQ ID NO: 48333 - DNA, 491 bp, Mus musculus
  source 1..491: mol_type = other DNA
ctcctctgtttgcaactagatggaaactgtctccataaagatgatttcaggaaagatgattgaaaaacttgctagttgcaattatattttcttttggagagacagttgacattttagctgtctccagacagacatccaagctgccagaataggtgcttgggaggggcgcaaagcacagccttgctctgttgagccaggtactgtcctgggcaattggctcgctcagctcaggaggcgaccacctggagctacaggtgcctgaaggaaaggggccaggtcctgctcacacctccactgccaggtgcctgtgacggcctggcagggggggtcacatgcatcctgggccgccggcctggagggggcaaaggcttgaggagcccagcgctctccaccgcgccctggagctgcactcatgcgcttcagagcgggtgcatgtccctgcgctccgtcggtcaccaggcgcaggccggcacgatggagccgcagcatgt

SEQ ID NO: 48334 - DNA, 492 bp, Mus musculus
  source 1..492: mol_type = other DNA
tgcagtcactcctctgtttgcaactagatggaaactgtctccagtaaagatgatttcagaaatgatgattgaaaaacttgctagttgcaattttcattttagagacagttgacatttgagctgtctctgtggttttcttttcacaaaatctttcagccatagaaaatcagacatcccagctgccagaataggtgcttgggagcggctcaggggtgcaaagcacagccttgctctgttgaagccaggtactgtcctgggcaattggctcgctcagctcaggaggcgaccgcctggagctacaggcaccggaggaaaggggccaggtcctgctcaccaccgccaggtgcctgtgaccgcccagtggcggcctggcagggggggtcacatgcatcctgggccaccggccgggaggggtcgctggagcaaaggctctaggagccgatcggtcgccaccgcgccatggagctgcactcatgcggctgcgaagccaga

SEQ ID NO: 48335 - DNA, 408 bp, Mus musculus
  source 1..408: mol_type = other DNA
tcctgagtgttcccagggattctcagaatagaagtaagaattcttgtataagcatcagttcctcctatgtataggatgagtaaggtgtcagaggtgacctctggtcattccttcaggtagcagatgaactgtcttctccagggcagcatgaaggtcctggaagtggtcctgctacatgcccaggagacagtagagcaatatctggtgtactgcagcactctgttcatggcctttacctgtgtcgtggcatgggcaaggctctgtctgtatatggccagatagcatcaaggcatgatcaaaaccaagttagctgaaggcagaggtggtgaccactccatcctaggtcctgccacagatgggcttgaccctatcccacttcaaacttctatttcagttgggattggagga

SEQ ID NO: 48336 - DNA, 413 bp, Mus musculus
  source 1..413: mol_type = other DNA
cctgacacattaaaattgaggtttcatagtaacggtaaaactcaacttctcaattccggaagacagatatttgagaacaggaccatgcattgatcccctatgtttcaaagaaaagggagttttccttgtaaaagataggattgtaaacaagagattttgtgaaacccatggatatatatatgtaaaaaatgcacactatcaaggaatgcacagttagaaaatattatccaggttttatacaattaaacatatagaaaaaagatatttgcctctgtgagaatgtcacattaattgtctcagatggcatattcccagagatttgggtattaacaaaatgacatctaatgaagcagtagaattctccagctttggagatcatggcagttgctaatgacatcatcagtaatgccttc

SEQ ID NO: 48337 - DNA, 369 bp, Mus musculus
  source 1..369: mol_type = other DNA
tgtagacacattaaaattgaggtttcatctcaattcaggtatgacgttacacgcaattctggacaatgcagtaatgtacagtccagttgtaaaccagagattttgtgaaactcatgtatatatatatatatatatatatatatatatatatgaaaaaatgccctttagaaaatattgtccatgttttgtacaattaaacctataggagaaagatatttgcctctgtatgtcacatgaattgacacagctggtatatttactgttgtgaaacatttttgggtgccaacaaaatacatctaatgaagcagtagaattctccagctttggaggtcatggcagttgctagtgacatcatcagtaatgccttcc

SEQ ID NO: 48338 - DNA, 463 bp, Mus musculus
  source 1..463: mol_type = other DNA
caaggcccctttaaaggagattttcagtttcaaaactgcagtcactcctctgtttgcaactagatggaaactgtctccagtaaagatgatttcagaaatgatgattgaaaaacttgctagttgcaattttcattttctttttcgagcagcagattagacagttgacatttgagctgtctggttttcttttcacaaattctttcagctatagaaaatgaataaaagcagggcccagccagacatcccagctgccagataggtgcttgggagcagctcaggggcgcaaagcacagccttgctctgttgaagccagtactgtcctgggcaattggctccaggctcagctcaggaggcaaccacctggagcttgcctgaaggaaaggggccaggtcctgctcacacctgaagcttcctgcaccaccaccaggtgcctgcctggcagggggggtcacatgcattccgg

SEQ ID NO: 48339 - DNA, 478 bp, Mus musculus
  source 1..478: mol_type = other DNA
tgcagtcactcctctgtttgcaactagaaggaaactgtatccaccagtaaagatgatttcagaaaagatgattgaaaaacttgctagttgcaattttcattttttttagagacagttgacatttgagcttggttttcttttcacaaaatctttcagccatagaaaatgaataaaagcagcccagccagacatcccagctgccagaataggtacagccttgctctcaattggctccgctcagctcaggaggcgaccacctggagctacaggcacctgaggtgaaggaaaggggccaggtcctgtcctgggtcctcggtgacaccaccgccaggtgcctgtgaccgcccggttatggcctggcaggggggggtcacatgcatcctgggccgccggccgggaggggtcgctgcaaaggctcgaggagcccagcgctcgccaccgcgccatggagctgcactcatgcggctgcggagcccgc

SEQ ID NO: 48340 - DNA, 509 bp, Mus musculus
  source 1..509: mol_type = other DNA
tgcagtcactcctctgtttgcaactagatggaaactgtctccagtaaagatgatttcagaaatgatgattgaaaaacttgctagttgcaattttcattttctttttcgagcagcagattagacagttgacatttgagctgtgctggttttcttttcacaaattctttcagctatagaaaatgaataaaagcagggcccagccagacatcccagctgccaggtgtgggagcagtgggagcaaagcacagccttgctctgttgaagccaggtactgtcctgggcaattggctccaggctcagctcaggaggcaaccacctggagctgcctgaaggaaaggggccaggtcctgctcaccctgaagcctgcaccaccaccaggtgtctgtgaccatggcctggcagggggggtcacatgcattccgggccgccggccggtaggggtcgccaaaggctcgaggagccgagcgctcgccaccgcgccatggcgctgcactcatgcgagccagaga

SEQ ID NO: 48341 - DNA, 530 bp, Mus musculus
  source 1..530: mol_type = other DNA
tgcagtcactcctctgtttgcaactagatggaaactgtctccataaagatgatttcaggaaagatgattgaaaaacttgctagttgcaattttcattttccagttgacatttgagctgtctggttttctttttacaaaatctttcagccatagaaaatgaataaaagcagggctccctagccagcccagccagacatcccagctgccagaataggtgcttgggagctgctcaggggtgcaaagcacagccttgctctgttgaagccaggtactgtcctgggcaattggctcgctcagctcaggaggcgaccgcctggagctacaggcacccgaggcaagcctgggaaaggggccaggtcctgctcaccctgggtcctcggtgacaccaccgccaggtgcctgtgaccgcccggtgggcctggcagggggggtcacatgcatcctgggccgccggccgggaggggtcgctgcaaaggctcgaggagccgagcgctcgccaccgcgccatggagctgcactcatgcggctgc

SEQ ID NO: 48342 - DNA, 454 bp, Mus musculus
  source 1..454: mol_type = other DNA
cttaagaaacttattatttcaggtgtgatcatgaaatcccacagatatcagacccagatggatctctagtttcttctgagccagactgaactacaaactccttcatacattcagtatggagagtttttctaactgtctgtataggaacttaaaacttacccatgctgcatcgttgatatttagtgttgaacgcattaatggcaaatacatcagtatttttgtaatggctctcattaaatcaaagcataatctaatcagaaaacacagcagtgtatgcttctgcgttccttcaaatatacaatcactggtaattgcaagtagagataataaattccaaaatcttttgtgccaaaaagcatcattcaaaaacaagattgtaatttataaagtcctaacaaatgccttttttatttgatattttcaaatgtagaacattcataggaccaaggactct

SEQ ID NO: 48343 - DNA, 489 bp, Mus musculus
  source 1..489: mol_type = other DNA
tgcagtcactcctctgtttgcaactagatggaaactgtctccataaagatgatttcaggaaagatgattgaaaaacttgctagttgcaattttcattttccagttgacatttgagcttggttttcttttcacaaaatctttcagccatagaaaatgaataaaagcagcccagccagacatcccagctgccagaataggtgcttgggagcggctcaggggtgcaaagcacagccttgctctgttgaagccaggtactgtcctgggcaatggctgctcagctcaggaggcgaccgcctggagttacaggcacctgaggcaagatgcctgaaggaaggggccaggtcctgctcacccctcatgagcctcgatgctcctgttgagcctgggtccactgccaggtgcctgtgaccgcctggcaggggtgtcacatgcatccggggcctccggccgggaggggtcgctggggcgtcggaagccagagagcgccgt

SEQ ID NO: 48344 - DNA, 473 bp, Mus musculus
  source 1..473: mol_type = other DNA
acttcagaccaatttctcttacgaatattgatgcaaaaatactcaataaaactcaactttgcaatttaggaagacatattaggctacaatgtagtaatgtacagtccaggatgaacaggaccatgggcaagataatgtcatcccctatgtttgaaagaatagggagttttccttataaaagatagcattgtaaaccagagattttgtgaaacacatggatatatatatacacatatatatatatgtatttatgtatggaaagaaatccaggttttatacaattaaacgtataggagaaagatatttgcctctgtgatacaggaaatccctgggaaattggagtatatgtcatatgaattgactaatcctagagatttggggctaacaaaatctagaattctccagctttggaaggagaggtttccaaagaggacctctggcagttgctagtgacatcatcagtaatgccttcc

SEQ ID NO: 48345 - DNA, 282 bp, Mus musculus
  source 1..282: mol_type = other DNA
ctgtcagctagtttccagttatgcaccactgcacagaatgtgagacataatctcaccaaccatgcattcagaaggaacttagttatttctcatcacaaactaagaagacataagatgatgatgacttcagatcttcacctgaaatcaagtgtctctgtcttttacaaagttggcctttgggcatacctgtgatacagtcatgcatggtcttcatgttttctgctgtctcatgggcacatgcctcctccaatcccaactgaaatagaagtttgaagtgggata

SEQ ID NO: 48346 - DNA, 450 bp, Mus musculus
  source 1..450: mol_type = other DNA
cctcccaggtcctgatggctccagaggaccctatagcagttcccagggatcctcagaatagaagtaagaattcttgtataagcatcagttcctcctatgtataggatgagtaaggtgtcagaggtgacctctggtcattccttcaggtagcagatgaactgtcttctccagggcagcatgaaggtcctggaagtggtcctgctacatgcccaggagacagtagagcaatatctggtgtactgcagcactctgttcatggcctttacctgtgtcgtggcatgggcaaggctctgtaatctgtatatggccagatagcatcaaaggcatgatcatctttctggcaaaaccaagttagctggcagaggtggtgaccactccatcctaggtcctgccacagatgggcttgaccctatcccacttcaaacttctatttcagttgggattggagga

SEQ ID NO: 48347 - DNA, 346 bp, Mus musculus
  source 1..346: mol_type = other DNA
aatattagcctcggaaaacttgcagtcactcctctgtttgcaactagatggaaacggaaagatgattgaaaaacttgctagttgcaattttattttcttagagacagttgacatttgagctggttttctttccagcccagccagacatctcagctgccagaataggtgcgcccaggggtgcaaagcacagccttgctctgttgaagccaggtactgtcctgggcaattggctcgctcagctcaggaggcgaccacctggagctacaggcacctgtcccccaatgctcctctggcaagtgggtcacatgcatcccgggccgcccgcctggaggggtcgctggggggc

SEQ ID NO: 48348 - DNA, 386 bp, Mus musculus
  source 1..386: mol_type = other DNA
aaatacaagtacacaacgtatacatttattgacttaaaatgtctcttttaagagttggtttattctggaacagtaaataacaaatgccacaggcaactgcagttgctggtgagacgcgtagacaaagcttttcacctacgtttgaggtgtgcacacgcgcacttgagagagtgcacttgagttcgcagatgcagaactgccacccttcctggttggaaagctccttgtgcacccaggtgccgggctgagccgcgttgcttggcgacacaggggcggggccgcggggcagggaggactggctggcctctgggcgtcggtccaggaggaggcgccctcggccgggccacttctccaccagcccgtgggcatcctgcctgggctttggg

SEQ ID NO: 48349 - DNA, 429 bp, Mus musculus
  source 1..429: mol_type = other DNA
tgactattaatgtaaaatctagactggagaggatatactctgtccttattatttcttcacatcactaaggaagtgaatgtgttaggtagcaacaaacaataaaaaaaaccagggcagtttagtttagtttagtttagttatgggactcacacagatcagttgcttattttcagagcatgtccccttaagatttctgaaaattctgggtctcttactcagtggttgtactgataaaacacaaatatttaactcccttttaatgaaccagcctgaatttcttaaagcgacagaacagcttgtgctgttgcctctgctgctgctgctgctgcggtttcagcttctacttatgcggaatctgcttccaggcagctccgcatctggcctctgcttctgcttctgcttctgatgcttcggcggctgcggcagctg

SEQ ID NO: 48350 - DNA, 350 bp, Mus musculus
  source 1..350: mol_type = other DNA
gatcttctggactaatcaatttgcctaatacagtcaacagggtcttcaagagagttctaggaagaccttatctgtgccttgttttaccggctttgaagacaagaaaggccttgcatagccatagaaaacagttcgttttcactaagccctggctgttctggaactcactctggagaccagattggccgtgctggatttagaaatcaacgttgcagactctgagaaaaacactttcctcgttggggatacttaggaagcaccaccccaccctaccctccggcgtaatgcaggctgcggagcctcgggggcggggcggcgtagcgcgcaggcgccaggccaggctacttcgc

SEQ ID NO: 48351 - DNA, 242 bp, Mus musculus
  source 1..242: mol_type = other DNA
ggaacgtgggtgcggctccaccaccccatccccaactagcttgtgcttctcaccgcaagcctgaagctgctgatgagatgtgatggcttcgcacagctgcgtcagacactggaaacacctgtttgggtcacacgacccagctgagggcctcagcctgtgactgctaaggagacactgcatagatgtgtccagtggtgactactctcagggagatgacgttttcctcatgaggacaagaaaac

SEQ ID NO: 48352 - DNA, 237 bp, Mus musculus
  source 1..237: mol_type = other DNA
gatgtttttataggaacaaaacaaggaacgtgggtgcggctccaccaccccatccccaactagcttgtgcttctcaccgcaagcctgaagctgctgatgagatgtgatggcttcgcacagctgcgtcagacactggaaacacctgtttgggtcacacgacccagctgagggcctcagcctgtgactgctaaggagacactgcatagatgtgtccagtggtgactactctcagggaga

SEQ ID NO: 48353 - DNA, 118 bp, Mus musculus
  source 1..118: mol_type = other DNA
cctcaacccaaggacttggtttacagtggactttaaaaagtgatctcagaatggccttcttcacaggagactctttgaggaaggagaactctagatctttagccctcccaggcctaag

SEQ ID NO: 48354 - DNA, 300 bp, Mus musculus
  source 1..300: mol_type = other DNA
cccccccctttttaaaattaggagtgctgcagttacccccagtctaacttcctgagccctggattctggctgcatctagtaaccagggggagccctttgttagaaatcaacacctcaggggttgtcacttgaactaaattgcgttattgggtcctaaggggcagagtggctatgcctcccctccggggagggatacttgtatctccgggaccggggatggggagcgtcccctggagagcgtcctccagagtgcgttgcgcctttaaggagtcaagccaagcccactgcgcaggtgcgggg

SEQ ID NO: 48355 - DNA, 483 bp, Mus musculus
  source 1..483: mol_type = other DNA
aaggtgggagcatggcagcctccaggctgaggtgatagttctacatcttcatctgaaggcttctagcagaagactggcttccaggcagctaggatgaaggtctactggccaaagcagataatctgtattaacaggcagaacagggactaataatagctgccttaaggttgcttgagggttccattagatcacttacgtgacgtaaatattagttgctattataactgttaaatatacacggtatgtcacatgaataatcctattctccggagttgccagcactcagaatagtcgctaatgcataacggattctgacttggtgattagatacagaagtggaattacttacatctggaaataggagcagctggatttgttttgatccctggcattgcaaaaaaggcgcagaacctgttcgtcctcagcccccgctgagggttacgcactagttcagtgaccgacgcggcgcggtgacgccacgtc

SEQ ID NO: 48356 - DNA, 424 bp, Mus musculus
  source 1..424: mol_type = other DNA
tatctgaagacagctacagtgtacttacatataataataaataaatcttaaaaaaaaaaaaaaaaaaaaagaaagactcatatttgatatatctcacatggtgaccacctgatggcagcaatgagggaggtttggaaggaggtgattcagttgaatgcagaatattaagtatctattctcaatacccttcatataatggtaggttcaccctccactgttgtgtgtgcgctttacggtcctagcagcctcggtcggatcaggctgcactgactcagtcccagcgactcgctaggtgggcggggctcgcaggcgtcgaaactagccgttggctacgcatgcagaggcggggcccagagggcgcgctctgccaaagcctgggggcggggcctatgaaatagcgccttgctattggcttcctcaggaa

SEQ ID NO: 48357 - DNA, 433 bp, Mus musculus
  source 1..433: mol_type = other DNA
gtgtgagaaagagagagagagacttattcaagatcacacagaccctcaattgatcatcaagtctgttctaggaccgaccaaatctaagagatctgagtgttctttggtttcaaagactttaaagctcaacttctgtcttaaagcttattgtttaaagattaggaactaaactggcacctaggttctcctgaagatccaggtttaaaacatgaatccagatttggtttacaaagtttggtctataaactcagactgagaagccagtcctaaggtccttgggtttctgaacggttcatctgaaaagctcagttgcccgaggccaggagctcacagtactgggcgctaggacccagcgaggtcgggcagactggtgttgacagccggcaggcagagacgaccggcgctaggacccgcgggcggcggcggcgcgcgg

SEQ ID NO: 48358 - DNA, 489 bp, Mus musculus
  source 1..489: mol_type = other DNA
cagccttgatgtccttcctgaagggacattacccttccagactaagatcctcagaggtattacacaggatgacgttagctaagccattactttacagaatggcctgccttaatatataaggccaggagtcttatatattaatacattaataatattaactacattattatgtatatattaatataatataattacatcaatattaataacattaaatgtatactaatattttatatatatcagatcgagccttggctgtcctggaactcactttgtagaccaggctggcctcgacggagttctggaagcccggccaaggcagccttctggcctgggcggagctccgcgcgggagtcctgggcgggaggcggggcttcgggactgctgcagagcccgcctgaccacgccgccccggcagcgcccagagtgcccgcggcgatccggcttcccggccttcgccccgcgccgccgatagggggcgtccgcgtt

SEQ ID NO: 48359 - DNA, 317 bp, Mus musculus
  source 1..317: mol_type = other DNA
tgccatggtgcacttgaggatgtcagagcacaaccttggtgtgctcatgctcgtgcatgcatgcacacacacacacacacacactgagtatgaagtactgtaagaggcctgtgacttcctttggcactgtcttcactgacaccatgaagaattcatcctacgactcctcaggagcggatactcctttcagctcactgtgatgtgactagcttgcctccttggtggcaggactcagagggatcctttaagcctggaagctgagtcatgccagagttgcctggcaccgcaatactctggcagacagcgctgtcccagga

SEQ ID NO: 48360 - DNA, 302 bp, Mus musculus
  source 1..302: mol_type = other DNA
attaagtaacttcccatgatatgtatgtatgtatgtatgtatgtatgtactgtgccatggtgcacttgaggatgtcagagcacaacccttggtgtgctcatgctcgtgcatgcatgcacacacacacacacacacactgagtatgaagtactgtaagaggcctgtgacttcctttggcactgtcttcactgacaccatgaagaattcatcctacgactcctcaggagcggatactcctttcagctcactgtgatgtgactagcttgcctccttggtggcaggactcagagggatcctttaag

SEQ ID NO: 48361 - DNA, 448 bp, Mus musculus
  source 1..448: mol_type = other DNA
attgtggccaggcacaagcatgcatatctcattgagctgacagtatgaagctaattatgtgaagttagttagttagttagttagttagttagagactgtctctgttctgtagaccagactggccaatgctgggattaaaatgtgtgcccaacacatttgtagatgacactacaatgtttcttacacctataattgccaagaaagtcactgcagcaggaacccctttggggaagtgctggaatcccctccctacaagggaaattccggagccgccttgttcgtgttccgaacaaagcttggcaggattcttatgcctcatcagtctgacaggtttctatagcaacagttcttttttattgatatcagaataaatgggcctcccatcttgggggtttaaggcccgccctttgggggcggctgcctcagccatctaggacctgcttagcac

SEQ ID NO: 48362 - DNA, 264 bp, Mus musculus
  source 1..264: mol_type = other DNA
aggtgcccccacccccatcccaaagggtctcacatcgttttgggaagagccctactttcctaaagagatatataagaacgtaagtctatgttggtctcccagtgaacctgagtggcatatatagtgggctcagagccctcgagggcacccaagcgaaggctggagctgctgtatttggaactccttcctggtaaggtgtttaacgaggcagggagggaaatctcttccaagcagcgctcagcatgggtagggctggaagtagct

SEQ ID NO: 48363 - DNA, 511 bp, Mus musculus
  source 1..511: mol_type = other DNA
catcaggaggttacctatgtgggccttacaagttaaattacacttgccatgtcaggtattttgtgacagtaacggaaaaagtaactaataaaggctttgccttcattagagaccagaaggaatgcagccccgctgaatccttcgttttgtatctgaactacaagagaataaatttctctcattctcaagacacttttgtgataactttttacaatcaagtcgagattattttcacattcatttaaattaacacaccgtgtaacccgggtgcaggtaggacctaagcactttgattaaagaagtcttaccctttgaagggaggggttcaacgactttgaataaaaaactaacattttgttatttctcaaagaacccaagtatggtgagttaccagctgttacaggtggacaagcccctcagttgcctgggcaacggctcagggctcagtgcgcaggcgcctccggggagccaatgggcgcagtagcaaagccccggagcgggctgcgcggtt

SEQ ID NO: 48364 - DNA, 531 bp, Mus musculus
  source 1..531: mol_type = other DNA
tgtccaaatgcaatacttggatcagactagctacatcttctttctccagatctagagggagggccagtcgtgcttactttaattctgggtttaaaaggactcattgggcatcaagagtgaaaaccccaggtgtttaacaactcaggatttctgggtctgctttttaatcagaaccttctgcacagtttttcatccccggagtggaagattcccggcgagctcaccccggaggagagggccctgtgtttggcaggcacagagtttgctggctgaggacaggcagagccggctctgggccccgctggctcgggctcgcctccgcacctcgcgcctgcagtcagctgagcctccagccgccgacccgcgccattctggtccccgcccggggcgccgcggcagggggtggcacagcggcctgcgggctccgccgagtgactgcggaccgaccgcgcccgcgggaaccgcgcagcccgctccggggctttgctactgcgcccattggctccccggaggcgcctgcgcactgagccc

SEQ ID NO: 48365 - DNA, 525 bp, Mus musculus
  source 1..525: mol_type = other DNA
ttgatgctccagcatagggctatatccaggaatgtagatatataaaatctaaatcaatgagacttactctgatttttgtgtttttaaacaaattgtaggtcacaggaatttcccaaacagttttaaatattttattacattgtgtgtgtgtgtgtgtgtgagcactcacaagtatgtgcacacaccctttaccatttggattatgggaaccaaaattggtcataagggttgacagcaaacacctttattcaatgagccattttgatggcctccaaacattctagagttgaagaaaccctggagcctgtctgcagattcaatacattagttacagctgaggaaatcaatagattctgtaaagaggaattgtgtgttaatgaagccttcattgcagtctgtgcttaatgaagctcaaatccttaagtcctccctgaatgatgtgacaactttaccttttgcatgaatctttctaccaagcatttagaataatctttctataactgaaatgttttagcagtttctgtc

SEQ ID NO: 48366 - DNA, 286 bp, Mus musculus
  source 1..286: mol_type = other DNA
ccatatttgtcttaaaagccatcttatattaaagaaaactaggtttattcatgtttatgatttaaacttatgtctcaagaaagaagttgtttattataaactacctttgttcaaaagggttgttatagctaccttggcatgaccactttgtatgaatcaaaaggcttgctttaatacattctcaatcaaaagcttaagtttgaaatttctcttgttgaccagaggcaaagtgcctcagtttacttaggacattgaacaacataatgcctctgcctttatctgagag

SEQ ID NO: 48367 - DNA, 392 bp, Mus musculus
  source 1..392: mol_type = other DNA
ctggcagatacaaactgaataacacaggttttttaaaggtaagttatcccttagagcaattaccagaatgtgagagttcccctcaaaaagaatctcttctaatgcaagactatgttcttctagaaatcttcactaacaactctgactttctacatttagactctgaaaagaccaaggagctctgagatctagttcatacttagagtaaatgtgcctggtctccagtcgagctgaggtcttgaaccccatgggacccgtgggtggtaatttccatctacatgggatggtaggcattcccccatatctcctggactcctgttgaagttaccacccccagaactcctacaggagaagctgtggctataggtcacatacagaatgcccctagcttc

SEQ ID NO: 48368 - DNA, 367 bp, Mus musculus
  source 1..367: mol_type = other DNA
aactgcagtttttgtgaaaattgtgggtttttccctcatgcatcattaaacccagaacatgtttaggttcagaaatggctaagtcaatgatttttttttccagcattcacatggcatctatggaatatattgagaaaatgattttgaattaaaatgaacagaggaaggtcatctctagctatcattcaattattcaaaagtcttcgttgggatgtcatgaggccattcgagaaaagctttcatttcaagagaaaaacagtcgtgtttctttttccatttgttaaaggctaaagactgtgatttatgacaattatttccttcaaaggggagtctcaccttagatgccgccccttaccgcaggttgctg

SEQ ID NO: 48369 - DNA, 410 bp, Mus musculus
  source 1..410: mol_type = other DNA
gctgcgggaaaccagtcctgccccggggtgctgctttcccctgccccgggtgagaggcgcacccttcttcccgaatccgggggttgggaaatatctcccagaggtagattcgaacggccgctgggctttgtctaggtgcaccccgtcaagacaccgtccaggtggtgaggccttacggccggatccatgaacgaggtcagggatctctccgaatccgtacttcgtcttaccctggatggcagctggtctcccctaggcacgcctggagagtggaagccggagcccagcacggccgctttaagagacgcgcgcccccgccggcggcagctcggggatgcgcgtcaccgcgcgcccgtgcttgcgcgcccccgccgccgcgcgcccccagctcgctcgctcgcccgctcgcc

SEQ ID NO: 48370 - DNA, 433 bp, Mus musculus
  source 1..433: mol_type = other DNA
ttctgaactcaggtacattttaaatacaactctgagacaggagttcttctaattagtggatgtagatatgtttacccacttaaataatccaattgtaatgtccagggcattgcttaactaaggctcttaaatcgagtgctgagacagatttaatagtgggagaccgtgtctctcttagagtggcatgatacttaatccatcttcagagactgcattaatggagcaatcattcagtcctgaaaggttgctgggattctcatcagctgctactgtgccctgtactgtgcccagggacacttttcatgatgatggccgcttgcctatgtttggctaaacataaaagctgctgaaatatctgtctcagaattgattcccccacagctagcagctaaggttccctcttgtactctttcagacagaacaagattgtcaa

SEQ ID NO: 48371 - DNA, 360 bp, Mus musculus
  source 1..360: mol_type = other DNA
tacaaaacacaaaatgttcttttgttgtggaaaaaaaaaatgtggcgaaataatacctctattgagagagtagcattataagtcatagtccatgcctttactcccatgatttaaaggactagccaggtctacatagtgagaccataaaggacacactgagttcaaagtgtctaaattcggtgctacatttaatgtaggtaacctaggaggaaaaactcacttaaatgtgttctgttttatctataagcaaagaatttcaaggaataaaatgaagcgtaagggtacacttctgcacacacggaacattccaaagactttataacatatgcagagaccactttttaaaagcttgagctatca

SEQ ID NO: 48372 - DNA, 406 bp, Mus musculus
  source 1..406: mol_type = other DNA
atccttctttttattttagaaaaacacaaaacccggttcggcagaattcagctcttttcaatctgctccttaaacaggtggagattggacctgcagagcccaaatcagcaattcggatcgattagcttctcaaagagccctaggcctctagtgggccagagagctgcagccaggtccccaggaccccggcacgccgcctgccctcccggactcttcgaggtcgtccttaggcggcggggagctctctctcgacctccggttgcttttgcataaattaatatttccccataatgaggtaattatcacacggtgcccagttcggctgcgcagggctaagaggggccctttgaggtagcgcgtcggggacaccccgccttccggtttgggtttgggcggcccccacctc

SEQ ID NO: 48373 - DNA, 324 bp, Mus musculus
  source 1..324: mol_type = other DNA
acagtaaattcgaattccttccctcagatcttcatggaggaaggaagggctgggacaaatagccgaacttcaccatacattaattcactctgatttgatgcattctcactgaattcctctttctgtgacctttggacgcctgcagaaagcctggtttttctttattttccctccccacccctggagggaaaaaaaaaaactttttgtccccgggaggggaaaagtgaagctcttttggggcgcaccgcggaggcgccttcttcagcggctgcagatggcatccggctgcgggctccgggctcgctgggtctgcgctcagctcgc

SEQ ID NO: 48374 - DNA, 398 bp, Mus musculus
  source 1..398: mol_type = other DNA
catttataaaaagcagcttacaagctgaagactaggtctttaactggttttctgatgccgctggccagctccgaaaggaaggattccagaataaaggcatcatctgtattaataatgacatcatttatattaataatgacaattccacaaacagtaaattcgaattccttccctcagatcttcatggaggaaggaagggctgggacaaatagccgaacttcaccatacattaattcactctgatttgatgcattctcactgaattcctctttctgtgacctttggacgcctgcagaaagcctggtttttctttattttccctccccacccctggagggaaaaaaaaaaactttttgtccccgggaggggaaaagtgaagctcttttggggcgcaccgc

SEQ ID NO: 48375 - DNA, 308 bp, Mus musculus
  source 1..308: mol_type = other DNA
acaattaaactgatgaattaaatgaataaaactgttctttatcagtcaaagaaaatgttaaatctaaaaaatccctgacacaaaatatctaggaaatctggatactatgaaatcttggatactaagaataataggaatagaagaagaagaatcctagttccaaaactccaaaaatattttcaataaaatcatagaagaaaattaaattggttgagaaaagaaaatctttataccaaataattgcagcctctaagaaaagcaatattgattacaggaattaacaatcattggtcactaatatctctgaa

SEQ ID NO: 48376 - DNA, 343 bp, Mus musculus
  source 1..343: mol_type = other DNA
acagaactaagttgctgcagtttattatttccagcaaagttcgactcaggctggagtggaaactgcttgttagtggacttgaattaccctttatattctagacccagattatttacctgcttggtaccaggctggaataagatcaactgattctagttccagctgatctggtgtctttgtcatagaaaagtcacgagagggaatgcgtgtctcccctagccggcagccttcgtgatgaggacattaccccggagcctggagcagattgcgcgcccgcgcgcaggatctggaccaatgtgcgaaggctgtgcggctagccaatgacagcctggccctgatggct

SEQ ID NO: 48377 - DNA, 352 bp, Mus musculus
  source 1..352: mol_type = other DNA
gtgagtctcagagatttgagtgtccccacacagaacagacactaagagaggccagagttccatggaggcttcacctccttacagaccctgctggccagcaagctgttgaatgcatctatatttcacctggaatcccctcccagctaccaactccagagctcgcaggaaggcaaggggttccttcaatgcccgaaaggtgccggacacctgtcctcccttcaggaatgaagttcctctgacctacgctccccagggtcagaagccacttctggtggtgagcggctcacccgggacccggggtgagtggggagcgccggcagccatcagggccaggctgtcattggctagccgc

SEQ ID NO: 48378 - DNA, 554 bp, Mus musculus
  source 1..554: mol_type = other DNA
aaccctgtctatacatacatacatacatatataaacaaataaataagattgtcagtagtgaccagagacagcactgacaggccagtgtgcatcctgatgacttcagcaattactagacatgttgtctatgaattagattcactcaacttagataaagaatctagtgttgtctataaattagattcattcgactgagataaagaatccaaactgtgaatctagcttcactaaccttacaaatgggttctcattgtttgacttagacacagaaccctaagctacactgcccatcagtcacagtgacctttgtgcttctctgttctgatcagcacacaatgattccatcatcaagtgtcactttctgaaggatgcttcacctgatagctttaaacacttacctaactaatgttagctgactaagaattgtgtcaaatcctgatagctgtcctatttccactcaaatgttgattaaacgtgtgattcaacactggggaaaagtttttcaagtgtcattattcagttgccatggaatgaatgacaatagtaacagctgt

SEQ ID NO: 48379 - DNA, 517 bp, Mus musculus
  source 1..517: mol_type = other DNA
gctagaaaataactgatgatgttgttactatgttgtgtccagatgtctacatgagacctcttactgtgctgagcagagtgctcactcagggcagagggagtacagggattccctctgtaattcagtacagaggaatctctctgtgaaggctggcccaccctcgaaatgagtgccacttctttctgaaaaaagaaagaaatttgagtcttgtttaagcctctgctttttaattcacaagtcttcattaacactgtcatgatgaatgagcaccaagttataataatgattatttatggacagtgcatgacttttccaaatgggtcatgcataacacccatgcatttccataaaaacaagggcagtttttaaaagcaaacatacatttgcctcatctatgcaaatctattagaggatttaatgaaataccctaaacatgcaagttcctggcttgtgttcagctcaccttagctcatgatgcagcgtgcttgtgcaaagcagcctgcacttgcagttgtga

SEQ ID NO: 48380 - DNA, 684 bp, Mus musculus
  source 1..684: mol_type = other DNA
gtttctctgtgtagccctggctgtcctggaactcactttgtagaccagactggcctcgactgcagtgctgggactaaaggcgagcgcattcactgcccgactccccccccccccccgggaggggggtggtttatttcattagaagagatgacactataacctgcagtgtgttctaaacttccctttaagaagcagtttttgaaaagcaaagttctggattccgggacctgagccctgggtcctgagtgacgctccccagacaggccagagctcaggaagggaggatggcttgccgcgcccgcctctcgagacccacggcggcagtggccgcgcccccgtcccaccggagcgcacggtcggggcagcccgggacagaggtcacctggagcgtcaggcgcggagccccgcgagcgcgcgcagcccgaagctcacctggcggctggccgcggcctccagggcggcctgtgggcgcgggcagggcgggacggcggtgtccccgggcccagccgccgccgcccgccctcccgccgcccgtctcgcccttcacccgccggccgctccgcgccccaggagagcggcgagcgcgggtccgcggcggcgcggcgcgcgcgccggcgcgactcaaaagtcggagagggcggcgggcgccgccgcctcctcctccatgattcgccgccaaccgcc

SEQ ID NO: 48381 - DNA, 367 bp, Mus musculus
  source 1..367: mol_type = other DNA
caaaaagcaactgtcctttgataaacactcagcagattccttgacacatttctaaatgtgtctcacagaaattgtgtttctgctttatttatttaagacaagctcttactatattatggaaacattttcatatgcacttttgcgttcattttaacatttgaaaggttttttgtacttcaacagagatgttggtcacatctgtcttactaaacctgtaagcctgaggctctgagcaggctaaaaagatgctgcaactttaaagtgatacactgattttgtagctttcaagttcgcaggacacagtgtgaccttcagttgtgggcactcaagtgcacgttcctggctggccaagcagcaggggctcgat

SEQ ID NO: 48382 - DNA, 486 bp, Mus musculus
  source 1..486: mol_type = other DNA
tgctgtgataaaacgccatgaccaaagcagctcatgagtctaatttggtttgcactttctgtgaggtcagaaattctcaaacctaccccgcctaaagcagggtttacacctttttatggttccttaaggtgtccaaacagcaccaccaatggggaccatgtggtcaaatattgaaactcagtgggacatttctcattgtgtcacacagtaggatttatagataaatcactgaattaataattggaaacacggggtactcttttcttagaatagtgtttgtctacaatctggaccaaaagaatctctccaagagtattgaaacaaagatgtccctggaaaactgtttttattgtttttatattttaaaaccctatccgttgcaaatattatataaaacagcgccaggtgctcccgccgatgtccagcaggggacgctgcgggcggcggagccagagacgcgaccggaagtcagactggcggctctgg

SEQ ID NO: 48383 - DNA, 748 bp, Mus musculus
  source 1..748: mol_type = other DNA
cactgagttttttttaattatgaacactatgaaaattcaaattccaaaaaagtgggctatagctcaatatacattttgtgtatcctaattattgtctcagtcagtaatgattacaataatcatattgataactcctaaaactaaaattcatttttaaaagtaagattatttttcaggtagtgtgcaagagcactctgcctaaattgttacatcctttaattaaaattcattcttaaaagtaagaatatttttcaggtccaccctacacatgtgttggtgcatgtgtgaacagaagcaaagtgtacttttgtaatacaacatgatgcaaatgttagactagacacactgtggctaaatggtacacagactatgcacaatgtcatgatgatggtaattatgctcacgattgctaagatgcactttataaaattaccaagtaaatgtcacttaagaaaggatgtgtcttatccaaccttacacgattaaactatggtataacacatatgcttagatgttacaaaatatgaatgattatgatattgtaacatccactgacatcttgctcaatgtacttaagaaattattgattaataatgataaattgtgcttaaactttgtagatattaatattttatgtaagtcgggtattgtgtatcaatttaaaaataccaagaaagctagttttgaatgtgtccttttaaattttacttagaaggcttcgtgttatatcagcaacattataagataa

SEQ ID NO: 48384 - DNA, 373 bp, Mus musculus
  source 1..373: mol_type = other DNA
gtgacggagcacgcgtcgtcctgcagggacgcggtggccaggatgcagcagcttcactgcagcacaggacaaattctgcgcctctgccccgccgctgcgcgcgcgcccccgtccccggcctatcctgaccctgcggtcactatggagggggcggtgtctaagcacagctgtgacgtccgctgtgagctctgctctcacagagtgtgtgggtcgcgacttcctgtctgcggcaggacgtcacgcccgctcgcccgtgactgacgggaacgacgtttcattttttttttttaataaacgaacgcgatgacgcggccggcgtggccgtggccgcccatcacccgcaatcgaaggggaccatgggcgcggtcggggc

SEQ ID NO: 48385 - DNA, 532 bp, Mus musculus
  source 1..532: mol_type = other DNA
aagtatttcctttcataatcgaatttagattttctcaagccctggctgttctggaactcactctgtagaccaggctagcctagatgcggcaattgtctttatcaacaacctgttaacaatagtgataagcatgtatttaatccttcaatgtccatttgtgatggagaccatcacctccacacccagccctacctatagggtgcagggagtgcactaggcaagttgcttttacagggtccacgatagagttacctctaggagagaacagaggcagagaatgaatctggcgtcgtcctgtttctctcctgcgaggagctgaatggggtgatgaccccattccacttcgaaagtctgtagaacttccgattcgaaaaaccgagttcggtcgctcgacgccggacctggtgcctaacaggcagggggcgtgctccggggggggcgtgccggagcgcgccccgcccccgcccccgcccccgccccccagccccgccccccgccccgcccccgcccgggcgccgctgcctcctccgcg

SEQ ID NO: 48386 - DNA, 156 bp, Mus musculus
  source 1..156: mol_type = other DNA
agtaaggctcttagagccagggacagcgtccggagctctttctaacctaggcagaagcagccccggggcaggaatcccagggctgcttcccacctccggaccctgggccaagccactccgaggatttttcgctcttgaagacattaacagtggcat

SEQ ID NO: 48387 - DNA, 383 bp, Mus musculus
  source 1..383: mol_type = other DNA
gtgggcacctatgtggtatcctatgaagtggcacataggatgctatcaagcacatttaaatcttataaacataagtttataaatgtagacaatagaaacaagaaaaaatgaacacttcttttagatcacattgacaatatatgtttatgttctacacagtttgattatatattattttcattttagattgatatttaaaaataagtaattatattccagagcatacaacttagatttttaatagcaagagaagtcaacagattctaaatctaaaccaatatattctatcttaaagcatgttcatctatgtagctaaatgttagcaccctattttacatgtatattgtgactctaaacatttttttgatggagatggccatcaa

SEQ ID NO: 48388 - DNA, 389 bp, Mus musculus
  source 1..389: mol_type = other DNA
agataaattttacagacaaattttatactttcaatgggaatgccaagttttcctttgagtaattagaccaaattacatacctgctattcatatatatttatttctaggtctgatttctcagtttaaaagtgttgaaaagtgatgacaattcaaatccagactaataaaatcatattgtgaaatgttagaaatacaagtcatagaatataaaggtgtataatgtggaagttttgcaatgtggctgcaagctttaatatgcttgatagaggtcaccaaatgataaagactttctggtgagtccccatctaagtcatttttagttaattaaaaatgtttggaggctaactaatgttcctagctcagctctgcttctccagcaacagtccagg

SEQ ID NO: 48389 - DNA, 520 bp, Mus musculus
  source 1..520: mol_type = other DNA
tcttttctacatttggaaagcaagcatacgtggcaacgatggattgcccacaagaaaatatataatcatgactacaagatagcatagtctatcctttatctgaagaaaaagcagatttatctctgagcaagtaaaactttcgtaagctcaggaatttccacttcaggttacagaagtagctgtttacatcatttgctaaagtaaataaaggtaaggagacgttaggttttgttatattttaaagacaaagtctttctccacagctgaggacagagctcctgatcctctgccgcccaggtgctgaaattgagcggtctctttgcaaacctttaaaagttttgtaactaacgtctcctaacaaattctcaacttgcacatttctaagtattcagatattatggtgacattctgaagagttctatgaatattttctacagagagctataggtcctccccggaatgtcctggggaatctggccggagcgtctgacctctgacatcaggcaccgggcggaaacgc

SEQ ID NO: 48390 - DNA, 383 bp, Mus musculus
  source 1..383: mol_type = other DNA
tcttagtggcatttcaacattaaaaagtatcaggtggatctgagttcaagctgatctatagctggagttccactttacctcagtgctcagtgacaagggcatcagctaaggaggttagtgattccctttctaagcaaaggatacaatgtgtatataaactttatttacttgtttatgcgagtatccataggacactccctgagttttcatcaacagcagaaacccagaagagttctgagctatgctctgttttttcggtcttctggagtcttttcttccacaaaagacttttatctaccgtaaaaagccggcctctccgcggctcgccccgcccctagccccgccccgccctctggccgcaggcctctgcggcggcctaggcg

SEQ ID NO: 48391 - DNA, 428 bp, Mus musculus
  source 1..428: mol_type = other DNA
gaatgcaattccatagtcaagagctcttccatctgccaaaagctttggcgttgcaaattttattcttagaaagcttccacacgaaaaaagtctatttcatgatgtcagggacctgtcccttcccgggaacgttctctgggcactcttagcaccccaagttccctggcggatgcagcagcaacctggggcctgagcgcggggtccggctgctctaggcggcgcacggtcccgtctgcagttcgctagctccctccggggcccagtccctgggggcggctagggcttcctgcctccctgcccccaccgcggcctcgcggcaagtctgcaggacacagtccggattgtcccaggactcccggctcgggtcccgcccccctaggggcctgaacgatccatggttgactgacagccggtgaccaccgcaccct

SEQ ID NO: 48392 - DNA, 283 bp, Mus musculus
  source 1..283: mol_type = other DNA
tctctctctctctctctcacacacacacacacacacacacacacacacacacctcagtctctgtgttttgccttttggtgcaactctccccctccggagcggaaataataataataataataataataataatatgaagaagaagtttcccggccccagaggcttccctctgcgagcggtggcggggctccgggtctccctgccagggccggcctgcacgctgagccgtggggagcaccgcgcggctggccgcggactcaggcaattcaatctttcattccgt

SEQ ID NO: 48393 - DNA, 451 bp, Mus musculus
  source 1..451: mol_type = other DNA
gccaaagcatttagctctgctaaagttatgtgcctcaggattcctcagggggtgctaagaccccaggatcctgggctccctgtggtgaggacaaaggctatgcttggattctcccctatgtgcaagctctacctggttcaggatatgggagaagatgtctaaactcttgtcaattctacagtctcaaaggtcagagcttatacctcagggtcatggggacccctgaatgctcaggaggatatacagctttccagtaagctggttctcagaagcacactgcttaatgagacaatatgtgtgtttaacatgaaccttcactgagtgtttactataaatcaggcataagtaaattctttaattattcacattttacatctttttaaaagccttctatattgagatgtgaaatcatttccctaaagtccagaatcacaactgaatctgggcatct

SEQ ID NO: 48394 - DNA, 627 bp, Mus musculus
  source 1..627: mol_type = other DNA
aacccggaacacactcagtgaggtgttgggggagcgtccagagccacaggaggatctgagcgccccgtgtttccaagcgcaccgtttgggggcggaaggaggagcgcggtgacacctgccgcgcctgtcgggcgactcaggagggttgtgcccctggagatcccctggatcctccacgctcctgcagttgggtgggtggacgcgtgtccaccagacccgcagctacgtgaccccgggggagggtggcgcacgccaggtgcgcagggcacttgatactctggcggagccagggtggcctgagcctgccgcagctgctgggaacggtcggcggttcgccagcggcggaggagctgacaccctagtcctagtaaggctaccgcgctgggtcctccggagtcggagactccggccctgcacctcgccgcccgcgcaggtcgcggcagagaggtcgccggtgtcctgggacccacgctgcgcccctcagcgtcggcgccggaggagggctcgctcgggagcccgcgcagtactggaccccgtggcggagggggcggagcggggaggagactgcggctcggccgagcacggcgcagccttgggcgggcggccggccggcgtgacgcggcggga

SEQ ID NO: 48395 - DNA, 530 bp, Mus musculus
  source 1..530: mol_type = other DNA
cactcattctcaaggctctgaaagtcagtgtccttcccctcctctcaggcaggaaggcaggtttgactttcagtctctgtttgagaaatcttaaaaagatgtctagcatttttctccaaagaaaaatggtgcacaaacacagctgcatgacccatctttttaatagggaaatgggaagataccttctgaagaccattgtagtatttattatttaaaaaaaaatcactagccaatttcaaaggtcagtctttaaaaagaatcttgaatcatagaattcaaagggaggaaaatggatattaggttggtgatcaccacatcaatcttacattcatggaattcattcatatattactaaatcaataagagaagcattactactcccagctggcacctgcctgccttggttaaagacatagtggatcatctcctgtttgtcacttcatgaggtaagcagcttagtaaattatgaccttactctattagtttgtgcagaaactgaagggccatgaagctgagcttaagccccaccc

SEQ ID NO: 48396 - DNA, 235 bp, Mus musculus
  source 1..235: mol_type = other DNA
ggtgccaatatctgttagctcatttaaaatatataccttaaagcaatttgtttccattttcagtttgctagaaaatttacatgcaaggtgaaatatacttttgctgagttctaaaaatgcatgtacaaggatcaccacaggtttatttaggtgatgagcctggatacagtcaaggccgggcccggcatggaggaggagcgggcggagtcaccgcaccgccggcggcggcggagga

SEQ ID NO: 48397 - DNA, 525 bp, Mus musculus
  source 1..525: mol_type = other DNA
caatacatagcatagtgttaacgcttggagctgcatcaccagcagctgagactgagctcaagcaatacatctgttgaatttttaaataggacaggtgaggactcttaaaatgctaaagctgccatttaggtaaacatgattcccaaaacctttgccacaaacaagcgtagtttattaaaaccacacaactgtatgaaaatagaaaattctggaaataaagaacgcagtgcagaatgccagcatttcttcctgaaacagtccctggccggccttaaggacacgcaaggtccaccacggccgtcctgcggtcactgtgctccgagatcacggagcgaggcgcaggtcaccgcggtccgaaggcgtccctctggagccggtccccgacctgcttcctccgctcaggagcactgctgagagcttgggagagcatccggaagcggcgggctgtcccagcctgactccgcccaccaggttggcgggactacaagccccaagaggcacagtgcggctacaatgccccaccgg

SEQ ID NO: 48398 - DNA, 433 bp, Mus musculus
  source 1..433: mol_type = other DNA
gagccctgtgcagcgcagagagctggcggtattgccaacagatcgctgtcaaggacattgactacggcctcccgctctgcagaggcagcaaggcgcagggccggctgggcgggactgactattccatactcccggaggccgccagaactgggagcttcgtcccacccgggcggcctgatgagaggcaagccgaggccacgcttccgctcgtgcgaggaaactccgaggccgtagggtcgccggggtcggatacctgatggctgccgccagaggaaaggaagaaggctttctcccacaccggtggggcattgtagccgcactgtgcctcttggggcttgtagtcccgccaacctggtgggcggagtcaggctgggacagcccgccgcttccggatgctctcccaagctctcagcagtgctcctgagcggaggaa

SEQ ID NO: 48399 - DNA, 382 bp, Mus musculus
  source 1..382: mol_type = other DNA
gagccctgtgcagcgcagagagctggcggtattgccaacagatcgctgtcaaggacattgactacggcctcccgctctgcagaggcagcaaggcgcagggccggctgggcgggactgactattccatactcccggaggccgccagaactgggagcttcgtcccacccgggcggcctgatgagaggcaagccgaggccacgcttccgctcgtgcgaggaaactccgaggccgtagggtcgccggggtcggatacctgatggctgccgccagaggaaaggaagaaggctttctcccacaccggtggggcattgtagccgcactgtgcctcttggggcttgtagtcccgccaacctggtgggcggagtcaggctgggacagcccg

SEQ ID NO: 48400 - DNA, 302 bp, Mus musculus
  source 1..302: mol_type = other DNA
aagtcctgtcaaaatcattggctcaaggttttccacatccttttcaataacaagtgaacctgaacagaatcccagtctgggaggaaaaacctgttaggggtcttttcttttggggaggagtcaaagtcctcgccaggagagtacctgggaagaacttcccctggtcaccccgggctccacctgccccagtggcgcccggttgcctcggctccgcccggcgcggcgtccccaggccaagccggggtcgctcggggctcccgggccgcggcccccaggtgcggcgggggaggggcgcggggcgg

SEQ ID NO: 48401 - DNA, 259 bp, Mus musculus
  source 1..259: mol_type = other DNA
catgggctcagccaaacaatgtgtctttcaggcacagtggcagctgcccgggcccacgcgaaggtgggtcctgcgcgagcacgagctggtggtgcaccagcccaggactcagctttgcgcgcgcacctcacaggtcctcgagcgggcacgcgccggcgggggcggggctaaatcgcgtcgcgggctcgcgggcgcgacaccgcgaggccgacgtggggctcgcgctgtcgcgggctctcagggcaggcagggcgagcgc

SEQ ID NO: 48402 - DNA, 436 bp, Mus musculus
  source 1..436: mol_type = other DNA
ttactaatattgatgcaaaaatactcaatccttattgctcaactttgcaatttaggaagacagctacaatgtagtaatgtacagtccaggatgactgctctttgagaacaggaccatgtgcaagattgcccctatgtttgaaagaatagggagtgttccttataaaagataattttgtgaagcacatggatatatatatatatatatatatatatatatatatacatacatacatacatatatatgtatgtatttatgtatggaaagaaaatatcatccaggttttatacaattaaacgtataggagaacaggaaatccctgggaaattgtatatgtcatatgaattgactaatcctagagatttggggctaacaaaatctagaattctccagctttggaaggagaggtttccttgctagtgacattatcagtaat

SEQ ID NO: 48403 - DNA, 436 bp, Mus musculus
  source 1..436: mol_type = other DNA
ataataaaatagtaataaaatctcatccggctttccaggttgtaaggtttcccatcctgcagggcaaaactcccaggctttgggagaaacactcagtggttccgccccggcgcctggccgcctcactccaggggtttcccccagggaatttcacaaaggcatgcttctcagcaggaaatttggtggggctcctttgattctttatccgagggccaggcctctagcgagaggggtaccccggaccctagggcagggcgcgaactccagtgtgcccagagctgcacgcgcgccgagggtcctgccagcccttgaggtcacctcctgcagcgtcgtagcctacactggagactagaccagacctctcagagtcgctgattggtcagtggccgatagccaatcagcgcgctgggcgggcccgtattgcggaccagaggtc

SEQ ID NO: 48404 - DNA, 276 bp, Mus musculus
  source 1..276: mol_type = other DNA
actatcctattgtctgaaacaaaggcccctcagccctaccaatattaggtgggtggtagatggactgggaatccgggccactctaagcatatgcagcaagaggctgcaagctgcttgggggctggccccggatctcaggaccagagtctaagctggcttgctaccctgggctgggctgggcagggcttcgctgcgctgggctgggctgactggggggctgggctgggctgggctgggcttgggctgggcgggccgacctcaccacccatctgctcc

SEQ ID NO: 48405 - DNA, 313 bp, Mus musculus
  source 1..313: mol_type = other DNA
atgctgatcgtataacctgatctatcaattgaaataaaggatcattcacattgaagagacccaggctgactttgcactatagcattgcttcaaataaaactattttgcttttgcatatttggataacgcaggttcccggtttctgacttcactgtttggggacaaactgtcttttcgatctttgtattaccagcgttcaaagattgcaagaaataaagtttatttgagcgtcgacgtggcagcgatgattggccagcgcttgcgggctgcgggcgttcctaagccgcgattggctccgtccgccgtccgtcgg

SEQ ID NO: 48406 - DNA, 277 bp, Mus musculus
  source 1..277: mol_type = other DNA
ctcagatttttccactgtgaaatatggtatgatttttgcaatagacattaagtcatttgtctaagtttacaggcaggaatgacagctcagattttaactctgtattcatgacactatcctattgtctgaaacaaaggcccctcagccctaccaatattaggtgggtggtagatggactgggaatccgggccactctaagcatatgcagcaagaggctgcaagctgcttgggggctggccccggatctcaggaccagagtctaagctggcttgctacc

SEQ ID NO: 48407 - DNA, 337 bp, Mus musculus
  source 1..337: mol_type = other DNA
ccagagttctagaaatgttctttagtagttacacactatagttacgatttatagattttatatatttttagtatgttcactttttaagaagtccacataagtagctccccagttaggagtgggctgtgatggccataagacagtttcagtctggtaggacgcatcctgcctttctgacacggcccagaatcacaggtctcccccgcgtcccgagactcttccctgaacctgaggtgaggagcaaacacgtcagaactgagttctgcggcccgggcaagaggacactcagttcactctcctctcgagaaccgaggaccgggctcatgcaacgcgcagg

SEQ ID NO: 48408 - DNA, 469 bp, Mus musculus
  source 1..469: mol_type = other DNA
gagacagtggaggctgcccatctgcctagcttccatttctttcctggaaagtagacagatgtattcacatcttctgcctattatcaagtatttgtttatttttctatgtagacaaagttggtatacctctctagttgggactaaatgtgcacactaccaccacacctggtctgagtgtttatcgctattaacaggcctgatgcatcaccgagtggaaagcatttctagtctctccagtagatattccagctgggcgcgaacacagatgacctgggatgggttcttcacccatttgtggttgggattaattcccagtaatcctaattcagatccaattccttactcgggtcagagtaacactggcaatgtatttctgacctcagcgaaatatcgggagtcccgcagaccgcaaatcccgcgactgtgtggctcctgaggggcgggttccgaatggactccaccccttggc

SEQ ID NO: 48409 - DNA, 368 bp, Mus musculus
  source 1..368: mol_type = other DNA
ctttttacctaaagcgtctataagcacagtccctcgtttatttaaagcaaggtatcagtatgcacccctgataacctgagtctactgtgtacactgggctgacctcaaattcagagggctctgcctctgtctcctgggattaaaggcaggcctgctctgtatagccctggctgtcctggactgtagaccaggctggcctctaaccttaaaaaaagatttttttttcatgttcatatgtacatggcacatgtgtgacatggaatgtcttcctcagaagtatatgctttataaggttaactttgcaacccaaggttacaaattcccagagcggtaatctctctgagactgctgggaagtgtgtcagattt

SEQ ID NO: 48410 - DNA, 471 bp, Mus musculus
  source 1..471: mol_type = other DNA
aatctttcagaactgctgaaaggaccaagaaactgcaggttcttttgaaattgcaaagtacctttactaagggtacaaagcaggtttttaaactaccaaagtgcttgcttttcaatcggatttgtaacctgatttcgctattgcattcaagcaaacagcttgttcaacgttattgtagcatttaagctattatcttcagtggggtgctgggaggtgagaatccgggatagtattttccctccctatgtctgggacgggaaaggagaggacgggccttataaggtcccttgagctccggcggcccaagctgggcgagcagagcaatccactcacagctccacgctctgcggcacggccttctctgcggccagggcgggcaagccagggcgggggcctcggggcctggccctcccgccggctccggcccggccccctcctcttcctctcatgagcggaagtgacgaaggtatt

SEQ ID NO: 48411 - DNA, 383 bp, Mus musculus
  source 1..383: mol_type = other DNA
ttctagagtaaggctacattctttaggtgagaatagttacttatgtacattcagaggacgctgattctgtgctgccatcctttgagataaaaggcattctgcatggactgagggattcatcccagctaagcctatagttgtactctgagtatcaccttgtgtaggccaaaagacaacttgacagagtatgttctctcccagaggtcgtcaggtatggcggcatgccctccaacccgctgctggcaccgggtggggcgtgcctcctctccagaagacgccaccgccgtctcattttacttcgcgggcgagagcgaggctgctttgcggctgccgtaaagtgcggctggccccgcccccggcgcttctcctgtgacgcaggcggg

SEQ ID NO: 48412 - DNA, 277 bp, Mus musculus
  source 1..277: mol_type = other DNA
gtgtgtaacacagtttgaaatgaaagtaaaacaccttcctttaaaattgtgttactaggtgcgttaaaaagcaatgccccttgctctacagggcttctatagaacagcaatttaattcctaagcttacttggctttgcaattatgtagaatttacagagtcagaattggtcctggcgaagcgacccaatcccggcccatgctgggtcctcgcgttcgcttgggccctgatccacgcctgaacgcctgcaagaataccttcgtcacttccgctcatga

SEQ ID NO: 48413 - DNA, 611 bp, Mus musculus
  source 1..611: mol_type = other DNA
gtccccacaaatctggagcctcttaaattaggggtcttcaaagtcacctggtgtgtttctgcagctgaaactgaaagaccagaggaaatggttggttttggaaatccatctttctgacagccttacaagtggatatttaatatggaaaaccccaaactcaaaatttatcatgtttctggagtcgtatgtatagcacattatattttatatgctcttatgtacatgtagctaattaatagccactatttgtgggtagatagtgtgactattagaattactttttaaagtttatctgatcaccttgttgcacaattgccaaagttctggaccaatgttactggggcttggaaattaaggcactgtgctgtgtcacacacagttgacagtggcgtcgcaggatgaaagtctcccgcacgccgcaggcactcagctgaagaccgccagcagcaccggcgccctgtggcactcccggcgctcggttgccctcccgtgcgcattggaagagaaagcggaaggggcgggccgatcggccggaggcttccgcagaggggacgtcgcgtcgtgtgcccgccggccgcttgggggcgctcttccgggcttcaggctctgtg

SEQ ID NO: 48414 - DNA, 461 bp, Mus musculus
  source 1..461: mol_type = other DNA
agaggcatcaggtgacctgggggtcccctagaactagaggagccacccagcgtgggtgctgtgaaccaggcttgggcctctgccagagcacgtcacactcttgtggcctgtcacaccagccttagataataccaagttgagaatcaactttttgaaggcggcactggaccacttggggctggagttgccccttgtctcctaactgctgaaccgtctacagatccagtattttgagaaaagatctaaattactagtttacttttcaatcaagcaatccttaagcaatccttttttgcctcggactcccaagtagctagaactagagacatgggagttgtttagtaaagactttttttttttttggagacatctaaggtttctttttaaagttttaattttatcattctattttttgtggataatgaaattaatcgtaaaggaaaaaacaagttctcgcgaga

SEQ ID NO: 48415 - DNA, 218 bp, Mus musculus
  source 1..218: mol_type = other DNA
ctacatggtggaaagggagcactgtctcctcagaaatatatcttatacaaataaacttttttaaaaactgtagtatagtggattccatccctgaaaatcacatggtaaaggccatgtaagtgcctcaaatacttagttctatatagccacctgaggggcgcagcgtcccgcccgagcttgggggcggtccaagcagctagcaccctcgcgccgcccat

SEQ ID NO: 48416 - DNA, 382 bp, Mus musculus
  source 1..382: mol_type = other DNA
ccaaaggactgctttacttttaagcatattgttaaaatgtaagcttaattagttttggacagtgtccatggttgtttaatttcaccaataaactttaattaaatctttttttagtgaccaaggattttctctcaaggtttagaaataaagccaactttcataaatggcaagaattttgctgatgagttttttcctcagtatgcttataaaacaactcatttcaataaagctgtttaataagcagagtgatacacagatacatgtgtgttggtcttcgttttaaatcgactggcaaccatttaatagcatggcccattttagtgtttaagacggaagagcgttcgtcataagtctagttggcaaaaaaattgttttatccctg

SEQ ID NO: 48417 - DNA, 674 bp, Mus musculus
  source 1..674: mol_type = other DNA
tttgttttaaaatattttaatggcaaaccatggtcacaattcaaagcagtatttaaacactgtgccagtctatacttgagacactgaatttgaaaattaaaataactttaaaaatgagcataatctaaatgacgaaatcttcattttacgatttctgcttattgactgcaaaataaagaaaaataatttcagttcttaatattcttaatccatagtattagtgctctctgagagcctggacttttaaggaactttcaactgcctctcaatttaatttaaataaatctgtttatctttcacttttccttctaaagagtaagtcgtgtgtttagaggcggcttgtaaaaccttcccgcgcggggtggcatctgagggccgagcgcaaaccccctgcggctggcgctagctaggcgttgtcacccgggagcaggcgtgggccagaacgcggcggcgtgcggctaaggggttccggggcccctcggtgcgcccgggcaagccgggagtgcagctcttaacgcgggcgccgcgccgaccagggctcactgcggcggacggccctgagcccgcgttagcgacagcccgcgcacgacgcccgcccgggcctgcagggcgagcgggagaccgaggagcagcctacgcctcggcccggcccagcggggacccgcccaggggcc

SEQ ID NO: 48418 - DNA, 473 bp, Mus musculus
  source 1..473: mol_type = other DNA
atctgtttctgcaagttgcccaaattcaaattccgagtatgtacaaagataaggaactaatttcctattttctacctaagtagatgtcagactagaaggagtctaattccttctttccattgtctccttcggccatggggattagtcctaaggaacttaaatcacagtccttggctgcaagcaccccttcaaatttatttgctcagtgaattacgagagaggcaatggctttccaggggaatcttacaggttctcaggacacatgtgcctttggacttttccaaactctcaaagcaagagtaggtctggtattaaagggaaaatttcattttaaatgataatgccactctattatcacttagattttgtagataaattgtcatatatttgtctaggcctgggaaattctgagatcaaatagcggccaaaaaaccgtccttttttcccctccctggagcttgtcccccgcccct

SEQ ID NO: 48419 - DNA, 440 bp, Mus musculus
  source 1..440: mol_type = other DNA
tccagcccctattattattattattagtagtagtagtagtagtaattattattattattattattattattattattattattattattattttgagacaggtggctgtctcactttgtagaccaggctagcctggagggtatcataaaattatttttgttgctacttcataactgtaattttgctactgttatgaattataatgtaaatatctatatttgagatatctgacattgacccctatgaaagggttgtttgaccccccatgggggtcaggacccacaggttgagagtacccacgggccaattttcccctccagccctggcctggaatggcccctcctgaaatgcttctttggagaaagaaggcaaggaggacttcggctgactgatccccctgaacctcaggcaaagagggcaggctctcggttccagggtct

SEQ ID NO: 48420 - DNA, 262 bp, Mus musculus
  source 1..262: mol_type = other DNA
tgaggcaccggggtccttcacagccacatgaataccacctgtaagttcatttgggattcctaacaggccaggtccggacccacttataacaggctcactgctatcctgatgtgaatcaactttggaaagttttatgtctgaatttgcagaggctaaaagcataagagtttacgcatcatgctgggcaagagtctatgcaatggctcaggtgtctatcacacctaaaaacagcccagtgagctcattcagctgccagctcggc

SEQ ID NO: 48421 - DNA, 398 bp, Mus musculus
  source 1..398: mol_type = other DNA
atctgtgtgcagagcacccatcgattttccttctcccatgtgggtaccagggataaaacttaggtcaggcatcagtcttgaagtgatgagacatcttatgcatattgatgcataaactcttattcatccatgtatgtagataggtagataggtaggtaggttggtaggtagataggtagggctgttctggaacttgctctatagaccaggctagccttgaattcagatctgagtgcacaagttgttcctggttcaaagagcaaagtgcactcttccctgaggtttcttagaaactctgagactgaagtctctgttgatgtctttccgatggactttggccaaaagcagatcacttagttaaaaaacccagagatctgatactgtactataattagtgt

SEQ ID NO: 48422 - DNA, 453 bp, Mus musculus
  source 1..453: mol_type = other DNA
tctattcatgaacctaagttggcccaaagaagtcaatgcatgcaacgtgggttatatatccagtttcaggatagtctgcctataaattgagatccagtctcaaaaaactgattagaggataaaagagcaataatcatttattagttaacattgttctctgaagagtcttatgattactgaaagaattgtagctcttttaacagatctttatattctggtagagttacctctattaaaaaaagggcaaaaatggtaactaatctttattgaataaacattatactgaacaatcttaggaaactcgacacgaattcttttcattaaagaagtaaaaggtcagggtcctagttttctcaataccctctcagctggcatacgcatgcgcaacatccgggtttccggaagcgtgccgagcatggggcggaacttccggggacggcacgccagcccccc

SEQ ID NO: 48423 - DNA, 249 bp, Mus musculus
  source 1..249: mol_type = other DNA
gtaaatcatatgttcagcataaatggacaaattcttagtgaaagattccaccaccaagaccctgttgtgccagcagcatatgtaagcaggcctctgctagcacttcttcagttctatttagagtgaacacaaaaaagatgcaaatgcttctcatgggatcaccacaagtttaagccctgggtttaatcacagcacaaccaaatcttttgttgtccggctccccaaggtactcagctcaggtgctgatcc

SEQ ID NO: 48424 - DNA, 278 bp, Mus musculus
  source 1..278: mol_type = other DNA
ggatgagcctctcatagttaccgaggatggatgactctcccctgcaatgattggtgagcacttctttccactcagcttccaccagaaacgttgttggggagaggcagatgccctgaagttatcttccaactccagttggctgggcaggacaagggctaggaatgaccgtggtcaggcctgcctgctcccagcccaggaggtttatttttcaatgcatctttaatttgtaaagaaataaaataagatgtaagccctatggcgtaggacctagtccactc

SEQ ID NO: 48425 - DNA, 391 bp, Mus musculus
  source 1..391: mol_type = other DNA
ggaggaaaattccagacgtttacctcaggccacgcactggtgcccacagatgtgtccctgcattttcaagcacgcaagcacttatgtacaaatgattgttatcatctcaaactactattctggctgcaaattagtgaagatcaacctatgacaaaacttagctttttctcactttggtgagggtgagccagtcacagatgaatgggagactctgtacataatttaacacagggcggtgtgggtttctctgtgtagccctggctgtcctggcctttgtagaccaggctggcctgccgtcgcggaattcattctggttcgcaaaccgcgccaggcggccgcgtagactgggcgtcgccattttgcacagcgttcccagtaggctccgcggcgc

SEQ ID NO: 48426 - DNA, 484 bp, Mus musculus
  source 1..484: mol_type = other DNA
tggaatttccctcctgaattagctatgtcgggactgtgtcttgaattcatttgcaaataccaaagaatctatatatagcacatcttttgattcggttttgtaacataaaaagaagtgatatagttgctctaatattaaatgttgtgtatgtcacacgtaaatgttacaacgttgtaaaaagcaaccattttattattttggtttttcttgtagccctggcagtcctggagaccaggctggcctcaaactcattctcacagacttgttaaaacaaaagtcctttgcaatccaaaccctggccgccacggacgcggcactcacgtggtgcgtggcagccgcggacacggggcccctgaatcctgccgggtcccgagcacgccctaacctgctgtcggctgccggcccgacggggttcgaatccagtgtcaccgtgaggcccggaaagtgcgcgcacagctgcccgttgtccgcacgccaagcgcgt

SEQ ID NO: 48427 - DNA, 497 bp, Mus musculus
  source 1..497: mol_type = other DNA
agattcccattagcctaataagtctgggatgaggagaaatatatctagccatagctgaaatttagcatttaaacgatacaatcgacagtagcattttgtaaatgctaggcaaaccaaaaatgtaagagttaaataccctgccaatcttggcttttaatgtataaataaacagtactacgtaacacgtttgttttatatgtctcaataattgtatttaaacccaattaatgtgtaattcataagcgtgcgcacacgcaaaggacatccatccatttcctgaaatcaaatgctttctttcctttagaaagctaatggactgcaactcccagaaggcaatgcggcctaggcctccaatggtcactgcacggtcccctgacagccagccgatgtgaacccatttggggacactatgggtaccaagtaataactgcaggcagtgcgcccgtacgcggtccagtcctcgagcacgcgagggcggaagcgggccgggatcagct

SEQ ID NO: 48428 - DNA, 625 bp, Mus musculus
  source 1..625: mol_type = other DNA
aagcacttttgctggcttgaagacaacaaatggtcttagagctctttgagacccatagctttcagcatctatagactattaatagactatttaaaaaacaaaccaccttttaaacaggaaatggaaggcatttgatgcagaacttttgcatgatgacatagaaataatttaaaatagtgtttgttctcatagctttgttacaatgaaaccttgaagatatttaataaaataacctttaaacagtccattgtgtctttttgcccattcccttggggagcaaggaagaaaacttctctcagcctgtaggcggtgggccgagtcttcgccccgccccaggcggaggtggccccgcccttggtacgcgggctccctcctccgcgggtctgagtggacaggcctgggccctgggcccgccccgacgctccgcagactgtgccacccggcgtggaggacggggtccaccctggtgggctgagcgcgtgcggctgggctgagcactgcggagggccgtcggcttatcccaggtcccggtcacgcagcggccacgctcggggagcgcgcggacctgagcgggcaccacgagccgcagcgcgccgcctccccctggtgggagcggtacttgagc

SEQ ID NO: 48429 - DNA, 445 bp, Mus musculus
  source 1..445: mol_type = other DNA
ctcccaccaaacaactgcacattatctgcattggggggaagcacttttgctggcttgaagacaacaaatggtcttagagctctttgagacccatagctttcagcatctatagactattaatagactatttaaaaaacaaaccaccttttaaacaggaaatggaaggcatttgatgcagaacttttgcatgatgacatagaaataatttaaaatagtgtttgttctcatagctttgttacaatgaaaccttgaagatatttaataaaataacctttaaacagtccattgtgtctttttgcccattcccttggggagcaaggaagaaaacttctctcagcctgtaggcggtgggccgagtcttcgccccgccccaggcggaggtggccccgcccttggtacgcgggctccctcctccgcgggtctgagtggacaggcctgggccctg

SEQ ID NO: 48430 - DNA, 417 bp, Mus musculus
  source 1..417: mol_type = other DNA
tagtgcacaaagtattactgacctaggagagaacatttatgactctagagtgtcggcaccctgggggaaggctgcgggcagctggctctgcagtctgggggcatctgcagtcatgggacccacgtgtggggcctctccccagacctcggtggtccctcttgcagggtccgccctggaggagcccgcaggaggtgtcttccagttcggtcggtcccagtgggtggccgggagtggggaccccgcgtccttggccctcgggtgcagggggcccagttcgggcggctcctggggcggggcggggccgacggtgggaggcccctccccgggggcggggcgggggccagcggggcttgggggcggggccggcgggcgggcgcgggggtgtccctccctccctcgctctctcgcggtgctgcc

SEQ ID NO: 48431 - DNA, 293 bp, Mus musculus
  source 1..293: mol_type = other DNA
cttttccagacaaataaatggattgttcattataggcatttttcaaaagacccattgacgcagctgctgtgccaagatcctaacatagtaaccattactgcttttttaaaaatcataattatttttgaggatttcactatgtaaattaccataaattttaaaattgtctttcaaagattgacatacccctctatcagacatctgaatcagtgagccaatggctggagcgccctcagccgccctccagcaaacctgggcggggccagggctctggcgggccctaataaagggcg

SEQ ID NO: 48432 - DNA, 491 bp, Mus musculus
  source 1..491: mol_type = other DNA
agggcttcttacgcaaacattttagcattaaatttcattaagtctctagttctacggaaacgttcctatttatttagaaaacacgtatttgcaagtgaacgtgtatgtagtacaaatcaatactgggaggtgacggaacagtgttctgactgcgtccggtgacggtagcaccctgcggggagaccgggggaagccgaggtcccctctctctggcgctgcctgaggtgaggatatcccgccctactgaggtgatcctgcggaggggcggagctccgccactctgaggcgggaggcggctcctgggggcggggccagtccagtgcagtcgctcgctccgctcccactatgcccttataaggagcgccccgcgagagggttcgggaatccggtcgcaatccctgcggcgcagccccaatcccaggcccctcccttgggaatgggggcggggcgggaggagccacagtccggctctggcgccggggctagttacg

SEQ ID NO: 48433 - DNA, 444 bp, Mus musculus
  source 1..444: mol_type = other DNA
cttgggggtcccatgaaaacgctcttctgcaacgccttctgaagaattccaggcgccggggcagctccagataggtcctttggggtcgcgctagcgcggcccgcgaagacaagcacgtggcgccagaggaaggctcggcccccgggccagcagctctgattggtcagtggctgccagggccgaagctacgcgggcaactccccgagctgcaggtccagcgcgttggccccacgaacgcagccaccaaccagctgcgccagcccacgtgggccttggctcactgcgagccgcgcgtcccgcccctcagtccggtgtaagggaccccaaacggagttaggctgcgggtgagcgcctgcgctcagggagtgccaacctccccgggaagagtcagatcttcaatctcctctgcggctgctagtcaggcaatctgctgggcactccgag

SEQ ID NO: 48434 - DNA, 445 bp, Mus musculus
  source 1..445: mol_type = other DNA
ttgatggtttttaggtagcaaactttatacttattaggaagaaattttttttaaaaaaacgaacggctttttgtaaatgaaagttgcaacatcggtgttgggagagagagctctccgctcctgctgaggttgcttgggggtcccatgaaaacgctcttctgcaacgccttctgaagaattccaggcgccggggcagctccagataggtcctttggggtcgcgctagcgcggcccgcgaagacaagcacgtggcgccagaggaaggctcggcccccgggccagcagctctgattggtcagtggctgccagggccgaagctacgcgggcaactccccgagctgcaggtccagcgcgttggccccacgaacgcagccaccaaccagctgcgccagcccacgtgggccttggctcactgcgagccgcgcgtcccgcccctcagtccggt

SEQ ID NO: 48435 - DNA, 462 bp, Mus musculus
  source 1..462: mol_type = other DNA
gcccttcccgtgcctggggtccagggtccgagaaccctacgtggcaggtgcaccgctcccttccggcccagctggctagaaagcccggacgtgccgggcaggcgcggccccggtgcacagcagcggggacgctcctggagcccaggctagagtcccgagccggagctatgcggtctactccccggctttggagaggtctccagcccggagactccccgccctcacactcaccccgacacctgggcgactcagtgattcggtgccgggtcctctctgcaccgcagctgaagcagcagagaatgccgcgaggaccccgcgctcggagtgcccagcagattgcctgactagcagccgcagaggagattgaagatctgactcttcccggggaggttggcactccctgagcgcaggcgctcacccgcagcctaactccgtttggggtcccttacaccggactgaggg

SEQ ID NO: 48436 - DNA, 586 bp, Mus musculus
  source 1..586: mol_type = other DNA
gggaaacttggctttcccagggattcccaaaggtctgggaagagaaactgttcaaactctgttaggaggcaactctgggaagagcaggacgttttctccagagtccggagggcgctgcaaggcatgtgggcacctttagagtagccttgcctgggcggccagaggatcccccagcctccctcgtatgggcctcaggaactccgggggcccaggggaagcctggaaaaccgaacttcgccttccttacagcgctggttggagacgagggaagggccccccagcggtcgccccccgcccagctccgagctcgccagcctctcccgcaggccgggagagggcatcctgaggggcagcttcccttcctcctgatcagggtagagacagctcctgaggccgagcgggagggggggcgcgtttaagaagaccgcacctcaccggcatccccgccctcccctgagggcggtgagcggagccccccggggcggaggcaggtacccccggggcggagactggggcgggcggggtccgggctgcgcccccggccgggccaggcgggctagcgggcggcgcggggggagcggggctg

SEQ ID NO: 48437 - DNA, 438 bp, Mus musculus
  source 1..438: mol_type = other DNA
gggtggccgcacgtgcttgcagacacgggcgagtgcggagccgggggtgcacacccggtgggtagggggcttgctccccctccgtatgggatggcgaagaggctgcagtgatcgttccgcctgcacccggcctgaggctggcaggggggctggatggaacgctccgggcggcgcgcccgtccgcgcgctcctcggcgggagcaggcgactgagaacctcgaattttaacttcgcgtgcccgcccgcgcgcgcccgcctgcgcccacccctaaatcctgcggccgccgccagcgatcagctctcacacaaactttagctgcgaaggcgggccccgcggtcgtcgaccctccctcggggtggtgccggaggggacagacccgtaggccaacggttggccctaagtgtaatggaacggcgccggggcggggccgcgtcttg

SEQ ID NO: 48438 - DNA, 304 bp, Mus musculus
  source 1..304: mol_type = other DNA
ctctctctctctctctctgtgtgtgtgtgtgtgtgttgtgtgtgtgtgtgtggtgcacaggctcataattacataagagggtagaattgtgagcactgtcctcactaagagatagctctccaaactctcagagagagctgcggtagagggcagagaaaccctgaggcctcctatgggcggccacatgtcctgtatctgtggctgagccagagacaaacatgtggaatcattttgcaaacaaatgcctcctcacactggcagcatgcaaggtcagtgtcagcagatctgaccctaaataggccct

SEQ ID NO: 48439 - DNA, 303 bp, Mus musculus
  source 1..303: mol_type = other DNA
ttcctgtatcctgaacattaaggatacatgtacaagaagtacctggctgagcctagggctgaccaggccatgggtttataattaaactcggtcaggatctccccacaggtgggtgaacgtggggcccacagaggtagaggcacagaaccctgcctctcgccacagggtggactcagaagacacgaccctctataggtcttggcgtgatgcctcatttatgtggcacctgccctgatgcagggcctctgggaggtgcatctcacttatgatgtcatgagagtctcccagcagctcctggtgaag

SEQ ID NO: 48440 - DNA, 381 bp, Mus musculus
  source 1..381: mol_type = other DNA
gggatgagggagaaaggccggccctctcttccacccagctcatcatccactggctgggtgagtgtggccaagccagtggcctcctgggtgcccatctcttttttggcagtgcctgccagagggaaaaggccagtctgtacctactcgagttactcggggaccaggggtagttgaccaaggtaggttccccttccgtaccaggctcaggttctggtgcctctgacacctcagctctgcaagggcccagatggactaagccagatgactccagacatatgaggcctgtacagtggtgaccatgtcattggtgtcagtgtgaaacatggaacacttggtgtgctgcacagattagcctccttgttcccagggaaaccaggccag

SEQ ID NO: 48441 - DNA, 341 bp, Mus musculus
  source 1..341: mol_type = other DNA
cactttctggatacagcaggcatgggatgcatgtggcccacatacatatttgtaggcactcaaacataattttaaaacttattttatatgtataaatgtttgccttccagtaccaataaaatatttttaattataaaaataatgtttaaaaagtggttctagtgtccaaagattctcagagccttattctcagagccttgggcaatgatcacccatcagctttctcttaaaaaaaaaaaaaatctgctatcttcattatagaattgtaggagtccaactccatgttcggcccttgggacttgctgagtcactttgtcccacctgtcaatgccaatctctgg

SEQ ID NO: 48442 - DNA, 182 bp, Mus musculus
  source 1..182: mol_type = other DNA
ctgagtctccagcaagagcagcaagtgctcgagcccttgaaggttctgagcatactaggcatgcattcgtcaggcttcttgacctttcttacagagttgaaacaatgatttgaagtatagtctctggccagcctggtctacagagtgatgtccagccttagggtgaatatgcttgggcatga

SEQ ID NO: 48443 - DNA, 473 bp, Mus musculus
  source 1..473: mol_type = other DNA
caggctggcctcgaggtgtgcacgccgcccagatctgggactacaggacaggggaagcttctcttcctagagcaggatgtgcttctgaggctcagcctagtcccagccccctcaacccggaccttaagttcagacctccaggctgggactcagggagggagggtgcacgtgaccctgcggggcacatcgccccgccccgtcgcgactcgcgtggccactcccatcctgaccgcgcgggtgccgttgcgccgcctccgccgttcccaggtcctcgcctctggggctgtcctggacattgcctaacccgaggccccgcagctcctgctcgccccgtccccgccggacggtccgagaccgctcaccaaggagaccgccgtgctctcgacccacgtggtcactccggagcaaggcgcggtagacagcccgggcggccgcggcggggacctggctgggggaggccaggcttgcggcgg

SEQ ID NO: 48444 - DNA, 284 bp, Mus musculus
  source 1..284: mol_type = other DNA
agtaacacttgaactgcattccagttgtacctgtccagttgttaagcatatagtagatattcaataaatgtctagggaactcagctgctgcctgtagtaaggctgtaatacctgctttagtcttggaaaccaggtgactctaaaccaggttcttggttagagccctggtgcagagatgataccccgacgcagttccgcatgcagccaccgggtggcgagatggtgcccgaggacgcggctctgtgggcagggcccggacaaggtggagccctgtcggcttactg

SEQ ID NO: 48445 - DNA, 239 bp, Mus musculus
  source 1..239: mol_type = other DNA
caggggaaacatgtgaccccccgtcacgtgaccgggaagggcggagagcccggcgcacgtcgcgaggacgagcagccaccctgaacctctggaaatccaagcgggcgggcagactttctgcagcacgcaaaatcttaatttctgaaaagattttttttgtatttgttttcctgctgggaaaacgaagaggcggtggcggcggcgcgggacgcgtcacatcccctttcccatttgattgg

SEQ ID NO: 48446 - DNA, 246 bp, Mus musculus
  source 1..246: mol_type = other DNA
aggcctatctatcagccacgaccccaatgataggtgaccaccatccttagagtcaggaggtgacaatggtcacttcttccttctggtgtatacacgtatgattatcaatattcctgccctaactttcattactacactttaaggggaaaattcaacctttccttgtagcagaggcccctcgtggggttcccacgctgggtgcagcgccgcgggccacccgctgcgagctgcccggaggtgcaggtt

SEQ ID NO: 48447 - DNA, 286 bp, Mus musculus
  source 1..286: mol_type = other DNA
agtcaggaggtgacaatggtcacttcttccttctggtgtatacacgtatgattatcaatattcctgccctaactttcattactacactttaaggggaaaattcaacctttccttgtagcagaggcccctcgtggggttcccacgctgggtgcagcgccgcgggccacccgctgcgagctgcccggaggtgcaggttcacgtgcaccgggttgagccagccagcggcggcagcgctgctgcgcacagagggcttccgttggtcagctgacctcccagtgcggaactg

SEQ ID NO: 48448 - DNA, 162 bp, Mus musculus
  source 1..162: mol_type = other DNA
ccctgtgtgtcacaaatgctttacactcagtggttaggtaaagagctaacctaggtctcagaatgtagatgctgcctagttgaatttatgtcctctggcaagcagagtgccttcgaagtagcacatgttataaagaataaaagaagtgacttggtgaggtta

SEQ ID NO: 48449 - DNA, 405 bp, Mus musculus
  source 1..405: mol_type = other DNA
ggagcagcaggaagaagcttgctgcttttagctcacatccatctagattgtggtaagagttatctctatggcctgaagagataaaatgaatgtagataaaagaacatatacttggaaatatgcttatatgagtatagggtttagtaagaaattctcttagattaagaggacctttggttctgaagaatcagcaacatctcagactgtcctttttggctgtgatgctgtctctgtgcaaaattcctaaataggttttttatttccttgttaaaggtataattcatcccaggctgggtgtatgtgttgctggttattgctttttagtcttcaaggaaaagcaacagataaaagaaaatgctgttacctgttcccactaaaaggttttgttgatgtcaaccatgagtg

SEQ ID NO: 48450 - DNA, 733 bp, Mus musculus
  source 1..733: mol_type = other DNA
ctattaggggcccctttgggaaaaccggccttgagcctagaggggcgcaacaccctctaggctggtggcgacatcctggaagatggggggccgcatgccccaccacaggcgagttagcccgtgagcccgcgcccgctccagttgctgcagctgccactgctggcggctgcggggcgcgcggggcgcgcgccgaagaggctcgggctgcagggtcacagagacccggcccgaaggggtcccgcagagcatcggctagctggccgcggaggcagggcagaccgccgcaaccaacctgccgcggccccgcgagcacaggaggcggcgatccaggagcggagcgcagccccggggaggaagggtggcgcgggcacgcccggtcgggagggcgcggattctccgatcctaaggagctgtcgcctcatcacccgagagagctgtgcggggacgggcgggagaccccgggcccgggcgcagcgcacacgcgtggcgcacgccaggcgggccgggcggcgccgagggtacgcgggatcgcgctcacggagcttcgggaggcacagaccccgggcgcggaccgcccgcggcgccccctgggctctcggtgctccgcgcagccccgggggcgatcggggccggggtcggggagtgggagccaccctccctcatcccctcccccccccgggccggccggcagcccgggggagggcgggcggcggcgcttggctgtatatatctc

SEQ ID NO: 48451 - DNA, 253 bp, Mus musculus
  source 1..253: mol_type = other DNA
ttgggagattttctaagaaaatcttggaattcttagaaggactaagggccggtggggtccggacccttcccctctacctcctccaggccgaaggcgggccggggaggagctcgggggagccgggccggagccgtcgggcgcccggcgacaattccccccgcggcgatcgcagtgtgcggcggggcggtggggagggggcatgcctggctgctgcgaggcctcggggcgcgccccggccgccgtccccacctcc

SEQ ID NO: 48452 - DNA, 153 bp, Mus musculus
  source 1..153: mol_type = other DNA
tttgtttctataaacaaacatgggagtaacccccggccttagcttcttccctgggatttgggagattttctaagaaaatcttggaattcttagaaggactaagggccggtggggtccggacccttcccctctacctcctccaggccgaaggcg

SEQ ID NO: 48453 - DNA, 375 bp, Mus musculus
  source 1..375: mol_type = other DNA
acttcctctctctccatctttctagagggtaagtgtggcaaggctttgcaggtttacgttcagcttaggtgaacctgcttctactcacaagagctaggacactgggcccaagggcttctcttggcataggcatcttggagcaatttttaaaagttaagcatatggtttataagccctgctggtacttcctggatgtgcttccaagcagctgtagatgatggtacaggtgacctgaaagtaaagactcaatttcccactttggaagagctaaggtgtttccgagcaaatctctggctttgaaaggaggagttgctcccagagagtcttctctggagagctcctggcatcccctgtgatgtcaccagtgttgtggca

SEQ ID NO: 48454 - DNA, 493 bp, Mus musculus
  source 1..493: mol_type = other DNA
gtgggtttttgttgcatctatttacaaaacacacaattcaaaacgaaccatacatatatattacatatgctgtgtaagaataagcgtgtttatatgtgtttgtatatatgtttgtacacaagtatgtaaatagatatgtaaatttacttatttataccaggagtacccgtcgcacacacacacacacacacgcgcgcgccggtccttgtttgatttttttttctatttgatgtaactttttgaccttgagatttaaaaaaaaaaaaacaaacagaggcaggcagatttctgagtttgaggccagcctggtctacagttccaggacagccagggctgcacaaacaaacaaaaaaagcggtccatccgtctcttctgctgtttttttcctggctgtcctggaactcgctctgtagaccaggctggcctcgagctcaagccgctagatggcgatccggcggggaagcggcacgtgcggcgctctacggtggccggg

SEQ ID NO: 48455 - DNA, 361 bp, Mus musculus
  source 1..361: mol_type = other DNA
aaataaaccaactacctctaagaaactatcccagcacttgggaggcaaaggcaggttcaaggccagcctggtctacagagtaataaataaataaatacttaaaaaataaaattattctcgttgctacttaattgtaattacttaattgtaattaatttgctgtgattccttgcaaaagggtcgtgatctcttgaattcgaggtcagcgtgatctacagcgatctatattttgagtggatccaattcaggccagccagagcccaggtctggggcgtggctaagggctaagtactttcggtcaggcattgctgtagtctaccccaaggccttagccacgcccccgcgctggggtccttccttg

SEQ ID NO: 48456 - DNA, 239 bp, Mus musculus
  source 1..239: mol_type = other DNA
cctggaatccatggtgtcttctcttaggagaccagagaccttactagagaaggctctgatggaacagagctacacaatacggtgtgttaatctgagaggaggaagcttgatcataaatactcatacgttcacatgttcatgtatgagcattgtatgtgtgtgtgtgcacacacactcataagtgttcatgtggaggcctgaacatatgggcttaaactagatccagtgcttataaacca

SEQ ID NO: 48457 - DNA, 217 bp, Mus musculus
  source 1..217: mol_type = other DNA
acccatcctccatttgatggatgtgaatggtgaagcttcaagcttggcagtctggaggccgagggcctagggctgaattgggttgggctctggagagcactccagcattttcacagtgaacactctgtcactggtagcatgcaatcatgctaaggccgtgcccctagtgggccacaagcccaagatggcaagcatcttgggcatatatctgtatgag

SEQ ID NO: 48458 - DNA, 252 bp, Mus musculus
  source 1..252: mol_type = other DNA
ccctgcaggagtgcactgagacctcagggattttgggattattgaccctaaccttcactaccaccggtgacgcaggggagactaaggagcgcctggggcgctgagagccgagcgctcccgctttccaagcccacagcccagggctgggctccactcctacagtggcgaagagcactttgcggcacgtctaggctggacccgcgcgcgcgcgcgcgcgcgcacgcgctccccttcaggacaggcgggggaggc

SEQ ID NO: 48459 - DNA, 323 bp, Mus musculus
  source 1..323: mol_type = other DNA
agtgctcttcgccactgtaggagtggagcccagccctgggctgtgggcttggaaagcgggagcgctcggctctcagcgccccaggcgctccttagtctcccctgcgtcaccggtggtagtgaaggttagggtcaataatcccaaaatccctgaggtctcagtgcactcctgcagggtctctccgctccaaacttatgggatgcggagcaagcagagctgcgcgccggaggcgcggcactccgctcccgccgtgactccgtgccggcttttgcgggaggccggcggcgcggggccctttggaaatagaaatgtacaacttgctc

SEQ ID NO: 48460 - DNA, 380 bp, Mus musculus
  source 1..380: mol_type = other DNA
gctcctaggcagatagataggacatcctcttcttgaagagggaaaggtcagcacaaggctccggggtgttcacaagccctctgcctcctgtcctcacacccacgagggagggaggagactgcactagtcaaccctctggtctaccagcagcagaagcaaactgttgcttaagaaaaccattggcaccaggaggcagctggagccaatggctctctatgtaacgaaggcaggggcttccccggggggttggtccccagtgtccatgcgcggggctgtccacccacggggctcagaggagggaaaggctggccgagcggtgcactcaccccgccagcccagccgtggagatctcagagagaacatttgtttgggctgccaag

SEQ ID NO: 48461 - DNA, 321 bp, Mus musculus
  source 1..321: mol_type = other DNA
gagttaaccaagggccagggcaagctagtgacctgccccgcttgggataactggtcggactaagatctggccaacaggaaggcctggccaaagcctggcttggaccagggactgaagctctgcaagcataaacatggctatttttagccctcacagggctgtgagtgtctggccctgactctccccgccatctcaaggcagggctgggagttgctccagaatgcagtcaggcccatgtggaggccagcttggcttcaaggagtctgactgggcctcaggaagccggggttctgcctctgcctcatagactctcagaaaggg

SEQ ID NO: 48462 - DNA, 352 bp, Mus musculus
  source 1..352: mol_type = other DNA
cgctgttgaacacagaacagcatttaacagttaacaaatgcttctctctcttgtttgtttatcctcagaacaggtatgagtagaaagcagggtctcactggctgaatccagcagtagggaaccagggttttctagccctagttaggctggagtgcacatccctagagaatggttgcttaggaagttacctgctagccccgcactctgctggcctggctacaaactcagccctggagccggcagcctgaggtcaccttgtgaggatcaacctttctcttgatctagaagcaagccgattacgctgccagcggcaaccggcaggggacgctagcgaagccagccgacaaggcgg

SEQ ID NO: 48463 - DNA, 370 bp, Mus musculus
  source 1..370: mol_type = other DNA
tcaaacgagacacgtttaaagtgtcgttagtagaaccaactgaatgtttgggcccaattgattcctcggggcggggtctctgtggaccccaccctaggagcggtccccggaggggtcagcgcatccccgggcgaggcggggctggcagcaggcggggcggggccaaaaggcccgtgcgcgcccactgctgcagttcggggaggcggcggcggcggcgggcggctgcgggcaacgcgcggggcgcgggacgcggggcggatagccgtcggggccggggcggctggcagtgggcacaggctccccggtgcccgcccctccgccgggaggggggcgcgagcgggcggccggggaggggccggcaccgccacgg

SEQ ID NO: 48464 - DNA, 485 bp, Mus musculus
  source 1..485: mol_type = other DNA
cttccgaagaacctggttggtcctggggcgtcagttaaatactgcaatcctgttttataaacaaatacatttgcttaagtaagagacttaatttttatttttaaatgttacacaatcatactcacaaataaacaaccaacgtgggtcttctcctgttattaacatattagtatttttgctacaatagatgtaccaatattgatgcattgttattaaatctatatatggtccagatgtttttgacaaccttgagagttttggacagtcctgagggggtcatgtgtctccaggaggaagacaccacacgacaaaattaccactgctgatgttggttttttttcgctgtcaaactcctgaaaataagctcggggcttcctacaaagctaccactgcaccctcacctgtgggcgtggtcccacgcaccccgcccctccagagaggctccgcccatctcgtgcggctccgccccggggcgacaaacgcgg

SEQ ID NO: 48465 - DNA, 270 bp, Mus musculus
  source 1..270: mol_type = other DNA
tggagtggccttggcagggctccttccaggagctgggtgctgctttagccagcacagctctccctccccggagggaggcctaccctccggtaatgaatcggaccttttcttaaagttgcgtgtcaggatcaccctggagctggaggggtctgtaggctgccagatctccatctctcaactcagaggccaaaaagtgggataaaagtcaggtcccctttgtgggaccagtgataccttaaggaaatagaatatcttagacggagactgtct

SEQ ID NO: 48466 - DNA, 235 bp, Mus musculus
  source 1..235: mol_type = other DNA
ctagtgcagggctaaaaaagctggactgctttgaagatgtaactcgtaagtaactgataaagatgcaaaataacttctctttagatttgtaacagacaggtagtccgggattcagaacttgtgccagcctggcccggcgccttcttgcagggcacggtggggcttctagagggggcgggcgggttctctagcgccagaaacccggagccgcccaggaattttggctcggactgca

SEQ ID NO: 48467 - DNA, 409 bp, Mus musculus
  source 1..409: mol_type = other DNA
catagtccaacatcgaaaaggtagagttaatattaatcactaatacttagtaggcagtatgggttagaaacttaatgctttctttttagataaacccaaagcctcgacctgggctaactcatggcattttttgaatggctccgcgagcaaatgaggaggcgcaatgctccgcaccgtctcaactcactgaaatggctcgggggtctggtgcacaggaaaccgctcgccccgcccgggccaccttgcactggatgcaagtgaccatccggtgggatcgctgcagcgatggggacggccacaggccctcggctactacacggtaaagcccgggagcggctggcaggcgccgcgcaagcgcactggctagtcagggctaagcctggggaaccggttcgccaggctttccctg

SEQ ID NO: 48468 - DNA, 360 bp, Mus musculus
  source 1..360: mol_type = other DNA
tttggaggcaggggcttgaaacagccatagctcccaccttcccagtcttggagagacaggtgtgtgctaccatggacagagtctcaagcagcccaggaacttgtgcatctgaagatggccttgacttcctcattttcctaaatgtcagaagggcacctgctcacgtggtgctgaaggctgaaccctgggtccctctggggcatagtccaacatcgaaaaggtagagttaatattaatcactaatacttagtaggcagtatgggttagaaacttaatgctttctttttagataaacccaaagcctcgacctgggctaactcatggcattttttgaatggctccgcgagcaaatgaggaggc

SEQ ID NO: 48469 - DNA, 257 bp, Mus musculus
  source 1..257: mol_type = other DNA
aaaaagctggactgctttgaagatgtaactcgtaagtaactgataaagatgcaaaataacttctctttagatttgtaacagacaggtagtccgggattcagaacttgtgccagcctggcccggcgccttcttgcagggcacggtggggcttctagagggggcgggcgggttctctagcgccagaaacccggagccgcccaggaattttggctcggactgcatttcctcgggccgggcgggcgtgatccccgggaggc

SEQ ID NO: 48470 - DNA, 360 bp, Mus musculus; identical to SEQ ID NO: 48468
  source 1..360: mol_type = other DNA

SEQ ID NO: 48471 - DNA, 83 bp, Mus musculus
  source 1..83: mol_type = other DNA
gttttaaaaatagctgtcacctgtaccaggtcagaaactcaataggaagactcctttggtgtgtgcatctgcttatattatca

SEQ ID NO: 48472 - DNA, 294 bp, Mus musculus
  source 1..294: mol_type = other DNA
caaacatggtttctattgagacagtgccatagaaagatttcttggccggccttagaaagtttgcaatgcagaactttgcagtcttccctgggatccattgaatcaacggtttattttagaattctagggaaaccctttctggcctcctgaggctccggagcggagctgataggtcaggttcaggggccatgacccttctgaatctgatgccttagcctccagccagtagccttgggctctcagccaaattcctttagcagcaaatgcagtttgcagggagtgcctttaggccag

SEQ ID NO: 48473 - DNA, 471 bp, Mus musculus
  source 1..471: mol_type = other DNA
aaggaaaattatttcctatgataaaaagtgttagtagaactagcatccctttcccagtctgggcaggaattgtgtttctgtaagaacttagactgaaaaaaaaaaacatttagtaaataaaaaggatttataaagtcccaaaatactgagtgacttcaagtagtaaactgtacagatatattttttcttactaaatgctaaaagcaatcctattatttcttttaaatagctagctcttctaaaatcatccattttcttgattatatattttgtagattctcttctgaattgtatcaataggaaattatcctttaaggaaactgccttcccaaagtcctttaatacaagagtctagactttataataggctggtgtctgatgaaaacagaaggcatgttctttccctatgattgctctagtaagtgtagctctctacttcctcttcaaggttcaagcttttggttgaagctt

SEQ ID NO: 48474 - DNA, 231 bp, Mus musculus
  source 1..231: mol_type = other DNA
gggtgtggcacacctgagtgactcagttgcccacttgcatggaattatttagtattttcagtgagaactgtagtaaacacacttagtacacgtaggtacttgtaggtactttcttattcgtgtgcttttgaaacattcaacccctcaaagccttaagggcgccaggggtcatgttaaaaataagcttgccttcttgaggagggcccttgaaaagggtgcgcgttcccgtgg

SEQ ID NO: 48475 - DNA, 413 bp, Mus musculus
  source 1..413: mol_type = other DNA
gcccggctctaattacttttgatgaataaatcctagcaggtgcctacttagtcgtatcatgctatgccaataatcaatagcaattttcttgagtcccagcctagagctgtcttgacttcttaacaaaggttcagttcccttatctgtgaagacaaattagctgccactaaacccagaatcttacaatagtgttcaccataatgatatgtttaataagagttaataggtgtatttgaacttagcatatcaactgtcacagagtaaaagtttaattaaactactgttaaccactatgttttagtaacactttaataatgaactgggtcgttccaagaataattcattgctgtattgtccgcggcgctcccagggtcacgtgcctcgtggccgcgcccctattccgggagtccgga

SEQ ID NO: 48476 - DNA, 362 bp, Mus musculus
  source 1..362: mol_type = other DNA
tttgaaatcctgggttccctctggagaagctagaatcagatgcttccttagagggatactttagatgtctataagtttttttcaaaaaatgaataaaattaagtctatgcgagtaaagactttccttatccctgcttgctgtgagcagcgagctactaaggttttttattaaaacagggactcatgggagcccgccgcacgtcggcgtagcgggctcaggcccattgcgcgcaggcgcggtggcccgggcggcgcctgcaacgcaggggggtggggcagcgctgacgcgattctgtccgcgttggagcgggcgggccgccgcctgagtctccgcggccgccgtgtgacgtggcacagccgaa

SEQ ID NO: 48477 - DNA, 431 bp, Mus musculus
  source 1..431: mol_type = other DNA
ttcgttttggtctacaaataaaccaagatcattcgtattaagaaataaaactctcggcgaaatttaatcttcaaattaagtataaagagttcttaaagttttacggtcttccaagctctttactacttaaaccactaacagctttcgaaaatgggttccaaggcggataggaaaccttcaagtacattatgcatcttgtgttttgtatcctcagagctcacaagctggtggaagaagccggcgggcggctcggagctccttagctaccacaagctccacacttgtcgtgcttagcttcatccgccaactgtgcagagcggcttgcaatcctggggaggaggccggcgcctagcctagtgtttcccggaggcaccgcccagtcacttccggttgcgagtcgggaacaccgcgcgcttgatgctcacaccccg

SEQ ID NO: 48478 - DNA, 482 bp, Mus musculus
  source 1..482: mol_type = other DNA
aacaacaaaaaggcatttgcttattactttcaagcttgtggattaaaaacaagctttccacgagatttgacattgtcagaatacttcttgattcgttttggtctacaaataaaccaagatcattcgtattaagaaataaaactctcggcgaaatttaatcttcaaattaagtataaagagttcttaaagttttacggtcttccaagctctttactacttaaaccactaacagctttcgaaaatgggttccaaggcggataggaaaccttcaagtacattatgcatcttgtgttttgtatcctcagagctcacaagctggtggaagaagccggcgggcggctcggagctccttagctaccacaagctccacacttgtcgtgcttagcttcatccgccaactgtgcagagcggcttgcaatcctggggaggaggccggcgcctagcctagtgtttcccggaggcaccgcccagtcacttccggt

SEQ ID NO: 48479 - DNA, 420 bp, Mus musculus
  source 1..420: mol_type = other DNA
ttatgtattcagtgaatcacgtaacatcattataaatcatcaaaatataacaattttaaaaggatgtatctttatggtcagtgctcttaaccagtgaactaacttttcagccccagggtcaattattatttaacatctagtggctgattttttataatcttcaatgtataaatttaaactattttaattctttctagttaaggctatatgaaattttattgttgggaaagtttttatcataatagttttgtaaatgatttagaaagtaaagtgtttcccaatcttaagatcttggcctaggttaccaggaagaggcccacactgatcctactggaggtgctgtggcacatcactttctatgatattaagactgagtcaataatgctttgaaaaaatattaatgatattaaatatcagttt

SEQ ID NO: 48480 - DNA, 413 bp, Mus musculus
  source 1..413: mol_type = other DNA
gtggcagcctggctaagctttctccagtccagctggctaaatgaggcctccacaggttgtacatgcatgtgtgcaacacctagacacacaaacacacacatatttaaaagtaagttctgttatgtgtggcttaagcctgagctctgcagctcagggaatatcatgcatgctgggcaagcactctgccactgagcaatatagctcctgccatttgagaaagagtctcactaagttacagtcacttttgataatgccatcagagcaaaattgttggttcctcttaattaagaaattaaggacatgaattctttttcatggtcaacaatcagcaaatactttctatttcccaacgaagacgaaatcttttaaatttcagactgtcttatgatcaagtatttatagtaaagctattt

SEQ ID NO: 48481 - DNA, 482 bp, Mus musculus
  source 1..482: mol_type = other DNA
aatgattttgccaatttttttgcatatcggtaaactcactgtacaacacttgagcttcactcggaaggaagtcctccgataaatgtatctttaaatttttttattaaaaaaaagttttcctttgtgatatacaagaaatatagtggtcgtatttaactaatgatttgtcaacaaaatcgttttaaatttagggtctactactcattaactgtaaaccccgttaatgacacaatttcggattccacagatttgtgagttaacgatatggtgcagaagtaaaactgcctcaggtcccctccggcggctcaggttagctgtgcgcgcgcccgacgacggaggtcgacaactgctcggcccgcacggccactgctctggtagagaacccgcggtcggggaggatcccggtcagccccgcgtcgcggcgagtttcccgcgcggcggccgctgagctctgggctggggcggcggcgcctgcgagaggg

SEQ ID NO: 48482 - DNA, 209 bp, Mus musculus
  source 1..209: mol_type = other DNA
agtttggggtgtccaagcaatactgatccccacattgagagtagtagtgctggactctgaggataagatgtggcctccagacctcccagaagtcagggtgcatgaacttaatcttcttaaaccttaaggatttctgcaaataatctctgatttggattcactaaggttttctgggaacatatgcacagaacacacacgacttggaaata

SEQ ID NO: 48483 - DNA, 371 bp, Mus musculus
  source 1..371: mol_type = other DNA
tgcagattcttgcaaggagcagtgtgcttcgtgaccccacgatgaggacagagacaccatggccaagagccctggctgtcctggaactcactctgtagaccaggctggcctctaactggatgaagagtcttgttcttcatttcactttggaggaagcaaataatttgtcctgggtcccatttcaaggaacttgacatttgaaaagcaagtacttattaaatcattaattttaaaattactattattatattctttgatgagaagtcatttggacaaatcctttggattgagtctcctgtgcattggggcggggccaagaccgagcgaagcccggcagcgcatgcccggtgagggctgccagcctcggccgc

SEQ ID NO: 48484 - DNA, 320 bp, Mus musculus
  source 1..320: mol_type = other DNA
caaagcccggcattcccagccttttgcaattatgaggccaacataaaggaactctttcagttttctataattagaaaagcttacttaaatactcttactaaagactgttaccattgtttttagggaaacagactgaatcagtccagggactccgttccgaactgcacttaaaatgggtgcattttcttttacctactaaagcttatttttagtaaaatgtattggcagctccacgcaggtccccccagcctcaggaggcgcgctccttggagggcggggtgggcctctctagtcccgcctacccgccctccagcggcggt

SEQ ID NO: 48485 - DNA, 471 bp, Mus musculus
  source 1..471: mol_type = other DNA
aatttgcctaaatttcaacatttaaattgtgcaaaagcatctacttggtatctgttgtgagaatgtgtctatacagatggtaattgaaaggccctcccttcattaagaatcccaaatattgaatgtctggagtacgaccagtgctcgtgatctacctttatgcatataggtggcttgcctgcatttatgatagactcgcgggtttggtccacagacctccggaggaaagttgcaagagtactgtccgaaagacgtcctctgggcttgcctccgtcaaacgcagtgcggagagggcagggcccaggaatccgcagaatgctgccaagcccaagccctcactctgaagcgatggcgtcgacgctcggcatcgcgaggctccgccctgcggaggcgggctctgcatttctattggtagagcgggtccgccgaggccccgccccctcccgggcccgacgcgagcacgttgggtag

SEQ ID NO: 48486 - DNA, 400 bp, Mus musculus
  source 1..400: mol_type = other DNA
tgccttcttttattattattattattactaataataataataatttatttatttggttcttttgagacatttagaccaggctggcctcgaactcagaaatctgcctgcctctgcttcctgagtgctgggaaacaggctgccgagggtgcgccctccccgactccagtctatacacatattcacattagatataagatctgtagtataattgtgcagtaacagagacatatactctgtgtcctaaaagagaatgttcctccattagagccaggcggctccccaaggttggcggtgatcgacgcctctagagtccggggaggccggcatcaacgaacggacccgccagcatgtcccactgtgattggctcggctggcccccggcaaccaatcagcatagcgt

SEQ ID NO: 48487 - DNA, 502 bp, Mus musculus
  source 1..502: mol_type = other DNA
cttaaatggtatggctattaaaggcaaaaacacttaggctgccaaaggaaggcatcctcctgttctctgagcagtgcatatgaggtcctccttagggtgggaggaaggattttgtggccactgaagtccctccctggtgccaagtggcagcagcaggggttcaagacttcttgttgagcggaagcttttgcccgtgaaaaccttgcacatttctaatttaaagcatctgatgaacaggagcctttttccttgggggacaaggaggtgaaggatggtcctagggcataggaatcctctaggttaacttaaaagccaccaggaggcgctgcggagcgggcgcgcactcgactctctgctgccccccgcggaggtgcccaggtcccagccgcggcccctccaggctcctcgggagggcgagcggccgtgagcgcgcgtgtcgggactgcggcgggcgccgccccctcggccccgcccggcccggccccggcgctcggcgctggcc

SEQ ID NO: 48488 - DNA, 524 bp, Mus musculus
  source 1..524: mol_type = other DNA
gcctccgccgtccggagtccggattgtgcggccgctgcattgccatctccttccgcggcctccgccgggccccacgaccgcccctcggaccccggccgcgaccgaggaggtgggcagcctcggccgccatggacctctggagttgagtcgccaccgcggagctctgcgccctccgtcctctttgcgcctggtttttgccagactctaaaatgaaaggacaaaatttggcgctgactctttttcagcggcatctcccggagaaaaaaccatgcgtgcctgattgttctgtggtcccatagccgccgccgctgctgctgcttgtgtctgtgtgtacacagaggttcactagctaactcagctgcaggagcagtgcgtgagccgcctggagtctgcagacgggcacagggattgccccccctccttttgtgaagaattttttttattatttgttgtaaagtcttttgcaacgcccacatttggggttggaaagccctaattaccgccgtcgctgatggacgttagag

SEQ ID NO: 48489 - DNA, 324 bp, Mus musculus
  source 1..324: mol_type = other DNA
tcttgggttttatgcaacctcaataaaaagtcagccagtggcaggcatttgtacattcaaagagctggttccaatccccatttggaatattggtgaacaaccaactcagttggttgaacctcagctttaggtaatgtaaaaaccatggctgtggatttcagggcatgaggacctgtcaacgcagctaatctccagtcagcctccagcaggccaatttgttaggttgcaagaccctaggttagggattgagccggattaagaaggctgttttattttggtgccctggacttcaagcagattaaataatcaaaaaggccgggccat

SEQ ID NO: 48490 - DNA, 246 bp, Mus musculus
  source 1..246: mol_type = other DNA
agccgccgcctgcaggtggaaaaatcagtgggagcagcctgagaactctctctccgcccggctccctgcgccctggaggccaggggcactgctggattttcgccccgcctcccagccgctgctggacctggggaccagagggtctcagcagatcctaaaggaaatccaggctgctcttccccataattcggagctgcatttcccagctgggcactcgcgcgcctcgctggtccctggggcctcgcc

SEQ ID NO: 48491 - DNA, 736 bp, Mus musculus
  source 1..736: mol_type = other DNA
cccgggcatcctggtccctgggtgcaccgtgtagcagtgcggaccccggaccccgagcttcaggcgaaagcaccccggcccgtggtccggaacgccagcggtagctgtgcggccgccgggtgcccgcgccgcgactgcagcgccaccctccgcgctttcctccagtcgccgcggcggtggagcagcgatgggcggccacgccgcggtgcactcccccggtccactgccgctgccgccgcccgctgtgcctcttcccaaggaaccgtgaggggaatcgggagggggtcgcaccacctctaggctccgcccggggctagcatcggggtcctcggcctcgctcccgagccgcccacccccattccgctccggtcgccagggcctggggaccgcccggggccacccgagagtcgcgcccgtggcggcggactgcggagttgtaaagaactcagcggccgcagtgggccggaccgggcgaggcacgagccgtggcggccaaggacacttgagtttgcgagtctccgcccgcgaggcgcctcccgccctcccgccgcggctcgccggactccccggggccgccgaggcggggctgggcagctgccgcggcaagaggcgcgtctcgctccctcctcccgccccccccccctgctccccaagtgagccgggcgcgcgagaggcaggaggggcggcgcgcggcggagcaggcagcccagcgcgctcgcccaccgcccgcccggcg

SEQ ID NO: 48492 - DNA, 159 bp, Mus musculus
  source 1..159: mol_type = other DNA
agttcaagaacagcctgctctacagagctagttacagggcagccagggcctatgccacatgagtactggtataggaccagctgggtgtcaacttccggtcggcagactcaggcagtcctagcctgacttgggtctgtcagtggcctgtgacgtacaggg

SEQ ID NO: 48493 - DNA, 543 bp, Mus musculus
  source 1..543: mol_type = other DNA
accccatcttagaggctgctgttgtattcaaaaaaagtgaatgaattcaagataattttagtcacttgactatttgcagccaaattacatatctgatttattgttgggggcttgtcatgccctgtcccacctcctatggtgaatgggaattaggaattacatatttgccaggaggtacatatgtgagtccgaggccagcctggactacaaagtaagtccaggttcagccagggcttcatagagaaactctgtctcaaaataaaagacaaaaaaccaaatctgtatttaatcttaactttgcaatgatttgtagaaatcttatgtataatgagactgatgaacctcattattagggttaagtgagatagcttaagcctttaacttcagttccaggctagccagggctaaaaataaatttaattgattaactgtattacactggagatgtagctcattggtaataggaacatgctcactattcaatggtgcctgggctctaggggcgacgccggtggcggccatggcagccaggggacgccgcgc

SEQ ID NO: 48494 - DNA, 468 bp, Mus musculus
  source 1..468: mol_type = other DNA
tgggatctcaaaaggatggtccctggcccaccttcccaaaattaggtggtggcagatctcactagcactctcggaacccacagtgctgagcagtggcttgagcccctccgcttcaggtcctcacccagcctaggacctcgcacctgggccaggacgcgagtggccgctgatcctcgcccgcttcccgggagtgccgcgagctgctccgtctggctccaggcgcgggtgcggtcgccccacctggcctgcggcacacacctgtgcgcggggctcgacacgccccgcgcctgctggagcttcagtcctcccgggcctgagtcattcgcaccccgcctacccccgcgagccccgagggcgacaaggcggccactttactgtcttgggaccaggccagcgccggcttgggcagggcggtactgtgggaggcggagcccggagaactgcggcgggcgcctggataagaggacc

SEQ ID NO: 48495 - DNA, 384 bp, Mus musculus
  source 1..384: mol_type = other DNA
gtttcaccaaggatgccttccaatgtgtgaagagagcagggcttgcatctgaaaaagattctttcattcatggggactggagaagaaaggaaagctgtgcaggctgtctgttgacccaagaggtgggcagcacagatgtaagcagtactgtcttgtttgtcacataacaggacaaggcacccctgggaagcagtctgacaactgataccttccaggatgggacaattccttgacccgctcgaggcagggcgctcctgcacgatgcagctggccaccgcccaccaccacgcggagctggggccagaggtccagggtcctcttatccaggcgcccgccgcagttctccgggctccgcctcccacagtaccgccctgcccaagccgg

SEQ ID NO: 48496 - DNA, 544 bp, Mus musculus
  source 1..544: mol_type = other DNA
accaaggatgccttccaatgtgtgaagagagcagggcttgcatctgaaaaagattctttcattcatggggactggagaagaaaggaaagctgtgcaggctgtctgttgacccaagaggtgggcagcacagatgtaagcagtactgtcttgtttgtcacataacaggacaaggcacccctgggaagcagtctgacaactgataccttccaggatgggacaattccttgacccgctcgaggcagggcgctcctgcacgatgcagctggccaccgcccaccaccacgcggagctggggccagaggtccagggtcctcttatccaggcgcccgccgcagttctccgggctccgcctcccacagtaccgccctgcccaagccggcgctggcctggtcccaagacagtaaagtggccgccttgtcgccctcggggctcgcgggggtaggcggggtgcgaatgactcaggcccgggaggactgaagctccagcaggcgcggggcgtgtcgagccccgcgcacaggtgtgtgccgcaggccaggtggggcga

SEQ ID NO: 48497 - DNA, 233 bp, Mus musculus
  source 1..233: mol_type = other DNA
tgctgcttcccaaggtagcccatttcctttgtggggaacctgggctgggaggacactgtgtaagaaaatggaggccttagaaactggtatttttaccacattcctataacgctaaagcaaaaaagccaagttctgagggcagtctgagcctgagacctaggacctgggcatcctaggaggtggtctaccattgactatatataggtggtcacctatatgcctccctatgtgtc

SEQ ID NO: 48498 - DNA, 539 bp, Mus musculus
  source 1..539: mol_type = other DNA
ttaatttccaaatacacgtggaggtgatggcgagagggagggagcccaccgccacgtatgcaagggctgagggcagatctctgaggacagtcagtgctccccaagcagagccctcgaaccctgagctttgatgctgcagcagcagcgatcgcctgcgggcacctgggttcctggggggaggggggcggggcctcccccaggtgtgaagcccagcggaccccaggggaccccagcagcctccgcttggggacgccgtgtagaggagcggcgcatcggcgcccctagcagcaggcacggggccccacgggcctggctcggggaaggggcgcccgcgcggcggcgccgagggggttaaccgggctgtcggcggccgcagcgcacttaaccctcggtcagccgcgccagcctgggggtggcggcgtccgagtcgcgcgccgtggagtccggggggcgcgtgggccgcaggcgggcagctggggcgcggcgcggccggtgggaggcccgggcgcgcgggggagggcgggggacggcggcggcgg

SEQ ID NO: 48499 - DNA, 599 bp, Mus musculus
  source 1..599: mol_type = other DNA
ctttgagaaaatgtaaagtttatcctttcaaaaatgttcatttgtgctgagatgtcttcaataaagagaaacgatggtttttaaagcaactcaatgaaaacagcctgagcactttgctttacaatgcccaataaatgttttctttttaaaagagatctacttactattttaaataatagacgtctctatagaacaatagaaatatttatctggctagtttggctgctttgaaacatttctttcaaaagttaccaaactgttaagagtgaaggtgcactctgattttaaagatttatttattttatgtatatgagtacactgtagctgtacagaagagcagtcagtgctcttaaacgctgagccatctctccagccaggtctgagttttctaaatggtacgtggagacctcatgtccaacctgcgctggggtgcagcctccccggcaggagtcaggttcattcagggaaccggttcacaccccgccaggtgagagaggtctcagctcacggctccaccgcgcaggcgcgggggcctgtctcttccggcagacgcggcccgaagaaaatcggaaccagggctcctggcgcacaggagcagc

SEQ ID NO: 48500 - DNA, 411 bp, Mus musculus
  source 1..411: mol_type = other DNA
ccttggcagtcaggcactaggagggccagcctctttgggcagagccggcagtctcactgggacacctggagctctgtggggacacagagaggacctggaccaaagctgtactggtgccttcctcctctcagctccaccagatctggtaagagcagtagctgtctctacagagtagtagtctgagaccagcatactcctagtatagaaaagtgcaattactgattagtatgatagtggcgaagttactttccaacagggcactgtgctgggagagagcccccaggcctggcgacttccgagagtccactatgcggggcgtggccagaggccactcgtcggcctggggtgattcggcgccccgccccacctccgccccgccccccatgggcgggtcctaaggagtcttaacgc

SEQ ID NO: 48501 - DNA, 337 bp, Mus musculus
  source 1..337: mol_type = other DNA
tgcctcaaactttaaaaatgtaaaggtagaattggttatctgacttagaggcacacagtctgcccactctgcacatgcctggggccacgtgcatctgtggtgatattcggcacatttggcagtagaatgccagagccaatacagtcctgtggtcttctgcagccaaaatgcctttcggagcctcctggccagtgctctccctgaggaaatatcactgggtctaggtcctgacagaggcttaggcctttatggggaggggggagttcccctgtacactgctcctggaccatgtgacctaaagtggggcggggcttgggcggggccctgcctaccctgc

SEQ ID NO: 48502 - DNA, 374 bp, Mus musculus
  source 1..374: mol_type = other DNA
atgatgaacctatgatgtatcagatcggaggccatactagttaaatgacttatttgactgtcccaaggccttaggtgtgccttggcattcatactgttattattactataagtataatgttgttagctcgtcctctcagtgagatcaagcttggctccacccagacagggtgtctaggcagctgaaacctttatgttagatcagatatctgaagtcttccttttatcttcaaaggcataggaggataagagccccatgagagaatagggagaagagctattctcaatggaagagtagttcttcttaggcccaagacgccccattcgggataaggggccattggaagctcagtgccactggttcttgcagataag

SEQ ID NO: 48503 - DNA, 430 bp, Mus musculus
  source 1..430: mol_type = other DNA
tctcatgaacaggtcaaacacagcgctcgcccaggaagtcatttcgaaaaatggagtccctggctcccatttggtgctcagactttgggcccaggggacccatccctcttatgagctaggcaattcccacaattgtctgagggctctcgccctagacctcccagctccttctctcgggcaggactggaaccggcaggcctggcggcgtggctctgcgccaggcaaggcgggccagctggccagtggggagtcggggaagccccgtcggtgcctctgggctcctggcctgcgtgccactggcaggcgaggcgccacgacccaaggacttgctggacccccagctcacgtgggcggagcttcgaaggggcgggcgcccgtggggcgggtcctgagtgggggcgggaccggggccggcacctgggtgaggtcg

SEQ ID NO: 48504 - DNA, 320 bp, Mus musculus
  source 1..320: mol_type = other DNA
catacatgaaaattctgtgtctgacctcctggtgctgagcactttgtcccgcagcagccactgcgataattagcaggcctgcaaattagcccagcaggttaagagcttaccatgtaagcctgccaatctgaaacaaataaatatttaattctcatcaaggccagccctggctacatagaaagaccttatttcaaaataacagctggagttgcggcacttgggagtcagaagccgaagctgctttgcatatatgatagccaaggctacgggtcccagcagcctcaaaagttgtttggagtcgcagccgcgacgaagcgggc

SEQ ID NO: 48505 - DNA, 278 bp, Mus musculus
  source 1..278: mol_type = other DNA
acgctgtatatgggcaaatatctgcatctgattcagctccattttcagacaggaacaattatgggtcagatttttgactgtgagaggtgggagaacaaaatataaataaaagttgtgtcagctgcagttttttgtaaagtcctttaattaaagccactgttttgtattagaaccctagccaaacagttgagttttcaatatcaactggaatactgctgcagtaactggccagtgtcttcaagaagacggttagcttctaagtgaatgcttatcttgtt

SEQ ID NO: 48506 - DNA, 554 bp, Mus musculus
  source 1..554: mol_type = other DNA
cgggatcccacaggcgctgggattttcttctgagggaaaagctctaggcgagtcggactcggtagacgagcactagagtgccctgctagatcccgacgtggtccggcgggcgggcgcagctccctcggccacggtatgcgccccttggggacctgcagaactgctgcggacttcgcggggtcccgagccgctctgtcaaggccaggacgcgcctccggagcccgaggacgccgtctccaagccgttctccgtccatggcgccgtcggggatcagaggctcacgccgcgacgcccagcgccacggcctcgcgggtgtctttcggcgagggcggcgggttatggacccgggcccgcggacgcgtcgtctcccgtgcagctccagctccgcgagccggtgggcttggggaggccgggtcgggagtgccacgcgcgcgaagcgaggggcgcgggttgcggggccgcgggcgcatgcgccttgcgtccgtgccatattggaatgagtcggagcgcggagcgccgccgccgccgcctccgccggagcgcgggtgcagggg

SEQ ID NO: 48507 - DNA, 254 bp, Mus musculus
  source 1..254: mol_type = other DNA
tcacaaggcatggcctggcctccccttggtccctgcgtatagacctgatggatgacatatctttccatgcaaatacagcttaatagctagccctctataggcctttactagcaagcatggctggctcactctgagttaggaagtttctcccctgctaatgtgctgggatggaaaatctatttccagtggaatcccacccctgccactgggatgggttcttgcagtcagcctgggcaggctgtctcaacattcat

SEQ ID NO: 48508 - DNA, 390 bp, Mus musculus
  source 1..390: mol_type = other DNA
agattctgggctacataatgagatgttctatttgaagtgaacagagcaaggacttgtgcatgttgactttgcacttaaactcaccctttttataaagcgaaaaggcacttaactgcagtcctagctacctcggaggctattagcctggattagagttaagaaagtgcctgtttcaaaacaaaacccccacaaattatgtttgggagttgaatccacggctgagactattgtactcaataccgtgccttagcataatgttgcctcaggttctggactccacttccgaagtagtgatccagggcatttatagatttggaaatccatcactgtccctgcagccccgcccctagccctggctagagccccgccccggagggaatcgaagcccgc

SEQ ID NO: 48509 - DNA, 353 bp, Mus musculus
  source 1..353: mol_type = other DNA
agttcgaggccagcctggtctacaaagtgagttccaggacagccagggatatactgagaaaagagtaactgacacccaatgttagtcttcctgcctctgctccctgagtgctgggagcagagttgtgtaccaccacctgttctgtgaagctttcatatctagttgtagaaaagaacaactgaataaaaaaaattgtttgaaatagagtgttcacaaatggtcactaaagtatgtatcagtagaaccttaaaagacaactgactcagaagcttcccagtcactaagtgctctgagaccaaacattccaatgcttatgcttatgactctataattaacaatcagttttggattcc

SEQ ID NO: 48510 - DNA, 303 bp, Mus musculus
  source 1..303: mol_type = other DNA
atctttccatgcaaatacagcttaatagctagccctctataggcctttactagcaagcatggctggctcactctgagttaggaagtttctcccctgctaatgtgctgggatggaaaatctatttccagtggaatcccacccctgccactgggatgggttcttgcagtcagcctgggcaggctgtctcaacattcataaacacagtctgtgaacaacagagcagctgtccccagagatgcggggtccccgcggccatctcctctcaccagggaaactccagctagtcgctgcgtggatctgaat

SEQ ID NO: 48511 - DNA, 270 bp, Mus musculus
  source 1..270: mol_type = other DNA
gaagcatttgagggctccacaagccttcttgacggtctggagtctggcagtagtaactgccatggttttaaaagttatttttcctacatggataggtgtgtgccaccaagcctagctggtgtgtgtgtttgtaagtacattcatgccacaacccatagttgagggagttagttccaaactcaggtagtcatttttcttcaacttcacttaacatgttgagatatatatatacatattcccctaggaattaaatccagagcttccagcaca

SEQ ID NO: 48512 - DNA, 458 bp, Mus musculus
  source 1..458: mol_type = other DNA
atccaggaagggacagtctactcttgcagagaacctgagtctgtctccagcacctatgttagggtcaggcacctaaaataaaataaaataaatcttttaaaaaagaaatacactatcatactgtgaatgaatgacaaggacttgatgtctaagagacatccattttttttcttaattaagagcatcttttgtctaataaggaagaaagggctcagccatggggggtctagctggagctgggatctaggcccagactaggagatgccagctgttctaaatgcagctcacaccaccctcaccagggagagtgggggtcaccttcctgagggcctccagacttcagactatcaggagtgccgccctttctgggtggttactccacccacccccagttcccggagctgctgtctgcttcctgagctctggccccatggtccaggtccttggcatatataaag

SEQ ID NO: 48513 - DNA, 323 bp, Mus musculus
  source 1..323: mol_type = other DNA
cttttaaaataaaataaatcagtgcttctactttctcaaggacatattgagaaaaggtattagcagcacctaagggccgctctcaagggcctgcaacgtattgtcaaattgctaataggacccatggagcagcctggtaccagagaggtttctggacccagcatcttttgctccaagatcccacgggcatgacacatcatgatggatgtctacatcactagctagcagaaggcctgctaatgcccagctgcctctggcaaagtttactggacataggtcacttgtcaggggctggccaaccagcaagttgccagtttataacc

SEQ ID NO: 48514 - DNA, 200 bp, Mus musculus
  source 1..200: mol_type = other DNA
ctacacctttattttcaaatagtaatgcaatacttactgcagctgccccttgtaatcctagggacgaaaaagaatcccagggaaacgggggatcggggacgcgcgccctcaccatctgggtgggcagcgaagatatcgagagcaaggccgaccagccgagcgtttcacttcggccgtggccccggaagcggatgtctccg

SEQ ID NO: 48515 - DNA, 496 bp, Mus musculus
  source 1..496: mol_type = other DNA
aggtttgggagcatgttactattacatggctgtaaacacaacagtaacataataataataataaataataacagttggtcattgtaaaagcaattacaatttactagttggcaattatagaagatgggattatatcttcccacacacgccaaaattttttgatgatttacattaaaggaagggctttctgtcctggaggaaaacatttctgcttgtagaagacatatgcatatatatctcactcttttcgcagccttgtgcatcaagcctttcaggatggtttgcaatcattctgtgagagatctttgccagtctcagtaaatgacgtcttgcctagagttggccactcttttaaagtgcggctcgggagtcgctctggccttccagagaagctctatggcaggtcctccggggctgccgaaccgctctggccgcttccgcgacggctcgatggtaggtcctcccccaagcacgaggagcagctctggccaccgct

SEQ ID NO: 48516 - DNA, 511 bp, Mus musculus
  source 1..511: mol_type = other DNA
actgcatgccagggtccccaaggtttgtagaccaggctggcctcgacacgcccggcccttggctggtctttaccaagagggactggcctgggaatttgggaccctctacataggggcaccgagatgtggggcgacttgggcctcgcagctcttctccgaggcagtctcctttccctggagaatctagagatcattagtagcctccttacgggtgaggcgctccggggatcccgccacgcactgacagggagccgcgtcagacgaatcgtcgccttccgaggctgggcgcagtcgcccttacctgcgctgggaggagtggccgccgcccacgccccagcccgccccgccagctcagcgctcgctccgcaggccccaggccccggcccaccgccgggccgtccgcgtccgctgctctctggccgtggcccactggccggcgagctctgccctctgccagaaagccaggcgcagcaggcgccacggggcagccccgtcgcccgggtcctccccg

SEQ ID NO: 48517 - DNA, 358 bp, Mus musculus
  source 1..358: mol_type = other DNA
tagtgctccctttaaagaggctcttcttcgtgaagctgaactaaggaaacagcaggtaatttttgctggctgaaagcctctgacacagcggaggtaaggttatctttccttaaaacttgcgttcctaacaactgttttcttccttttaggaatctgacgaattgccaggaacttaaaaaggtaccttagtataggttagtgtcaaaaatgatctaagatttttgaaaacttagtcctcaggcatgcataaaaaggcctgttaaccaattgggtagattatatgtccagacttaacagtcaacatacttgaatgcatacaggagatcctatcttctggattcactgtcagtgtttcaga

SEQ ID NO: 48518 - DNA, 443 bp, Mus musculus
  source 1..443: mol_type = other DNA
atttcattaaaaattgcaaaggtagtggaggccagcagtttttctgaaagctggcacctggtgatgtttaccagaattaaaattgctatattttatgtttaaagataaaaaagaagaaagttgttccattccaaagcaaaatctgctacttagtcagggtcttgacattgtgagtgtgaatagctttgttaaaactgacagggtttctcaacttgcctggtgtggcaaatgtgtttctgagcataatccgagtttaggaaaagctaaaacaagaatggatttgcaatgttgggatttccatgggacttacaaggtaaatggaactgtccttggaaaggcagtgttggacctagtcttggaaaaataagttaataaccttactgtgccatatatgcaaacatgaatatgtttggatatgtagtgcacagtatcttacagtgtgt

SEQ ID NO: 48519 - DNA, 628 bp, Mus musculus
  source 1..628: mol_type = other DNA
tacaacaggccaaatttgggtccctggccgcggacgcttcaggagcagaggaggtctcgggatcaccacgacttctcgggcgccacgtgcgaactggaactgcggttcaacgtcacgcgctccaggacctgccggaaagtgtgtcggggccgggccgagtgcgcgcgcacacacatacactgtcgcgccgagccgggctcgcctggcggccacaggggcggcgggtgccggagagacggccgcggccagaggagcgctagcagccgtggcggccacggggcggggctcggcggtcggggaccgcagccggggctgcaggcggcggagcggcggggtaaggccgggcccggggcgggcggggccgcccctcctcggccggctgccgggcctttgtgtcggcccgggcgggcgggcgggcgggcgggagtcgcggcggaggccccgccccgtggtgcggacgcgctggtcgggcagggcgcggggcggggcgcggcacggcacggcggcggggcctcgggacagggcccagcagcccggccgcacctgccgccgggacaaaggcagagcagggcccggaaactcccttcgctgctctttcccgctcgcgggccgccttcaaagctgtcaa

SEQ ID NO: 48520 - DNA, 679 bp, Mus musculus
  source 1..679: mol_type = other DNA
tttgatatcaaattttcttaaaataagactcacttcttcagaaaacaaaattttgaaacggaaaatacttttaaaaccagaaaatacagttagaagcttaagtacctagcctgtaaataagtaagtctctctgacaaaaacaaaaaaatattccgtggagttttttttgacagctttgaaggcggcccgcgagcgggaaagagcagcgaagggagtttccgggccctgctctgcctttgtcccggcggcaggtgcggccgggctgctgggccctgtcccgaggccccgccgccgtgccgtgccgcgccccgccccgcgccctgcccgaccagcgcgtccgcaccacggggcggggcctccgccgcgactcccgcccgcccgcccgcccgcccgggccgacacaaaggcccggcagccggccgaggaggggcggccccgcccgccccgggcccggccttaccccgccgctccgccgcctgcagccccggctgcggtccccgaccgccgagccccgccccgtggccgccacggctgctagcgctcctctggccgcggccgtctctccggcacccgccgcccctgtggccgccaggcgagcccggctcggcgcgacagtgtatgtgtgtgcgcgcgcactcggcccggccccgacacactttccggcaggtcctggagcgcg

SEQ ID NO: 48521 - DNA, 373 bp, Mus musculus
  source 1..373: mol_type = other DNA
cctggccctcaagagattgttttatcaggccatgggggcctacaagaggaaagcactacaaatatcaaggtttctttctttatttttactctgtgtagccctggctgtcctggtagaccaggctggcctcgatgtttcagtatacagcccaggctggtacaacaggccaaatttgggtccctggccgcggacgcttcaggagcagaggaggtctcgggatcaccacgacttctcgggcgccacgtgcgaactggaactgcggttcaacgtcacgcgctccaggacctgccggaaagtgtgtcggggccgggccgagtgcgcgcgcacacacatacactgtcgcgccgagccgggctcgcctggcggccacagg

SEQ ID NO: 48522 - DNA, 436 bp, Mus musculus
  source 1..436: mol_type = other DNA
gtgtagccctggctgtcctggaactcactctgtagaccaggctggcctcgaactcaagagatactgcctctgttccaagtgctgggattaaagacatatgccatcttttagattgtcaattctcacagcatcatagattggttgtgatgcttaaaaacactacaagttaccagaataacggtaatttcccacttatcataggtttataaaatgcatatcgagttatgtttgtattagaatccaagtcaaaccagtgtcacgaaactgcatttgtcgagggcggggccgccacgccacgttggagaccccgccccccgaatcaatctaggcgcgtgcgcaggcttcttcagaccgactcagcctcacagagcacgcgcgctcaaacagcactctgattggagagtctgagagtcccgccacattctgattggcggag

SEQ ID NO: 48523 - DNA, 385 bp, Mus musculus
  source 1..385: mol_type = other DNA
gggctacagagaaacttttttttttaaacactatttttaatgaaacctcagttttatttcatacccgccagttctgaattctttcctgctttgaatccatgaatcctgggaagattaaaggaaccccccagactgtgctcggtggctctacccagtcactacagagaccagtctgaggggctagccagctcacctgggggccagccagcccaggggctgtccaacaaagggaaaattatttattggtgctagactatggtgccagggagcagcgtcctgggccaggaagccctgaacagggcccaggtcgtccatgtgggggtcactggccagcgtcttcccttccgcctgcaggctgctgatacgcaggaggaaatccaagcgg

SEQ ID NO: 48524 - DNA, 245 bp, Mus musculus
  source 1..245: mol_type = other DNA
atggtagcatgcctggcagtgtaagtcctgccaaaacacttcctatgcaaggttcagagtataatatgacaagtcaacaagtgtccctaaagcaggatgtcatctgggaaaccagatggacagcgcatatctcttcgtgccgcctagcacactgccaggggggagagttccgaaggcccatggcctctgcccttccctgctgtgagcccagcggacaccgcaggagctgcgcatgcgtgccactg

SEQ ID NO: 48525 - DNA, 274 bp, Mus musculus
  source 1..274: mol_type = other DNA
ctttagggacacttgttgacttgtcatattatactctgaaccttgcataggaagtgttttggcaggacttacactgccaggcatgctaccatacctcatttcattcaggaaactaacctgaaaacttgagttcagtcctgggttcctgggaacctaggtagtgtcctttgacatgcactcataaataaaagcaatacattcttttttttttcttgagggaacagatggcaagagacctggtccttgcagtccttcatagctcctggccctaggc

SEQ ID NO: 48526 - DNA, 412 bp, Mus musculus
  source 1..412: mol_type = other DNA
tgatccctgtagagcccatgggcttgggaggaactcggacctattgtgctctggcccctgggcctccaaagcactggggcctggagggttctcaaccttcctaactgatgattctccaaccataaaattattttcattgctacctcatggtttcagatgatcttaggcgactcctgtgaaaagcccatttgaccctcaaaggggccgtgatggctggaccgatacctggctgcctctctggagaggcagggatgcatttgtgagtgtctgtcactcccaagggggagcaggccagttagctgcacgggcattgagcgggccggccggctgagatggcaggcttggagcacttcgctcttcctctcccgccttcccgcccagcactgggtggagccactgccttataagtggc

SEQ ID NO: 48527 - DNA, 263 bp, Mus musculus
  source 1..263: mol_type = other DNA
aggttcagagtataatatgacaagtcaacaagtgtccctaaagcaggatgtcatctgggaaaccagatggacagcgcatatctcttcgtgccgcctagcacactgccaggggggagagttccgaaggcccatggcctctgcccttccctgctgtgagcccagcggacaccgcaggagctgcgcatgcgtgccactgaggggccaagatggcgtcgcgggcgcgggcggggggcagcgggggctggggggcggtgggacgctga

SEQ ID NO: 48528 - DNA, 437 bp, Mus musculus
  source 1..437: mol_type = other DNA
aagagtgacactttcttatgtgatattttatataggccctccggaggtaagggggcgtcggtcggcagggcagtcccaggctctgccaccagccagggaccgaaggtcgtgggtaactgcaggtgcgtccggggcccatccggcctccccagcccccggcccgccgaggcccctccgtacctgggcggagcggcctctcagcgccatgtccaggccctgctccgcgccgcccccaaccgggagcgcccaccgcccttagggcacagacaacgggccgcgccgcgtcactcgcccgcgccggacgcctaacccgggggctggtcttccgccggccgaacggcgggggcggaggcggagacagaggcgggcatgcacgcgcgcgcgcgtcgaggcgagggcgcgcacgtgcggagggcggggcgggcgcgcggccgtta

SEQ ID NO: 48529 - DNA, 386 bp, Mus musculus
  source 1..386: mol_type = other DNA
aacctttccgtgtccccacgctatattaacgaataaacgatttacgcgcatgccagggctcccttgccgggcggctgtggcgaggccaggctggaggctgcttccgctgctcgcgccaccgctttcagcccaggctgcccacccagctgtcgccgagggcgccgctgtcccggagtcgttgacacaagacgtggtaactacttcacgggcggccgccccgcgcggtgactgcgccgtcgaaggaggcgaccgctaacggccgcgcgcccgccccgccctccgcacgtgcgcgccctcgcctcgacgcgcgcgcgcgtgcatgcccgcctctgtctccgcctccgcccccgccgttcggccggcggaagaccagcccccgggttagg

SEQ ID NO: 48530 - DNA, 334 bp, Mus musculus
  source 1..334: mol_type = other DNA
ccacagcctccagactgctggcatacagtgtataattttgtcaagacttgctactttgacacagcatggattttgaatctcatccaagttctggcacttgccattagttaattttcatcactgctgaattcaaacttttaaggggataaatcaaaaatacatcatctggtttgtagacaattcaaacaatacactaattaaaccatagcaggcggaagcggagccctcagcttcgcccgccccgcctgcttcggcgggagcgctccccctcccggccggggtcgactgcgcctgcgcaatgcgaggggtgggggcggccgcgagggctccgagc

SEQ ID NO: 48531 - DNA, 409 bp, Mus musculus
  source 1..409: mol_type = other DNA
tgtccagaaattcactgagtgcctggcctacccttcttagagaggcatctagtccaggatggctcagccccggcctctgagagctggctggcagtacaggaaccccaggcccaccttggcgagagacaggctctgagctgtccctcttaggaagcagtgtcctgagctcagtgatttctgcctcaggacagctgccaggagcccaaacgggtgaggactgtacagagctggtggggactggctcccctacccaggaatggagaagcccaggatgacctggacatctgtgaacagcgcctgggcagagctgacaaggtgcgcgcccctcctccacagcccgcgggcaggcgggcggccgggaccaccgggaaacctatgggtggggagtgggcggagatagtcccaggcc

SEQ ID NO: 48532 - DNA, 205 bp, Mus musculus
  source 1..205: mol_type = other DNA
agggatggcaccaccctgatcactaattgagaaaatgtcttacagctggatctcatggagacatttcctcaagggaggctttccccagaggtcttgatttttctgctgtccgtccctccactcccaaagtcaaggcttggagtagggaaggagggactgtgaccacacagtgacaggaggttcccacaattcaggatcctggtac

SEQ ID NO: 48533 - DNA, 394 bp, Mus musculus
  source 1..394: mol_type = other DNA
aagctgagttcagcgctagtaatttctaggccagcactgtaaggggagtctgggcttgcacgtggcggccagggagccccaagtgaacctggaggggcgctcactaatcgtgtggaaggaggcccgcggccgcttctcgaagctttcctcccggtccagcagcgggttcgccgtgccgttcatggccttgcacttgcccggcacccggattggagctctcctcgcgcggccgcagtccccccggatccccgcgcaagcggcccgcaggaccgcgctcccgggacaccgctccggagcgcgcactgaaccaagtccgcgcccacccggggtctcgagagactctgcggaagtaaggccgctgcacttccggcattggggagggacttccgtctcc

SEQ ID NO: 48534 - DNA, 457 bp, Mus musculus
  source 1..457: mol_type = other DNA
aacggccctagcacctgtaaacgttcagagaactaggcaagcaagctttgccatctttaaaacattcagaatatccaggaaagccctaagagctcatgccttcgcttgccgagctttgcccagcagactccaggctatgatgtccactcggtggctggacctggctagccatcctctgtctgctgtacagacaagattagggtagagttcccttttctgtgactccaaatagacacaaaggtagcttaggcggcccacgctcgggctggtgagccactgggcggcacctctcctagtggccatggccgggactccagtgcactgggcttgtgacagaggtcgtgacacaggctatcacggcggcctgagtgggtgcggtgtactgcgggccgctgcagacagggggcagccgcgcccacttcctctgccactccgcactcgccggcggagcacccgg

SEQ ID NO: 48535 - DNA, 329 bp, Mus musculus
  source 1..329: mol_type = other DNA
gtgaccagggcctcatcaagctagatcgttctttttctagagcttggattctaaacgagtccaagactcggggagaggttcccggagggctcttaaggctccggggtccaacaccctgccggggtctggagaggtcataaagaccaagacagtctctgagcctactgaggtcccgagaaccgtcatcgctctctgagctctgagctcccagggtcccagaatcttctgtgggctgcagcagtcccggagaactctctcctggcatatttccgttggggagacggaagtccctccccaatgccggaagtgcagcggccttacttccgcag

SEQ ID NO: 48536 - DNA, 311 bp, Mus musculus
  source 1..311: mol_type = other DNA
acaaactcttttaagaatatttttgggtttttaacttaattttacaattgtgcaggtgctctggagaccagacacatcagatcttctgagctccagcccctggaattatttttgtctgagaaaaatcccatattgaatggtccactcgaatgctgtttggaattgcaagttccccagcagaaagtcccagctcgacttgcacttttttctggtgggtgagactgtcccaagccaggagcttcaaaaaaaaaaaaaattctgacatcttaattttaatgtgggcatttgacccagtgcctgagataaatata

SEQ ID NO: 48537 - DNA, 295 bp, Mus musculus
  source 1..295: mol_type = other DNA
tctctttgccaaatggcaaaaatggccagttgaagactgatccttaataatcgatctgaatcacagtgatttgtccagtaattctgagaaacactattactttggtaaaagttaagcaatcatacattaattattaagcaatggctctaacaagcttgcctccaatcagcgggaagccccggcgagggcggggaggcgcggtggggccacgccccctcctcgcctggtccatcctcagagattataggacgcggcctccggctcgtcccgcctcctgctgatggcggagtccgga

SEQ ID NO: 48538 - DNA, 268 bp, Mus musculus
  source 1..268: mol_type = other DNA
ctgtcatgtacaggaactacatcagacttctctgctagaactaacagtctagtagtgaagtaagactacccctttcgattctgatatttggatgtggcaggttacttctcattttcctgtcaaggaggattaactggatgcccagttcctgggcagcaagggcgatgaacatgtcttcttgccctcccggggggtccaaaggaaagacctgacaacgcgaggaagttacttcaggtgacacccgcttctgacagacaggagggcagcc

SEQ ID NO: 48539 - DNA, 446 bp, Mus musculus
  source 1..446: mol_type = other DNA
tttattgaaaatcctgcacatctttttgaaaaaattgatttctttcaagtgggaggcaaaaacccttttgggagacattctcactctcgctccacgtgaagcagcatcggcccggaggttacccggttccagtccgggctccgcccaccgcgcccggggcgcgcgcccagacgccccgccacctggcccgcccgctccgcgcgccgccgcttcctgtgccccgcccctccctccgcggagaggcggagcccgggagcgagcgagcgcggtggcgtggccaatgggcgctcggctctggcctctcccccgcgcggccgccaatcgcggcgggcggtggtggggatgccgccgcggccgcgggctggagcggcgcggcggcgggggctggaggcgggaccggcggggctcttcgcggcggcggcggcggcgggcggccggggaggcgg

SEQ ID NO: 48540 - DNA, 331 bp, Mus musculus
  source 1..331: mol_type = other DNA
ccatcacagtgcgagcatatggccggcagctgctcattatgtgtgtacaagctaaatggagtttgaagactgaaagagcttgaagtatgcctgtcctccatcagcctccaggtgcttctgaggaagccaggtagccagacttgggctccctctgctcctcacttttagaaaggaaaggctagggggcaggtgctgacaggcagctggctcctggcatctgcgtctccaaaccagaagggaattctccttcctgctcttctgggtcaggagcgagacgcacacttggctccctgtcctatctggcagagggttcctgcagagctggaacccc

SEQ ID NO: 48541 - DNA, 380 bp, Mus musculus
  source 1..380: mol_type = other DNA
ggaatcgaacaacgtgcttccgagaactaaagttcacataaataatttgttcctgggcttttatggcctaggtatgcaatcttgggcaagatgcccagtctctaaatctatgttaaagatgaataaaatggatttttgaacctcaagatcaagtttaacatataggtcaccactgcagtgaatatttaaaattgcagatcttggttctctacaacacaaccgcctgaaacgcagctccctgagcctcaatgattcccccttggtggagttggtcgctggcacccactgcgcaacgctgctgcgcaggaagcaccatctttccggcgctatctccatggcgaccgcgaccgggtcacccttttggccgcggcggtagaagt

SEQ ID NO: 48542 - DNA, 452 bp, Mus musculus
  source 1..452: mol_type = other DNA
gtcataaatcacttttataatgagtgagcagctaggacacgtggccacatataaatctcttatgggcaagtctttagttgggtaacaacacaaagaactttcctcccccgaccctgtatgctagacagcctaggtttgagccttcccagggacctgcgcaagctcgagggatcgccggcgggccctttagagtaccttggtgatggcaaagttatccccacaggggcaagggtagaaatatgtctccgagtcctcgtccatggtcacccggtcggcaccgcatcagcttgcctacctgcgcccaggcagggtaaggcccggtcttcccggtccaccctggcgcaggaacagtcactcacttctaccgccgcggccaaaagggtgacccggtcgcggtcgccatggagatagcgccggaaagatggtgcttcctgcgcagcagcgttgcgcag

SEQ ID NO: 48543 - DNA, 359 bp, Mus musculus
  source 1..359: mol_type = other DNA
gacagagcctcttcagccacagactctggtttcgggtagtgctggagatgaaacccagggcttctcacatgctatggacacagggtgcaacagcgctattataaattacttcaagtttttaatcattcagacatgtgggcatgactcatccacaccatggaccatggctggaccctaaggccagcacctcctgggcctcagctccctggcctaccaggctgacctggaggctaaccttatgcctccaggatgaaggctcacagggaaagctctttctgtctgctctctcccatgaaaagcaagagaaattataagttcctgttcaacccaatatgttcttggaacagtatctcacctgg

SEQ ID NO: 48544 - DNA, 422 bp, Mus musculus
  source 1..422: mol_type = other DNA
ctgtaacattaattctgacatttatttactcaatatttaaaaaaaaatgtagcatgtttttcctaagttataaagcccatcagccttgtcttagtcactgttttattgctgtgaacaccatgaccatggcaactcttacaaaaggaagcatttgcctgggccatctttaccatttgtgcaggcagaagtagctcagagtactacatccagatccacatgcagcctggcttggacttctgaagcccagaggaaaaaaagagtttattttctttatttgcatgacgtgcacgcctggtgcccttggaggtcagaaggggctgggaaccaaaactgggtcctctgcaagaacaggaagtgcttttttttttgttagcccggctgtcctggccaggctgctccgcgcagggaaatctcgcgagact

SEQ ID NO: 48545 - DNA, 292 bp, Mus musculus
  source 1..292: mol_type = other DNA
actgacctggagttctgtgtttctgatacccttttctgaaatgcctttaggaaaacaaccacatggtggctcagtgcctgaagacagtcattctttactttcagacaggaattgtaaaggcgctctagaccagtctggtctttaaaacagcctgtctcccagtcggctgctggaccgttatcgcggtcgctgcgggacctcttgaccgccgctgggcccggggaggggctgccgaaggccccagcctcgcgcccacggaggccctgtggtgggcgacctggccggaaacctg

SEQ ID NO: 48546 - DNA, 552 bp, Mus musculus
  source 1..552: mol_type = other DNA
atttatcccggggagcggtaactaaggacaaagattttttttttcccgttgcctctgtgcggtcccgcccgccccgagacgcaggctggcgaggacggagggaccctgactggacgggagcgtccttggggtcgagaacacgcctctgcctgccagggaagctccgggagtccgaggcagtcggcgcagaagttccagcggcgccccagcggggccgcttcgtgcagggctcccagccggggcccgcactcatgctgggacccgcagcacacagtccccgggccggcccgggcggagagcctcattcactaacccggacagggacggactgcgcctccttctcggcgcgccgcgcaccattccctctccgcagcggcccgcctggaggctgccactcctcgggccttcgagcgagaccctcgctgcgcagccgcttgcctccgctcggcagcagggagcccaccagccccgggacgcgccgcttccactcggctcgagatcgggctccggcttcccacttccgggccgcacacagccgtaaagcggaagtgc

SEQ ID NO: 48547 - DNA, 304 bp, Mus musculus
  source 1..304: mol_type = other DNA
ttctttactttcagacaggaattgtaaaggcgctctagaccagtctggtctttaaaacagcctgtctcccagtcggctgctggaccgttatcgcggtcgctgcgggacctcttgaccgccgctgggcccggggaggggctgccgaaggccccagcctcgcgcccacggaggccctgtggtgggcgacctggccggaaacctggcgggccagactacctggtaagtgtgccacctgggccaggagactgcgagccgctcggtttttagtttttgaaacagaaaaaccttactttagttttgccat

SEQ ID NO: 48548 - DNA, 574 bp, Mus musculus
  source 1..574: mol_type = other DNA
agactccgagacaaacataaaacgtcatttgattatggttttatgtgatataggagccttcagatggacaattatccacagtttgcttaggatcagtggatcttaaacagctacgtgttacagtaatcctgtgaaggactgctgatagcatatcctgcatttgcttagaaatgatcactaataataaaagtgcagattaaatttccacaggttctgtcaatgtatattctttgttagattgtctgtggcaatgattctctcaatcccttggaaagtgaattggtagggcactaagcattttttcataaactgcttcatcctttcttcaaaacagctggaagacagcagaacttatagtcccattttatgggtgatagagaggaatctatctttcccccatacacacatactgtctccagtcactcagacagggcagacctgggctcctgctggccatctggaagcacctggctctttgggggccacatgagaggtcagcacctcggacagcgagggccgcagacagggcggggcgtctaccgagacgtcacgacgcgcggaatcccgagggtgc

SEQ ID NO: 48549 - DNA, 347 bp, Mus musculus
  source 1..347: mol_type = other DNA
aggttgtacacatggggagaattagaatacacaacagtagcatcgctctttataaagcgtacaaagatttcttcctccggtctctggggctgcctgcgtccagggatccagtttcctccatggagtctttaacaaaacaaagacacacaggtatgtctgtttgtatgtatgtataataaatcaatcaaaaacagaaaacgcagtgttcagtccactatacgtcagacacatactttctctaactggcgggagttactcactcacaattgagttaactctgtgctaacttgggacaggaaagccttggccccgcccagcagtggccccgcccacctctctgaaggctg

SEQ ID NO: 48550 - DNA, 480 bp, Mus musculus
  source 1..480: mol_type = other DNA
tgtaaaggttttacttagaggattagcaagaagaaacactttagtaaagtgttattaaacattaaaggctgggaattctaaaaatctcttaaaaaaatgttttcgcctaactggtttagaaatatttaaaagccgtgtgaaaaaaaattaatagcgcgcttgttatttggaatgtttatttctagaactacggggataacgttacacatttctagctgtcccaggaaggagtcagaggcgaggcccgatactcacgcgggacgccggccacccgctcctccggctccgaagaagccagctaacccgctggtggatttgttgctacttcctccgccaccttccatgaggtcgcagcaaacggcggtgggctcgccaccaccacctcaggccggggacgtatgctcggccgtggccgcggcaacagcgggaagacccgcgttgctcctgccgccggcgcacttccgctttacggctgtgtgc

SEQ ID NO: 48551 - DNA, 176 bp, Mus musculus
  source 1..176: mol_type = other DNA
gggggtgagggtgggggctcccgcccttgatttcctaccctggttgaggctttaaacaactcccaaccaactccttaatttttaatattttaaaggggtgcagtaagattagggttctgcataagcagctgcccaggagccggtgcggtccgggaagctgtcctagacaggttttg

SEQ ID NO: 48552 - DNA, 478 bp, Mus musculus
  source 1..478: mol_type = other DNA
ggggggggagagacccgcgcccagttttgacttccaggaccctggtgggtcggaaccagaccctgaaggctctgtaccttccccctcccttcccggaggaggggatgagacgggcttcccggctgcgtgttccagctgcgagaacagatggaggcagcgcggctcacctcgggggctccgtgcccgctgtgcgccgaagggctgggaggaggtctagagcccccggctctcccgtctcccaccaggctgcggggaaccggctgccgcacccctcctcccaattgggggaacctcacccctataggtcccagaactgggggaaacatagggccggttcctggcttgtatctcggaagcggacccctgcccggacgcgccccgcccccggcccccggcccccgccccgacgacgtcatgagcgacgccagtggcccgggcaccactcgggggccgagactcaccggacggcgggcggcgg

SEQ ID NO: 48553 - DNA, 275 bp, Mus musculus
  source 1..275: mol_type = other DNA
agtgacactttgtcagagaggctcttgtatatatctatactaaagccattttttctttaaatgcctggcctcccaggggactattgattgagtcagttagctctcttctggctatagctagaagctaaacagctttttggcagcactggagtgttgccaatccatcattttggaaagcacatgaccaaggaaaggcccaggcttcttcctctagaggcagatgttgttttcttgccatgtatgtacacacacacacacacacagtcaaggtcctt

SEQ ID NO: 48554 - DNA, 475 bp, Mus musculus
  source 1..475: mol_type = other DNA
gaacttatcaacagttgtctgattcgcatcttctgatgcatcttgagtgggtcataatttattttcagtggtgcataaattaattacacgcatttaataaccaaaatatcattatattccccctttaatatcataaaggctttccgccagggaagcgttgctattacagaaccaattatgaattgacttgaaaatttcaacccggtactttagagttacccaggcagagagaagggcggtctctctccgctgagtgtctgccattttaaaagtaattgcgaagggtcccactgcatatcatttgcaactttccttttgtacgatcgcttggaaagggaattagcagcgtggctcactcagagatagctgttgtttttatcttcgtttaaaagaaaaaaagggaaaaacattcctgatgtttgctggggccatttgtaaggcccaatagacctatccgcgctggaaataatcagat

SEQ ID NO: 48555 - DNA, 442 bp, Mus musculus
  source 1..442: mol_type = other DNA
tagttaatattagttaacaagtattaagtgacttaatgtagttaagccatcgcatgtgtacattgaatgatttctgagttcgaggctagcctggtctacaaagtgagttccaggacagccagggctatacagagaaaccgactgagatgcgtattttacatatcaaagcctccagtgaacttcccagcccagggcctgggctgcccttccctcaggcctttagtataatctggtttaaattggcttatttcaccggtggtgacggagaaataacttattaatatcttttaattcataaaactagataacatttgtcaagaatgataaaaggccacgcgcggctccctttggtcaacgcacgtggcaaacccttgcttacaaacggctcagcaaggcgcaggcgccgttggtcctgcccgcccccagaggcggtgcttagcac

SEQ ID NO: 48556 - DNA, 538 bp, Mus musculus
  source 1..538: mol_type = other DNA
aattagcagcgtggctcactcagagatagctgttgtttttatcttcgtttaaaagaaaaaaagggaaaaacattcctgatgtttgctggggccatttgtaaggcccaatagacctatccgcgctggaaataatcagatcgcgcgcttctggtcctgcgggcgccagcagcgccaagccccgcccgccgccagccgagccccgcgtgcggactagaggcgagcgcactccggccttctcgcccgcctcccgcagaggtaggcagggttcccgtgctgctcccccggctccctgcgctgggccttgggacttcaccggcccgagctgctgcgcttgcagatggccttgcgcgatcgccggacccagctgcggtggccaagtgcagggcttgtggttgggacccaccaggagccagactgtgcccagctcctcgtggcttgggaagggaggtgcaaccacttctcccaccatccccgcggtggccccaggggaccaagggcttcgggaagggcaggaggagcactccctgtgatcctcggg

SEQ ID NO: 48557 - DNA, 188 bp, Mus musculus
  source 1..188: mol_type = other DNA
aaccccttatagggctaggagacatacttctttagcatgaagaaccttcttggatgacacttacattctgtttgcacacatctgcaatcactggagacaaaggtctttgatattaatgtacagaccagagcaggcagcattctcctgggccaagaagaacccacagtctttggctgtggctgtcctgg

SEQ ID NO: 48558 - DNA, 85 bp, Mus musculus
  source 1..85: mol_type = other DNA
ttcccctagggctgaactggaggaccagccttcccccagcctgtggctggccagattatgaaacagatttctgctctgggacagg

SEQ ID NO: 48559 - DNA, 347 bp, Mus musculus
  source 1..347: mol_type = other DNA
gggaggcgtccactggaagtctgcttcctttctctgacaaaactctttatccatggctcagttcatatgatatgagatcgacatatactaatgtactatgtctatgtgtctatgtatctaagtgattgtgtatgtgaacattcacacttgtgtaagttctgctctttatgagggcagtgcctgcagaggtccaattccctgaaactggaatttcaggtgatagtcagggctattaaagtctttatgcctgcacacatacttgaaagcatgcgtcttttcctggtaacctggcagggacgtttagtcttgccaagggtcacagaacagacccgtgtcactgatgacat

SEQ ID NO: 48560 - DNA, 341 bp, Mus musculus
  source 1..341: mol_type = other DNA
cttcctcaggcccttgaagtggaaggatgtgccactttaaaaaaatggatattttatttatttacatttcaaatgttatggaccacttttaacaaagttctacttgactggtggtgttttctgaaccccgctgatgttcaccaccaggcattgggtgtcaatgccagacattctaggctctcacctggaaagttgaactcttctgtgggaaccctttaactttccagctgatgaacccagtacctaagtttctggatccttctggacaacgtccaacgttacaacgtcctcctggacgccttagtttctcatctgagacgcccagtgtggagaggccgctc

SEQ ID NO: 48561 - DNA, 456 bp, Mus musculus
  source 1..456: mol_type = other DNA
acattttcccatacaaatgtccatatgcttatgttattttgaattgagtttgacagcttcaggactgtgccacacaggtgtgtttctagctgtcacactactgggttagagtttgaaatgattaagcaaatgcccagatatttcttttaaaaggtggcactctcttacacttctacacatcaaaacacacactgttgggaagggtgtgtggggaaggggccctgtctcctgctgtccttggccatgacatgtaatgtccgtgagagggcttccctgatggctatagtgatcactgctacttggaaccctccagatagccctgaatgttctgagccttctggagccaagaacttttgaaacctcataagcttagattttattttaaaatatgaaatagctgttagagttcaggaagtgaaaaggcctctatcttcagaaagagctggggagagcaag

SEQ ID NO: 48562 - DNA, 231 bp, Mus musculus
  source 1..231: mol_type = other DNA
tgtgtttctgagcctcacactcttagacataccttaccatttagagaagggaaggccccagcctgctggcaccaaacacacagtctcaggggagtgtcattggctccttggagggaaggatgggaagggcaggcatctgctgacttcccacttcaatgaaacactgtttcttggataagagagatcagccgcagtgcctctcagcacccttgtcacttgtgagttttgctg

SEQ ID NO: 48563 - DNA, 362 bp, Mus musculus
  source 1..362: mol_type = other DNA
ggtggctctaggcccagtttaggcctctccctcatacataaggcactgggcaaagtagccagtatgcttccatagggaggcagctgatggatgtagaccagaaccctgggctttcatccaggtaaggtatcagatgctagctctagctaatgcctacaggcagcagggctgctcaggggtcaggagctgtgctgagagttgcccgccagcctagagttcacagctgcctgttctgatcaagccagcagtttggagtacactggaggtctggaatctgctctgacatgccaggagcagccctgatcactgcggcaggctgagcggggagggaggctgatacggtcctatctccgcacctggta

SEQ ID NO: 48564 - DNA, 213 bp, Mus musculus
  source 1..213: mol_type = other DNA
ccttggggaccagtcagtcctgcccaggttggaaggatctaccggtgcaaatggtatcatatgtcctaaagacaggtgacaggtgccatgataaataccactagttataagcattccacaactgtaaatgatgtaatgatgacacatttccaaaactggggtctaccccagcacttggaccacaagcatgctcagagcaatttggtctgagag

SEQ ID NO: 48565 - DNA, 326 bp, Mus musculus
  source 1..326: mol_type = other DNA
tgcgtgttacacagtgtctagaacacctggtggtgttttaccttttactgagaaacattttgctggctctacctatacatagtttcccgtggacaagcttgattagtatttttaatagggaaaaatatatttattctctctctctggtgggctgagaaaaagagccaggtggctttagaccacaccccctttccgtctaaggagccatccttgtcgcgcaaggacacttcatcctctactcagcgccccctggcggccgctgggtgcgctgggctcggcgccggaggagagtaacgggccgtggggagggcgccgtcccggccgag

SEQ ID NO: 48566 - DNA, 609 bp, Mus musculus
  source 1..609: mol_type = other DNA
tgctcacatttgctcataaccattttaacatgtaatgggaacagtctacctgaatttactcaatacatatttgtatattttggaaatcacagtatactacacaggtgtaatttttttccaagtttaatatactgtgcatgtaatatattttatataaacgtagaatcattctatatgtatgtgcctttgaactctttaaagtgctaaatatattttgcctcatgaatgatagtgatttaaatacctttccatccattatatttgcgagagccgcaaggacttgcgtaacttcttccagggagctagagaacatctactccttcaaaccaggactccgtggttcaggtgtgtgccctggcacgcgtgcctgaccgaggctagcaaccatgcaggcttaagctatgactggtgtttcgccgccacgcgccgccacgtgccatcgctcacacgcggccgcccagacgctgctcgcggccccgccccccagtgtagccacgcccaagtcgcggggccacgccctcgtaatccgggcccccggggctggcccgcccctaggccgctcgccggcgcggaggcggggccctgcgcgatgacgtgggcgggcgtgcg

SEQ ID NO: 48567 - DNA, 293 bp, Mus musculus
  source 1..293: mol_type = other DNA
tttcttggaaagaagccagtcaagttcaggtcctggcccttcccagcgctctcctttgtggccgccagaggggggaggagcctggacaggcactggctgctcttccagaggaccgtaaatcttttaaaaatgctagagagtggctgtcaccttggagccctgtccctagcacactgccctacaggagtcacctggctctcctttgtgacttgaggtcaagttagcgtgaccttgctatgctcacggggacgttcccttggggatcccctccctggacattcccaactttaagc

SEQ ID NO: 48568 - DNA, 360 bp, Mus musculus
  source 1..360: mol_type = other DNA
ccctactttctgcaggaccaagaccgtggcttctgttccttgcatcagccaacatccataatgctgtctcctttgaaccactgagacaaaagttggaatgtttcttgatgtgacctgttctctggaaacaaaatgatgagaccagtaacgactgctccatccctagataaagggtagctcttgctattaagctagatagcagctcagatgtttcatcttgtcataatactggactaaatggatagagttatttttgtcaagacaagttatagcatcttaaaatataaaaggaacaacagactgcaggactcacagtgggcgctgaagttcctcaggtgaccagcaggggccaggtttacc

SEQ ID NO: 48569 - DNA, 460 bp, Mus musculus
  source 1..460: mol_type = other DNA
tggggccccttctgccccctgccctttgaaactttttacaaagtaaattgaaagcatgcccttttctttagaaagggtcaagttaacctgatgattctcacatggcctctgggtcctcatgatgccattgcagggacaaccccgcaggcgggccccctccaaagcccgcccagcccccgcgacgccctggctcagctgcaggcagcgacactccggagccggctgcggggctagtctccggctctcggcgggggagcggggagcgcgcccgcccacacccacggcccccacactcgggagcgcacaccccggcgcgcgcacgcccgcacaccgggacgcagggccacagaccgtctcttggcggcggcgagtggggacacagcaggatccccgccccccgcacccccgagggcgctatcggccacctcgccccgccccgcccctcgaactcgccagtccc

SEQ ID NO: 48570 - DNA, 440 bp, Mus musculus
  source 1..440: mol_type = other DNA
atggatagagttatttttgtcaagacaagttatagcatcttaaaatataaaaggaacaacagactgcaggactcacagtgggcgctgaagttcctcaggtgaccagcaggggccaggtttacccgaggctcgggcgcaaacctcctggtgaggcggttggggcccgaggcctacaggcccaggtccttcctctgcctctcaacctcgagcacaggctgaactctgagactccctggggcctgtggagtcctgatcatgggggcgggagggctggactaggcctaccctcagggtgaccggtgtccgggtgacaggtgtggcctgccgaccctgttctgggcctctaagaccaggctttgatgaccaaaggcgccatggacactcaagccagtcagggttggttggggtgattggggaaagtgtacccggcacatgttcta

SEQ ID NO: 48571 - DNA, 272 bp, Mus musculus
  source 1..272: mol_type = other DNA
ggtcaatatgcatcagatacatatgtttgtggtacatggcatcagcactggagggtggttgacatagctacccactgtcaggagctgaccagaacagtggggacaggaggtaccatctgtgttggctgggacgtcaccagtccactgaatgttctgggcccatgcacactccattctcagtactcaggagctctttcctcagaggccagtgcctagataaggaccagacttcgtctgggaactcttctaattagggtggatgaccctccgga

SEQ ID NO: 48572 - DNA, 391 bp, Mus musculus
  source 1..391: mol_type = other DNA
tccctgggactggctcccagcagaagctgagcccctaactattggggggggtgtctccaaatgaggctcactagatcacttaaccttatctggtatcttgaaagttgcatctatattatacctagaagcataataagggtataggccttcccagtatctgagatataaaatagatatgatactcattatagagcctatacgcaatgctttgtgaaagcattcatgtttaatctacccaataacttagtctacagaacaaactgcgtctgggtgagccacagtgggaaaacgatatttatttgtagattaacgattctcatttaaggaactcaaactaaatgcaattgtttgtgttattctacacagacatggctcagctgtccagctcatg

SEQ ID NO: 48573 - DNA, 364 bp, Mus musculus
  source 1..364: mol_type = other DNA
ggatccccaaccatgtcaagctgtttagcaacccaggtttaaacatctcctggtcctgcaggacatggccttatggctttctttcaggaaagttacctaaaagacccttggagattgttggcagcccagggcctctctgccacccacgacttgggctgcgcaggcggctattctgttcaagaccctagaggttggagtgcactgtgcaaccgcttagaggtgagactggagctcctggctgtctgtcaagctccgaagcccagtctatggtctctggtgcctccgcccggaggagccaggggtgaggaccctctacgggcttgaaggtcccgccctcgaggcggggcctggaatcccgcgggct

SEQ ID NO: 48574 - DNA, 360 bp, Mus musculus
  source 1..360: mol_type = other DNA
agttcgaagtcagctaacatttatcttgtaggtctattttaaaatgaataagagggaaggttatgattcttaatgactttttgagcatacatacaggcataaaaagaaattgatgaagaagggtgaaggcactggggagcccacccatgacaccatgcctggtggtgtgatgtgcactgcagacactgtctgaagttcctcagctcaggtgccacccaggttccctttccagggggacctccccactccaccgtaactgaggacacttaacctgagatcacaataaaatggttgtgttaagtcattaaggttgggcagcccatcacatgtcagtggatgggtgaactactcacagtgggg

SEQ ID NO: 48575 - DNA, 557 bp, Mus musculus
  source 1..557: mol_type = other DNA
ctgaggcagccagtacagaaggccctaactgtcaggactgttcagaaagaaaaagaaacattctgcaaggtttccttggatttaaaagtcatcatgagggctgagagctttaggagccttcctggaactgggtgatgctcccagaggcagcagcctcacactgaaaggtagctagctaggagctagcttagttaagggatcctataaattcccaaaattagctagttgggaatacctccccatgggaggcagcagcctctcaccccatgagagttggtacacagtcactctgttgtcacaacaactgtcattgtgatcatgacccaaggatccgtcgttgtgctgctaagtatgcaaagatggcagtaagcagaagggctgcgcgctgccggtcccttctccctcagagtttccaagctatgtgacagccacagcccaaacattctcagggcaggcccgggcagtgtctgggtggggtctgggagtcacaggaggggcccgtggggctggacctgtgtacacaaccacacctactatcggggagtagctgtgtccag

SEQ ID NO: 48576 - DNA, 363 bp, Mus musculus
  source 1..363: mol_type = other DNA
ccagtcgaatgagagcagctagaggcctcagaatctgaggccaacgctgagtgccaaatgcatgttagacatagcctaaacacatatttcttgtcataagttgtttgtgtcatgtgtgtggttacagcaaatagaaaagtaactaactcagatacttgatattaaaaaatgaatagggcaaagctctggcctgcacagtacttggtttttctgagaatgatgtgatcagaacagcaatactgtgtaacagggctggttgtctactatgggttgcttaagcagaaaagaatccctaaaaggttattggaagccctccaaagctcttaatagatttgggtctgtcagctcatgttgcaacagaag

SEQ ID NO: 48577 - DNA, 377 bp, Mus musculus
  source 1..377: mol_type = other DNA
gcctgtgtgtggatgatcctaggaggtccactaagctcagatgagtttaccaccaataacctggctccatcatcgaatccattgctgccctgcctcaggccttgctgtgtcctctctttgggtcaccatctaaagaggacacaggtcatctgatgatatgacatcggaaccagatcttgtgtcattcagctctgtgtgtacagtcagacaaaaaggctcacagttcatgttgttggaacccagagactctagcttctgcctcccaggtaggaaagtacattttaagtcatgcagtgtagtttgcctgcaagtggcaggctgacggctgccagcacctcgcctcctgggggctggctgtgggtgcggctcaccagcgg

SEQ ID NO: 48578 - DNA, 148 bp, Mus musculus
  source 1..148: mol_type = other DNA
cactgggagatccctgaggtaggctgcgaaaccatcctagcgtgggaatccttaaggacctcatgctgttggatccagcaggcctggcctctagagaaaatcgggcggggccgggacgctgagccgtgaagaggcggggcgcgcctag

SEQ ID NO: 48579 - DNA, 407 bp, Mus musculus
  source 1..407: mol_type = other DNA
agtttcatctttgggtgttacgtctatgattgtaaatcacaaggtaggaatccttggagatcccgttaatgatcacctgggtacactttttaagtcaccgctaagactgtcaaggtggtgagagcctcgaacctgagttccacacagctgctgggagtctgtgcacaggagccaaaccgggttggggccctcgcaggctccgcgcatgcactgccagacgctggtgaagaaggctctgctctaccctcagtgatgggagtgactccgtacctggcaggggccgcaggaagctgctcgtgcctctggcaagggcccctaggaacttgcagcagcgcctccgagcccctcccgggccagggccagcaccagggcggggcgtcgctgtgacctggggcgctggagccctg

SEQ ID NO: 48580 - DNA, 763 bp, Mus musculus
  source 1..763: mol_type = other DNA
atattacgtggtagttttaggctgccacacccgaggcgggggagcccgaagcggggcacggcctgcagaactgggctgggccgagtagcggcccgggctacgacagaaaggggccggagggcgctcacctcccttgcagggcgtgcggtgctggctgtgctgggcccggtagccttcgatgacctcccaggagccgtcgtcgcgagggcttgatgatcctcaggatgccgcgcacccggttcctacgatgctggcgccgcggtcgaagaagccctccaccatcttgaagaagttggggtcgtcttcgcggtcggcggccgcttcgctgtagtggcgccgggcgaccggcgtgagcccgggttgcggggcggcggagggctgtccgcgggcccagcccagcagcgcggctgagtctgcagccgcagagcccagggcagcgggcccggcgcgggacagcagcagcgcttcgcccagacggcggtacatggcggcggcggcgggctgaggcgagtgcgggaccggagctcgcaggcctggaccgcggggaggaagggctgggcgcgagctgcccttttaagcctgcgccgcttgtcgccccaccgggaggacggacttcggcggccgcgcgccgcccagggcgctgggcctcgcctccgccgcggccttgcccggcctccaggcggcggcgcgtgcggctgcggcggcggggggcgcgcctttgcagatgggcttggtgcgcatgctcgcgggcgggggcggggct

SEQ ID NO: 48581 - DNA, 590 bp, Mus musculus
  source 1..590: mol_type = other DNA
cgcagaaattaaatatatatactgagacattatatttctagtttagttagggtggttcccatgagttctgggcaagcctgggctacaggggccctcaacaatgctttgcataactgttttacgggatgagtcgggaggcctcggcttcggcgcggcgtcactctccggccggccgcgcagcggatccgcacaccgttccggcccaaggcggaaaggaggggcctggtgactcatgcggccggggctgctggccagccagcgaggcctccctgcagtccgcttccacctcccaggccgccgcgcgtgcacacgggaccgaccttccgggccgcggccgcgtccgaccgctctcaggagcccaggcctccgggccgcagcccgcgcgcgtccacgctagccccgcccccgcccgcgagcatgcgcaccaagcccatctgcaaaggcgcgccccccgccgccgcagccgcacgcgccgccgcctggaggccgggcaaggccgcggcggaggcgaggcccagcgccctgggcggcgcgcggccgccgaagtccgtcctcccggtggggcgacaagcggcgcaggcttaaaaggg

SEQ ID NO: 48582 - DNA, 334 bp, Mus musculus
  source 1..334: mol_type = other DNA
catagctatcccattttatagatggagaaactgagagtgctcctagggggaatcagggtacaaagcggccagcatgtccccatgtgctggctgccccagtcctgggtaacccggggagccaggatgaccacatgggtcaatgctgtcccctgctaggccacagacaggactcttgacaggcaccccagaggtcttgacatcatggcgtggagagcctagatcccagctaggacctggcagaactattgttcccaagtgctatcttctcgaagaacatttgagctccttgccctggagaccagacctgttcagagatgacctctctgaaaagcac

SEQ ID NO: 48583 - DNA, 460 bp, Mus musculus
  source 1..460: mol_type = other DNA
cgcaaagtgctgccgcagccgctgtctctgctgctactgcctctttggctgctggctggagcccagccagcccgggccagggtgggggcagggaggcggggataccagcgagcagggcccgggcccctactggctcctcagtgtcccaggctgggccggggtcagggccaatccaatgaatggccaacctgcaggctgccctgatccatcctggatgctcttgagcctggagctctagccaagtgccgagcaggtgtgatgtgcccgttccccacttcctggccaacagtgggtggcaccagatctcctccaggcccacgacagagtcctggagaaaatggggccacctttatggtccctgattcaagtgccctcaggacacaggaattgacctgagtggttggaggcctccaagggggccaggatgagacttgccgggtgggccggaccaggccacttc

SEQ ID NO: 48584 - DNA, 457 bp, Mus musculus
  source 1..457: mol_type = other DNA
tgatgctcagccttacaagtgactctcaaatttgctggtgatgaagtggcctggtccggcccacccggcaagtctcatcctggcccccttggaggcctccaaccactcaggtcaattcctgtgtcctgagggcacttgaatcagggaccataaaggtggccccattttctccaggactctgtcgtgggcctggaggagatctggtgccacccactgttggccaggaagtggggaacgggcacatcacacctgctcggcacttggctagagctccaggctcaagagcatccaggatggatcagggcagcctgcaggttggccattcattggattggccctgaccccggcccagcctgggacactgaggagccagtaggggcccgggccctgctcgctggtatccccgcctccctgcccccaccctggcccgggctggctgggctccagccagcagcca

SEQ ID NO: 48585 - DNA, 378 bp, Mus musculus
  source 1..378: mol_type = other DNA
gccaaggcccccgcccagggcacactgtcaccggggtatgggctgaacatgccaaaagggcacggagcctggcgtgagacgctggcagctgtagctttccatgctactgtctaactgcctgggccccagaggggtcacccccttcttcggcctattatccgacatgagtcccattggaatgagctcaggatcctgtgggacctgacttctctgagacttggcttttacaatccaaggtgccaggaccctcttgggccaatcattcttctgacccattggaggctaagctgagtccaaggccccactggggccctacaagggataaggtgcctgcagagggaggccagtcctccatgcctgccccttggggatgggccc

SEQ ID NO: 48586 - DNA, 651 bp, Mus musculus
  source 1..651: mol_type = other DNA
agtgacagttctttgcatttttctaaaagtatttatagtccgctgacttcagttcagcccgcaggcccgcggatcacaagccaccccagcggcggggcccccgggccgaaaccaggctttcgctacgtgatccggagaacgcgtctccacgttcctcccggcgggccagaaccggcaaccgatcccgcaccgggagcctcggtgccctcggagccaccgggccgcttctcccgtggagcccgagctccggctctagaaggaggccccagtgggcccctccgtcacgcgtgcggtggcggcggcggcgtgcgctgaggggcgaccccctcccctcggcaaacctggcgcccccgtgccggcggccgggcctccttcccggcagaggggcgccgaactccacgggcccttcgggcgcttccgccgagctctcggctcggttcgtgtccggggcggggccggcgccccggcgcgggtgcgcgcagagctggcgggcccttcccagtgcgcgcgcgccggcgcctcttgctcgcccgagccgcccccctcccccgccccgcgaacgagcgagcgtcctccgcggctgaggcggcagagattggaatctgcttgcccgccgcgcggaggaggagggcggggagggaggctcgagct

SEQ ID NO: 48587 - DNA, 515 bp, Mus musculus
  source 1..515: mol_type = other DNA
gttatgaaccaaaagtacctgtgttttttgatggtcttaggaaccctgtgaaaggctaagaactgctggtctagtacctgacttggctgctcagtgctcccagataagactgctctggagcatcatcagagagcatcctgatgagccttggtgtactagtttctctaggaaaaacactttttaaatttattattattattattatcatgatatgtaagtgtgtgcatcatgtgggtatgtccatgtgactgcactactttttttaagacaagttatcactatgtaggttagtctcaaactaatgagttcaagggatttcttttgtctcagtctctcatgacactgacactatagttacagtcttaacattgtagcatctcccttcatgcagggaagtgtgagacagccagtgtccccataggcattcgcatgcacatatacacacatattcatgtcatcaccatcagactcttgtgggctgatcagggactactcagcactgctacttaaaagtg

SEQ ID NO: 48588 - DNA, 400 bp, Mus musculus
  source 1..400: mol_type = other DNA
tttgagacataaatactggtatgatagcatatgtgtacatatcctagtctaaaacaaaataaacgtattggatctgtgtgtgtgtgttttaaatttaaagccacattaccgtaagcacgttcggctgaagcggatcccggctgcgaggagaccagcacccgactgctccaggtcgcaccgtcagaccaggtcaaaggcggccccaagttccccgcctccaaggtccgggcggtggcccagcaggctcggcgcagacacagctgcctgcactgtgccgcgagccttcccgcgctgcacctgcgggaactcccgtcgggccacgcggtccgaccaatggtggtagccggcgcgtgcggggcgcggcgcctgcgcggcggggctgcggagtcgggcggccgcg

SEQ ID NO: 48589 - DNA, 707 bp, Mus musculus
  source 1..707: mol_type = other DNA
gggaacccggaggcggcgggagccccgctctgcttccgcggctgggagcgagctttcctcccggttcgtacaggtcgctgtctgagagcgccggccgcttggaaggctcctcacgtccaggcgccgcggtcacggctgcgccggtttccggccatgaattgggcttcagagtctgagcctcctgcccgactccgggctcagtgcaccgccccgggggcgggggatggacgcccgccgaaatctacccggacagccagggttcgagcccgccgcccgcccgctaagcatcccgatgccgggtcgggttccgagaccccctgatccgttcgagttccccctccccgagggtagccgggcccacacggccaagcctaggctcgagtccccaccgtggtgccgtcctcgtagcatcccccggccgggagcgcggagcaccgggcgccccctccgagcgggcgagcggcgcgcggctaggcggagggggaggggagggggcgtcctccgcagttcgctcctcgcctgggctcagacacatagccagcccggagccgccgcgcgggccgggccgccgccgcctctgcctctgccgcccccagagccgctcgagccgctggaagcgccgccgccacagccgcgggccgcccccgccgcgccggcctgggctcgggctgcgagcgccgccgcaaccgcaaccagagccggcgcgg

SEQ ID NO: 48590 - DNA, 279 bp, Mus musculus
  source 1..279: mol_type = other DNA
acccagatcctctttgtgaaagtatggtgtttgagttcaattccattgctgtgacaaaacacgctggggtatgtgcctcagccagctgtttacagagtgctgtaacccctgggcttaagccctacacaggtatgcatgtgctctctttttgcacagaacacacacacacctacggtttatggtccactggagtaattagactcagattgcaaaactgatatgctacttgtatcccaaatatagatgacaaaggagctttttaggaaagcccttctgata

SEQ ID NO: 48591 - DNA, 181 bp, Mus musculus
  source 1..181: mol_type = other DNA
aaagaggggaagtcttctttcattccattgctgtaatactgaattaattcacccagaaactgagccagctgattacagagaatggaaagacattcctgttttggaacaatgtattctaaggcatcatggctcaggacagtagtgagatcaccctcttggcaatgacctcataatgaagccc

SEQ ID NO: 48592 - DNA, 334 bp, Mus musculus
  source 1..334: mol_type = other DNA
tcctttaaagttaatagccagagtctcagctgtttatgtgcttagtagtatttattgtatataatttatattcagtacagtacatgaatttacaaacatcccaagatattttttggagttgtccagtattccaaagaaaggtcacctcttagcaagaatataaatggagccacgcacatattattttgtgtctggtctgactgatcagcctgctctcagtaaatgtttattgaaataactgtcataaaataaatagaaacccctaaactgcagctactgtttgttgctgaatagccactctagaaagtgagtctctaaggcatcacctaaactg

SEQ ID NO: 48593 - DNA, 454 bp, Mus musculus
  source 1..454: mol_type = other DNA
gataggactgacctagcactgtttcggctcactctctgacaagctccggatgaaaatacctaaaatttaaaacattatttggagtataatgtttcacccctaccacagtgttccaagttctctttcaatattattaatttcagttgacgctggctttcatgatggtgactctcaacgacttgtctatttggaatgggattgggatccacagcctcataaaatagctccaattcgctcagattcagtatgcacggctgaggcattgcttgctccagtgttcagatcactcctgtcagactggagccggagctgacaggtttggttgtggtcaagctgcacatttgaatccagcccgcgaacgcgggcccgcgcgcctgcgcaaggcgggaggcggggccgcgcacgcgtagtgcgagggccctggagggcggagtccaggagggtgccggcctag

SEQ ID NO: 48594 - DNA, 411 bp, Mus musculus
  source 1..411: mol_type = other DNA
ttctcgtgagaatttcagcatgagccagtacaaaagttgtaccaagaccttggtactttcaaaaagaatgcaagccattctttatcctgagagatattttatgattgcatagctcaatggctgtctgtgagacaggaagtgaagccctaaatccatgatggagttcaaccagcacttaacagtcatggcagactttgctttatgatgtgaaacacacacacacacacacacagagagagagagagagagacacaggcagcttgtcagcagctgtgcatttggatccaagaccttaatcctgcctagtgggctggaatgaacaagacagagctcattccagtatccatctactgaatggattctttctatgtgaagaaataaaaaaggtgttattagtctaccataataatc

SEQ ID NO: 48595 - DNA, 305 bp, Mus musculus
  source 1..305: mol_type = other DNA
gacgcttgaggaagggaaagcaggtgtttgcctatgctcatgagcatagatgggcacctttgaacacgtacgtgcctgtaagtgccagaaattgacagttttcagaaaggttctggcctgggctaattttcaccagtattccaggtctgacgatctgagatcggaatacaggtgtcaggccctgaaacatggactctctttgcaagcagccagtcactagtcacttgcctctgggcagctgcccgtcaggcatcagtaagctgctgagtgctagggctggggctccctccctaatccccagcctg

SEQ ID NO: 48596 - DNA, 329 bp, Mus musculus
  source 1..329: mol_type = other DNA
gcattaattaatctatccaaagcatgtgtttgctgatgattcttgttctgtagaagaatatctatagagtttattttcttaccactgttgtgcctagaaaacatgtatcttgtcacagatgacattccatattggaaggacaccatgatgttctccaattctagtgatatggattgtagaagcattagtcttaatgcagtagatgcggtgctggcagaccgcaagcaaggaaaacaatcccagggttgttttgttgctcatcaagaaaataattggaaactggcatttcaggattcctttgtgaactgaataataggatttgctactca

SEQ ID NO: 48597 - DNA, 366 bp, Mus musculus
  source 1..366: mol_type = other DNA
aaagcaaagatgcagaaatgcttgtgtggtttatttacacaggcttttggtcttccttgaggtaccccaggaagacagagggtctcctttgtctaagactttgaaagcaacctgggttcaagttattactcaagttggggggaatacctcatcccaattgatgaatgccaggaagagccttggactttttcttttggtctgactcaaaactaaagaacgtatttgaattggcaaggcaatgccgctggagtactttgatcaagcaaatcccgaatttctggtggctgtgcagagctccacctctgcacctggtgctcctggggggcgtggtaggagagaggtagtcttgtcacgccctcccacccg

SEQ ID NO: 48598 - DNA, 221 bp, Mus musculus
  source 1..221: mol_type = other DNA
tgtgaggtcagtcacacatctcagccatgcctggctcaggctggtacccagcttggcacagatgacttcttggaacatgtcctcaggccgctctgtgtccactttacagatggcaagagggcaggaagatctgcattcggtggagttattgctcactctaaaagttaacctttaacccttacgtgcagcaagtcacctaatcctcctgacttcttgaagag

SEQ ID NO: 48599 - DNA, 378 bp, Mus musculus
  source 1..378: mol_type = other DNA
ttgatcataagttataaaaacataaactttattaaaatgctcaagttaattttgtgtattgatatgttcatacatgagttcatgtagcataataaaagcaaagtagtgaaacttcggccttataattaattcaaagtaaattaatatatgcagaactcactaaaccatcccttaacatttgcataatgaataagtctgactaaattatacctctaagggttagttaatactcggcgtaaaacgtgttttaagaatgactcttaaatagaacaaaatccaatttaaatgtgaaaattcattgttaaacctaaatcgctggcctagagctcacagcgatctgcttgagatgcccaaagcgtttgccccccagaaactgcc

SEQ ID NO: 48600 - DNA, 473 bp, Mus musculus
  source 1..473: mol_type = other DNA
cccaaaacaagaaactcaaccaatgattgtttaactatccatctaacttctaaaagttcctaaaattaaggcttagttttcagtacatacaaaaaaaaaattgatcataagttataaaaacataaactttattaaaatgctcaagttaattttgtgtattgatatgttcatacatgagttcatgtagcataataaaagcaaagtagtgaaacttcggccttataattaattcaaagtaaattaatatatgcagaactcactaaaccatcccttaacatttgcataatgaataagtctgactaaattatacctctaagggttagttaatactcggcgtaaaacgtgttttaagaatgactcttaaatagaacaaaatccaatttaaatgtgaaaattcattgttaaacctaaatcgctggcctagagctcacagcgatctgcttgagatgcccaaagcgtttgccccccagaaa

SEQ ID NO: 48601 - DNA, 367 bp, Mus musculus
  source 1..367: mol_type = other DNA
acaattacctttcaaaaatgattcattagatgttattattgattatatatatgtgcaagtatacctacctgaattctgtaggactactgcctggaatctattttaagacaaacatctactccaaggattggaataaaacaagctgtatcagacttagtgaaatagtacaggatgtttggagcatacatggtgacaatgcaagtttgtcaaagtattatctcagaaacagtaggctggattaaaggagcttattctctcacagactataaagtgggcccaccacctagcttggtccaggtaaggaacattgtttgataacaatattaaagaaccagtttcaaactggccattcagtcaaggaccacct

SEQ ID NO: 48602 - DNA, 229 bp, Mus musculus
  source 1..229: mol_type = other DNA
ctcagactcaagagacttgatgcctcagggagtttatttcatggtgtcttttcacagcaataaaaccccagcataatgggatattgctgtgacaggtttgaaaaaccgctgagtgttgaaatctgagtaggattttctatagacagctgtgattaacaagatatcagatctactgtcagacttaagaaattatagtgattccagaaagtattttctgagagcacaaagt

SEQ ID NO: 48603 - DNA, 503 bp, Mus musculus
  source 1..503: mol_type = other DNA
gttctctgtccagccgcaccgcggcggggcaggggagctcagaggcgccctcccacctaacgcttcagtgtctgaccccgcagcggtcacgacgtccgggacccctgtcgcccgggtcggccaggcagcgtcaccggagctgcgtgctggtcggggtgcgccccggggtaccccgctcctgagcggcgggcggcggcagtagcggcgcagagccgcgggcggcgggagcgaggcgagcccggtcgctcgccctccgcgctgctcttctcccggagagcgggccggctgaagaacaggtgcacctcatcgcccaggctcgccgagtaaccaccgtgcaacgctgcgtacggggaatgcggcttgtcggcgcccagcatccagctactgctcgccggggcccctgaggacagcggcggtgcggccggacgccccagggagcgggccgggcgcggcgcaccgaggatgccggcgaggctggagcgcacacaggcggcgggcagcat

SEQ ID NO: 48604 - DNA, 181 bp, Mus musculus
  source 1..181: mol_type = other DNA
gtgggctaagaccagggaaactatggtctatgtctgcccagggtttatgattattatagaataagccagctagccttgtcaccttacaaggtgtgggttacctggcaacagccaggtatgttcttccccatggtaacctggtaacagccaggtaggcctagcccactataaaaggggctgt

SEQ ID NO: 48605 - DNA, 374 bp, Mus musculus
  source 1..374: mol_type = other DNA
cagcagtgtggacagcactgtaatcagcataaaggtgatgagcaaatggctcagctgtaagctgggcaggaatgcccatttctccctggctcggctcccgccgggttaagagctaatgcgcggcgtaacttggccgagcgctcaactctgcggccacaagcgatcgacttcgccagcagagggcggaaccgggtaaatcccgtttggggcaccgcccagagccggacaaaggggcgggtcagcgatccgcctcattacctatgtgcgccagacgcactgggcggctgagcggtgcgaggaagcggcgcctcttttttcgccgcggccccgcccctccgcgccccgcccccgccgctcggacggcccgagtcgcg

SEQ ID NO: 48606 - DNA, 461 bp, Mus musculus
  source 1..461: mol_type = other DNA
gagcagctcctactggcccactggggaggcctgtctttaagcacatgcagagtttaaaagtctgaatgatgtcatctttattcgagtttgaatccaaaacagataggagggaaggcatttcctccccaaggcactttaagaagtaataacgatacagttgtggcacctggggtcccagaagcttttgaaagttgcataggcctctgacattggctcagcatggaattagtaggcaaacaacttcttccccaccccctcttatctgcaggggagggatcaggctggccgggccagtgtcactgatacagctggtgtcaccgacccaggtggatttgggtctgacacaacactggtaatttaatgctctctgccttgaatccatcattggacaggacaaagatgctgtccaacatctggagtgactccaaagtgggagctagctcaaggcgctggcctggccc

SEQ ID NO: 48607 - DNA, 360 bp, Mus musculus
  source 1..360: mol_type = other DNA
gccatcgaggtgctgggactcgaacccaggcctctagaagccttgccagtgctcttaactgctgagccatttcagcttctcatacagtgggcatctctgaacatgtgaggagatccagaataaacagtactttttgctcaaaccctttcctgaaagcattgcttgcctaagtgaacacacatgcaggatccttggccaaagagccttggacaaaaggacctgtccctttgatgttacagtctgcatgactgcaaattgcaaatgactcaaaactttgctcaatttttttgggcagctgaaggagccccagggtttctggctaagcttaggggcctaggcaagactccagcacatacacac

SEQ ID NO: 48608 - DNA, 348 bp, Mus musculus
  source 1..348: mol_type = other DNA
taataaccctgaaagcagggcggggtctcctttttgtctagggtaacacacagttctacaagatagtaaaataaaaactgtcttaccctccttgttattacatagcaagagtcttgcttcttacagtgactaggacagcctagtcctctggccggacagatgaccacttctgaccagcgtgcctgtctaatacacgccaggcatggcggtgcacgcctgtgatcccagcccaagacaagcctgtcacacagttctcagctggttcttcattctaataacagcatttgggggtgaagatggagttccaaactagctccgtggagtccccagtctggaggcgctgagctg

SEQ ID NO: 48609 - DNA, 207 bp, Mus musculus
  source 1..207: mol_type = other DNA
gaactctgtagaccaggctggcctcgaactcagaaatctgcctgcctctggcactcgcagctcatagtgggcatatgcccattctgtctaggtttgtgtcacgttgacaaaattaaaattgccaagcccaagcttgcagctttaatccccagggatcaggacagtgcgcactccaagctattgggtagcaatggaaccttaggttgc

SEQ ID NO: 48610 - DNA, 332 bp, Mus musculus
  source 1..332: mol_type = other DNA
aatagctcactgtgagcctaagcaagttagctcacttcttgttaagtgctttgatagctgtgcagtttagaaggaacccattactcaaacattgtagatctgagagtaaggatactatcaatcctgcatagaatgaagttataggaacttcatatactaatttgcacataatgaatctgtttctcaaaattccattttaaaaaattaataatcttaatgtgtttgcagttcttagatttcttgtgtcaggaaaaaaaaatgggcaaagatttcccttcagggtacaggtgcactctctggctcctgttctgcgctgaggagggggggcgagc

SEQ ID NO: 48611 - DNA, 443 bp, Mus musculus
  source 1..443: mol_type = other DNA
tagaaggaacccattactcaaacattgtagatctgagagtaaggatactatcaatcctgcatagaatgaagttataggaacttcatatactaatttgcacataatgaatctgtttctcaaaattccattttaaaaaattaataatcttaatgtgtttgcagttcttagatttcttgtgtcaggaaaaaaaaatgggcaaagatttcccttcagggtacaggtgcactctctggctcctgttctgcgctgaggagggggggcgagcaagccttcacagcagagcctcactgtgttgaccaaatctctgggagactttctggctgcccatgagtaactccagggatggtatcccgggaaccactaagtccgaaaggcacttccggtccgagaggctaaacagccttcgccacttgagacatcagagctgaaggctgaaattcctc

SEQ ID NO: 48612 - DNA, 163 bp, Mus musculus
  source 1..163: mol_type = other DNA
actttattttattctgaaaaatatttttaattctttctcacgtctctcaagggatagacatgtcttctctcactgaggccagatcaggcggtaatagagtcaccaggacctcggaaagctgaatgtacacagaaagctgtcagcttacatatctataaaggat

SEQ ID NO: 48613 - DNA, 257 bp, Mus musculus
  source 1..257: mol_type = other DNA
gagaaataagtatctaaattgtctttcatcagaatgaaacttgcttcggaagggaaattaaagtcaccttgacgctctttgtattttagagcagtattagtactacaatcctctttctcaatatctctgcaatgcttttcagatgaaaaaggaagtggacaaagcatcttggacatctcaaatactcgggcattgggaatgcttcctcactcctggagctgtagaaaggttgtagagctcactgcctgaccatgcat

SEQ ID NO: 48614 - DNA, 403 bp, Mus musculus
  source 1..403: mol_type = other DNA
atatatggaaatagaatagccattgctatttctaaattgtgaccaccggtcaactggtatgggcccactcaatgcacactggatgtgccgtgtacattctgtccacttgtagtaactaggttttcaaatgtgggaaacctcagcgctgccttttcaaaatttaaaacttgcataattccgcagatgttaaagagtcatcaaaaaagcacaatagaacatggtccttgggctttgttccttatttgtgtttgtttcaaagcagcatatacatgcagtattgattgtttttacagtaaaaatattttacagcttttttctttttttttttttaaaagcactgagcgctattaaactggggttgaaggccagtccagcttggttcccggtcaccaggctaatggcc

SEQ ID NO: 48615 - DNA, 261 bp, Mus musculus
  source 1..261: mol_type = other DNA
atggatccattaaaattgaggtttcactggacctattgccaagtacaagggagttttcattgcaaagaaatggggttgtaaatcagagatttcatgaaaacccattgctcactttattgaaacaatgtctcacatatactccaacttgtgtaaagttaaaggtgcaggagagtagatttatattggagaagaatctccctcataaaacatgccatgatggaagttccaggtgaccaagagaaccctagaatcttctgtgat

SEQ ID NO: 48616 - DNA, 395 bp, Mus musculus
  source 1..395: mol_type = other DNA
tttttccatgcagatatttgctgcttctacaagtatgatatgtgggtagaacatcctccagcaagctccaagctgaaatacctagcttagcttacagttcatgctatataatgccagtgccaggaatttaaaaacacagttgtgcatgtgcacatgcgcgcgcacgcacacacacacacacacatgccttgatttttcttcaatgcagcattctgcaaaacaatgagtgcaggattccatgaatccacttggtgaagccagaaagacactcattagattccaaaggagtctaagttttatttttaaaatgcttacatgtttaactttttattactaaagagtttaattagaaaacaataaaactcgagaagctctgctctgagattccggaagtg

SEQ ID NO: 48617 - DNA, 304 bp, Mus musculus
  source 1..304: mol_type = other DNA
ggtggatccattaaaattgaggtttcactgggttgagtcttaagcatcttatgaatacaggatcattatccaatcctgaacagtctcaggaaatttacaattgccaagtacaagggagttttctttgcaaagaaatggggttgtaaaaaatatagtgaaacaataatccaatttgcataaaaatttatattgaagaagaatctccctcatccaacgatgctagagctttagatcctattcaaatcatttgacttgtagtgaagccagtgacatcatcaatagtcatttcccttgacaatctctt

SEQ ID NO: 48618 - DNA, 328 bp, Mus musculus
  source 1..328: mol_type = other DNA
acctggatttaaaaattacaggatttaaaaatcctagtgctggagcagaggtggtgcttccaccctcatccctggaagagctcatcctcagtggcaccagagcactgtctagtggcataggcctggtccccacactggagtcctgagtgaagggcttcaataatgaacagcctgcctgtgcttccacagcaagcaggagaacatatgttcatgttctaacagtcactgaaatcgggaaagcggcttcctagttagggaagcgttagccccgtggacccagcagctgtcaccggtgacgtcccctccgactctcaggcagatcgcccag

SEQ ID NO: 48619 - DNA, 449 bp, Mus musculus
  source 1..449: mol_type = other DNA
gcagatcgcccaggaaagctcttcattggtgggcttaatacgaaaccaacaaatcaagaggatttgcttttgttaccttcgaaagcccagcagatttgaaagtggcaggcgtggaccacctccacctccaagaagcaggggccctcccagaggtcttcgaggaggaagtggaggagtaaagagaggaccaccaccacgaagcgggggtccccctcctatagctacgggggtccaccacgaagggaacccctgccatctcgcagagagtccccatggatattctacaaaagataatatacttaccgtgattacagtcattccagttcccgtgatgactatccaatggatatggtcgggatcgtgactattcagatcatccatcccctacacgagggccaccaccatcttatggaggaagcagtcgttatgatgattacagcagctcacgt

SEQ ID NO: 48620 - DNA, 383 bp, Mus musculus
  source 1..383: mol_type = other DNA
tgagggtccatgttgcatactatgaactatgctgtgagtacagagttttgttataacagtgttcctatatgcaatatttaaactttaccttttaactttcacatgtgtgtgcactcacatatgccatgtgtgtacaggtactaacaaaaggcaaacactggacctagaagaggaatgtgtctgtgcacatgtgtatgaacatgccaacagatgctattaaaagacatgatatgtcctgggatgaagttacaggcaattttattttcaagactttctaaaagtgtgtagtcgggctagatttctgtgtagaattccaattcagaattaaaacaccatggcttggaatgtgtgggttctgcaccagctccacccatagagtgggc

SEQ ID NO: 48621 - DNA, 348 bp, Mus musculus
  source 1..348: mol_type = other DNA
tcagctgatgctcacacagtgagagtacttttgcttttagaaattggtacagcttaaatcatacacaaatatctacacaattagatgtaagatgaatgtataataattttaaattatattatatatatacatacatatatatatgcatgtatgtttgtgtaccacacatatgccagatagttgtcaactgccatgtgggtctgagaactaaacctgaggcaattgaagatgtatatgtcagaacaattctcgtagacttcttcaagccatattttgttttctggaagtactccttttctttcctgaaaaaaatgtgaaagatccttagataggttcctgtcacaggag

SEQ ID NO: 48622 - DNA, 335 bp, Mus musculus
  source 1..335: mol_type = other DNA
tcagctgatgctcacacagtgagagtacttttgcttttagaaattggtacagcttaaatcatacacaaatatctacacaattagatataagatgaatgtataataattttaaattatattatatatatacatacatatgtatatgcatgtatgtttgtgtaccacacatatgccagatagttgtcaactgccatgtggagtatctgttgaagatgtatatgtcagaacaattctcgtagacttcttcactaagccatattttgttttctggaagtactccttttctttcctgaaaaaaatgtgaaagatccttagataggttcctgtcacaggag

SEQ ID NO: 48623 - DNA, 369 bp, Mus musculus
  source 1..369: mol_type = other DNA
tgagggtccatgttgctatgccatgactacagtgttttgttataacagtgttcctatatgcaatatttaaactttaccttttaactttcacatgtgtgtgcactcacatatgccatgtgtgtacaggtactaacaaaaggcaaacactggacctagagagtgtgtgtctgtgcacatgtgtatgaacatgccaacagatgctattagaagacatgagatgtcctgggatattttaaaatgcaagacagaaactttctaaaagtgtgtagtcgggctagtgtagagttccaattcagaattaaaacagccatggcttggaatgtgtgggttctgcaccagctccacccatagagcgtatatctatgggcc

SEQ ID NO: 48624 - DNA, 345 bp, Mus musculus
  source 1..345: mol_type = other DNA
ggtggatccattaaaattgaggtttcactgggatgaatacaggatcattatccaatctggagcagtctcaggcctggaactgaaatttacaattgccaagtacaagggagttttctttgcaaagaaatggggttgtaaaacagagatttaatgaaaacacatggctctatatagtaaaacaatgtataatccaatttgcataaaaatttattgaagaagaatctccctcatccaatgattagagccttagatcctattcaaatcatttgacttgtagtgatgacatcatcaatagtcacttcccttgacaatctccagtgatgtcaccagtgttgtggtaacaag

SEQ ID NO: 48625 - DNA, 244 bp, Mus musculus
  source 1..244: mol_type = other DNA
ctaaaacaaggcctatatgttctggtttcaaatcaacatggaaacttgctttcctcaaataaaattgtatggcaatcagtgtggcttctgacacctaatgtgcagagagagctgcccctgacctggttcacattgcagcgatctaagatttggagtcaagccttgagagtgatggaacactcagatggtctctccctaggaccctgtgcatcaggctgagttcttagcagagctgctttcagct

SEQ ID NO: 48626 - DNA, 448 bp, Mus musculus
  source 1..448: mol_type = other DNA
ccagcaatctagttcagtacttgtcagcagccatcataggacaagctaataagtagtaggtgatcttcttgagaaggtctgcttataattcgtgacagatttgctctataggcaaggcctgagagaatttattttaggaaagattcctgctattaatgtgcttttcccgttactattaaacgtatataattttgaagggacacaaagtttacaatttgatattcatcctgaacttgagcacctatgttgccaaaacaagggggttttcattgcaaatgcaacttgcataaaattccttgggggtagatttatcacggagaagaatctccctcatccaaagtcactataactttgggttgcaatgaagcagagagaaatctcttcagtgacatcaccctcttgtatccaggacagtcctagaatcttctgtgatgtcaccagtgttgtg

SEQ ID NO: 48627 - DNA, 441 bp, Mus musculus
  source 1..441: mol_type = other DNA
ccattaaagtcagcagagtcatgtcactcatgacgcttttgttatatgttctgctcattccccaaccatgtgggaggagatggcacctactggcctgcagtttacagcctgaatccatgccctacaaacttagcaatggagtggatatgtactccataaataattgtctgtcaggctggactgagaaaaccagaaacactgctgcatttttaactactctgtaactatggcaacaaatgataaataactatttatgccagcttcattgtgaaactggccaattaccaaaacactccgggaataaatccttcgaatggttaactgatgtgaacaatgtattaacagattcttcaagattgagcctcaatagagaacacttaagtgccatttgttttccatctggggccacaaacatgactctaaacaagaacagttcctgtt

SEQ ID NO: 48628 - DNA, 284 bp, Mus musculus
  source 1..284: mol_type = other DNA
gagaagagctatttctacaatttatctatgtgctcacaaagtgcacagctacagaatgaggagcatctatgtgtgctcctgacagtgacatcaagaaacaattttgtaacttaatgttcctaaagtcaaatgaaagcctttgatcagattataacattgtcaacatcctatcttgggttcttagaagaagtgctaagtggcaattgacctttgtcatcccacccaggctgtgagcaggctgcgcgggctgcttgcggccaggagaatgaggtggtccgtctcct

SEQ ID NO: 48629 - DNA, 627 bp, Mus musculus
  source 1..627: mol_type = other DNA
cgctagaggctctggtaactgagccgccgctcgcggtacaggagcagccgccacagctgcaggcgtagagcagcgcgtgcagcacgctcagcgccagctgcaccgaaccgggaaccgcggcgcccgaggccgcgacggcgcccccgccggacgtcgagggttcgcggccggccgtggggaccgcggcggccgccggcccggacactgataccctcatgaggagggagcgcgggaaggaagcggcccgagcgccccccggacctcccgcccgccccagcctgcggccccgggcagcgccgtgacaggagtcgcagccccgcgcgatggccgcggctgccctcgggcccgcctccccttccccccggggggctcggttcctcgggccgcggctcggctccgcagcagcagcatcagctgagaaacccgagcttttgaggcgctcgctccgcactgtgagctgccggcgattggcccgggcgggcgcgccctccgggcgcctcactcggtcagagcctgtcactccaagcccagcaactgcaagacttcctcgcgccggcgggaggactccagattctggctccggaccgtccattggttggagttgggagccgccgtagggaccagccc

SEQ ID NO: 48630 - DNA, 616 bp, Mus musculus
  source 1..616: mol_type = other DNA
gtcctgagcgctgcccacgagaggctctggtaactgagccgccgctcgcggtacaggagcagccgccacagctgcaggcgtagagcagcgcgtgcagcacgctcagcgccagctgcaccgaaccgggaaccgcggcgcccgaggccgcgacggcgcccccgccggacgtcgagggttcgcggccggccgtggggaccgcggcggccgccggcccggacactgataccctcatgaggagggagcgcgggaaggaagcggcccgagcgccccccggacctcccgcccgccccagcctgcggccccgggcagcgccgtgacaggagtcgcagccccgcgcgatggccgcggctgccctcgggcccgcctccccttccccccggggggctcggttcctcgggccgcggctcggctccgcagcagcagcatcagctgagaaacccgagcttttgaggcgctcgctccgcactgtgagctgccggcgattggcccgggcgggcgcgccctccgggcgcctcactcggtcagagcctgtcactccaagcccagcaactgcaagacttcctcgcgccggcgggaggactccagattctggctccggaccgtccattggttggag

SEQ ID NO: 48631 - DNA, 318 bp, Mus musculus
  source 1..318: mol_type = other DNA
aagagagctttctaaattgcaagtttccgccccgtgtttcctccagctcagaaaaagaaaagggggttggtgcccccagaaacaggtgaactgaatcagcaagcaacctggctgggtgctgatgtgcatgcaatcctgcacagcacgtcccgccatggggcaggggctggtccctacggcggctcccaactccaaccaatggacggtccggagccagaatctggagtcctcccgccggcgcgaggaagtcttgcagttgctgggcttggagtgacaggctctgaccgagtgaggcgcccggagggcgcgcccgcccgg

SEQ ID NO: 48632 - DNA, 654 bp, Mus musculus
  source 1..654: mol_type = other DNA
tgagctggaatatagctatcgtgaagacaatattagcttataaggccatattatcttactctgtgtacagtgcatgctatagataacaggctaagcgagagattgaatagtctttaccacattgctctctagcttgtgaaatatgcctaattcgcataaaatacagcaaaaaaggagtcaattttttatgaacaaatcgggactacacattgagctaatatcttctctatgctagtttaataaaaacatgtttttattattatatttaaacatttatttataaaatagagcctaactcagcaatcctcttgccacagtctctggagtgttggattataggtgtaagccgcggtgcacagcccgaagggaaaaggcttgtaacccaggctcgggagagctccggggcggggcgggcaggacggcgcaggccccgggcagtgtggctcgggggataccccgaccccggaaggaccgcgtctttgcgccggacgagctgcaggccggaggcgggtgcgtgagcggggcgcgcaggaaggcggccgcccgaggctcgcgtggacagaggcgcgcgccgctgcacgtccgcaggggaggcgggagcgcggagggcgcagggcggagcgcggggcggggccggcgcaggctacttcagcg

SEQ ID NO: 48633 - DNA, 353 bp, Mus musculus
  source 1..353: mol_type = other DNA
ctctaccaaaggtacacctgcacaccatacatgcaggcaagatatttatatgcataaaataaataagatttttttttttaaatcatagctgcttggcagtgtggattacaagacactgtctcaaaaaaaaaaaaatcttgtcatttcctcttgtctaagaaagcagtgacttaatattgagccagccagtagctaagtcaggcattgctcactctggcctgcaggggacagtgtgaccggagacgatctggtgactgacttcggcgcccggagccagaggcgggccagccggaaggggcggagccagtcacggtcccgccccaggccgcctctgcgcccgcccgggctgccat

SEQ ID NO: 48634 - DNA, 400 bp, Mus musculus
  source 1..400: mol_type = other DNA
cactatcctgtatattgaacatgcattacatatatgacctttagccttcagtgattccttcagtgagaccaagtatattcttcaaaaattattaaaaatcttaaagagtaccgaatacaatttagtaagtaaactatcatttacatttctgatgactttttttaagaatcattttcttgaaattttctggataatttgagttgttaacactccggagtacatgaatttaagttgaagggacggactcccatcccatttgggaaggccttggccgctcctcccctacggccgcagctccgccctgcgggaagctcctccccccgcgtctgcgcgctcgcggacgggcggggcggaggcgcgctgacacctggcggcgggggcgggccgtcggcgagcgtgg

SEQ ID NO: 48635 - DNA, 351 bp, Mus musculus
  source 1..351: mol_type = other DNA
cacacacacacacacacacacacactcgctgtgtgtgtgtgtgtgtgaatgtatgtatgtatgtatgtatatctccaaatcttcagatgacactaaatgacacctgagattacagaacaagcacagtatttgctgtatactgtaagatcccagagtaatcaccagtcctgttaatggacccccgccccgcctcgcctccggagcccaggagtggtgtgcgtggccgtgcctccgcgtgcgcagcggtgcgtgagggcggggcagggcagaggcgttggtccggccacgtttggcctggcggttccggctgcggcgcgtgggggcgcacggggggcggggctggagctgcag

SEQ ID NO: 48636 - DNA, 564 bp, Mus musculus
  source 1..564: mol_type = other DNA
tagtcaaagtctttaacagctcaacatcagttcaaaactacttaaatgtcttggaagggggtctcggggaaaccactgccctcctggggtggggtggggaggtcccccttttccagccggagcgcatgagccaagcttttgcgtctggcaggcacttgggtggaaccctgcttgccaggcaaccccggcgcggtgccttcgcgcccgggttccccgcacacgtcccggggcctgggaacttcccgaggcagcttctcacgcatgaaccccggggaccccgctgcaggcgccgcctcagccccgcgagcccccgcccccagctccgcagccgagagcccggatgttggattccatccctgcgcctggggcagcgctccgcagggccgagattgcggccgccgcctccccccgcagcgctcccccgaggcgcgcaccgccccggccccaccagagcgcgcgccgcctcctctcccccgcgggagcgcggtcagagaagaggaggccggctgcgggcggtgctgcggggcgcgggggccgcggtgccgggactccattagcagcggc

SEQ ID NO: 48637 - DNA, 391 bp, Mus musculus
  source 1..391: mol_type = other DNA
tttagaacctatttccatccaaggccttactgcactactttcggatgctgaaagcagaatcacccacggggctcatgaccgagagcctcactgcggctggcatccaggggcgtggaagcgagggggcggagccactgcgtccgtgaggcaggggctccacggatgccgagaccgccgcgaccccgtctgacccccgcttccaggcgcggcgggagctccagcagagtcctcgggccttccggggaggcgcgcgcggctgggggcggggcccctgtggccccgcccacgcagggctgcgtaacaatggggcgggccccggaacggcgctgcggcggccgggggccggcggggaggcggagtcgcctcggccgcagctgctgccctgctcggg

SEQ ID NO: 48638 - DNA, 361 bp, Mus musculus
  source 1..361: mol_type = other DNA
tgattaaatcaacatgacatttgagttgaacacagaagccatgagcagccatgctggttgctgctatcaatttaggaaggatggcttccatcctttagaaaaactgtgtgttggccaaagtattggttaattaaagttataatacaacttacattgttttaaatattgtaggtagaaatcaagttatgtaaacttaagagagatcatgatttctttgacaaaagcagactggagagactgtccttacatgttgttgtttagatttaaaaagtgaacgtttctggatttttctaacctcacattttctgagcactttgatctgagcagactccttttttttcaagaactgattaaacattac

SEQ ID NO: 48639 - DNA, 335 bp, Mus musculus
  source 1..335: mol_type = other DNA
tttagaacctatttccatccaaggccttactgcactactttcggatgctgaaagcagaatcacccacggggctcatgaccgagagcctcactgcggctggcatccaggggcgtggaagcgagggggcggagccactgcgtccgtgaggcaggggctccacggatgccgagaccgccgcgaccccgtctgacccccgcttccaggcgcggcgggagctccagcagagtcctcgggccttccggggaggcgcgcgcggctgggggcggggcccctgtggccccgcccacgcagggctgcgtaacaatggggcgggccccggaacggcgctgcggcgg

SEQ ID NO: 48640 - DNA, 378 bp, Mus musculus
  source 1..378: mol_type = other DNA
acttcagaagccgctccccgacacccccgcggcggactgagttggcgacggggtctgtgtgtgtgtgtgtgtgtgcgcgcgcgcgcgcgcgcgcccttggagggtccctagatgcattgcactgcgcgccgcaggtagagacgtgccccacgtcccctgcgtgagctacgaccgagagccgcgccagtggctggtgtcccgccgagagttcctcagagcaggcggggacaactcccagacggctggggctccagctgcgggcgcggaggttggcctcgctcgcaggggctggacccagccggggtggggcggggcctctgggtccacgtgactcctaggggaaacagagcctgtctgctccagagtctcattatattc

SEQ ID NO: 48641 - DNA, 485 bp, Mus musculus
  source 1..485: mol_type = other DNA
ctcatctcccttcttttaaaaaggggccaaagggcactttgtttttggcactgtgttaccttcctggaaggtaaataggattttttgtcttacaaggcctaggcctgtttgcctgccaagtgcctgcaaatgtccacaagaaacatctcacaaaaacttttttggggggaaagtcacctcctaatagttgaagaggtatcaacgtttgggaatcctttaacagtttacggaaggccaccctttcattatctctaattactcggggtaaatggtgattactcagtgttttaatcatcagtttgggaaactcaggggcccagactcccatgggtggtcaggtgagccccggctgcttcccgagctggaggcatcggtcccagccaaggtggcaactgagggctgggcaatcttccggacccgggccttgccaggcgaggcgaggccccgtggctggatgatgtgggcggggctcccatccccagaag

SEQ ID NO: 48642 - DNA, 329 bp, Mus musculus
  source 1..329: mol_type = other DNA
gatggctctgcactttaatgcacatacttctcttgcagagaactggagttcaggtccctgcacccacgtgggtcttacaaaaaaatttttaaatcctattaaaactctacaattgagttacaaagaaacagtatttttttcttttctttttcctttttaaatcacaagatgcaagaggcacagaacctttgacagaagatctgaatacttgttaagtataaagttggtaaatctgaaatggatcaaagtaaacagagacatctaaaagcttttgttagttgaatgcaggtcttgcctcattaacctgggtgagaatcctgagaatctct

SEQ ID NO: 48643 - DNA, 273 bp, Mus musculus
  source 1..273: mol_type = other DNA
tgacataagggtaaaagaggaaacttctgcttttctcaaatttcccaaagccataaagagcgtgtcctctcagagaggaccctagttcacagcggtgaacaggaagtgatctacacattaacttatgtacatcctggaacatccagaacatacagaacatccaatgtcaagtatgcctatgctctttattttaagtccagtcgccacgtccacgccctcaactggcggaggggcggagccctctagtcagaggcgtgggcggaccaaggactg

SEQ ID NO: 48644 - DNA, 414 bp, Mus musculus
  source 1..414: mol_type = other DNA
agttcagcaggctgtttcttgcttaaaagccttgaagagtttttcttccatcatcagcatctagtagatgatgaactggtttctcagacagcattaaaaataaaactgttttgtagaaattttactttgtttttgatctttatgttacagggttacactgagaaaaacaaaatctttgaaatcttgtgataagcaattgaggtcttagacctctgcgttataacaacattgtttagattaaatcctttcaatacaggcacttttaaaatctacttttgcatttcaaacacaagactagtctctggaacaagctagacattcatttaatggctatccaaagagcgaccatcagggggtgctcgcgcgggcggccctctgcgcaagcgcgccgggaggaggccgcggcggcagtgg

SEQ ID NO: 48645 - DNA, 512 bp, Mus musculus
  source 1..512: mol_type = other DNA
tgcttgcaccacaagcctgcagtggccctggaggccagaggggttctggagatccggccagggtggagagaacaattttgaaagagaattctactaatcgtttgaggataaaaagagtatacaaatattagaatgttttaaaaatctcttatatttatttttccgttatggaataccagtagtaatacatttaaaaggtcgtaactttttgagtgtcacactttgaaacaataagagggtttcagagttcaattcgctgtaacttggatcaacattggtaaccatttactggtgagtatgaatagattttggaaaataaatttattcagtaagttcttacctgccgttaaggcttgtagaatatttaaagacaccaagaatctgcgcactggctcattccttggtaggcaccagaggcgcccgcgtccgcatttcgccaaattttgggcctcgcctcccgccgtccgctgtcacgtgcgggccacggcggccgcgtccttaggtgggggagg

SEQ ID NO: 48646 - DNA, 383 bp, Mus musculus
  source 1..383: mol_type = other DNA
acatacttttacaattcaatatctactaatgagaaaatttacatagaaaacttcctgtactaagatctctacaaaaattagttactaaaaccttcttatttgaataaacttactttgcaaaggttgataaggttacaaaaaatcagtgacctcttttcgggttttccgcgacaatccgcaaggatacctaacttaaattttggccccagatgtcagttaggaatttgagaacagagcccggctggcggaattctctcaggccaccaatcctgggcgcagggcagggcggagctggtccctccctgttacgtagccagtagtcgggaccagatggccgcggctgtcagctgcccagaagcctgggcgagtgaggacctacaaag

SEQ ID NO: 48647 - DNA, 588 bp, Mus musculus
  source 1..588: mol_type = other DNA
gacaaatcccggcccagcctctggccccgccctctgcaggcacaggtgaaagccgcgaggtggtctcgccacgcctccccgtcgcccagggcgcctggggccacagctccaggccacaagccacagccgtagcttgagatcaggctcccgaagtccgcctcctcctctcgggaggctgagggtgatcgaccaggctctgcttgcttctcctagacaagggcctcgtggagcaccgcggccagacacatctagccctgcgcgttgtgcagcccccagagacagtgactccgggtgtttacggtctacaccagtcagtcacccacgggaccagtcagccacccacaggtcccaggccaaagggtcactggacctggggagccacattcccaagggcgagcggcgggtggcagcaccgttctcgctccacagctccggaggctccggtgccctggccgttgtagaacacgcgggtggcagccgagaggaattcacccggaccctccccccaacccgccgcccgccgggcccggggatcctccccccctcccccgactcccccgcgtgccgccgccgccgcccgggttcctc

SEQ ID NO: 48648 - DNA, 391 bp, Mus musculus
  source 1..391: mol_type = other DNA
aagtatttctccagaggcagaaggaaggactccttgagacaatccgacactatcaaatggcttctgggtttcagatccaacctgcaagcaggaactgcaattctgagggaagatgtggtctgtccacaggatatcaatgtgtcactgatacaagtcactcacatgagctcagaacacccacccggctgtgcagtactctgaaaagctgagttatccttttaaagatagaagccctcctttaattcctggtttccagggcttttctgaagaggccaaggaaccacattgatagtgtctgtgagtcagggtgggtcacatccagacagggtggagcctcgcctgctaagaagctaaggccaagttatctccttccccttgctactcatgggtc

SEQ ID NO: 48649 - DNA, 284 bp, Mus musculus
  source 1..284: mol_type = other DNA
aggccaacctggtctacaaagtgagctccaggacagccgggctatacagagaagggtgtgtgggacaacgactcgtgagccctcaccctgactgaggtaatcttccctaggacagagaagacattaaccagactgagcaagttgtatttatatatttagaaacacacatacatacatacataagaactgttaaaaagcccccttttccggtggaaagtgagggagaatcggtgtttctatctcggaggttgcggcgccggccgagtcgccctgccataaaaaga

SEQ ID NO: 48650 - DNA, 477 bp, Mus musculus
  source 1..477: mol_type = other DNA
aatatctagaaaatcataattttcaacagaccaatttattaatatggcaaattagacctctccttttagatctaaaagcagtttggtaaactttggtcggaactaaatagaaaacccaagttaactctctttagcattatttttattcaggcgtcaaaccccagctccgagctcagctcaagcggagctgtccgagcgcctgccgccatcaccaccgccatcacccggcgctcgctcaagcgcggaagagaggcccggccactcccgctcctcgtgcggctcccgccaggcggaggcctggctgtcagcccccgccccggctccacggtcagcccagagtcagacttgccgctccaccagctctcggcttcgaggcggcgcgcttctgacgccaccacccggcgacctcgggccggacctgggctgggcggcggcgggccgcgcatgcgcacagggcgagcgcgccagagcgcggga

SEQ ID NO: 48651 - DNA, 416 bp, Mus musculus
  source 1..416: mol_type = other DNA
acgacagtcattgcaatttacagcaactgctgatgcttagaagtgccacgacagttcaaagcaaacaagcctcagggcagaggcgtaccgagaatgacggctgctttcccctctgcaagcacgggcagcgggggcgaggagcaagtgcaccaggccggagccgcttcccgcgctctggcgcgctcgccctgtgcgcatgcgcggcccgccgccgcccagcccaggtccggcccgaggtcgccgggtggtggcgtcagaagcgcgccgcctcgaagccgagagctggtggagcggcaagtctgactctgggctgaccgtggagccggggcgggggctgacagccaggcctccgcctggcgggagccgcacgaggagcgggagtggccgggcctctcttccgcgcttgagcgagcgcc

SEQ ID NO: 48652 - DNA, 503 bp, Mus musculus
  source 1..503: mol_type = other DNA
tataaatacttttaaatgaaaaacctaggtttaaacccactaaagagacttgtgaaagatattagaaaaatttttgttattgtttcaacatgatacattgtttagccttatataaccctggctgacttcagaccagatactgggagtacattgcattctgaatacattagttgttaagaggttacctatggtatgcactatataaactattaaaactctgtctgcttagtatcacttgttagttcagtgaaaaattaaattaaaccacttgccatagtttaaagattcttttacttcaaatactacaatcacatgaagcagactggcctgctcttctatcaggcaaatttccagataaccaatttcttatattttaatttctaggaaacaaaaatttcaaggtaaatgttgtacattgaaaactgtaagagttgcatgatactctgaaccatacattgatacaacaaaaatcgctttataaagttaggaacatgctgtaattt

SEQ ID NO: 48653 - DNA, 539 bp, Mus musculus
  source 1..539: mol_type = other DNA
ttagttcatggctacttcataactgtatttttgctactgttataaataatgtaaatatctgatattcgacccctatgaaagagtcgacgcccaaagggttcataaaccacactattcttaatttaaaacttaaagggaatcagagatagcttattctggacccatttttgaatgatgatggcaccaaaacacaaatttaggttacctcaaattccatgtcccattttagttttacagaacagagaacgctataaggaagcttttctatacatctaagacattatccgatgacctgttaatagacctaaaaggtttttaatcttattgccacaagatattagtgctagcactctgcagacatatgcttttaaaagttttcattcgcaagacctttagaaagactactgacagccagcttggagcctgtctaagcagggaaaccttcccggcccaggctcccggagccacgcggccctgcctgcagtttcgtgggcggccggctggaggcgtgggcggggcgggcggaaataacgggcggc

SEQ ID NO: 48654 - DNA, 450 bp, Mus musculus
  source 1..450: mol_type = other DNA
gtaggtacttctgccataattttatggaaaatatattcttttgtaaaaattttttttatgtgtatacagaaaaagactgggaattgaattcccctggaagagcagcaactctgggattacagacccagggccatgggcttgctaaatagctcattttaaaaatttgaaatagatgagccgggggcacacgcctttaatcccagcgcagaccagcttggtctacaaaggagactctgtctcctaaataaataaataaataaataaataaataaaataaaataaataaaaatggatatctggttagggtccttgttgtgcagtgacactcaaactccccactggcctctccccacagcgctcgcggccgcccgcagggggcgctggcgcacgcaggctttgcggccccgcccccgggcaaccgtcgattgggccggcgcgtgatgtcacgcc

SEQ ID NO: 48655 - DNA, 394 bp, Mus musculus
  source 1..394: mol_type = other DNA
agaatcttaggaggaaatcctaactatcgagttcaaattctcttagaacaagaactcagttttctggctgtgcttacagctagatttctgtgattacacgcttgaaatctgttagctcttctgagttcgaggtcagcctggtctacagtgagttccaggacagccaggaaaagaaaaaaaccccacatttatctttgatttacattaaaagattttcttcaaattccgagtcaaacttcagttagtttgagatccaactctgttttagcccaaaacctaaaagtaaccttggcttcgtttggcgccactccaagggttgaactgcgcagaagtaggacaagaagatccctggttcctagattcggccttcaggccccgcctccgagcccaggat

SEQ ID NO: 48656 - DNA, 521 bp, Mus musculus
  source 1..521: mol_type = other DNA
cctggtcaacagaaaccacctataagcttctgtttgtgcagccagctgctttggacctaataggattaaaataatgccaactccataaatttggggaaaaattatcttgaatatccttaaccacatcactcaagtttttaatctatataaatggttccaaactggttatcagcctcttgcaaaagcggtccttgtaactattttcattagacaaattcctaggaatcaattcacacattcatactacttcattcattaattcattcgtccacattcattcattcactcatcaatcaatcaaccaactactatgtaccacattgggtttacccaaggggcacctcttacatctcagatttgtcagggacagaaggcggctagggcccactgcggggcacaggtgaggggcacaggctggcgggcgtgtcccagtccactctccgtggtccgtggggcgcggtccagccaggcgcctgcagggcgagggatgctgccccgccctgggagggcgggcccggggg

SEQ ID NO: 48657 - DNA, 340 bp, Mus musculus
  source 1..340: mol_type = other DNA
ccagtgaggggctgctctctgaaatctccactttgggagaccgcagctggctggccagtttgctttaatcataacataaccatgaatattatgtcagttacagagctgcaggcagctggtcctctttcccaagacagcacagctgtcctggcaaatctcagttgatttctaaggcagacgttaattttgccttaagaaatggaataaatgatctcgtttaacttaaaacctttgcgcccgcccctatcgcaagcctcgttcgaggggaaggggcgggagcttccggaagtgttggcaaaagtccctccaatcagcggctggcagcgggaaatttcagttc

SEQ ID NO: 48658 - DNA, 408 bp, Mus musculus
  source 1..408: mol_type = other DNA
atggtgcagatgtcatgctacataaagcacattacgttgtacttagtttacctcacagtgagctgataggaagataggaaagagtcattaccttaattgtaaagtcaagtaagcttagtgttatgcctgcagttccagctgcaggactgggtgagggcgtcaggctcacttaccttgcacctgtagatttctcattcttttagcctgaagaggaaaatcagagtgataattggttttctgttacagaaatatgcatatttttgtataatgatatttgttgtaagttccttagtggactactgaggttttcaaatttttccactcaggtgaatgaggaaaaaaaaaatgtaatttggggccagtttggttcttttatttcagggtttctctgtgtagcctgcctactcc

SEQ ID NO: 48659 - DNA, 338 bp, Mus musculus
  source 1..338: mol_type = other DNA
acgcttcagctttcattctgctttgaagagctctgaaagccaatcattaaggattgcatcatttgcgttgtctgagataataataataataataataataataataataataataaaacactaaaaccttgcttaaggaatggccagcagccagcaagcattgcagccttacaatatttgcacacaacttatttaggtcggctctataaccagcgcggggcatctggaggccgccggctgcgcggacctgtccctttaaggggccggtctccgggcccctctggccgcgacgcccggacgtgcggagccgccccgccccgaagccgcccgtttcctgc

SEQ ID NO: 48660 - DNA, 662 bp, Mus musculus
  source 1..662: mol_type = other DNA
gtgtgtgtgtgtgtgtgtgcgcgcgcgcgcgcgcgcgggcacacacacacacacactctcgagcttttgcagtatttatttctttaaatatttaacagtctggaaaggcagtgacaggcaataatatgtagcgtctctagcatgttgcaagggcttaataaatgctagaataataaattcctctatactatcacagcctacaatattttgtgccttgattaatccatggaaataaaggaacatttgtcttcatttaaaaaaaaaaaatccacctaggtaatttccttttaaattccccagggggttgaaagaataagggattaaaagtaacttttaacttttctttttccctctcttgatacatgaaatggtggggagcccttcaattagcgcccccccccctctcaagggcttggctttgaaagcagacacccccagatcagtgcgctcagcatggtgagctcggacaagcggggtccggatccccgggctgaggacgaatgcccctttaagggcttgccttcacggggcgctcgcgggccgcgggggctggcgggcgggcgggcgggggccgcgggagcgcggagacgcgggcggcggcgcggccgtcccacctgcccagcccgctcagccccccggcggcgcgcgctcctcctcccgcg

SEQ ID NO: 48661 - DNA, 392 bp, Mus musculus
  source 1..392: mol_type = other DNA
gtctatctcttcaagccgtcagccgacagacttgaaggatgactgctggtcaatgggtgtctaagactttgaactttaaaaaccaagtgtatccctgcagcagagctgtatagagtaagagtgatcactgatcgtcatcagttgagtgcaggctgagtgacttaagtctgtctccagtagggaccgtgtgactgcacacttagtcccaccataccctgcaggctcttcagtgcgtgttttgacacatcctgccatgaacagcttctgctgtagccggtccgctacatcacctggggcttatctagatcctcaagacaacctggagcactgataatcagcttgtagccaacacatgtcaggtgcactctcaaggtgctgtgtaacagaagcag

SEQ ID NO: 48662 - DNA, 503 bp, Mus musculus
  source 1..503: mol_type = other DNA
tgcctatcacagtgttcctgtcagactgcaaatagcacatttgtgaatgttgcccattaaataatgcaaactgcaagcttaaaatgtttactagcctagcctgtcttgatttcattttccacttttagagcaaaaaaaacaaaaaaacaaaaatcattcttcttcatttaagtaggagacactcttatcatgaagagttaattttgttaactcaagtatttcaactcacctactgagttctcatgttaaaaaaaggctaattagcacattttaatatcttaaaattagtgaattaataattagcatatggatttacattaattttaatgaggcaaggctctataaatacatagccgtcaatgtccactgaaaaatataatagcaattaatgtatttgtggcagggggcagagcttttggaacggaccaagtcagcggagtgcgcccgccatctcctcctccccgacctggcgggcgaaggtatggtgcgctcggccctgctag

SEQ ID NO: 48663 - DNA, 451 bp, Mus musculus
  source 1..451: mol_type = other DNA
tctgactttacttcagttaggagtgctagtcttgaagaaaagacttttttttttccctctcagtatgtttaaattaaatatttgatgggtgtcgcttaaaagttaaatagttgtttgtttagctatagttctttagacacatgtaatcaaacaaatctgttacttacttcgaaatctaattatccagactactaattaggtgaaaatgattactggaaaggtgttttaaatgttgaatgcgtttacattttaggttcacagcagttgaaagtggtaataatttaaaaaaaaatcagctaagataattaaaatctcttagccaaagagttcttaaatggccccaatcaagttttgtttgagacaattagctagtgccagccaatgagtcctatgcaaagggaagacaggtttatctggtctcactccatcccctctagttttggagctgctg

SEQ ID NO: 48664 - DNA, 289 bp, Mus musculus
  source 1..289: mol_type = other DNA
cgaggcccagcccctgccgctgacacccggcctgggcgacggttcgcgcggccttagagccccaaaccgatttggtctttttggaccacgccctccattccagagcttggggggtagagtggagttgggcgcaaactcctgccagaaactttcactcgagttggcgggcctggcgccggtttcctttctatcatgcagaaaattaatcatgagcacgacggcctgtaattaaggttagtttatcaagaaaacatttattataattaattctcggacgaggtaattatta

SEQ ID NO: 48665 - DNA, 565 bp, Mus musculus
  source 1..565: mol_type = other DNA
acacttctattttgctcatataataatcatttttgtaccaaacttaaacagatggaattaattttaaagataaggccagcctggtccaggtatacatgaatcctgtctcaaatatataaataaataaagatacaatagcagtaatactagaaaacatgtagcatcatgtaacaagcaactcattccttgggcaccctgctagctgctcctgggacagctgagacctggagaatctgacggtgcctccaagtggagttcctggttcgtgacgtatgagccacactgagtagaccccgccttctagatgggctgtaccaggcaatcttccgggtgaggtgactcaagtctcccggtcccttcaagagattaaaacactcctcagaaggtcttaagatcgcccacttccgggacggcggcccgcgaggctcaagacgcgtcaccctgtcgcaaacgagcgcctccgcggcccgctcgccgctcgctcctttcgcccgccccgcgaagtcggccgggcgcgcgcagccccacttccggcgtgcgaggcggtgacaatgggagcggcgcg

SEQ ID NO: 48666 - DNA, 736 bp, Mus musculus
  source 1..736: mol_type = other DNA
gtcaagtttaaatattgaaacagcccaaggatcctttaactagcagtcggagggttccacagcaattaaatgcaggctaagtaggcctttattgtccttaaaagaatcctcgcaggcaccccagggccgcttctgagcttgtcggaacctcggcaccgaggagccccccagagtcgaggatccgcacagcaagacccggctcgccggccctgggctccggagtcagccctgcccactgcccgtccggtctccgggacgtctggccgccctgccacccgagccggcccagcgtcccgccgccacccgcccctcccccgccgccgccgccgccgcccgccgagccccgggacccacctcgaagagctcggccgtcgtggccatgccggccggctgagaggctcgccccgcgctcgaggccgtctccgcttcacatgctgcgcctcagcggcgccgctcaccagtcccagctcggcctaccgcctccggcccgggctgcgcaccgctgctggctgccccggtcctcacacagcgaatgaagcggagccgcagacgcctgtcagctgcctcccggcgccgcccgcgccgctcccattgtcaccgcctcgcacgccggaagtggggctgcgcgcgcccggccgacttcgcggggcgggcgaaaggagcgagcggcgagcgggccgcggaggcgctcgtttgcgacagggtgacgcgtcttgagcctcgcgggccgccgtcc

SEQ ID NO: 48667 - DNA, 480 bp, Mus musculus
  source 1..480: mol_type = other DNA
cttagaactgacagatgggatctcctgaaatcaagctatactttatatcggggttaatatctaatataaagaactgcagagtcctctccatagaattatcttggtaagatatggcaaattccacctggataaaaaggtgactgtaatttaatttttcacacttctattttgctcactataataatcatttttgtaccaaacttaaacagatggaattaattttaaagataaggccagcctggtccaggtatacatgaatcctgtctcaaatatataaataaataaagatacaatagcagtaatactagaaaacatgtagcatcatgtaacaagcaactcattccttgggcaccctgctagctgctcctgggacagctgagacctggagaatctgacggtgcctccaagtggagttcctggttcgtgacgtatgagccacactgagtagaccccgccttctagatgggctgtaccaggcaa

SEQ ID NO: 48668 - DNA, 387 bp, Mus musculus
  source 1..387: mol_type = other DNA
gccagaaaaggctgtagcctcaagttaataagtaacttgattagtatgcgtgtgagttactcaactctcagatcagatatgcagacatatcacatgggaggatcccgtgaactcttaggcaacaagactactagccattcttttgttttttaaattgcaaaatgcggccgggagttggatgtcaacagccagcagctcccagggcacctagccctgcccacccggggaggctgcggggcgagttccgcaggaacctctggaaccccaggctagagccccacccccggcacgcggcctcccggaagccctccggagacacctcggggcccccttttctggcccggcagccggcaggcagggaagtgtggcccaggaaactttacccgg

SEQ ID NO: 48669 - DNA, 727 bp, Mus musculus
  source 1..727: mol_type = other DNA
tagacattgcttactaattttttgactaattcctagtgatgttcaaataggtgtttctggaaagctaatttacaaataaatattgcttgctaagataacgtcctatttatatttcccaggatacactattagaactttttagcagttttgaaatatttgaaaaacatttgcattgacaacactggcatatcaaaatgagttatcagcattatttaaaatttacctttaatacttggataacctgatagttctattaaaatatgaataagtcattattctattacactaatgaaagattggaatttgagataaatttgctgtatagcagcaagagcaggctgccttgagaaggataaacagtgctttttgtgggaaaaaaaaatcttaggtacttttttcttgatcaaaattaattgccaggtgtaattttcagttatgttttatatttatcttttattaaaatcttcattataaaaagttgtaatactctactgatggataacttgtacaatactttattgtattctaataagtagacttttctttaaaataggttttcactcctttattgcaaatgattttaattgtaagcacttgacatgtagtcagtaaatgtatttaggttttaataagcattacaaacaaagtcatgttttgaagaaagtttgagttttagaaacaataatatttgaaaagttttgggcttcagactctgaagctttgagat

SEQ ID NO: 48670 - DNA, 403 bp, Mus musculus
  source 1..403: mol_type = other DNA
gaaagctacagttcacagatttagcaaacaaaaatttaccaagttaaatttgagtcttctgcatactgtgcctgagcattcagatggggctgaaggtcattttgtttttctgggaagaaaagcaaacatgcttttaaaaaaactacctttttaaaaacaaaaggtaatagactatgcttgtattcttcctctaagagcacgtggttttcacattgaaaatcagtatgtgttataacaaatgtgaagctagcatgggctacaaagctagatcctatctccaaacaataaatcacagtacgtactgctgtcatgttgtcacatctgtctaccttacagatacatgaaaagttaaatgcctaagagtgactgtcatgagggaacccatttttcgaacaacgctcaa

SEQ ID NO: 48671 - DNA, 482 bp, Mus musculus
  source 1..482: mol_type = other DNA
cacaaggcttggaagtagcacctttacattgatgcagcctttcaaagttaaatgatacaacggcaaaaaattaaagctagatatttcaatagatttcacaccatggaaaatattttttaattcatctatggacaactcaaacttgaacgtgggttccactctgagtaaaggtctgacattaaattttctttttctacgtaaaacaacataataaataggctctgtttgaaaacagtttttatttggaccacttatttaagaaatttgtcccttcattcccagcagggagatgaagaaaacatcctattgtcttttcgttctcctgcaatgtattcatttccttcgaaggtagacatatcctctaattaaagttatagtgtttaatgatcaatagaaacttctctccatgtaactgagtttttcagagagtagaataaccaagtcaatgtttaactgcattctttagtttggaaaccaacctc

SEQ ID NO: 48672 - DNA, 255 bp, Mus musculus
  source 1..255: mol_type = other DNA
aaggaaaaaaaagtgtttctctttggtaagcccttacttcttatgtgttttacaataaagaagaaaatattttttcttagattgtgggatatattagacaaatgaaggacttaaactcttcctcctcctcctccttctcagttggtaaaaggagaaaaaggagtagaagtgctaaactgcagtgtgcatctgtgtgagtgtctcccacccacgtggggcgcccacaagcgtcccagacctgggtgggcgtcggag

SEQ ID NO: 48673 - DNA, 357 bp, Mus musculus
  source 1..357: mol_type = other DNA
acacatgtatagagtatagatttcatccatcaattaaatttaatcatattccattcaaaaatgagttctttcccttcacaattaggagaatgaaagggaaactgagtcccttcctgaaccttcaacattcaagggatcgtcagaaggagcaaagaatcccggactcctattaactcttattttctacttgatagttagcacatgtgattgacaggaacagttcaactcttcccacagggaccactctggagaaattcctgctctggttggaccagtgatgtctcttgaagggccccgggctcgggtgtcctactctaatccagccctgtgcgttagcggagtccacaaaactgtagg

SEQ ID NO: 48674 - DNA, 225 bp, Mus musculus
  source 1..225: mol_type = other DNA
tgggtaaacacatttgccacacaagtatgtgcaacacaaaacagccaacaaggtgtcaacacgatgcctgcacacatgcatccatgtgatcacacatgcacgcacaaattggggctgcatgcttgctggagccatagttctattcattgtttgaccaaagaaggatctgaagaaagcatgagcctctcttactttaagagacagatttcattccccactttttct

SEQ ID NO: 48675 - DNA, 478 bp, Mus musculus
  source 1..478: mol_type = other DNA
taatcataattatactgaattaaactaaatcacttgaataaatgtaatttcatgaaaatcatgtaagttgaggatcctggaatctttctcatctattaaaaaagtaaatctccaaaaataattataaaaataaaaaaattttcattataaaaatgttgtcactactaatatccaaatttaatttggcaatataatatttatcactgagttttgtatctgtgatttatatacagtcagttattttattttgaagtcaaaatagtggtcactttaaaatattggatatacaagtctacaccaaatcctctgaatatagacatgacctgttcttttctaataagagacagaaagtaatcagattatattgtatgagaaaataatctagtctcattataaaatagtgcttcaaaatgaaaattttgtgtccaaagattctacaaaggacagtgatttttaccattacagatggtgaaaatcc

SEQ ID NO: 48676 - DNA, 618 bp, Mus musculus
  source 1..618: mol_type = other DNA
acatagtgagaccgtgtctcaaaatatgcaagttccaggccagcttgggatatatcagactctgtctcaaacaaacagaaggtttaaatttttcatttttgaataggcaattcatgttcaaggtaaaaaatggaaaatacactgagaagacttctcaagtctctctcttcagagatggtttattacagaaataataaacatgagaacattattaatgtacagtatggtggcatgccagccaatagtagacttattaggatcatacattaaaaagctaaaaattacacgtgcagatatcttcagttggtatatattcagacaagttcccttgcagggagttctcttcctaaaaaaatgaatggaattaatttaagaacattttgattccagaatttgggaagggaattataaaactttcacaaactcagcaggtgtttgttatcccagttttgtcaaaagtccagcctggacaacatagccacgttgatctacgtggccaatctgatctacttggtgggtgagattctgtcaaaccccaaagcagttctagggcatctttgaggctgtgtctctgaggcgcagatgggcctccggagccccaggggtcgctgtggtttc

SEQ ID NO: 48677 - DNA, 365 bp, Mus musculus
  source 1..365: mol_type = other DNA
ttgttaattagctcagcaagcagttaagagcactgactgctgctcttccagaggtcctgagtcaactccccccatattatgtgcagatggtgtgcatacagacaacatatacttctcaaaagtttagagaccagctctcagcatctgagagggctgctcccaattctgagaaaggctctcctccagtgctgggattaaagaaatgcaaaagaaaatacacttgatcctattacctcagccttaggtgtcctagaactcagtctagtagatcagggtgacctcgactcaacgcctttaagcaccttgtgaataactggtgtagacagactaaaggaagttattaagtgtagattgacctgtaaaac

SEQ ID NO: 48678 - DNA, 523 bp, Mus musculus
  source 1..523: mol_type = other DNA
ctcataatatcctttaaagaaagaacttaaaaggagctgcctgattcttcacatacatggtgcatatatatatatatatgcagataaaatacataaagattaaataatttctaaagaaataattcaacatgctcttattgctatcctgatgggatattaataataggataaaataagtttacatagatctttatggtcatcagtaaagtgttcaacggtctggactgaccaactaaattcattgaactttagttctacagacaccaattctaagattcgaattttactttctgaaatcggattacagctaatcattagcgagaggctccctgtgacactgggccgagcattcagcctgcggactgagttccctgccgccgcggcgccatcgctcttgaaggacgacgtcatcatcccatgcgcgggcttcttgtctagcacaggagcctggggtagagcgcatgcaaattacgcgctgtgctttgtgggaaatcaccctaaacgaaaaatttattcctctttc

SEQ ID NO: 48679 - DNA, 544 bp, Mus musculus
  source 1..544: mol_type = other DNA
tcctaagtacttattacagttacaggatttttttggttttgtaataagtctacatatatattctcccaataacaagttacatgaaggtatgaactacgtttatttttgctagacaaatagctaaagtaatatcatgtttcactaaatgttgtcaaaccatatttgaacaactctcaagcttggtctttttattacagtcacaactgttcaaaattttcgagtcaatactccccgggaggtgcctcacctcagctccggcgagggaggcatccgctccggcgagggaggcatccgccccgactcggggcttctcctgcccagtctgcccaagcgtagagccctgctctctgggaactcacctccccgctcggggagagcccggttagggccgcgggaggcccaagtctcagaccttcccaggggcgtgacacgcactcagcacgtggaaagaggaataaatttttcgtttagggtgatttcccacaaagcacagcgcgtaatttgcatgcgctctaccccaggctcctgtgctagacaagaagcc

SEQ ID NO: 48680 - DNA, 285 bp, Mus musculus
  source 1..285: mol_type = other DNA
tctacatagtgagctgcaggccagctggggttatatagatagaccttgtctaaacaaaatcaaaatttaaaaaaatttgttgctctccaggacatccagggttacatagagagaccctgtctgaaaaagaaagaaacaatcaaaagggtttggtttattatctcaggtagtttgtcgcagtaacaaaaagataacatatagcatgagtagagttaactcttaaaggtggcatgattttagcacataagcctctggggtattttcaggatacatgtggttagcaca

SEQ ID NO: 48681 - DNA, 402 bp, Mus musculus
  source 1..402: mol_type = other DNA
cttacatcaagctggccagccagctggtgtggagttctagtctccacatacccgtatatatatccgcatatgcacatactcttgaatttcagaattaatccaatatgtatgtatgtatgtatgtatgtatgtatgtatgtatgtattgaaacaagacaagttctcaattaaaattttaagttaacagagaaataaagacatgtaatttttttcctctctggagtttatagagattctgattaacttctgaaagcttaaaagttcttccccaagttccagagataactggtattgatagttttatactgacattctgtgtatacactagtttgtatgtatccaaaagtgatcacattaaggcaaaaggaacccactccctgccagccgcccggaaggactaag

SEQ ID NO: 48682 - DNA, 369 bp, Mus musculus
  source 1..369: mol_type = other DNA
cccccgggggaaacaagatgattggtccttaaagggtcctcgtacaggacagggccctctccgtaagagctggcagttccaacctcaggccagagtacttggtccatatttaccgtaattcatggcggtctatcgctgtgacgaaagcccttaggctcctggagcaccgaagcagtgtttactgcgctgcctgcaggaggcagcgaggcgcctcccgtaggcgtttgcacacccggggctgcggttcttccggcctggcccgccacgagcaatgcagcccctcgcccgcgttaggcccttcagcgagcagggtcgcgaaacgcgcgagggctccgcccccacgcgtgacataacttctggcgcccgaaa

SEQ ID NO: 48683 - DNA, 301 bp, Mus musculus
  source 1..301: mol_type = other DNA
acacggtgcagtatgtgcatctacagcgctgccaacaccagcagtcacataggcaacagtgtggaatagccgggaagcgcggccgcagccactcaccggtgcccggggccgtgacgtaagtgcgccgcgggttcgccagcaccgtgccgtcgcggaccacgcccacgccgatcttgttggcgctgccttcgaaccccagcaccgcgggcatggtgcctcacggctcccggtcgtgaggccgagtgacgagctgtaactttcgggcgccagaagttatgtcacgcgtgggggcggagccctc

SEQ ID NO: 48684 - DNA, 419 bp, Mus musculus
  source 1..419: mol_type = other DNA
ttatatatatgtgtgtgtgcccacgcacttaagccacgtgtatgtagctgccgggtgcacaatctccaggaggtagaggactcaaactggttcccgcggcccaggataccagccctgccagccagaaggcagccgccctcacgttctggcgctaaatttgggccaatagggttacgtcccacgggagacttgggcccaatgaggagcgactcacgcgacaggctgcgcacgtgacgcgtgcggggcagccgcccacctgggccggaggtagcgcgaccgccccacttccaccatgtgacagtgacgtgacacgtctctctccaatggagaagggacgctcccttacaaaccgggaactgtttcaggagaggggcggggccagcctgtcacgtgagcggggcggcactggctgcgggcga

SEQ ID NO: 48685 - DNA, 312 bp, Mus musculus
  source 1..312: mol_type = other DNA
ataaatattttttaagtgatgtagtttgattactgccaaatactttccacagtatactgtttaatttcttcttgacaagagttctctgccagacaaaaagttctcaaagttagcagaattgtttggactccgtacctgcaggtttcattttatttcaagattgcgcaatctatgaaaaaaaattgaattttttcgcttttcaaatagataggcagttccggggctctttgaaaagaactctggagaggtttcctgccacacctcgtgtcaccatggagacaaggccgctgccattggctggagcctggggct

SEQ ID NO: 48686 - DNA, 331 bp, Mus musculus
  source 1..331: mol_type = other DNA
tcaataaatatttttttaagtgagtgagaaatgtagtttgattactgccaaatactttccacagtatactgtttaaatttcttcttgacaagagttctctgccagacacagatttctgagttcaaggccagccttggtctacaaaaaaagttctcaaagttagcagaatttttggactccgtactgtgtgcctgcaggccattttatttcaagattgcacaatctatgaaaaaattgaattttttcgcttttcaaattcagataggcagttccggggctcctggagaggtttcctgccagtgtcaccatggagacaaggctgctgccattg

SEQ ID NO: 48687 - DNA, 303 bp, Mus musculus
  source 1..303: mol_type = other DNA
ttctttctggagattttgttcacaaattcaagtttattataaaactgggggaataattctaactccttcatgtgatttacaaagaaggccttttcctttacctgaagaagactttgtgccagtcttaatgtacttacacttttttgagaatgaaccagcagaactctgagctcaccacttgggtctcctcatgcgtctcgggagatgatcatcgtcatcatctggagatgatctgaccagagccaaataactacatttacaaaatctggatttttttttccccacgcaaataatcaaggcttg

SEQ ID NO: 48688 - DNA, 281 bp, Mus musculus
  source 1..281: mol_type = other DNA
tccttcatgtgatttacaaagaaggccttttcctttacctgaagaagactttgtgccagtcttaatgtacttacacttttttgagaatgaaccagcagaactctgagctcaccacttgggtctcctcatgcgtctcgggagatgatcatcgtcatcatctggagatgatctgaccagagccaaataactacatttacaaaatctggatttttttttccccacgcaaataatcaaggcttgagtgtttgtgggagcagaaagacacattagctgtaagccct

SEQ ID NO: 48689 - DNA, 415 bp, Mus musculus
  source 1..415: mol_type = other DNA
ttaagagcactgactggtgtgtctgaagacagtgacagtgtacttacatatataagataaaataaataaatcttaaaaagaaattagcaagaaataattcattcataaataacactttattacgatctggcaggcagatctctgagtttgaggccagcctggtctacagagtgagttccaggaccaaaaacaaaaacaaaaacaaaacctctttttttttcctcgtatgcaatctatatttccactgaataaaatggtgagacagcacgcctgaggagctcatttcaattcctggaatctacatgacagcaataataattaaaactatgaggttgacagagttcagcgttctgtgcttttctttcctcaagaagagcatggctgttgccaatgaacactgtgacccaaagtgaca

SEQ ID NO: 48690 - DNA, 358 bp, Mus musculus
  source 1..358: mol_type = other DNA
aaggtctacagaatcgccctgcgcttgtcggagactcaggactccgctgccctgcatttgggctccactcgaagagcgcagcgccaactcggctcgctccagtgaaaggctttgatgagcaagctgagctaccaaggtcccgggttcaaatcccggacgagcctttcgttcttttttagtaactgatagacaaaatgttcattcctgaagctccccaggggagaaccttccaggggagaaccttccagggtcttcctgacagtcatggacgtcctcgagaaaaaccagtccgatttctgtacagaaaccaccagaatggggtgcggtcccagccaccgaggctggaacgcccaccctc

SEQ ID NO: 48691 - DNA, 459 bp, Mus musculus
  source 1..459: mol_type = other DNA
cgtgggagagatgcctcccctcccccgactgaagcagataggagagctggccccaccccttgccagctgtagcagccaagttggtgtgaccaggcccagatccagggctttgagtttgcccacccttacatctaccctatctatggcagagcacatgaaggggcaggtcctagatctccagaaagatgtttggacaaaagggtctactgtggcacatactgttatactgtgaaattctcaaaaaatcaattaaaagttttttttgttgttgttttttttttaaagctatttttaaagatgcccaaaagcaccagctatatatatatatatatatattttttttttttttttgttaaaaaaacctaaaatcatagggtgatcaggtccttaaacctctgagctttgaggaactgttaaagagctcactaggaggttttctctttcataggcttaaaaata

SEQ ID NO: 48692 - DNA, 326 bp, Mus musculus
  source 1..326: mol_type = other DNA
gccccaaagctgcctgcttgcatttttgtgccacacagaggattttgcttttagaaattagtacagcttaaatcacacataaatatctacacaattgacaaggagctaaaatattgcaactttgccctatatacaagataaatgtatggcaacttttaaaattgtatgtatttatttatctgcatgtatgtctgtgtaccacacatatgcaatgcccagggagaccagatgaaggcatcaccactggttagaacaattctagtagatttgcaactgtgctttaaagaacaggaagctgagtagccataaatatatattcttttttc

SEQ ID NO: 48693 - DNA, 419 bp, Mus musculus
  source 1..419: mol_type = other DNA
tcaaaagatactgtgcaataggagtacagtgttttcttattgtttctaaatgcaatttttatagtttattttttaatttcacatgtatctggactgatatgtgccatgcatgtacaggtactaacactcaccgatccctaaggattatttttactgtctgtgcacatgtgtatgaacatgccaactgatgctattagaagacataagatgacctggcccagcatctgtgctgaaaccaatcttgggtgctagcatctaaaaatgaaagacagaaatgaaaatgtctcttatgattctggcttacccagctatccattactgaaaacagttatgaagtgtgcaaaggatttctatgtagagttcagattcagacttcaaactgcggttgcacaagcaggcatgtgtgggttctgcaccaa

SEQ ID NO: 48694 - DNA, 321 bp, Mus musculus
  source 1..321: mol_type = other DNA
gattatttatataataaatgccttttgtcatccacttaagcctaaagctcatgtcaggacctttatttatttattttatgtatatgagtacactgtcactgtcgtggctgagtttggcttggcaagtctgccacaacccagctagtagggaacccttcaagctgcagacaggacggcctctttttgattcaaatagagaaggagggcttccctcttccatgccaggttgtatatgatgcaaacagcatgctcataaattacaaggctttgtgaaagtagctctgctgccccttgggaatcagcacaggaggcacaaaaggt

SEQ ID NO: 48695 - DNA, 357 bp, Mus musculus
  source 1..357: mol_type = other DNA
tggacttgcaaactttatatgccccagtaaatgtaaatgagctaaatgtgtggcctctagacgtctctgtgtgtctgtgcacatgtgtgtgaacatgccaacagatgctattagacgacgtcagatgtcctgaaatgcagttgcaggaccaacgttgggtccagagcactacaacatcataaaattttaaagatcaaggatagaaatgtcaatatctcttatgatcctggcttgttaaaggcaatacagagatttctatgtagagttcagattcagacttcaaactgcattgcataaaaggttggatttggttctgcatgttgaagactctgagccaccagctccacccacagagcc

SEQ ID NO: 48696 - DNA, 182 bp, Mus musculus
  source 1..182: mol_type = other DNA
ccatactttggtatcactcaaaggatagccaccttttaatactttgagtaacctttatggttcaccctttggtcttagagttaaagagcaagaattaaagtgacatcagttctagacaatcccttgtatccagggaaccctagaatctttggtgatgtcaccagtgttgtggtaacaagagt

SEQ ID NO: 48697 - DNA, 412 bp, Mus musculus
  source 1..412: mol_type = other DNA
agctcagcttgtctgactagaaaagcctatgctctggaatggattatattattttattttttaaaaatatttttgaatgtatgagttttcattgcaaaaaattcagattgtaaatcagagattttgtataagcacatgtctcaatacattgacacaatatatcctctcataatacaacatttgcaacattaaaggtacagaatacatagatgtatattggataacaatctacctcatgcaatgaaagtagtgagaaatctctcttctggtcttacctgggtcaaaagagagtccccccccttttttttgaggtacagggggaatatctaattgtacatgcacctcatggtaagagtgggccatagtagttcccagtggtatcactgtgatgtcaccattgttgcttgacacc

SEQ ID NO: 48698 - DNA, 525 bp, Mus musculus
  source 1..525: mol_type = other DNA
aactttttcaatgcagatatttgctgcttctacaagtatgatataaaatgcacacacaagtgggtagctccaagctgaaatactagcttaatagttagccatagatattatccagtagctgctattcaacacattacagttcatgcgatataatgcagggagtaaagaaaatactcaatttaaaaacacagttgtgtgcatgcacacacacacacgttagtgacttaaccttgatttttctgaaatgcagcactcaaagtcatgtctatgattaggattccatgaatccacttggtgaagtcagtaagacactattaaattgaaaaggagtctaatttttatttttataatgcttatattttaaactttttattactaaagagtttaattagaaaacaataaaactggatactgttcttctgtcctaggagcaaggagctctgctctgagatagctgccatagagaagatcggaggagataattccggaagtgacatcctgaggcgcctctcaataccacagtgc

SEQ ID NO: 48699 - DNA, 450 bp, Mus musculus
  source 1..450: mol_type = other DNA
atgaactatgccgtgactacagtgttttgttattgtttctatatgcaatatttaaagtttatcttttagttttcacatgtgtctgcatccacatgtgccatgcatgtgcaggtactcacaagctgtggcctctgggtctgtgcacatgtgtatgaacatgccaaaagatgctattagaagacatgagatgtcctgggatggagttaaaagcaattgtaagccatccactctggagagcattcatataattttaagatgcaagacagaaaggtaaatatctcttatgattcaggcttcccaagactttctaaaagtgtgtagtcaggctaaaaacagtcaacaggcaatacagagatttctatgtagtgttcaaatttagacttcaaactgacctatggcttggccaactggtcacatgggttctgcatgttgaagactctgagccaccag

SEQ ID NO: 48700 - DNA, 408 bp, Mus musculus
  source 1..408: mol_type = other DNA
atctctggttgtcaggcacagaaacaaacaaacaaacaaacaaacaaaggctttttgctggctatagagagcaaagagcttctttctggctgtatccccagagatggggatataagataaacgtataacaatttttaaaattgcatatatatatatatatatatgtatatatatatatatatatatatatatatatgtctgtgtaccacgcatatgcaatgcctggggaggccagaccaaggcatcactacagatggtatatgttagaacaattctcatagacttcttcatgtagacagctggttttacaactgtgctttaaagaacaggagtggaagaggaactcaggaagtactcattctcttccctgtggtccaccgccaaagagataacacactatatattacc

SEQ ID NO: 48701 - DNA, 234 bp, Mus musculus
  source 1..234: mol_type = other DNA
tttagcttaaaattaaacggtgcattgtttaaacctattaagttcatgaacttgggtaaattaaccacgtgaaaaattaagttaaaatgtgaaaaaaaagtaagctaatttttatatttattaatttgcaaactgtaatagttattagcgctcatcgttaaagaaagtccacactttccttgccttcttcgcagagacgtacataaggtacataaggtcgcttattggctgtta

SEQ ID NO: 48702 - DNA, 386 bp, Mus musculus
  source 1..386: mol_type = other DNA
actggcagccttgactgaaacaatgaaagtgttctgctttttttgtttgaagtttgtgggtttccttaaactttaaagataaaaaaagaagtgtttaaacttttatataagagaaaaaaacaattgactgatttcgaagcagaggcaggtaagtctctgagtttatcaaggctagcctgatctacatagttccaggctggccagggctatacaggtatacatgttgtaacaactcccagggaatttccatgcctggagctatttttctggaattaaggggttagctgggacgtaactaccgtaggttgttccatttgaggttagatcaaccccagagaactaaggagagcttggattagtcacagcattgaagagaaaacttctct

SEQ ID NO: 48703 - DNA, 380 bp, Mus musculus
  source 1..380: mol_type = other DNA
gaattcataaaattacaaactgcttataggaataaggacctgattacatagactagaaaggtaaccagtctctgatgtctcttagagggcttttgtacagaaagaaaccattaagggacatttggagcttctcagaatcgtctccaggggattttcagagtttgagacttactctaacacatgagtcaacagtagaagctctttaaaatcccctgctgtggttggctttccacggccagagggattctctgtctggtagtcacagagcttgaccatgcaagggcgccaccagactggcagttaactcaactcaaagactgtgtcttggcagcttgaagttcagaggaggtgatgtcatataacactgtgacatcacagtg

SEQ ID NO: 48704 - DNA, 315 bp, Mus musculus
  source 1..315: mol_type = other DNA
ggcatcggcagcagggtactgcagccacagggtctcttgggtctcagcccagagcggggggcccctcgttggggcacccgggcagccccgagaccgggtctgagcggtggccctcgcccaccttctccccactgccactcaatctgggggagccaggtcacagtagggggggaccatttgggggtttaagggatcccccacgctcaccgggagcactcagagagcctatgagcatcacccctcccctggtagcccaggcgagttacgggctgcagggagatggcccgggggcgggcccagggcgggtctgtgggg

SEQ ID NO: 48705 - DNA, 444 bp, Mus musculus
  source 1..444: mol_type = other DNA
acttccatgtagaagtgatacaggagcctagccccttttgtctgatctgacatcagtactaaagagggatcctgatcccggggccctggcctctttgtagtctcatggagccttgagcgcccaaggcttgggggaataccctaatttcccggccttcagctctacctaaagggaactaaaggctgtggatcgacctgggccccaggaccttgccaagccttgccacggaccggagaccgccgggcaacctgggacctaggcgggtcccctgcagggtcccgagctgagggacgcgggaaacccggggcgtcctcagctgggcgggctggcagcagacagccgggtcccgggctgggcggggcggtgcaggcggccgtctcggccctccctggcggggcccccgcggcctgggctgccgaacgagcggggagagccgcggtcgcc

SEQ ID NO: 48706 - DNA, 200 bp, Mus musculus
  source 1..200: mol_type = other DNA
acagggagtatcatctcgagcttaaattacccacccaggaatcaacttccctttgggggagggggtcaattaggtaaaataagaactgcgcctttgtaatgcaaaaatattgttggtatagatcttttccaaaccagcctaggtaccgggtggctgggtggccggccagtggatcctgtctaggaaggccatctgacaga

SEQ ID NO: 48707 - DNA, 597 bp, Mus musculus
  source 1..597: mol_type = other DNA
ctggcgccactgcaatgtcaaggcaagccagccaggctgcgctctagcctcactggtacctgggcttgcctgagcccggagaagcagcattctctagggaaaagaagcctataagtgggcccgccgggggcggccgaaaggctgagcctgcgcagtcctgctcccgccttgggggtggcggccacgcgggctcggtccaccagcgtgctcgctagaggcgggaaagtcttaggtcggtacccccgcctgcccagccagcctgtcctctccagctcccggcccgggggggagggggcgaggagggccggcgcctctgactcatcatctccgcgcgcgctccaagtctcaggactttgaacctgggcactcgcgcgaggggcgcggcggcagcaccaggggaagcgcggcttggcccggcgccgacccccagcctttgtcagtaccggcagctgcgggcacgagggctagagacccgcagccggtggcggtgacctggccgcggtggcggcgcctctgtgcgcgacggccctcccggcgcctccccgcacgcggggccagtggtcgcgtccgaggaaaactcggctaggccttgctccc

SEQ ID NO: 48708 - DNA, 329 bp, Mus musculus
  source 1..329: mol_type = other DNA
aatctttttaaaaaaatcaataattcttaaaaaaaaaaaatgattgaattagtcttcacgtcaggccttattcgaggccagcctggtctacaaagtgagtccaggacagccagggctatacagagaaactctgtctaaaaaaagagctcagaactcctttcccatagagacactgtctctgtgcaacagccctggctgtcctctcattttgtagatcaggctcgattcagcagccgttgcttcccaaagacaatagctatgtaggccaggctagctacagactcgctttagccagagtcctgggattacaggcaagggatcccacacct

SEQ ID NO: 48709 - DNA, 381 bp, Mus musculus
  source 1..381: mol_type = other DNA
acagtaaataaatctttttcttaaaaaaaaaaaaaaaagaaaataaagatctaaagattaaaaaaaatcaggaaatttttctgggatacaatctccttttctccgtaagctatatatacatttcagtgtatttaatgttcctacagtataaccatccttgagaaggccatgtcctcccaacagcttataaatctggtcccttttcctaggcctggggctagggcaggccgtttgccccacccccgcgccgcggaaatgcggtgatctggccggacctgggagctctcagaagcactgataggacgatgcggccgtcagtcagatccgccggatatcagtcactaagggtagcgctcgctaatgctggactttcgcctcggc

SEQ ID NO: 48710 - DNA, 238 bp, Mus musculus
  source 1..238: mol_type = other DNA
atttaacgcagcactgcagaattcataaacaattcttcacacgcctttaacacaggcatgtggatcaaggtctacatggcaagttccaggcaggcaaagatacatgtgagaccctgccttttccagcatcttaggatcttaataatttacaatgaacaaaggcccttgtcggttcggtaaaagctggaagacagctaattgcctgactttgaagaaaaatattcttttctcagactct

SEQ ID NO: 48711 - DNA, 270 bp, Mus musculus
  source 1..270: mol_type = other DNA
agacaatagctatgtaggccaggctagctacagactcgctttagccagagtcctgggattacaggcaagggatcccacaccttgtaagtttatatctaatgaatatttataatctctcatatttttaccttgatgcttttgagaaaagcaaaataagtgtattcattttgtcctcgtattaccgagatgggtttccagtagacccctgtctagcctggacttcactatgtagaccaagttaacccagaatttgtggttaacaggggaaaa

SEQ ID NO: 48712 - DNA, 331 bp, Mus musculus
  source 1..331: mol_type = other DNA
caggcttggcagcaggaacccatacctaacatcaacaggtatttttgtcttcctatgcagaccaggttagcctaaaatctgtagaccaggctggcctcgaccctgctcaaactcagagatgtcaatgtcattccatttgtataaatgactaagacctggtcttgtgtgttttacactctaacagctaaataccaggatggagtggtgttaaaataaagttgtagaaaagaaagctcttgattctcagttctaactcagaggtctgggcgtgtcctaacacttcaggccctggccaaagcagacgtgacactgagtaactcctcaatgccac

SEQ ID NO: 48713 - DNA, 570 bp, Mus musculus
  source 1..570: mol_type = other DNA
tgtggctacagctggagggtcaggaactgttaccttcccattaataaatttaagttaattccttaaacacaatataagtactgttttttgctgcgtaatttaaacaccattctcctacagttcaatactgttgcaactaatagaaaagccatttgtagtctcaatagataaagaggtaaaatattttgaattgtacttcacattcttaaacgaggattaatttcaagagccatattttttttttcaattagtcaggataactattcttggggaaagccagagaataatgtggcttttcatgaaatacagcaaagaaagaactacaaagtttaggagccactccggctgcccaccgcgcagcttattcgcgaaggtgggcgccttccccggggcggtcactggcctgccctggggcagaggactcactcctgcgcctggctgcctccctctgcccgccgcccagagcgcccggagctcggaaagtgggcgggtcacgtgacgggagcctctggcgccggagagagcttccagagcccgcgagcccgcgctgcacctcgccagataccgggc

SEQ ID NO: 48714 - DNA, 301 bp, Mus musculus
  source 1..301: mol_type = other DNA
aagaatcctattggtgtttatgttgaaaaacatgtgaagctggtagttaataacaaaatacagatgagatgtttaataagcaatttttccataaacatacaagttgcattggaagaaaaaaaaatcttcatataccatgatttcagaccaacagggtttctctgtgtagccctggatgtcctggaactcactttgtagaccaggggtagcgccgctggctcccagacagggaacagggtctaaggcaggggcagagccccgcccccggggctcgccccgccccctccgcgattttggaggt

SEQ ID NO: 48715 - DNA, 568 bp, Mus musculus
  source 1..568: mol_type = other DNA
acttgtgaagttaacaagttaactagcaaaaaagtaagtttgaaattatgattataaaacacccaatctttggagaagccctggaacttccacagcgttcccagcgctgggtctgtgacccacgcaggccggggagcggggagcgccaagagctccgggcacagctttcgcgcccctttcccgcaaacggtaattgtggcgggacctgggcgggccgctgtggccgcggggcgggccaggcgcgtgcggaccccgcaggcgcagcacggcgcggcgagccggacgctgccggggcaggcgggagcgcggcggagccgggggatgtggggctcccgggggcgcggggctccttacccgccagttcagagtctggacgccgcttcccgtcgggctccgagaatcacgcgaggtcccagctccgccggcccggaatcccgacccggaagtaccgaccgcccggtatctggcgaggtgcagcgcgggctcgcgggctctggaagctctctccggcgccagaggctcccgtcacgtgacccgcccactttccgagctccgggcgctctgggcg

SEQ ID NO: 48716 - DNA, 342 bp, Mus musculus
  source 1..342: mol_type = other DNA
taacaactgtccgaagttattccctgctggataaacaactttctttatctcgatttctttactgaaaaaattttttttcagaacaattcctttcgttcttcctattcagaatagaggagctcgaagcctcgcagcatcagcagcttttgctcacctcggctcctgacaggaaagggtcatttcctccgggaaagcggagcagtggcgtgctgagaccccagccctcccgagcccgtcacttcctcaaggagaaagcgtcgctctccgatgattggaccgacgatcccagctgcccgaagggtcgctgtcgccccctggagcctagaggcggcgtccggtaca

SEQ ID NO: 48717 - DNA, 438 bp, Mus musculus
  source 1..438: mol_type = other DNA
ttaaattaagctaaaacaaccacacagctttgccttaaatttatgtgggttctgggaatctcagaatctcatgctttcacagcaatttcttgcacattttcttttaaaaaaaaaaaaaagaacaaatttattatatgtatatgagtacactgtagccgtcttcaggcacaccagaaaagggcaacgccttacagatggatatgagtaaccatctgggagagcactgagtgctcttacctgccgagacatctctccactcatcctgaacatttttaaagagtgctccctcgaattcccagaactcacatagtgaaactccactctcctttcacacactttgtatagaaagaaagaaagaatatgatacagtgcttgaccgtatgtgaatatacactattttaaatgcgttgtcactaacgacttaaagaaaattacgtc

SEQ ID NO: 48718 - DNA, 299 bp, Mus musculus
  source 1..299: mol_type = other DNA
cagggtttctctgtgtagccctggatgtcctggaactcactttgtagaccaggggtagcgccgctggctcccagacagggaacagggtctaaggcaggggcagagccccgcccccggggctcgccccgccccctccgcgattttggaggtaggatccccgccccaactccgaaggcggtccgtcggcgggtgtaccggacgccgcctctaggctccagggggcgacagcgacccttcgggcagctgggatcgtcggtccaatcatcggagagcgacgctttctccttgaggaagtgacg

SEQ ID NO: 48719 - DNA, 211 bp, Mus musculus
  source 1..211: mol_type = other DNA
cccgttaggagctttggatcctgagctgcaggagctcccctccccccagggttggagctgggtgagaagggcttttttaaaagtaggcccctccccaaacttcttttgtgaagagagatgagggcctctgaggcgagctgagcagcgagctcagatttcccactgtgggcttgagggcacagtgggcccctaaggtgcctcactgacacct

SEQ ID NO: 48720 - DNA, 214 bp, Mus musculus
  source 1..214: mol_type = other DNA
taccccgttaggagctttggatcctgagctgcaggagctcccctccccccagggttggagctgggtgagaagggcttttttaaaagtaggcccctccccaaacttcttttgtgaagagagatgagggcctctgaggcgagctgagcagcgagctcagatttcccactgtgggcttgagggcacagtgggcccctaaggtgcctcactgacacct

SEQ ID NO: 48721 - DNA, 378 bp, Mus musculus
  source 1..378: mol_type = other DNA
ctttaataatgtagaatatatgatataaatatgtaatatattattttgtatatttacatgtttactataataaccccaagcttttattcttctttactgaaggaaccccaatccttccttgtaatatatttccttggcagattaaatcttgcctttcaaaaaacttgttattgcaacaaactgtggtgtctattttatatatttaaaactattaatgaaagcccatgcattaggagagacagttcagacgtctcatatttcaggccacagcatgctagctaataaagagtttgcttagtgattgacctccccctggggctgatccacagggacgctctagtggattagacattggctgttctctggggagcataccca

SEQ ID NO: 48722 - DNA, 433 bp, Mus musculus
  source 1..433: mol_type = other DNA
gaccacataggagttcgccaagtggtggcaccacccacagtgagctgggctctccaccaatgccccaagatatgtgggcatgcctgatcatggcttgtgttgtgttgacaaaaaaaaaaaaaaaaactaaccagcacagtaacttagccacttttattaataccagtaaatcctgcaatatcacatgtatgacatacttttcaatctaaaagtaggatgaggaagacgacttttcctttcatttgcttagcagaataaatgataccagttccctgatctcaagcaggctactcctgttgttcagcaagcatgcacacccagctttcctgaaagatctgggcagtgtgcagagaacatgaaattcaattctgtcactgtccacaagggggcagaacatgtcttaagagcagcctgcagtcagcagctctctgtg

SEQ ID NO: 48723 - DNA, 461 bp, Mus musculus
  source 1..461: mol_type = other DNA
ttctaagatgctttctcagaaacaaataaagaaaatttaaaaagtattcactcttattttatgtacaagttccgtagttaacagattgttttgaaccactgagtttggttctgcaaaccaaaactcagtcctctgaatagtatcctactactagtttggatcagtgaaaataaattggtaaaacctatatcttgccattcagtttatcatatggtaaatcccaaaccagataagaatgatgacagtcaattcttatgttttaaccattgcttaagttctttagattgatgtaatgtacataaaataaagtctgcacttaaagaatgttcaacatcctttgacatagggacacctgaaatctggtatgtgtcttataaatgatctgaggacaagagcacattttccctagtttacacaagatccttaggttcatcatttgatgccatttcatcatttcttca

SEQ ID NO: 48724 - DNA, 233 bp, Mus musculus
  source 1..233: mol_type = other DNA
aaagttagagaaattaacaagtccctaggttttatttgttttatagttctttttacacacatttctagtcacagtgtgtcccacattatgcagtacaaaaataaaacctcatgcagtttccaaagctcaaagggctttactttttactagccaagttagaacactttgcagagtccacaagatggcagtgttttctttgggatcctgagcaaagagtctcttttctagctgcc

SEQ ID NO: 48725 - DNA, 485 bp, Mus musculus
  source 1..485: mol_type = other DNA
tcattctataagaaagaatatgccaacaccattaatgacctagttgtgcaagactctattggcccattcacacacacacacacacagagagagagagagagatctggccagaaataggactgaatttcaaattgatttcttttgttctggttctttataaaaacactgatgagaaaatgatggtaaaggcattattttctggcttcccagattgaaatgaacacacttttaaattattttactatgccttcaatagcgaaattgctgggccatttcttaagcttcagaacaaactttaaagactcaatctctgggttttgactaccaaaatttaatgttttatcatataataattttctaaaaaaaaaacagcccatttttaaattaggttagaattcgctctagatagaacacactaatttgtcgctctccactggccgccagagggcgacattgcagttctgagttcttagatgatctgacag

SEQ ID NO: 48726 - DNA, 382 bp, Mus musculus
  source 1..382: mol_type = other DNA
aactaatattaattgaaactattgtatctgtctatcccttaacatactattagtaggagtgaatactactagattctatatatcctttccactaacatctcctcagtcaggatcttctctgactggattaattacgaagactgccttggttaagggtgacatcccaaactttgaggaaatatatatcaacgtctatacggctttaattgatagccataacaacatacattgttactgccaatgtgtaatgtccttataagggatttgtaatcctcatgactcgattttcatagatacaaaatttgagactatgtcagaaagagcttcagacaaagtgtctgtgaacctgctcagagagctgattctgtgggagacaaaagac

SEQ ID NO: 48727 - DNA, 535 bp, Mus musculus
  source 1..535: mol_type = other DNA
cttctcattcaataaaaattttgtgaatttatttttgttcattcctttaagtatgaaacgcatatacatgtaaatagacagacaggtagtgtgtgtgtgtgtgtgtgtgagctgatgtgtcacatatgacagattttgttactcaggggacttatgaaagctttcattaagaataacctatttttatataaatttgccaaatccctgcattaaaattttaggaagaaagactaagttgaagttttgcattcttgttaaaccatcaacctttttttttcctctagggaaaaaggatgaatctataatccacatatttatttcataataaattgcatgtcctacattatctatctgaatgattaagctgcatatgtatcaaaaaaaaaaaagaaagaaagaaaattagtccattttcttatgatggtttccagtccattataataaggtcaacgggtcttcaagacagtctaacactctcccatatccatacaggaagttatgacagggcacaattaagtctgccccttaactgtca

SEQ ID NO: 48728 - DNA, 240 bp, Mus musculus
  source 1..240: mol_type = other DNA
aactttcaaacaacctttactcaacaattctccattcaagaaaagagaataaaaaattagacaaataaacaagttgcctaggtcttttttagagttgaaaacaagtgtgctcttggttccaaatggaatccttgattttatgtgcaatacttattattactgagaacagttttcatagtgttaatagttacattagaagaatttggagtttgactctttctttgctttatagggatcttg

SEQ ID NO: 48729 - DNA, 440 bp, Mus musculus
  source 1..440: mol_type = other DNA
cacacacacacacacacagagagagagagagagagtctggccagaaataggactgaatttcaaattgatttcttttgttctggttcttgataaaaacactgatgagaattattttctggcttcccagattgaaatgaacacacttttaaattattttactatgctttcttaagcttcagaacaaactttaaagactcaatctctgagtaggaccaaaatttaatgttttatcatataataattttctaaaaaaaaaaaaacagcccatttttaaattaggttagaattcgatctagatagaaagaacacactaatttgttccactggccgccagagggcgactgaaccaatctgagttcttagatgatctgacagctgaatagaattttacctataacaggaactgggaacagcagccactttcctgcacgagccaggtt

SEQ ID NO: 48730 - DNA, 513 bp, Mus musculus
  source 1..513: mol_type = other DNA
aaccaacccctaaggagttattggtatatatacagtcttcttcagagaggcttcttgctgtagcacacagtgattaaagatgggacatctatatcccatactcttctcccaagactcagagttcagtgagggtgtgttcaggacacttggtagttgctgggaacgagagtctgtttcctttcaaggtacagactctggtgtatagatcagcctccactgaaggccatatatccaagagcacaagctgtaacacaaaacttgatatgttttatattttaaagaacatggatacattttaacagatgtgtgtgtttatgtatgataatcatgcaaaataccttaggatacacatagttcagtaatgttagtgatttcaggcatccactggagacttgagacctgactccttaaccagcagagggcgctgccccttcagatgtggttaacatctcattcgggtggtgacttaacaacgtggcagactcactgtgcagacagaggtccttgtctggt

SEQ ID NO: 48731 - DNA, 212 bp, Mus musculus
  source 1..212: mol_type = other DNA
cagctgattctctgaaatttgaaagggtttattttcccccttgatcactaattgagaaaatgccttgagctcctggaggcattttctcatgtgataactccagctgtgtcaagttgacacaaaattttgtgtcttattaatttccatgtctctgaaatgtttgtttcctcatgtggcctccagagggcgctgctgcactcactagtggctga

SEQ ID NO: 48732 - DNA, 432 bp, Mus musculus
  source 1..432: mol_type = other DNA
atccttctttttttaaaaattagttttaaaattgaaatataattttaatactttccttcttgtagcacatagaggttatgaaagaagctgactcaggcccatatgggtcatctgttattcagtgactcagatgctgcacatgtaaggatcactttttctttaaagttgaagctcatggtaacctataacacaaaacttgacgagttttattttaaatggtgagtaaatcttttaaggacgtataaccaaaattcattgcataatattctgtaaaagctaataaaaatttaaaagtatataaattatatcagaggtctatttgtgtgcatattcttttatgttcactcagcaagctaaataccataggattcctctggaggcttgagacctagtttatagacaaagtactgtgctgtgcagacagaggccctt

SEQ ID NO: 48733 - DNA, 367 bp, Mus musculus
  source 1..367: mol_type = other DNA
aactgaaagccagcatgagttgctggtcaagaatttcctttttgttcctagaatcaaagaacatatgtattaacactgagccttccaggaaaaaacctagagtcattaatcctaaatttcttttctagttgtaattctgctagctttagcagtcaaaccgaggtaatctaactctgtgctgcagagcatctatcaccaccatggctgtggtagccactcacactcagcctgagacgattgcctctttcataacctgttttcataaggatttttaacaaaaagtttgtgaaagtttttgtggacccacttcctcctatggcctccagagggcggtgctgcactcactcttgcagctggctgagtattt

SEQ ID NO: 48734 - DNA, 271 bp, Mus musculus
  source 1..271: mol_type = other DNA
aagtacagacttaggtgtcataagttttctcaagtaaccttcatggtaaaatttaaaaatgcattgcaccagcacaccaccactctggaatgcagaagcactgcattggttttccttgactgttacattagtgttccactttaaaactgcattccaaagctaggaaagcattacagtgatttcccttaaattatttcacagtgaagaagtccctggagctggagttacaggcgggacctaaggtcctgcagaacaggcacctgtttcctga

SEQ ID NO: 48735 - DNA, 474 bp, Mus musculus
  source 1..474: mol_type = other DNA
gcgaataaaatgtttttagatattaaaaagattttgaaaaagtctttgaaatttttaaaagactgattatttaaaagttatatttgttttatattgtgatcaacaagaaaggaaagattatgtttaataatgttgtttttatgttaagttttgtcaacacttatgtctttatttataatataacaatacatctgtgttcctacagatgttgtcatcagtagacagcacctacattttggcaatggttaattgtgctaaaataaatgtgcatatacagatatctctcttttattatatcaagacatatttctaccaacagtgtataatgataaaattataaggaagggatttctgattctcatttcctatttcaatgatactaagtttgaacagagcaggaagtgcttcctatgtcagaaagagcttcagacaaagcagagcctgctcagagagctgaggggagacaaaaggcca

SEQ ID NO: 48736 - DNA, 503 bp, Mus musculus
  source 1..503: mol_type = other DNA
aatataagccttaacaagtacaaaagagttaaaatgactgcttgtttcttatgattcattgaaaacaagcatggaagaattttaaaattcctagaataaaatgaaaaataagtcacaaattataaaaatcttttagatacattaaaagcagttatacagacaggaatatggtttagtgtataaatttttaaaatcttttcactatgcagtttctcactgcttccagaaattccaaatttgtatattttggggtgacagtgaaatccactaatggagtatattaaatattctatatgatggatgagactgtcaagaatgtttcaaaaatatttattctaagattatagaaatatttgaaactgtgtgctctaggtcgataacattcaatcagcattctataactgtaagacaaattttgaataaaagcaaaaaataaatagattttaaaaagtaatgttatactgttgtaagagcagccctctgtgcacacagctgaagatgcc

SEQ ID NO: 48737 - DNA, 337 bp, Mus musculus
  source 1..337: mol_type = other DNA
tgaggcatagattttacatattctaactggtgtgaggtgaaatctcaaagttgttttaatttgcattttcctaattgctaaggctgatgagaaaagaccactgcagggttcctaaaattactctctagctctcaatcattctgcagaaaatcataggtatctagagcctgtccaggtgtctataaacctattttaagaataactctctgaacagaaatggacactcaagagaaaacatctttactgtttttatttcttttatatttatgtctaaaattccacaaactcaaagaactggaattattccaatacttggagagctgaatgaggaagctcg

SEQ ID NO: 48738 - DNA, 406 bp, Mus musculus
  source 1..406: mol_type = other DNA
aggtcatatgcatgctgtcataactgctgtcacaacatatatatatatgaactcatcaaagactactaagaagcttccctaatgagtgtgacatcctgacttgtggatataacagcatgaagtccaactaataatatactaggttctaagtcccatgacctatcaagttacatgtcattaaaaaactgatagagcatagataaaaacataaagtatgatttaattgtaagagctttagaaatattacaaaaatgtgattagagaaatactttttagctgaaaaaataaattgccctttggtgaaaatgtatgcataagtacacacgtacataaacttgagcagaggcactttctcatatggtcctaacactgtgtgtgtttctttttatgcctcttcaagcagaag

SEQ ID NO: 48739 - DNA, 384 bp, Mus musculus
  source 1..384: mol_type = other DNA
acccaatctttatttgatagaaatgtaatgaaattgacattgatttaatttccttatgtatttttctaagattatacataatatgaacacatatgaaaatgaagctcaagctgtcaggtttgcaattgcagatacattttcaggaattgcagttgcgacctgcaatcagtaccagttaaatgtagaattgccttgatcatgtgtctgttcacagcagtaaaaccttacctaagacacttaggaaccctagcaaggctgttcagaagtatcctgtaaattctggaatattctctcactctgtgctggaaccaatggcagatgcatggcagtgcctctctgtcagaaagaaccaagcctgtctctgattggctaagcaaaaaccag

SEQ ID NO: 48740 - DNA, 393 bp, Mus musculus
  source 1..393: mol_type = other DNA
tccaaagcatggcacctactatggaatatggttgatatgcggaaaactaatattaattgaaactattgtatctgtccataatatactattagtaggagtgactactactagatctcctcagtcaggctcttctctgactggattattaattacaaagttgcaggtttcatgcatactgcctgtcacagtctctgtgaatccaaactttgagggggtacatcatttagggctgagtgttctttatgggtatatcaatgtctatacagctttagttggtagccataacaacatacattgttaccaccaatgtgtaatgccttataagggatttgtaatcctcatgactcgattttcatagatactaaatttgagaagatcagactatgtcagaag

SEQ ID NO: 48741 - DNA, 274 bp, Mus musculus
  source 1..274: mol_type = other DNA
tatctctactccataatttcaattttaaaattgtatgatgaaaatccttattttctctcagactagcagggacaagaataatttgtttcaacaaatgaaaattccattggaaccattgtctttgttgattttaagaaagtgtatttcctcattcccaaaccctatcaaattatggaatttaaaaaatggcttacttttgctatctattaaccaacctactaatcaaccagtttttaggctgttttcattcctagccagggagaagttatagtga

SEQ ID NO: 48742 - DNA, 388 bp, Mus musculus
  source 1..388: mol_type = other DNA
ccacgtgggcccaactagctgctggctgctgtggggcagggccttgagacacagtttcccagagctatagtactgtgagaggtggtgacaaaagcagctgtggcaacagggccagctctgccccagtgccaggaccggagctgccgcttgacatagtggcaggtggtagaatcctaagaatgatgacagtcaattcttatgttttaaccattgcttaagttctttagattgatgtaatgtacataaaataaagtctcacttaaagaatgttcaacatcctttgacatcagggaaatgagggacacctgaaatctggtatgtgtcttataaatgatctgaggacaagagcacattttttacccctagtttaacacaagatcctataggt

SEQ ID NO: 48743 - DNA, 285 bp, Mus musculus
  source 1..285: mol_type = other DNA
ctagaactttagatcaatttcaaaagttagagaaattaacaagtccctaggttttatttgttttatagttctttttacacacatttctaggatgtgtcacagtgtgtcccacagtatgcagtacaaaaataaaacctcatgcagtttttcagaaagaggacagtatctgctaagtgtgaaagcacaagctcagctttctaagggctttactttttactagccaagttagaacactttgcagagtccacaagatggcagtgttttctttgggatcctgagcaaaga

SEQ ID NO: 48744 - DNA, 429 bp, Mus musculus
  source 1..429: mol_type = other DNA
catgagtcttgcatgccagtcacaactgcttccttctatagacattgtttcaagacaccaatgatgtactaactaaataggtggtaccaactcataatttcaaacttctaaaaggtgaaagaagtagactgtaatgattttacactcttaggatcagttgataattactccatttcttaataattgtaagagatttttaaagatttatctgattttatcagaaagagcactaagtacttgcaagtcttcttgtcatttgcttattaagtgataaattccaacacaggaaacccatcagttgctgtactatacaacagtttcatgtcacatagaatgctaagaatgataacattgagtacgttaacagctattgtttatattctttatattgataagggatgcttcaatctgatgggtgccttgcaagtg

SEQ ID NO: 48745 - DNA, 200 bp, Mus musculus
  source 1..200: mol_type = other DNA
tctagaactttcaaagatcaatctttactcaacaattcttcattcaagaaaagagaataaaaaattagacaaatgaacaagttgcctaggtcttatttagagtacgttgtttaaacacaagtgtgctcttggttccaaatcctttcacttaaatatatgcaatacttattattactgagaacacattagaagaatttgca

SEQ ID NO: 48746 - DNA, 366 bp, Mus musculus
  source 1..366: mol_type = other DNA
agcagacccgttcattccagcactggacatgacatttccagaatgtgtgttcagctacacttcttaaaggcgttttgtaaacactgcacagactcacacgtctgtttcactttaaactggaaccagagttgataaacccttgcttgaccattggtcatcacagagagagactgtcctttactgttttggaataaacagtccagtctgtagacatcagcgaacaacagcattgcgttccagtggtgcacactgctcaccactgcaggctatgccttcttagcaagaagatggagccaccagcagcctcttcctcagatcttgactcagactcagaaggtaattacaagccttccttggtttgaaatc

SEQ ID NO: 48747 - DNA, 452 bp, Mus musculus
  source 1..452: mol_type = other DNA
gaccttcggaagagcagtctagaagagcagtcgggtgctcttacccactgtgtacctgtggtagtccactggaaaatagacagttatagttgttatttgaacaaattatagcaccctttaggtatatgtatctaagtgagtatagttttactcaatataaagttttaaccaactttaaaaccaataaaattgtcatggttcttggtccaacaacaaaacttgtaaactttatttttcaagtttgtgtttttgagttttaaaaatatatgccaataataaaacattgtaagcatgatcgtaaagcttgttgttttcactaaaataatttggagtcatggacaatttgccataatccatttcaatgttcagctatgacagtcactgagatggttggtgctgcagccctctgcacagtccgtgggtgggtgtgtctatccaacacatacacattt

SEQ ID NO: 48748 - DNA, 314 bp, Mus musculus
  source 1..314: mol_type = other DNA
agcctgagtcacacttctgatactataaaatgtagtcagcaaggaggaagttttctgatttgaaaccaagagctgcttctggaagaagtattatactaattcctctctctgtgtgtctgttcctgcacatacacacacacacatacacacatactctccattgtccagaaaaatattgactgaaaattaaccattttcttgcctccattcataaggataaatcatagtgacatattgatttcaaatatttatccttactaataatgacttcgttgtataaaaaaaaaaaatttaatttcattgcatgctgaaaa

SEQ ID NO: 48749 - DNA, 403 bp, Mus musculus
  source 1..403: mol_type = other DNA
cctaacgcttggtaaccccgggttttttcagtgactctgaagtattaataggtaatgtatgtggattatagaatacgaaaaacttttgttgaaagatggcaatcttaaaatatagttattaggtattcattatttttattttctttaacaaatataaactgttattttgtatatgtcaataactcctttacatgttctgaaaaatagaatcaatcagcatgaggtgacttcttattgcttctgaagcatttctatgtatgcttagagctgtaatctgaaggaaaacaaccttgagatgctttccgtttaaagtgcagacagtgtctctctatgttggaactctatttgtaaagcaggatagttccaaaatcacagagctataccttgatagctgtctttggat

SEQ ID NO: 48750 - DNA, 184 bp, Mus musculus
  source 1..184: mol_type = other DNA
ctggtcccagaacacctctgtgttactaagagtctttgctagcagagagtaaccttagtaattcacaggagacagaatttctacgttgagacagtttttaaatctttcaagatgatcacatgaggttcaacatttgtatgacatcctgtatcacattgccatgacctcaagatggcagtgcttg

SEQ ID NO: 48751 - DNA, 360 bp, Mus musculus
  source 1..360: mol_type = other DNA
ctttatggtaaagctttacaatgcagtcctctgcatagcacagtgtttcctgcagtcaggacaccagggctgctgccctgtcattctggaatgcagtattttttatacagcatttagaacacatgaggagtgtcccacactttaaaatgcattgcaaagctaggaaaccattgcactctgatctcacttaaattatttcataggtgaagacgtacccatgtacaggttctgaagaggacacatctgaccctgacaggctgctgtgagccacctgatgtggatgctagctgctccaataaaagctctttagtttttagaacatacaactgtttcctgagttaaaatttccaggcagggttc

SEQ ID NO: 48752 - DNA, 391 bp, Mus musculus
  source 1..391: mol_type = other DNA
tcaaagtattagacattatttcaataccttttatatcacatataatatatatgtgtatatatacatacatattctaaactagaaagaaaaagaataacttcttttttgaaatgaaaacgtgcacctgagcaggcatcctcagcctgatctggatcggctgtgttttcctgaggcaaaacatcagtgaaatagcatgtcttatttttcccataactatcaaaaatggtcatcttaattgcaagaaattctcctgccagtactttttttaaatatatgtcttatatattgagcacacatgccatattgccacctgtttgttttctaaagagagaaaaagaaagggctacatgttacattagaaacacagtgtcttgctgaatgaggaagcttg

SEQ ID NO: 48753 - DNA, 292 bp, Mus musculus
  source 1..292: mol_type = other DNA
ttcttaatcataaatatcctaattattagcatacattaattgtacaggctagtattgagaacacatatgtgttgtaggcctctacatgcaataataaacatacatacacacgtatgtgtttatatgctgacttttatatggtgatctcaattcccctaaatgatattagattagctggttggtggctatatcaacacaaaattttaccaacaatatgtgatggcagaattataatgacaaggaagtgcttcctatgtcagaaagagctctgctcaaagagacaaaaggtcac

SEQ ID NO: 48754 - DNA, 434 bp, Mus musculus
  source 1..434: mol_type = other DNA
tcttttttttaattagttttaaattttaaatataattttaatactttccttcttgtagcacatagaggttatgagacagccccatatgggactagtcattcagtgactcagaggtcattttctggacataactgcacatgtgactttttctttgaagttgaagcttatggtacaaagacctataacacaaaacatgacgagttttattttaaatgggtaaatcttttaaggacccaaaattcattgcataatattctgtaaaagctaataaaaattttaaagtatataaattatatcagaggtcttgcatattcttttatgttcactcagcaagctaaataccataggattcctctggaggcttgagacctagtttatagacaaagtactgtgcaaccagcagagggcgctgtcccttcaggtgtggttatggt

SEQ ID NO: 48755 - DNA, 390 bp, Mus musculus
  source 1..390: mol_type = other DNA
atttaaaacttgaaataaaatttcagagactgtagctgactcagcccctgattgggcatcggctccttgagagtcatacaaaggtaagtggccattcccaacagtagatggacagcataagctgtaacacaaaacttgatgtgttttgttttagaaaggacagaactgtgagatgaataaaattaaacttcattgcacaacattctctaagagctaataaaatgagaaaaagtagataaattttatcagaggtatatttgagtgtgtatattcttttatgtccactcaccacactaaattcagacatccactggaggcttgagacctgactcctttggaccagcagagggcgctgtcccttcaggtgtggtacagactcactgtgcagac

SEQ ID NO: 48756 - DNA, 121 bp, Mus musculus
  source 1..121: mol_type = other DNA
ctggaatgcagaagccctgcattggagtgtcccactttaaaactgcattccaaagtgcagtgatttccctgaaattatttcacagtgaacctgggacctaaggtcgaacaggcacctgttt

SEQ ID NO: 48757 - DNA, 446 bp, Mus musculus
  source 1..446: mol_type = other DNA
gtaccttgaagcccaccaattgtctgactagtgagattccaggattacttcaggtgcacccatagcaactagattcaatgtgactgctggaggagcatctaattagaatctaaatattattatttcattcctcttcctgtttcacagaatgtaaacaaatggggatcttctgaaattctgatgtactatcctttgtttgtgatttaaaaataaatttgttcattggagaatttagatagaccatcccactcactaagggaggaagactgaagttcatgggctccatgaggaacttattatcttttattaagcttaactagacaatagaataacgcctttttaagtgtggactcttgactattaagaaaagtctctgcatatgggacttgtggcctataatcaccctgcttgaggtaatgtaatacacacaggcagtacatatatgc

SEQ ID NO: 48758 - DNA, 407 bp, Mus musculus
  source 1..407: mol_type = other DNA
tttagatattaaaaagattttgaaaaggtctttgaaatttttaaaagactgattatttaaaagttatattttgttttatgttgtcaacaagaaaggaaagattatgtttaataatgttgtttttatgttaagttttgtcaacacttatgtctttatttataatataacaatacatctgtgttcctacagatgttgtcatcagtagacagcacctacattttggcaatggttaattgtgctaaaataaatgtgcatatacagatatctctcttcacatatttctaccaacagtgtataatgataaaattataaggaagggatttctgattctcatttcctatttcaatgatactcagtttgaacagagcaggaagtgcttcctatgtcagaaagctgctcagagagct

SEQ ID NO: 48759 - DNA, 487 bp, Mus musculus
  source 1..487: mol_type = other DNA
acaaaagagttaaaatgactgcttgtttcttataaaattgttgtatgataggatgagaagtgattcattgaaaacaagcatggaagaattttaaaattcctagaataaaatgaaaaataagtcacaaattataaaactcttttagatacattaaaagcagttatacagacaggaatatggtttagtgtataaattttaaaatcttttcactatgcagtttctcactgcttccagaaattccaaatttgtacattttggggtagtgaaatccactaatggagtacttctatatgatggatgagactgtcaagaatgtctcaaaaatatttattctaagattatagaaatatttgaaactgtgtgctataggtcgataacattcaatcagttgcagtctataactgtaagacaaattttgaataaaagcaaaaaataaatagattttaaaaagtaatgttatagcctgttgtaagagcagccctctgtg

SEQ ID NO: 48760 - DNA, 529 bp, Mus musculus
  source 1..529: mol_type = other DNA
tttagccaaaatagtcactaaaggggagatagacctccagtagataggcacggtccccaattgagggatggggccacccacttgctgatgccaaaaagtacttgctgacaggagcttggtatagcaagtatatgcaaacagttgtgaacatggtaacaagaaactagaagaatttctatcattattacatttaatctcagaatttttttagtagaagtaaggaaagagatttatattttaaatacatagagctttaatgtaagtctgttatgtagacttagctcactgagcaagcaagggaaccttttccaaaaattcaggacactccatggaattcaataacttgtgtttcttcacctttcctgaaatttaggaatattgagtactttttataaggtgtgacttctctcctgaaaaactttaataaaaaattctataaaattgctattcttttagaacagagaaaacatgacctttgaagtataagagatctttcaattctaaccaagagttcattgcttgagaaatg

SEQ ID NO: 48761 - DNA, 312 bp, Mus musculus
  source 1..312: mol_type = other DNA
gattttacatattctaactggtgtgagatgaaatctcaaagttgttctaatttgcattttcctaattgctaaggctgatgagaaattcactgcagggttcctaaaattactctctagctctcaatcattctgcagaaaatcataggtatctagagcctgtctataaatctcttttaagaataactctgaacagataaaatcaagagaaaacatctttactgtttttatttcttttatatttatgtctaaaattccacaaactcaaagaactggaattattccaataccatcaatgtcctccacagccctgga

SEQ ID NO: 48762 - DNA, 493 bp, Mus musculus
  source 1..493: mol_type = other DNA
tgctgtcacaacatatatatatatatatatatatatatatatatatatatatatatatatatatatatatatatgcctcgttggttttgtttctgtaaagaaccttgagtatgaaaagacgcttccctagtgagggttgtgtgacatcctgacttgtggatataacagcatggtctttttaaaggctaagtccacttaataatatactaggttctaagtcccatgacctatctagttacatgtcatttaaaaactgacagagcatagataaaaacataaactatgatttaattgtaagagctttagaaatattacaaaaatgtgattagagaaatactttttagctgaaaaaaataagttgacatttggtgaaaatgtatgcataagtacacacgtacataaacttgagcaaaaatagttcacatatgaagaggcactttctcatatggtcctaacactgtgtgtgtaccttctttatgcatcttcaaggaga

SEQ ID NO: 48763 - DNA, 368 bp, Mus musculus
  source 1..368: mol_type = other DNA
caatctttatttgatagaaatgtaatgaaattgacattgatttaatttccttatgtctttttgtaagattatatataatatgaacacatatgaaaatgaagctcaagctgtcaggtttgcatagcaaaccaaatacattttcaggaattgcagttgctgacctgcaatgataatggaaatctctgaacttctaagccaataccagttaaatgttgtttttataagaactgccttgatgtaaaaccttacctaagacacttaggaaccctagcaaggctgttcagaagtatcctgtaaattctggaatcactctatggcagtgcctctctgtcagaaagatcctgtctatgattggctaagcaaaaaat

SEQ ID NO: 48764 - DNA, 522 bp, Mus musculus
  source 1..522: mol_type = other DNA
atcttctcattcaataaaaattttgtgaatttatttttgttcattcctttaagtatgaaacgcatatacatgtaaatagacagacaggtagtgtgtgtgtgtgtgtgtgtgagctgatgtgtcacatatgacagattttgttactcaggggacttatgaaagctttcattaagaataacctattttttatataaatttgccaaatccctgcattaaaattttaggaagaaagactaagttgaagttttgtattcttgtttaaccatcaaccttttgttttcctctagggaaaaaggatgaatctatccacatatttatttcataataaattgcatgtcctacattatctatctgaatgattatgacctagctgcatatgtatcaaaagggaaaaaaaaaagaaagaaagaaaattagtccattttcttatgatggtttctggtccattataataaggcttcaagacagtctagcactctcccataagttatgacagggcacaattaagcctgccccttaact

SEQ ID NO: 48765 - DNA, 508 bp, Mus musculus
  source 1..508: mol_type = other DNA
tggagctgaggggcagctgctcatcccttgtcgcagggcctcctgaagctcacatcaggaagtcagcctgcctcagccatggaggaaggttaaaaactcccttgatcatgagactgaggcagctgggtgcttctctgcactgaatcactagtgcagagctgatttcagactcagacactttcaggaattttaccatgttggaaaaaactttagattacatgcctctattgttagaaatgtgcagtatattgttccctgcagttgccatgtgcaataacgcaccattacatctatactacataataattaatatcatgtaactctatatgactggagtatcttcattaaattaattcaaggtcaatgaaaatatgttagtcaaagcatgcacctatattctggatacaatatttagctctttaggaggaactggtctgtcctcccgatgtcatcaaagaagaatcttcttccctcagccaggtcctagttgtagaagaagtagggaaca

SEQ ID NO: 48766 - DNA, 433 bp, Mus musculus
  source 1..433: mol_type = other DNA
tggaatccaagcatgggacctactatggaatatggtttatatgcaaaactaatattaattgaaactattgtatctgtctatcccaggctcatggggttaacatactattactaggagtgaatactactagattcaagtttaacatctcctcagtcaggatcttctctgactggatttaattacgaagactgccttggttaagggtgacatctttgcaggtttcatgcatgctgcctgtcacagtctctgtgatccaaactttgagggggatttatgggtatatcaatgtctatacggctttaattggtagccataacaacatacaccaatgtgtaatgtccttataaggaagatttaatcctcatgactcaattttcatagatactaaatttgagaagaacctatgtcagaaagagcttcagacaaagtgtct

SEQ ID NO: 48767 - DNA, 257 bp, Mus musculus
  source 1..257: mol_type = other DNA
ggtggcagcaggtgccgatatcctgccacctgcacctgatgtaagcaattgtgaaatgctttccatcagcattggaaacttgcagcacgtattcttagttatgactgagagccctttgtcctcctttctaaaaataataatttaacagacaagctcattaaatatgtacttcgtaacatttctgatctacttactggcatgagttttactaaattaatgtaaagacctctaaggacttgttagttagtatagccctg

SEQ ID NO: 48768 - DNA, 505 bp, Mus musculus
  source 1..505: mol_type = other DNA
attttacagagacaggttctagcactgtatcatagctgttttacaaatttaaaagtatagcctttcagaattaaaactaaataccttaaatcattcatcattttaatagctagtaaataaaaatcaatgttgggtattcaaagaataatattttaattcctgttacacaactaagagcttgacattcaggtgttgctttattagctgcagaatttaaataggccccagggaaagtgaggaaggaaataagattttgttttgttttcctggaactcagtctgtagaccaggctggcctcgataattgactttcttaagacaaaaaaaaaaaactgtgagttttgacttcccataaggtttatgagatttttatttaaatgaaaatgtctaggttaagttgatgacaactagtttattcatgatgaattttactttaaatgtatcgttcagttactacctgacttaattaccagggaaagtcaataactgaggtaacatatatgtac

SEQ ID NO: 48769 - DNA, 543 bp, Mus musculus
  source 1..543: mol_type = other DNA
ttactttctaagcaaccatcagggcatcttttaactaaaggcagcggtggctccctctgactgtcactgttccctaaggagactctgactacagaagcaaggctttagctgacagttagatctttgtttggggacatgtgtcaggacctccccacccaaccgctgcttaagtagaatttacttaggctttctttttccttcactaataagatgtgcaataaaaaataaaatatagactgttgggtcttcagaggagcagacaagctggtggtctgtgaccttatgaaacctagttagctctataaagttttgatatatatgacagctaatgataaatgtgcatagtcattagtcattactgatgggtgagagaaaagctttctagtttataaaacgaggacggtagcattttctagctcataagattaaatagtactacttaactcataaaattagatcatctgcttaagattcactttcaccagattttattgcttcaatgaacctactaatttttccacctttgaccacaagggggcatac

SEQ ID NO: 48770 - DNA, 442 bp, Mus musculus
  source 1..442: mol_type = other DNA
aaacatcttggaatttacaattagatgtaacctaaaaatacaattgattcttcttatttctcttagtgccgttgcttttctcattggagaacagtgagaacatcgactaatctcatttagattttgtgtgttcttggaaagaaaaaaaaaacctatgtaagatttaaatccaatttaattatcttctgccatttatttaaccagaaaaaaaattgatatatctgaagagcatgctagaattcaattacattaaaggttttactaagtagagcactatatttttatgtgaccccaatacaaacagatctttgtaatattttaaacaaggcattggcaatgtgtcaatcatttgacataatacaattatttacattgtttggcaaactgaacataaggaaatcaggagtacatttgaagttttctacattttttggcaaaaatg

SEQ ID NO: 48771 - DNA, 515 bp, Mus musculus
  source 1..515: mol_type = other DNA
gtaaccaaatatttatcattatagagactaaaagtttcaaattttgtagcagagaagaaggaatgatttagatcttattccttcccatatgagaacaagtgttgctgtctctcctatgaaatggcatcatttcattttcacctttatatgtattgagcacagcaatattatacacttatgttgcaaatggtttcatctacagtattattttaactggtaattttgatggaaaaaaagttggtgcctcaaaaagttaaatcgtatatttctgcttctaagacttacgtattgttaatataagtaagaagtctcttcttactggtccattcaaactcagccttattgagtctgaaacttgaaaaactctcaactgaaactaaaattggagattctgtagggaaaatattttcatctccttttaaactttatatttaaacccgagaggtggagatcagcaagaggcccttgactggagccacccacaaaggaggcttcttgaggcggggcgtggggtt

SEQ ID NO: 48772 - DNA, 382 bp, Mus musculus
  source 1..382: mol_type = other DNA
cagtgagcaaaagcccttgcaggacctgagcaggagaagctcctaggatcctaggcagctccccaaaagttgccctctgacctctatacacatgccatagcatatgtacacaaaagattgagttttttaattattggtcaaagaattgtaattataccaatattatattctgaaaacctactgactattttatgatatcaacttttattagagcaaatcttgtaattacataaaattttgtctctattaaaaacaattgaacacttttttttttcttttctattttactcgagagaacatttggtcctgactgtatcttttttcacttaagaaagatttatcttctgaagagaaagataaaagtgagatatcaccagtgaca

SEQ ID NO: 48773 - DNA, 334 bp, Mus musculus
  source 1..334: mol_type = other DNA
gggctatacagagaaaccctgtctcaccagcaagcttgtaggcgcttagcgacagggaaccctgtcgggcattgcagtgaacactgccaggcactaatttattttccatattgaatactatctactgattccatttattgagctacacatgtcaggcgccctgagacaggactactggaagtataattctatgatcagagaatatgggggcccacttttaaaagagtcgttgttagaagtatcagttctagatggtttgaaaaccaacatttctgtaaatgacagtcatgtgaggggctgtccctagacaaagcaatagggatggttaaagaga

SEQ ID NO: 48774 - DNA, 306 bp, Mus musculus
  source 1..306: mol_type = other DNA
tgtgtgcctcttctaaagacaaatgtggcttatcagcacttttggtgctgggatccaatttcaaaggcttagcttactagaccaactccattctatgctctccactatccaatgctgagtgtgtaggatagcaattgtctttcttcttctccaagacaggcatgaaaatttcatgttggacctagtggaatctccatctttgacctatgaaggacaaatgaagaagaaaggaacatcaaagtaattaagtctttggagttggactcattaatttgtcattcaacagtgtgaattgagtgcctccca

SEQ ID NO: 48775 - DNA, 183 bp, Mus musculus
  source 1..183: mol_type = other DNA
atttgtaaggtgctttctgcacgctcaggggcagtttttgtattctctgtacactgaagagactaacttagaagtgcttgggttctaagaaacaaacaaagctccaggtgcagcgcagacagatcactgtgtggctcacttaaggatctacacgcagttggaaactgagtttaaacttgaatt

SEQ ID NO: 48776 - DNA, 323 bp, Mus musculus
  source 1..323: mol_type = other DNA
agttgaacttgaactccttgactgaccgaaagtggtcattaacctcaccagagatgataagagttcaggaaagctttccccaggcgggctggctggaaagaggccatgggagcgctctactgtaagagaaggcatcttctagagaagtctccctcctgccttccggtgggaagaggcctcatggaggaaggcagctgccctcaattatcagtcgaaattaatcaggactttgtcacttagcaacagggtgagagtgctcgtgacctattagtgggcactctggggggaccctagggagcttccacatatttaccactaatgga

SEQ ID NO: 48777 - DNA, 298 bp, Mus musculus
  source 1..298: mol_type = other DNA
gtatagtgatctaaacccttcttcatgaagttgtcaagtgattgacattaaagttaaagagactctgtagcaagaatctaaaaccctaactgttgtggagtttctagaaggttccatttttaaacttggctgcagcctgggtgtttttgactgactaagaaacactgtgccctgcaacaatgtgtgtgtgtgtgtgtgttcgcaaccccacactacaaggtctgagatttgtgagtcctctgctaaaatatgacatagatccaaaatgtctctatgtagattgtcaagcctcttggct

SEQ ID NO: 48778 - DNA, 420 bp, Mus musculus
  source 1..420: mol_type = other DNA
aggtttagaaggtcgtattgtgaacttgtataacttaagttttcttcagctataaaaagcagttaattgtacttgttaaaacctcaaactttcaattctttttctataaaatgattcagaggatcaggttgaaacaaatatgctctttggagccattcaaggaatattataacaatacctgttgtacaatgtgactatctctctttttagacagtgactgattaacctaaaacaacgagcgtttgttgacctgtagaggtcaaccctctcgtaaaccggcgctccctggaccgccagcttggtctctaagcaaagagagccggaactctctgggaagcgtctcagcctgtgtctgcctggcctttacgccggagccaattggcccgccggtgtgggcgtggctagggcccgctaacgcgc

SEQ ID NO: 48779 - DNA, 246 bp, Mus musculus
  source 1..246: mol_type = other DNA
tcttctcctagatgaagtatgtctcagcttggcattttaatttaaagctctaccaactttaaatttgtgttaaagtttcatcaaggtaggatatttttccttagagaaagttcagccgctgcggagtggagctcaagtactcctccagacgatgtggctcgcgcgtgcgcgttagcgggccctagccacgcccacaccggcgggccaattggctccggcgtaaaggccaggcagacacaggctgag

SEQ ID NO: 48780 - DNA, 408 bp, Mus musculus
  source 1..408: mol_type = other DNA
agggagcggctccagggatgccacaccccctttgccatttgttctgaagccagctttgcgttaggcctttaactggccctcctctgggaggtccaccgaatggaaggaagcaggatactgctactttttccttgggacaggtgtcacccctcatcttagagctgtgaaacagggagcctacttagctttaaactttgctgtctaaaatttaactaggcagcatgctttttgtatttctggaaccatcttgggttacaatatccgagcagttccttcactctttaattgaaggaggactttgagttttaaactagatccggattaagcacccaactgattgctgtccatgtgctgagtcggttgggcgacccaggccccgcctcgtcgagcggagggatgggctggctc

SEQ ID NO: 48781 - DNA, 276 bp, Mus musculus
  source 1..276: mol_type = other DNA
cagtgctgggctttagggaagcttttagtttcaaaaaatacacaattccaacagatccaagacatcaagttcaactttcatctttagtaaagtcagattccaggctactttcaaatttcattggatctgtaattacaatattaccttgcaacagatgtaaaagctattgttttcaagattggcactattccaagagtaaaggccatttttaatccaagaattattttaacccagggaacaattacacaggaaatatgctatgtttacacttttaaa

SEQ ID NO: 48782 - DNA, 270 bp, Mus musculus
  source 1..270: mol_type = other DNA
agtgctgagccaggagctcctagctgcccctttcgcagatatgaaagcctcttactgctggaggaaggaggagctgtcaggtctcagagagagccagggagtgagtgtgccccaccctgttcctcgagctacagagcctctggctgggtgtctatggtgggtgggcagccaccacccactgcctccagaaaagcagtacaaagcgaatcaatctcctgtcttttttttttttgccaacatctaagatgccagctgaccatttgttaatgg

SEQ ID NO: 48783 - DNA, 282 bp, Mus musculus
  source 1..282: mol_type = other DNA
tattgtagtgcgcgcacgctcgtagaacagtaggaaattttctccttccatcactccatatatttttaagaaatggatctagaagtttgatctcatttctgaaagcgccacaattagactctctggggtttcagagagcacacccagttagttagctgtcccttcctctgggcctcctgtcccggggcagagctgacaaaggagattcctgatcgagcaccttcttatcacagaaagtgctgagccaggagctcctagctgcccctttcgcagatatgaaag

SEQ ID NO: 48784 - DNA, 279 bp, Mus musculus
  source 1..279: mol_type = other DNA
atgctaaggatgaatccacagtctaagcatgctagacctgattttttttgacaaaaattccgtcatgtggtttaaaattagaactgagtttcctcaaaaaaatgtttaactgagaaccaaatttttccaactcgttcttgagttaccctaaatttcccaagtctggagaacgtccacaggtatctcaaccacctcggagggtgcaagatgcacgcgcggggcagttcctcctgttcagacttccgtacgggcttccggttttcccggcagcgtcccgcg

SEQ ID NO: 48785 - DNA, 304 bp, Mus musculus
  source 1..304: mol_type = other DNA
gttggtgctcaaattgtttaaaacagtgggagccattcagatttgaataatctcgctgttaaatatttactatatgtatactaaatgtacttaggtataagcctgaaatgtgaaaaaaaatattcaacttgttattcttttgtaaatattctaccctgtaactgagaataattgttgctatcagatagttgaacggaggagtaattttctcaagttcacggatccagcaagtagcctgtctttataggtctaggccccagcctttaagaagggcgtggccgcgcggtgactggcaggggtgggg

SEQ ID NO: 48786 - DNA, 153 bp, Mus musculus
  source 1..153: mol_type = other DNA
ctcggagagccagcgcagcctggcctccctgaagctgaaagccattaataaaggggtcggtcccccaattcaaagtaccaggctcctagttagttgccggctgcggcctcaacccctgcggcacagaaaagacaaacttttttttccccttct

SEQ ID NO: 48787 - DNA, 256 bp, Mus musculus
  source 1..256: mol_type = other DNA
ttaaaaaaggttgcgtgtatttatgagaacacaagccactttgtttagagaccgtgggttgtcttgcaagaatgctttggaaccaccaacccttctaaaccttagttatgaaaaggctgcctgaggacttttgtagctcctgaagaggccgagtgaaggacctagacagtagggtggccattctcccctatgcagggagtcttacatcactgctcattagcatatgtgacctcatcaggaggcgggacaatttccc

SEQ ID NO: 48788 - DNA, 250 bp, Mus musculus
  source 1..250: mol_type = other DNA
gttctgtagaccccttcagatcctgctcaagggctgatcctacaacttgtttaaaaaaggttgcgtgtatttatgagaacacaagccactttgtttagagaccgtgggttgtcttgcaagaatgctttggaaccaccaacccttctaaaccttagttatgaaaaggctgcctgaggacttttgtagctcctgaagaggccgagtgaaggacctagacagtagggtggccattctcccctatgcagggagt

SEQ ID NO: 48789 - DNA, 276 bp, Mus musculus
  source 1..276: mol_type = other DNA
cgtataaagagctctaataaccttgaagcagtttatttaagacttttattcaacctcctgagtaggtgtggtgaaggattaacagtacagctaaacatcttattttccaaaagaagggtacccttagttttacaaaaccagtgtagagttcaagtcccagtggacaccgcccacatatggcggaccgagccgctaccgcgacagttgcgctgagcgcgcgctcccggggcggggctgcgccaggcgggaacggaggccccgccccgtcctgtgccc

SEQ ID NO: 48790 - DNA, 331 bp, Mus musculus
  source 1..331: mol_type = other DNA
tttcctcgaatcgagcagctgttccaagcagtttcaaggttcctggacactgtaatttctgtgtctgagacagaatcactaggaattatgacttactacagttttatttttaagtgtagcatagtaatgagacaaagctcattttaacaaaattttcatgctcagaataacttaattacatttttaaaactagcaacattgggagatgactagatctgacctgtagtctcactagagtgtgagagtctgtcattggtggggagccacgcccacgtcactgtgagaattgcggattggtgggagcagcggcttggtccctccgcctccgctc

SEQ ID NO: 48791 - DNA, 167 bp, Mus musculus
  source 1..167: mol_type = other DNA
tccactctgccatcagcctcttatgaggaagcaaatcacactttttgatcttagcgacagacctcggaggcagcttccacagttccctgcttgtgatgcccaggaaatccttgcgcggacacctcaacccggggtgcacaccgcgctccgcccttcccggaaagtag

SEQ ID NO: 48792 - DNA, 492 bp, Mus musculus
  source 1..492: mol_type = other DNA
cagggtttctctgtatagccctggctgtcctggaactagaccaggctggcctcgaactcagaaatccgcctgtctcccgtacctggcacaagttgtttgcattgcggcacacacacacacacacacacacacacacgtatgtatgtatgtatgttagtgtgtgtgtgtggcaaacgttttataataaaaaggtgccctggctcaggctcacttgaacaacgttacactcatagatgttcatgtaaagtgtgtgacccagagacactggcctgggaaaccaagggttggagggcctcgccccccaaacctgatgtcagagggcgctcactcacagggtggttgggcgcatcggccaggtccgggagctcgcggccctcgggggccccccggacgggcgcctcgggtgcggcgcgtgtgcttgcgggcggggcgggcggcggccaatccgggcgggcggccgggaaggggcggggcttgtgagctccggctccg

SEQ ID NO: 48793 - DNA, 292 bp, Mus musculus
  source 1..292: mol_type = other DNA
ctctagagtacatgtagatagagcattcatgtacaaacaatactcaggcctgcctttcattagtctgaaacaaggcaggaaaacctggccagttaagagggggtagcctggcctacctacctctagggtatgtatataaatgctatcaaaaacatggagtttttgttgttgacaaccaactatatgggaaaatggtctgaaaacaattatttgggccccgaatagaaattagaagttaatcttataaagccgcctccgtctagacttagctggacgtgaagttgtgacgtcg

SEQ ID NO: 48794 - DNA, 260 bp, Mus musculus
  source 1..260: mol_type = other DNA
agcccatactggggaaggatttcagaatatgtggtattcttaagccagagatttctctggttgccaggcagagcaacatctgtgtacagatagaaagacctctttgtcctcaaagcagaagagggactctgctggaaggagttttgtgttccaacacagtccatgttatgttggaaatctttgctcttgcgcctctgttctgaggtgggtggagatccctcaccagccaatgagaccaaggagaaatgaagcttagctca

SEQ ID NO: 48795 - DNA, 260 bp, Mus musculus
  source 1..260: mol_type = other DNA
gaatcggaactagaatctctattattgtctgcaattttgactactttaaaaccaacaagaggctaatttggatttgactattatttgattagtttttcagaactacaactacttaactgaacttatgtattaaaaatttcacactgacctcacgtatgctaatgaactctaataacactagttcagctcaccttcttatacacagtatgtcttaaggccagccacaccggtggttgtagagggatttaactcctttccgg

SEQ ID NO: 48796 - DNA, 409 bp, Mus musculus
  source 1..409: mol_type = other DNA
gcccctgcagtcttattttttttattattaaatgatgtggtctatggaaaaataaaaatctgacttagttttgaccggcagggcaccagggggtgcacacactcaggtcctgagtcggtagcctcgcagccgcacccgaatcgtgaagccgggtctcccgcagtgctctcccagcgccccgcctcacggtgtgcctccgcaggtgctgtgctccaggccctgggaataatagcctagccgtgctaccctgtaccttgccgtgctgcgggctggcccgggaggggccccgcatctgtatgcgcccagcagcccgggagccgcgggggcggggactggctggggagggtcggaggcagggctctcctctcccgcgcgagccgcctctcctcggcaggcggagcctccttcc

SEQ ID NO: 48797 - DNA, 245 bp, Mus musculus
  source 1..245: mol_type = other DNA
tgttgttgtattttgtaacacaacatgccctagaaggtctgtttcacactcacatctgcttgtgtggaagctgtcgacctggatgccttcaggcccaggcaccctgaggctgagttcagagacataacttttctagaaaacagttgatgttctgagagatagaagctttggtcatctttaaaatgggagcagaagggaaaggcctggcctctgaagccacttgactccctgtggcctgccagagg

SEQ ID NO: 48798 - DNA, 425 bp, Mus musculus
  source 1..425: mol_type = other DNA
gttccacagttacacaagtgtgtgtgtgttggatgcgtacacagtctctgaaatctgttttaaaaaatttatgttctatggtcttgtctagcagaaaatcagaagccacactaacttttttcaggttctgaaaaaaaaaatgcctttgctttcttgaacattgaaccttagtactgactttgcattatgtgtgcaaatgtaagccaacttattccaaaattcctacctcttcaagttggaagatttgtatcccggttcagggtgactgccagtttcaaagtggctctacagggagaagtttctcctaaaacttctctttttcagagaaaggtaatttgttattgtcattaataaactcaaaagacctgatttttctttttcaccaagtctcatctggcctaggagacatgtttcctgaaaacccg

SEQ ID NO: 48799 - DNA, 465 bp, Mus musculus
  source 1..465: mol_type = other DNA
cttaaggccagccacaccggtggttgtagagggatttaactcctttccgggagagtagcgcgcaccctcccattttgggctcgcgccgctgccgttaaggcgggaaccggcgttatcccagccacaccaaccaccgtgcgcgtggatctgcaggctcgcgctggcggcctgagagagctcgcgccgagcccggacactgcgcctgcgccgcggcggagactcgtctctaccgggtccgctctaggcctcgctgctccagtgcggccttcaggtcggcccgcagagcctgaagaggcttcccgtccagagtgtgaggtactcgggtccgtcccgacggcttcgggcatcttcggtcgcaacggaattccccgggtttctccggagcttttgaatcgaatctcttcggaagccctcgaaccataatcggagatattcggctatctccggacctgggggccggggcgc

SEQ ID NO: 48800 - DNA, 374 bp, Mus musculus
  source 1..374: mol_type = other DNA
cctccagccagaacagcttttagggtggagcaactgggacctccagcagatcctttctgttggttctgctgcagcttgcctgggcctgaggtacaggaccctcagctatgtcctggcagccccggactgtgccaggctgctagccatagccagatctgccctgtactagggccaggggtagcttggtcctagaatctactaccttaccccggggtattcagagaagctactctgggcaagggattagaatcccgggcaaaaagggccattttctcaaacagtggggccttcgcaaagagcgccctaactgctaagcacccctccctccggggtgtgccctgcccctcccttagtcaccccaaggagagagagga

SEQ ID NO: 48801 - DNA, 379 bp, Mus musculus
  source 1..379: mol_type = other DNA
tagccttactcaaggaattttattttttagactcattttaaaatcaaatcattttgtatagactatgtaaaaaaaaactttagtttttcagcatggtctattcaaagcactttacagttagaaatagcaaggaaatgggggtgcaatgttaatattcttaaccattaccattcttagcactcctgtctgaagttcaaataatttgtgataaaatattagggataattttatttagctttcatgacagtcacagcttgatggcaatatctctgtgtttctgaaggcattagaagcccgcagaaccgtaaagaaaatgttttaagccccttcctccgtgatctttgggggtggggggcggagcctcggtccgcaaataaac

SEQ ID NO: 48802 - DNA, 427 bp, Mus musculus
  source 1..427: mol_type = other DNA
tttaaagatttatttatttattatatgtaagtacactgtagctgtcttcagacacaccagaagagggcatcagatcttgtcagtgagccaccatgtggtactccggacctctggaagagcagtcgggtgctcttacccagacagggtttctcagtagaccaggctggtctcgaactcagaaatccgcctgcttctgcttcctttcagccaggctacagagaaacacaacacaagtcacttcagaagtgctgtttccaagtacaatgggaaatcctaaatattctaaatttggttgagaactttgtacccccaagttggagagtatggtttagtgaacagttttcaaaagtgaccgaagtcctgggttaagatgctgcagtcgcggacctctgctgggacccacgcagccaatggcggacctcggctc

SEQ ID NO: 48803 - DNA, 465 bp, Mus musculus
  source 1..465: mol_type = other DNA
tgtaaacactataataatgcctagtgttctgtattataaaaccccataaagagaagttataaaatatttgacataccattgtcactagtgtatttttcaaaaataaaatggaaaatagcctgtcctgtgtccttcttggaagaaggtataaaaacggtcatgaatcagaaacagtcttcacgcttgaaaagacttacagataagagatcagaattatttttgtttgttttaatgattgagaaaaatcaaggtcccttttctcagccgtcttccactaaagactcttattaaaccctcagcatttttaattttcccgtgccaaaagaaaaaaaagaaaaaggaaaggttactcttttcttcctgctttaacccttcttatataggagtaactcatctggtggtgataccagccacctgtcagagggctgtgggcgggggccgggtcagcgaggcccgcagaactga

SEQ ID NO: 48804 - DNA, 467 bp, Mus musculus
  source 1..467: mol_type = other DNA
aatagatatatgtatattatatatacatatatgtgtatattataaatatgtatatggaatatataaaaatataaaaatatttacatatactatactgatatactttatatttatatgtatattgatacatttataaattatatataacatatatatttatacttataaacatatttatattgtatgtgtatatataaaagcacatatttatataaacatatgtgtatggataaatgtatatataatccatgtatatgtgaatgtagatattcacatgtaaattatagatatatgtaatctgtaaaacaggtattcatctgtatttagatgtaagattattgtttgatttttgttttaaatagtaagaattaactccaatctgattaccttgaggaactgctctgcttttcctatggggacactgcgggcttcgcaggcagccggcacaggtcactatggcctctgaa

SEQ ID NO: 48805 - DNA, 277 bp, Mus musculus
  source 1..277: mol_type = other DNA
cacttgtcacttgcaaactagccctaagtaaggaatttttgaagtagtctagttttgaactcacagatgcagccaggccatcctttcgagagcaaggttcacctgtcgcacaacgggtgtctgcccgtcgaatcccataagccaatcggcatccaagaatgggccacttcggtgaggcgcctcacccaattgcggagcatcctccatgttgtgggcccgcccatgggtggaggctgactgactaatgaatcctcggcgtggccggctcagttctcca

SEQ ID NO: 48806 - DNA, 109 bp, Mus musculus
  source 1..109: mol_type = other DNA
acctcaccatcggtggatggtgaaggcaccgtacccaaagtgccacttactaaataagaaaagaccccagcccatccttcaacggggggccttggcccccctttatcag

SEQ ID NO: 48807 - DNA, 558 bp, Mus musculus
  source 1..558: mol_type = other DNA
gcgggggcgtgtcgggcagagccgagctccccggagcgcgcggaccagaccaccccgcggtctgctgcgcggtcccgaggaggaaggtgcgggtttggcccgagggtctggagctgaaactcaacacctcccctggcccgagcccctcgcgagaggaatgggcctgcggggcaaggggtgatcgggggccgcgcgcgaccccggacctggagcttccctaagctttgggacgcgccgagggcccggtccagggtgtgtgagcgcgcgcccttgagcgctgagactgagaggtgcctggcggccacctccaagactgtggccgggagagctcgcctcggcgcgggcctgggcagacagcccagctccaccgccacgcgctcggcgccggcctttgcgctgacttgagcgagtttggcgacacgcagctcacttccccgcgggtcccgccgcagtggcccggctgccacgaccacagacagccctgggagcaccgctctgcgccgctgggggagggttggccccaagagtcgctcgtccagcccaaccactgcttctccc

SEQ ID NO: 48808 - DNA, 211 bp, Mus musculus
  source 1..211: mol_type = other DNA
cggactccaaaggcctgctgaccctggaagccaactctgcgtgcagaagagatttatccaaataaacatctgtgtttaaagtggtgtgggcactgcagaaggcacacattctggctgctgcagcttggtccagcagggtactgctcttaggctggaggaagaggagggttaaccacctctctctcacccctccccatgcctcctaggggcc

SEQ ID NO: 48809 - DNA, 374 bp, Mus musculus
  source 1..374: mol_type = other DNA
cagaggttcacaaaggtccttaagtaagattttatctgttctcttgtaaagaggttacgactaagctcgtgcttaaagtgctcatttgttaaacgtaaacactggggatttcttttgaagaagacagatctcttggggtttggctgaaactcccgattccagccctactccagctgctccagtagcagccggccagcctgggatctggtgccagccgctccccaagggccagaatcagcaccagactagcctggcagccggtttgagcccctgctcagcgtgctcaaaccgccgggaccctagcgcgcggcggaagcagcgcgtcccctccctcgggagcgggggcgtgtcgggcagagccgagctccccggag

SEQ ID NO: 48810 - DNA, 256 bp, Mus musculus
  source 1..256: mol_type = other DNA
ttcattccacctgcaggggagttggctaggcaactggaagctcctccagcagatggaggcgtggcatcactggacacactgttacctccaagagtgcacctggatgccagaggtaacctggtaacccatttaatgactcaaagacattgagactccacttcatgtgggtgaatctgggtcttgaccggcatgactgtgacctccaactcagaggtggcccaccaagtgagtccactgtggctgcccctacgtataa

SEQ ID NO: 48811 - DNA, 170 bp, Mus musculus
  source 1..170: mol_type = other DNA
gtgcacgatatatggctgtgcagctgttggtctttggaggacacctgtctagagatgtgggcaactagacatcatgactttgtctctggaggctcccctcagcctgaagctattctcctctatctgcccatcggccctttggggaggaggacctgctgtcctcctgtcac

SEQ ID NO: 48812 - DNA, 399 bp, Mus musculus
  source 1..399: mol_type = other DNA
gggctctgcagactgaccccttcccaagtgcccttcgtggcacaagcacccaaggcccagaggcaacccctgtcctccagggctgctgttatagctctagagtgttatggtgggtgggggcaggagcatacccctctctccagggcagccacctatgccaaatggttgctctttggggataaaggccacacttgaggctcctgtgtgcaagctccagggttagcccatggccggttctcaagctcttgagggcatgataaggtagagacaaaggccaggctctgtcctcagggaacctggaatgccactcaggccaaacttggtatggtcatgggggatggtggtcacagagttcccactgcctccgcaacaaggaaggagttaactcagttctgggct

SEQ ID NO: 48813 - DNA, 269 bp, Mus musculus
  source 1..269: mol_type = other DNA
ccctgggtaaccctgggaggctcaggccttgcgcctcaagcaggaccatgagcaactggtcctcctccttgcttcgctgaagctgtgcaatctgctgcaccatgatcccagggacacattgcctgctggcccaaggaaagcagtgtgtgagccagaattcctgtgatgccagggtcagcaggaccctcttgcaggccagccagggccctgcctgcttgacagccctttcgcaggtgggggatggggcaccctgctgccccatatataca

SEQ ID NO: 48814 - DNA, 274 bp, Mus musculus
  source 1..274: mol_type = other DNA
acctctgctcctgtctgtgccactactacccagacagtgaccctctcaattcatcacttcttaggcatggagagatgtggagagccctgaccgtcctcctggcctcggaagggtcccctttggcacccaaccaagtagatgccgccacacttggcagtgttgtgctggcatgtgaccagtgactcagattctggcactgcggcaaacccaaaaccgcttggcggcaatgagggggagctccgtgttgtaaagtggcacatgacgctgcccttca

SEQ ID NO: 48815 - DNA, 387 bp, Mus musculus
  source 1..387: mol_type = other DNA
aggccaaagctacactttgctccgagccaacctttctagcgactcccacctaatcctccagcccgtgagaggcgagggcctcgcctgtcgatttttccctcgagaggaatgcagggcgcaatgcggcctttgcgcagagtcctaggcgtgcacggggagggtgcggccgacggtttctgaaccttgggttccttggaagtcctggggccaatggcggcccaggagaacggacggaagccgccaccctgcggtctgtttacgccgtggaaagactgtctccaatgagctataatcacaatatttattggaagtgaggtcccgcctctccgattagcggaaatgaaagatctcttacttccattggctgaaatttgcaaactgtgattg

SEQ ID NO: 48816 - DNA, 284 bp, Mus musculus
  source 1..284: mol_type = other DNA
tataaaacgagttctatgtctcgaaaaaaaattttttaaataaaaataaaacacacttctgaggcatagggtagacctactgcctgagtcaaggaagaagcccccacccaggtccctgcgtcctgggacaccggttgactccgctagctgtctatagagggcggacacctagcgggcgggtcgctgcacctgctcagtggggctgccccgggcgcctgcgccttggctccagccagtgaatgatctccgtccctgacgccccggagcgagcgctgaagggaggg

SEQ ID NO: 48817 - DNA, 287 bp, Mus musculus
  source 1..287: mol_type = other DNA
tcgtcagcttagatactggctaggtgctgtagctacattcattcattcattcattcattcattctctgtagtacagtacgagttaaagaggttgccacctgcgctttaagtgctgggaaggtaatcccagctctgtaagcacagcacttaaggggagccattcactgtctacactgggaggggttgggaactactcttcccgttcgccacccccaaaagccttcctgtagagcttgaggtagagtcccctcccatcatgcaccaggcccaggatgccaggctcacgc

SEQ ID NO: 48818 - DNA, 310 bp, Mus musculus
  source 1..310: mol_type = other DNA
tttgattaaattcctaaggggacaggaccccagtcctcagctctgacagttgtggggccgctgccccacacagggcagggggttgggactaactttccctctggggacagaaagctgtcggggcgggggcctaccctgcatgaggcagaggcaagctgcctgccaatcaatcccttcctcaaggaatggccttgctctgatttctatttcatggaatttgggattgaagtaaaaaagtatattaataaaaaactcaagctctcgtgaggcccctgggggagccacaagagggaagggccccgaaccgagc

SEQ ID NO: 48819 - DNA, 256 bp, Mus musculus
  source 1..256: mol_type = other DNA
ggtttggagcaaaaattttgattttttttttcctctcccaaccataagaagaaaaaaataaaaaggagggaccctgccatggaaactgcgcctgggaggcagcctgagccccagcagggcccccccgcacccgggtttgctagcggagccggaagaccctgccctggcccctcccagggatcagcgctgggaccccaagtcccgggattgggagggatgggaaagcccccttgccctcaccgcttgggagctgcta

SEQ ID NO: 48820 - DNA, 184 bp, Mus musculus
  source 1..184: mol_type = other DNA
gcacactggtgcctccttccctgtaaacacaaaagcctgctcaagcaaacttgtgtaatttgctgtgaagactccagagccctaagatcttggtggcctcctcaaatttgagcccctggggcctccagacagggccccatctcaagctacctctaaaactgacagccggccaagcagctgggag

SEQ ID NO: 48821 - DNA, 362 bp, Mus musculus
  source 1..362: mol_type = other DNA
ttcaagttttaatacttttttttttttaacgtttaaatagaagttggagaaaacagggatgtcaccactttcaaagaagagataagatgtgaggtgctgctggcagaaacatcttctgtgacaaatatgcctccagagggatttgattttaaaaaaaaggtttgtaaaaatctgctgcaggttctgtatgatataaatgtatacatatacatatatatatatatttgcatttatttaatagatatgtactgacacataacctaactactctaggaataaaagggacccatctggggccatagaagggtgtgcctcagggggtgaccctgaggtagttctaaggacacagcgtgaagcaggcg

SEQ ID NO: 48822 - DNA, 375 bp, Mus musculus
  source 1..375: mol_type = other DNA
taaccttaagggtcaggatccttggcaagactctccagacacagggcagatctgggtagcttctctccaactgtgcagagcagagcattgcccttggtctctgctttgatactgtcctctggttatcagtacagccatttacatgtctaaagatgcacacatgtgcctatacgagaggtcggagctctggtgtctgtgtatctaaagctaggaatacagctgtttaggccagcatgcttgctcaacaaccattttaccaaatgagttgtctgtgcagtcctgcatacaaacccaggctttttataaaggaagaattatttggagtttaagggcgcggggcgccagcagggagcgctcgcaaccgccgcggctccc

SEQ ID NO: 48823 - DNA, 351 bp, Mus musculus
  source 1..351: mol_type = other DNA
tctcatcctcgcctctggacactttgaggaaattaacaatttacgtataaggtacaaataaaatgaagatgcttgccgctccacggagctgcttgccagctgttgggggaggtagctcgggaactcggtgccaaggcagcaaggacgagctggaccgttcctgagtggcacgcctgagatagctcggacaccaggcgccgcgctccgggcttctcacgaggtagtccgcgggaggggtcgtcgcgagcgcgcgcggggtctcacgcggctcggaagctcagcgcgcatgctccattggccaactctccgggagtagccgggggggaggagcgctcgcgcagccgcccctga

SEQ ID NO: 48824 - DNA, 339 bp, Mus musculus
  source 1..339: mol_type = other DNA
agaaactgctcagttcccctcccacaaagatgtggccataatggttggatctactcgggaaccggatgccatttcctgagatggatatcaacattctgtgtcacaagtacagtagctacaaatatccttaacaagtgtagtactgttgaaagtactgtgagagtgtgtttcccagattgtgtgtgtgtgtgtgtgtgcgcgtgcacgcacgtaccactgcaacgggggggtcctgctttgggcctgcccccagcccgccctcggcccctctccttcctcccagccagtctgtgcaggggggggggagctggtgctgcggcccccctcctccccatccag

SEQ ID NO: 48825 - DNA, 228 bp, Mus musculus
  source 1..228: mol_type = other DNA
tcaggcaggttggtgctttgcattatcaagctgacaccccccatgcccccgtctctgaacatcctgattgctgtggccagggtgtgggccacacaaactggcctcagacccacatgatctgattctgagcatcaccaatgcaagtgaatgacaaacctagaccttccggggcggaggcttcacccagcccggggccttgagcccgggctagtgagccggcctacccgg

SEQ ID NO: 48826 - DNA, 254 bp, Mus musculus
  source 1..254: mol_type = other DNA
cacagcacctatttaaacagcttcaggcaggtttaaacatctgcttcggcccctactagggggtgacagctctaagagaaagaccagagttgggatctccgcaagagcgagtttcttcatggaagctcatggcttatctttctaatacagtgactctgtgaggactcttaccactctaagctttgagctatattggaaaccaagctcacaacataagcaaggtctgatataggaagctttctcagggagagtgt

SEQ ID NO: 48827 - DNA, 447 bp, Mus musculus
  source 1..447: mol_type = other DNA
aggtatttttataactgtacaaaactgaccataatttattatactattatcagtgattgttaagcagaacatacatttttatgtaggtccaagataaagcatctctcagattagacattctgaaagggtacatttgattggcagacaaaattttcgaatgagctcttaagaaaatacttttaagagtaggaaaaatactaaaattattacagactaatacctaggaatcctgaaagttccgtgtatgtttgaaatagtttacagttaagaatttgggtctccggcctagagaccaggaaacctgacacagaacctgtcacatgctcgccccgggagctgaggtgtcctcgcgatggcccacctctgggccaaggccgacatcgcccgcctctctggcctaggaaaccatcccagacaaggtagggttggccttggactcaccctagt

SEQ ID NO: 48828 - DNA, 371 bp, Mus musculus
  source 1..371: mol_type = other DNA
tccctcttcgggacaagccctcagagggttctaaggacccggatccggcgctgctgctgttccgtgcaggggctgctcctgtctccaacttgggtttggtgaaagcaaagcctgctgtagaaataccagggtttcccccgggatgcttcacgcccacgtggtgcgccgggggtgtgtacaacagggggggagaagcacctccccccggcgtctggcggttaccgccccacgcgagaccacccaccagccaggagctgtcgcaggacccgcaggggcgaggccctgtttacagcgactatcgctgcggcgccggagctcctcagtcgcgagcctcgtccgtcacgcttctggcggccaggcctgctgacgtc

SEQ ID NO: 48829 - DNA, 322 bp, Mus musculus
  source 1..322: mol_type = other DNA
aggaaaaatactaaaattattacagactaatacctaggaatcctgaaagttccgtgtatgtttgaaatagtttacagttaagaatttgggtctccggcctagagaccaggaaacctgacacagaacctgtcacatgctcgccccgggagctgaggtgtcctcgcgatggcccacctctgggccaaggccgacatcgcccgcctctctggcctaggaaaccatcccagacaaggtagggttggccttggactcaccctagtcggacggccgcgccaccagtgggactgctttcgacaggccgctagcgctacagccaggggga

SEQ ID NO: 48830 - DNA, 286 bp, Mus musculus
  source 1..286: mol_type = other DNA
cggacggccgcgccaccagtgggactgctttcgacaggccgctagcgctacagccagggggacgtcagcaggcctggccgccagaagcgtgacggacgaggctcgcgactgaggagctccggcgccgcagcgatagtcgctgtaaacagggcctcgcccctgcgggtcctgcgacagctcctggctggtgggtggtctcgcgtggggcggtaaccgccagacgccggggggaggtgcttctccccccctgttgtacacacccccggcgcaccacgtgggcgtgaag

SEQ ID NO: 48831 - DNA, 236 bp, Mus musculus
  source 1..236: mol_type = other DNA
gtgagcataagctgtggcacaccaggtgacaccttgtgcattcattttgccaccaccagtgtgcacatgctttgtgacacagaagaaggaagcttttgctttttgcctctgattaatacagacatccaaggcttcagctggccaaaataaggcaacggaacggcaggccttgttgaccgtcagtcctcaaactggccccttgctcctgccagctgccaacagcgctctgtgtctga

SEQ ID NO: 48832 - DNA, 290 bp, Mus musculus
  source 1..290: mol_type = other DNA
acacacacacacatatatatatatacacacacatatttgtatatacatacatacacataattactatatttgtttaaaccattgtattatcctgactcaaaacaggtgccaggaagaatgatggcagaacattctctcagaaaaattgagagtcctaagattgtgaaagaaaagtctttatggattttatcatagagggattttgttgggaggcgggcctggctgccaaacggagagacccgagcgccgggcggaaacgctactccggctgctggcggagcccccgcctc

SEQ ID NO: 48833 - DNA, 355 bp, Mus musculus
  source 1..355: mol_type = other DNA
aagtaaggctcttaccctgttttaaaatatggcataagaatattttgtgttcttaatttagtccctaaagggacagttgggaagattaggctccttatctatggtgcagggacaaggtgacagtgttgtcaccattcccagctaggagtgagtacttcacctagcagtctttgcccgaagcccgtaggggcagctagggctttcaacttcagagacagaggcagaaacctcggtgagtttgagacctgcacccaaaacataaactaggttatttagctaatatgtccaggccaaaatcaagactattttttttaaattttggattgggcaaaataataatgtcacaccctatcag

SEQ ID NO: 48834 - DNA, 402 bp, Mus musculus
  source 1..402: mol_type = other DNA
ccgccaggaagcctcgctcctcgtctcccggcatcctgagactggagacaggctcagcttctctgccctccaggggctggcgcaggtgcgcgcggcgccacagcagcccgggtcacttaagccacgccagggttaccgggaactggccaggtcgccgccaatgaagaagccgcggcccgggctcctccggagggacccctcccatgcgaggggtccccggcggggaagtcccaccttatcggggaccggctctggctgcccttagcccggctcaggcgggctcctcccttctcctgaagggaaggcagtcccccctggacggtccatactataagctccgcccttctcgagaggccgcctccccttcctagtggcaactagctgggaatggtggtggccggc

SEQ ID NO: 48835 - DNA, 464 bp, Mus musculus
  source 1..464: mol_type = other DNA
cggaccaagcgtccggcgtccagctgcaggtagcgggcggctggtggcagagaggcatgagctgctccaggggacctcagggcgctcgccagctcctcgcgggccgccaggaagcctcgctcctcgtctcccggcatcctgagactggagacaggctcagcttctctgccctccaggggctggcgcaggtgcgcgcggcgccacagcagcccgggtcacttaagccacgccagggttaccgggaactggccaggtcgccgccaatgaagaagccgcggcccgggctcctccggagggacccctcccatgcgaggggtccccggcggggaagtcccaccttatcggggaccggctctggctgcccttagcccggctcaggcgggctcctcccttctcctgaagggaaggcagtcccccctggacggtccatactataagctccgcccttctcgagaggccgcctc

SEQ ID NO: 48836 - DNA, 287 bp, Mus musculus
  source 1..287: mol_type = other DNA
agctctcgagcctgggctagcagccccagccggccaccaccattcccagctagttgccactaggaaggggaggcggcctctcgagaagggcggagcttatagtatggaccgtccaggggggactgccttcccttcaggagaagggaggagcccgcctgagccgggctaagggcagccagagccggtccccgataaggtgggacttccccgccggggacccctcgcatgggaggggtccctccggaggagcccgggccgcggcttcttcattggcggcgacctggcca

SEQ ID NO: 48837 - DNA, 344 bp, Mus musculus
  source 1..344: mol_type = other DNA
aaccattcactggacccagctaggaggagctggagacagccctacatttagctcctcagcccgcggatggagaggatctgcctgcttaccaggcccggctattacaggtaaagctgtcacatcctgtgaagctgaggggtcctgatgggacttcctgacccaggctaaagaggcatcttatggcctaggcttcttggtgcctcagcatcccggggcattccttcctggctgggaagaagcctccgggtctgatctgcagagccacaggcccaaggtgctactgctgactgaggctgcttccctcagaccacgtggtttctaggaaatgcacctccccggaggag

SEQ ID NO: 48838 - DNA, 264 bp, Mus musculus
  source 1..264: mol_type = other DNA
ttcaagctcgagcttgggctacaaaccttcaaaaaaacctgcaagcaggggtttcttagccctggcattacatgaaagggtaaagaggtgtgcacaccaggacaggtcctatgctcaggcaaggtaccttctcttacgtatcataaaagatactttgtcagctgtcgccagggagagagactggattttctctgctggcgactattctccaaggttctgctgcctggctccaggagtctttgatggcatcccgctggagggcga

SEQ ID NO: 48839 - DNA, 291 bp, Mus musculus
  source 1..291: mol_type = other DNA
gggtcctgatgggacttcctgacccaggctaaagaggcatcttatggcctaggcttcttggtgcctcagcatcccggggcattccttcctggctgggaagaagcctccgggtctgatctgcagagccacaggcccaaggtgctactgctgactgaggctgcttccctcagaccacgtggtttctaggaaatgcacctccccggaggagtaagcctgggaccttttcagcggcttccagagccctgtgaatcctgatatcaggaaggtctacaaaggccttagttgaccttt

SEQ ID NO: 48840 - DNA, 257 bp, Mus musculus
  source 1..257: mol_type = other DNA
gcatcacacctaggcggagccctgactgtcctggaattcactgtgtagatcaggctggcctcaaacgtagagtacagattgtgtgcaaggggtaaggctgggggaccacatatcagcagctactctgaggaggtgatgccccttctcctctcctacctgaagtctggccaaggcctgctatgctctggaggaggcacatggtgcatcttcctgagttgctcgccctaccttccggagcttatggaatgtatgctgca

SEQ ID NO: 48841 - DNA, 385 bp, Mus musculus
  source 1..385: mol_type = other DNA
gagagcagtacactctgtacgtggggaagactaccgctggtggtggcgatccgtgctgagcgtcggctccatgttaacctcaagatggactgagttctaagccacagaactctggcgagaggacctggaaattaaaaatctctattatataaggaatatatatatttgaactttttaagttgctgattttttttttctttttacaattattaaaataaaatttattaagaaaaaggatcctgcagttgttttgaaaacccgagttcgctattggactctgggaactgtcggcacagggaacccacggtgccgaggctctgtcagcgggtgctcaggcagacggaagcccagactgacgccctttccgccggaagttgctgtcgga

SEQ ID NO: 48842 - DNA, 619 bp, Mus musculus
  source 1..619: mol_type = other DNA
aggcggagactcaaaagaccccgggttcgataagagcacccgactgctgtctacagtgtacttacatataataaataaataaatcttaaccgcacaacttgcagggtgaaatggcaaactgtaggtgcacgaaagcctcggaggggcacctttaccaaggtgttgtccctggcgtgggaacgcggcacaaagccccgccccgcccaggttagggacaactttccgcgtccgggccgacctcagcagccgggggcgggtgccgcgctcccgctccccagctgtctctcgcgcgagagcccgtgggaagccgcccgcgacacaccggcgagcatcgcggagctcttggctcaggagaagagccttcccgccttcccggagctgaggtccccgtcggcgaaggcggaagtggtccgggctgcggtgctgctcgccgggacgaccactggcatcgctcggtggctcggggagcgagggccgggccggattgcgggcgaaccagagctcttccaggagcattcgaatgagccgagggcggacgccggcgacgtggcagcagccgcggcaatcaggcgcagcggcggacaacccggaggaggtccgtcgtcaggtcctccgcaag

SEQ ID NO: 48843 - DNA, 241 bp, Mus musculus
  source 1..241: mol_type = other DNA
agcaagatctctactgctgagtgatctctctctagacccttcaagggctttatgaatgacatgttcaggacaacatggaactccagtgatgcagactgtgcttcctggattatagaagccattagtttaacatagtatattctgcatattatatgccacatggcagatactcagtaacataactgcttcatttcaagcaatgatgaataaaggtagttctgtagccaagacaaaaagaatg

SEQ ID NO: 48844 - DNA, 276 bp, Mus musculus
  source 1..276: mol_type = other DNA
ctagaaggatcactagactaggaaagcctactccaatgtgggcttcggtcagttctaagctcacaagtgccaagtgttgtccaattaaaggttacccttgtcagaaattggcaagcactacaaatccatttgtacaaactcacatagtgatactgtcaagattctgacatgaagacaagatagtaataaactcatgagatgaggtctcaatttccccgcagagcctccgaaggcgctcttgcgctgtcggaggaggccgagcgacgctctagtcac

SEQ ID NO: 48845 - DNA, 228 bp, Mus musculus
  source 1..228: mol_type = other DNA
ggtgctgcgtttgggcctcaacaggacatccttgaagtcaagtttcacatcattatcaatatgaggcatgatgcaacacgcttaaactgtgagtgtctggattatcctaatgcttcaatccccttttttcgcccctgcaaagggcaacttagagtagcctcgatgagccttcagggccactcgcaaggaattccaccagttcggtggccacgcgcggggtctcagggc

SEQ ID NO: 48846 - DNA, 273 bp, Mus musculus
  source 1..273: mol_type = other DNA
actgaaaggccctcactttcatcagactctaatcagtgctgtgtctgggtctgaatacagactggcaagaaagtaggagtcttcaggctggatcggcctccagagctcaaagcctcccggggaagcctcgcgcagggccccgagggaaaggcatggttttccttcccgcctctcccttaaggcgcagcggccaagctcccgctgtggtcgctgctgccgctgccgcttgccctgagaccccgcgcgtggccaccgaactggtggaattccttg

SEQ ID NO: 48847 - DNA, 318 bp, Mus musculus
  source 1..318: mol_type = other DNA
atggtagctcacaaccatctgtagtggggatccattctggtgtgtctgaagagagtaatgtgtactcatacataaaataaataaatctttaaagaaaaaataacatccagtgtagtactttggtactaaccattcaaataatgggcaggtttcataaaattcctgttataaagctgtacacagtgtgccactcaggcctgtgtttgttgaaacgagcgagcgccctcttctggctggcggcccgtacgtcactttcacagtgcaggggacgtgacgtcacagctccctccgcggcctcttccggggagggaagccgcg

SEQ ID NO: 48848 - DNA, 421 bp, Mus musculus
  source 1..421: mol_type = other DNA
cctcggacagggccagagagagcctccctaaagctgtctggctcctctctgcctggggaggaggctcctgtttctggggctgtgggctggctggtcagggactgacaggtggagccagtttgagggcctggccgctgatgtcatctgtctgcagcctgaggtactgggaccttcctaggcaaaagaagttccagtcccagggaccagtagggaagagagcttagcagcagggccctctgacagatctgccctgcaggcctgagtggaaacacctagtgtggtaagaatcaagttggtgtgggatcccaggtctgacgttcctagaaaggagaaagtgggtggagccagtctttcccgcccctaccagaggacagcccccagagactggcctcttgacaggagggatgaagcaaccctcttc

SEQ ID NO: 48849 - DNA, 328 bp, Mus musculus
  source 1..328: mol_type = other DNA
agccctggctgttctagaattcgctctgtaagccaggctggcctctaactcagagaacagtgatactcaatttttaaaaaaattagaaacctcactattatcttagtcaacaaatacatatactgctatataattgtcactatcattatcttttggcagccagaactcgctgatagcaggttgctggagaaacttcttcacttagcctggaaagggactctagccagcctgagtttggcaaacatggctctgttagattgagttcctaaagctagcaggaagagccaggcctgcagggggcgcagcgcctcgtctccgcacctcacac

SEQ ID NO: 48850 - DNA, 421 bp, Mus musculus
  source 1..421: mol_type = other DNA
ggggcttgcctctctggtcccaggactagcctgctgttcgtggccaaggctagagcctgagttgcgcgccatcaactctttaaaaaaagaagacttacccatcacttagccaagacctccacttttagcgctgacagcgcccgtcggaaatatccaagagcctccgggctcagatgcgggagagcctcgggggcctgctccgcacgcgcggctgccggcagccggggataaccatcgcggccgggagggggacgtcccgaaccccgggccgcgcgtccccgccggccggcacccgagaactggcgtcgcgctttgtgagcggaacgcggccccaaccccatgcgtgctttgggaccaaccgccggcgcgctccggacgcacggggacgtcatgagtctgcgacgtggggctgcaggtcgcc

SEQ ID NO: 48851 - DNA, 432 bp, Mus musculus
  source 1..432: mol_type = other DNA
ttttttctttgcaaaacctgaaactctcaaacagaaagatttttcttcccattaagctctcttggtagaaaaaaaatcaatcctagattattatttatggtattcagtaaacaatcacagtgattaattcaggtggtcacttgctttgcaaagctgtaaggcaatgcctcacatcaaaggggactgagtcaaagtctcaggccaggctgtccttttaggagagtcccaggactctccagcgagtcctgggctctctggagttctggctacccgtccagacccacggagaaccatccctgacccctgaagtggtcagagccttaccagcagcagacgcagcctctgggtttctttctgcccagatcgccagatctatagtttgagaaacctggggaagggcgacctgcagccccacgtcgcagactcatgacg

SEQ ID NO: 48852 - DNA, 172 bp, Mus musculus
  source 1..172: mol_type = other DNA
gtgcagtcctgactgtcctggaactcactctgtaggacaggctggcctcgaactcaagcttttaatttcagaatccagtctctcatcagacacagtgcaaagactgaagtttcggatcaaatatctaacttttaaagagacacaaacggcggactttgcaagggggtcagag

SEQ ID NO: 48853 - DNA, 384 bp, Mus musculus
  source 1..384: mol_type = other DNA
ccagctggagccccagtaggggtataacacctctagggtacctcagggtcctgatggctagtcatggggagcaatgcatctcctcttcctggtgtgtgtgacacacacacacacacacacacacacacacacacacacacacacacagagagagagagagagagaggtcctctggctgagcagcaaatgttcttagccgccttaggcctggttgcctgcaagccatggaggctaggggagcagtcgttagcaggtacaactgctcttctccgcaggctgagccttctctgccctcagccttactgcttcctggggaggctggcctccacatgcctgggcctgtcagtgatgggaaggagtaggatgaaggagggcccagggtga

SEQ ID NO: 48854 - DNA, 238 bp, Mus musculus
  source 1..238: mol_type = other DNA
tggccctgagcctgtggattcttgcctagatccatcaattagacttggcttgtctcttatagccacaccacagttgtggtctatatgctgtttttaataccatgaaggttgttaatgtgaagtacaaagataatatttttaaaatcagcagtctcaattttggactgcgttggaacacagactgtcccaccccaacagtgaagggaggtgtgggggttttcagcctcaccctcaggaa

SEQ ID NO: 48855 - DNA, 216 bp, Mus musculus
  source 1..216: mol_type = other DNA
acatagcatgttaacttcagggatggacagccaggagctgtaggccacctcctggctcataccagagctcagggctgataccaccctaagcctaggctgacaggagaaaagttctcccttttctccgttttgattctctgtatccaagaattgataactattcatcgacatcgtcgtcgtcgttaaagaaagagttggcgccaagagggaagtgcc

SEQ ID NO: 48856 - DNA, 427 bp, Mus musculus
  source 1..427: mol_type = other DNA
ggccttttctaaacccggccaggaatttaggatggccgggagcagaacgtcttgggatcagcgagcccagagatctgcagcttttgggacgaaggagccgactatctcctccaaggctaagcctcaaagcctggcctggatctacgcccagcgggctatgggccttcaaaggcggttcgaaagttctgagaggcttctgggacactagaaactgcaaaggctccttggaggaggaatggcctcctctacagagcagctcagagcctctctcaatcccagatctctcttcaactcaagatttggatggaaaggacattaaggcgaggggacccggacctccccaccccctacgctgggatgattgtcacaactgtgggccaataggtaccattgcgtggttttcccatctcatccatggaggaggggc

SEQ ID NO: 48857 - DNA, 274 bp, Mus musculus
  source 1..274: mol_type = other DNA
tgtcatgcaagcatgaggacctgaactacattggggacagtagcccatgtataccatgccaaagtaagtaagtaagtaagtaagtaagtaagtaagtaaataaataaataaataaataaataaaatacttggccaagcgatttaaactttaagtacttgggtttcctcctctatagaaaagaagactggctatcgtcgcccagtgcctgggcgcttctcgggtggaagcagtttcaaggcacgtgcgctccaccccagggggcggagatagaag

SEQ ID NO: 48858 - DNA, 411 bp, Mus musculus
  source 1..411: mol_type = other DNA
accccctgcccctccagccctggggggcttccgcagggcctgggcctagagccagttccaggcggtccccagactagagtgggggtgggggtcagagctgagcccatagtttctacaggccctagcctctgtggtaaccctttcctgccacaaagagatgggtgtctaaaaccagggtctcagagatcaattccttttccttccttcgaggaaggaactttgacacaaaacttgggtggaaggcagttgcttccaagagggaggaagggcggcgggaatccgctcggtcccacccctagctacaacccttagcaggaagggtttgtctcccgtgctgcggcggaaagggacggcggagcgctggcgggtgggtcgcagaacccacagcaggggcggggggcgcgcctcaag

SEQ ID NO: 48859 - DNA, 338 bp, Mus musculus
  source 1..338: mol_type = other DNA
cttcagctcccgatcgcccggaagggggacgcctaccgccaaagccgcgagttccgcccgctcctctaggtgcccgcggcgggggaggaggggcccgcgtttctcccgcgccccaggggcctggggctgggagcccgaatctgggagggccttctcggatcctccggcccggggcggagccagctcggctcctcccccgctagggccgcactggccagggctcggggcagggctgcgctcctcctccccggctcggcctgctgtcctgctgccgagcgacccgcaagcactttcaccaagtagtgtgtgtacacacccttccatgctctgccaaggag

SEQ ID NO: 48860 - DNA, 239 bp, Mus musculus
  source 1..239: mol_type = other DNA
aaatgcagtttcttgtttggtttcagaccccagggactgaggcaaatattttacatttttacatgtttacaaaaccttgaagtttccagaccaggggcctggctgcctcctcatcccctggccttaatccttggggccagttaactcccaataaacctgcctttaatgtaaactagtctggatttcaccagcggtagagaaatgcctatcatttctaaaagggatcaatcaaaatgatc

SEQ ID NO: 48861 - DNA, 264 bp, Mus musculus
  source 1..264: mol_type = other DNA
gggggtgcctctcccagggctgcacccccaggtcctcctgcagtaggtcggcctggctcacagaccaccaaaggacagcttgggtttgctccttggcagagcatggaagggtgtgtacacacactacttggtgaaagtgcttgcgggtcgctcggcagcaggacagcaggccgagccggggaggaggagcgcagccctgccccgagccctggccagtgcggccctagcgggggaggagccgagctggctccgccccgggccgga

SEQ ID NO: 48862 - DNA, 492 bp, Mus musculus
  source 1..492: mol_type = other DNA
acattccattgtgttttctgttcatcccactggaatgaaaagagtaagttatagaaaccaacttaaatgtatgatcttcctgttttgtaatatcctgaaagtccattcacagcagctgtttgtgggtcatgacccctctaggggtcaaatatcagacattctgcatatcacatattttacatctttaacagaattatagatatgaaatagcaatgaaataattttattgggaactgaattaaaggctcatatcattaaagttgaacaccactgatttaattaaggtgttgttaatatgctgtgtattcaatatatcatctctgatttatttgaataaagatgagatgcccctgtgttacaggaagtcttgcagcatgacagttccatgatccctgatcgatccaggagtctcatgatcaggagagttgtgagaatttttgataaaaaacaaaacaaaaacctgcctttctcccacgttggagctataaaagc

SEQ ID NO: 48863 - DNA, 566 bp, Mus musculus
  source 1..566: mol_type = other DNA
tcccaagatcttttattttgtgatattctgaaattccatttcgtatgattaaatcaggacatttacttatagtagctgtttgacccctttaggggtcaaatatcagatatcctgcatattacgaatttcctgttaaaattcataaccatagcaatattaaagttataaagtagcaatgaattaattttgttgggggttaccataatatgatcagtactggccatattggcaccacaatggctccatttaataactgtattaaaaggtcagaccattaggaatgttgggaaccactgacttaattaaggtgttggtcatgccttacatcatgtcctacttatttgaataaggatgaaatggcctgcaggctaaattagccctccatcagtttttgttttttaaataaaatatatgttgagacttcacacgtatgcagcatgggtccttgcttcctgggagccactttgaaggatgcaaccaccagtggtcagagtatgagaatttctgataaggaaaataaggcttgtccaagccagatctgtggttcctgcctttctcccacgtgg

SEQ ID NO: 48864 - DNA, 425 bp, Mus musculus
  source 1..425: mol_type = other DNA
taaggaaaatatgtaataaaaatattaaaaattaaaaaaagagagacttagtatgattaaacttacagaagctgctcccttcacattacatattttacattaaattcataaaactgtagcaaaattttacttataaagtgtcaatgaaataattttgtggctggggtcaccacaatatgagaaagtggggaaccactgacttaattaaggtcttgttcatctacttatttgaataaagatgagagtttttgtaaataaaatggctcatacactacagaagtctgtgtttgtgtttaacaggaggtgagacttcccacatatgcagcatgggtcggatcacctatcatggggagtctcagaatctggccactgataaggaaagtagagcttgtccaaaccagatctgtggttcccagccctgcctt

SEQ ID NO: 48865 - DNA, 589 bp, Mus musculus
  source 1..589: mol_type = other DNA
attccatgtgttttctgtccatcccactggaattgaaatgaatatgttttagaaattaacaaactaaatgtatgatattcctgttctgaaaaatctatcaaaggctgttagtatgactaaattagaacatgcatttttacagaagctgttctcaacctatagatcacaacccccttaggggttgaatattagatatcctacatatcagatattttacattataatcagtaaaaccaaaattacagttatggggtaccaatgaaataattgtatgcctataagcaatcatattaaagggtcagaccattaggaaggttgggaaccactgacttaattaatgtgttggtcataccctacatgctgtgtatttacttatttgaataaagatgacatcagttttttttttttttaataaaatatatgtccttacagatgtctgtgtttgtgcttcagcagcagaggtaagacttcacacgtatgcagcacatccctgatcagggtgcagtcgacaccttattatgggatgcgagactcagaatctggccaagccagatctgcctgcctttctcccacgttggagctataaaag

SEQ ID NO: 48866 - DNA, 353 bp, Mus musculus
  source 1..353: mol_type = other DNA
cttgacagtgaagaacactgccaggtgataaaatatttgagatctttgagatgtcaaagatgatgaggacatcagtgtcttaacaaaactcttcatagagagtagtatagtatgtagagatgttattattattattattattatttattttttctttgtagaccaggctggcctcgagactctcgagtgctgggcttatattttttttttaaggaaatgtttacctgatcataaacttaaggttccctgagcattgacaggagaggggacttgtctagtgtggaaggcctcaataagtggctgagcagtgtgtttcctgtacagtcactcagatcttaaagaggtctttcctc

SEQ ID NO: 48867 - DNA, 370 bp, Mus musculus
  source 1..370: mol_type = other DNA
tgtcttcttttcatggtgataaatgatatttataaaacacatgcttctaatgtcttacattctgggtagaaaaaaaattaaactatgtcttcttattgacaccacatcaaggaatcctttctaatatcttcctcatagatcaagaattaatattttcactggatcataagaggactattttgattatcaaaagttcataattgcacacctgtatctacataactgggttttccctatttatatatctcccagaaggagaggaagaaaaggaagtagtcacctgtttctctgaattactgcgtgtacggtgaactcggtacacagtattcaaagaccacatgggcgaaacctcctaggaactccaggggag

SEQ ID NO: 48868 - DNA, 559 bp, Mus musculus
  source 1..559: mol_type = other DNA
taataatcactcaagatctaatcatggtccatgtttttatatagaaaatggtagacaacattgttgatctgatcttaatgacctaagagaaaatgtcttatttaggacaagaaggggtcatatgtgagacataacagaatcatatgtatgtcttacctctgtagacatttgtctgaattcttacctggaaatgaatggaaaaattgggctatgtcattaaatccggacctcaagctcttgtctcagagataaatgttcacaaataaagtatacctgtcatttgtgatccattattacacttaattatgtatgacagttctgagatttctctgtgacttcctaggagttccaggagagtcagagtgagttcagattaatttatcagaatattcagacaactccacaggatgatgtcatcccagagattaatgccctgatgcactgcaacattgcaatttggttgtcttttgaaaacagaaggagtgaaaagccataaagaatgacacacttgtgtctgtatgtcagtgtggtaacagtgtcatttttaccaatatttcct

SEQ ID NO: 48869 - DNA, 427 bp, Mus musculus
  source 1..427: mol_type = other DNA
agacataacagaaccatatgtatgttgtagaaaaatgaggctaggtccttaaatccagacctcaattcctttgtgatccattattacacttaactaagtatgacaaatacaggcagaaaacttggtttttttgtcctggctgtcctggacactctgtagaccagactggcctcatttctctgtgacttcctaggagttccaggagagtcagagtgagttcagattaattcatcagaatattcagatcgctccacaggatgatgtcatcccagagattaatgccctgatgcactgcaacattgtctgtattgtcttttgaaaactgaaggagtcaaaaaaaaaaccataaagaatgacacacttgtgtccgttttggtgatagtgtcatttttacccaaaccagaatatttccttaagtaataaagcc

SEQ ID NO: 48870 - DNA, 571 bp, Mus musculus
  source 1..571: mol_type = other DNA
tggatgtagtccattaaatactcattcaagacctaatcatggtccttgtttttctatagagaatgctaggcaatactgtaggaaataccaagtgatctgatctgtgacttctaagaaaaaatgtctttcttaggatatgaaggggtcatatgtgagacataacagaactgtattgtgttgtaacctctgtatacatttgtttgattatggaaaaatggggctaggtcattaaatccagacctcaagttattgacccagttcacagataaagtatacctgtaatttgtgatccattattatacttaactatgtgtgacagttcacagaactatttctctgtgacttcctaggagttccaggagaatcagagtgagttcagagtaattcatcagaatattcagacaactccacaggatgatgtcatcccagagattccctgatgcacagcactcactcagtactgtggaactttgagagtgcagtattattttttgaaaatggaaggagaaaaaaaaaagatgtcagtgtggtgatagtgtcatttttaccaaaaccagaatatttccttgcc

SEQ ID NO: 48871 - DNA, 406 bp, Mus musculus
  source 1..406: mol_type = other DNA
acatgatttattgactatacagtctcagagctgttcccatgcagaaggatccttgtcaaatctgattttcctcagtttggatgagtcaacagtctgttctctcctgttgaacaagactatcatatatatatatgtgagtgtatctaatgctttgtctcattggtcttaaaaaaaaaaactctaggattgtaatataaatctgtaacacatctcatgccataatgtttaaaatattgttggaatcagctccgatctgcagaggcaattctaatcagaattggaattctgaagtatgatgtatcgacatgtgtacatgtcttaattctccaaactctataaaatgaaacacataatctactgtctgacattgccctaagatagcatcatgcagtagaaggttctttat

SEQ ID NO: 48872 - DNA, 369 bp, Mus musculus
  source 1..369: mol_type = other DNA
taaaagaggctctagcccattaaataacaatcatgatctaataatggactttcttacttgatagattgagttcagtcctgaagctcttgcctcagagataaaaggcaatacctagtaaactttaagtgtcatttttgatttgttattacacttaactatgtatgcctatttctcttgtgaaattttcatagcagtatcaggagaattagagttaagattaattcatgaggatatatgagatgatattctgcaatacagtgtgaactctcactaagcactgtgtaactgtgagtattataactgctgtaagataaattggttgtcaatattgttttaaaaacttcctgaggtctcatggtaacagtgtca

SEQ ID NO: 48873 - DNA, 118 bp, Mus musculus
  source 1..118: mol_type = other DNA
aggccggggcctagcaaacactcaagtggatgctcacagtcagcttatgccccagtgtctaagccttagaaaaggacacatttgtttcagtcactgtggacgtgcattttcattaaaa

SEQ ID NO: 48874 - DNA, 468 bp, Mus musculus
  source 1..468: mol_type = other DNA
acacaggtctggagcactgtggctccagtctgtgttgcaacacaagaatctgtgggtccacagtaggaaaaccctagatttccaactttgccctttctgattggagaacagagctatcccaaaactccagatttttatttcttttctggatctttacaaagtaattcagctactcaataaagtcactctaaaattggtatttatttttacacatttttaaaataaattcctttattggtaaggaaactgcagttttaaaagcttgcaggaatccggggtccttgcacgggggctgcacgcacctggcgcgtgccactgttgttgtggacctggtctccagacccgccctaaggcagaccccgcgtcgcccaggcttgcgtgtcctcgggtttcctaccccaggggcgtccccagtgcagtgagctgcgtcgccccaggtacgtgggcggagcgcgcggcatttaaggc

SEQ ID NO: 48875 - DNA, 191 bp, Mus musculus
  source 1..191: mol_type = other DNA
cctgaggttctctggccagccagccagtttaaagaactactgtggagtgattcaatagtcagtcagtgattcctttgtcagtaaaggtcagatgtacaagagatgagcccaaatgcacatctgtcctgatgatgctccaccactgggagcttgggtttctgggactctgataccataggctacaaacccca

SEQ ID NO: 48876 - DNA, 275 bp, Mus musculus
  source 1..275: mol_type = other DNA
ctagtatgctctctgaatgatttataaattaattccttattgcaatgtctagggagacttttcataccactctagctacatgtctctcaaacagaaatctattagtttgcaaattctttgcatcctcgatgatccctttgtttggaattaattggatctaagggtactgcaacagttgatcgcacccgggcgtgttaatcccagactggtccaggatagccagggctatacagagaaaccctgaccgcaatgcagccagagcaacctggggttgg

SEQ ID NO: 48877 - DNA, 445 bp, Mus musculus
  source 1..445: mol_type = other DNA
agctcacaaacatctgtagctctagttccatgggatcatgggatcagatggcccctatgaaaatatgcttgcacataaagtaaaaataaaatagtaaaattatatatttaaaaaacagatgttagtttacaatattgttcaaacctagtctaaaaactgacaaataaacctgcgctcaacattccatatataattttaatatctgcactttcaatattccatataatttaaacactgaatgcacacactttgtgcagactcacataatagatgattatttccggagtaaatttttccacttttttgttttaaacaggtctttattaaatcaaacccattcgtcagatctcaatcggttgacttcagaacaacagctgttgaccagtggagcatcccctagcaacgtttatgtccgaggcgcctgcgcgcaagctcacacggacga

SEQ ID NO: 48878 - DNA, 446 bp, Mus musculus
  source 1..446: mol_type = other DNA
acaagcctgatgacatgagtcctatacccagaatcataagcacacatatgtgtatgcatgcaaacaaatatagtatattatatatactatatataaagccatataatatacatataaagccaccatactggctacctagcctagtacacataataagttccagatcatttggcacctgattcaattctctagtctagaccttatagtctcgtttcattcatcatattctgaaattattaatggaattatttctaaatcagtccctactcagtacatttctgattgcgcccagggcccaacttcaaactcagaagttctcattattcgaagcaatttacactctgaaaaagctgaggccacgccttctccccagctggacggggcgtaggtccggtgttcaggagccgcagccacggtcccgccccgccgcgccccacctaacccgg

SEQ ID NO: 48879 - DNA, 346 bp, Mus musculus
  source 1..346: mol_type = other DNA
tctgatattttcaattcaataagacaattaattaagtatagcccaaatggggccaagccaggcaacctgggctctatctttaaatcccataaattattacttgatacagtgtctcctgacagaagagaatacatattggggggtcctcatatttggcgaccagggccgtaaaatgaaatatccctataggctatatgtaattgatgtgctaggaccgcccctcgcagtctccccaggggagcccttccgcctgaggctgaactccccagggagccggggagcgcgcctgccgttctgtgtgtcaatccagagctcggcgcccacaattggctggcttgccgtcgag

SEQ ID NO: 48880 - DNA, 400 bp, Mus musculus
  source 1..400: mol_type = other DNA
acaagaaaaatgaaaggaagcattttttctattaatatcattccattcaatgatagttgccgtaatatttaaaagggcaaatacattccctaaattattgtattttcacaccgtattgtacacatatactttgttcctcatgatatgttaattaatatcagataatattaatctacatatattttgagcagagagaagggtggtggtaattccttccccccccccatttataacggtactaacacttcacttgtagtgtctgacctaggtgtcccagggctgagtccgcctaggagtggactctaaggctcgccacagtttgcgcacgcgccatgctagcaaacggttcgcgcgcaggcgcgccgtggaggggcgggactcttgcccgcgtctcttcttc

SEQ ID NO: 48881 - DNA, 686 bp, Mus musculus
  source 1..686: mol_type = other DNA
gggccccaaacgtctcctcccgccgcagccatggcggaggtgggacacccttcccacgggccaggcaaggtggaagcgcctgcacggccgccagcgcaccagtccccttgcggccgcggccgggctcgccccctcggtccgccgcaggcattgccgggctcgccagtcgccggggtcttgggggcctggacagggaggacgccgggacatcgaggccgcgtctctcctcgagcagagtcgcaaagggccgtggcgaccgtctggaggccgagacccagtgtcccgatcccgggccccgcccgcccccagggccgaagcgcgagccgaactgcgggcagcgccactcgggctcctgacccgggcagaccccgcgagtgggggcggggcggggggagggccggcccagcccggggctggcggcggggggggggggggggggggccggcaggcccgagggcgtggcccaggtctgacggacagccgccgtgactacctcacgagactgggccaatggagcctgcccgtgccgcccacgccatcagccaatgagcgtgcggagggcggggcctccccgggccccgccgtgccaccgcctccgttccgcggagctgcagccagaacccggtgaggcttctccccgccgtctttcctgtcgagggccgcggagagcagcctcgggtgagggc

SEQ ID NO: 48882 - DNA, 813 bp, Mus musculus
  source 1..813: mol_type = other DNA
caggcgccgggcaggccggagagcgcgtgctcggccaggcaccgacggccaaggccagacagcccaggtcccaggggcgcgagcccgctaagggagcccggggctccatcttgcccggcggcagtctggggtcaccactgtcctgtggccccgccgcaatctcggcgcgcaaactcttggcggccgaggacaaggccagagcgcgatcggactcgttatgggccccaaacgtctcctcccgccgcagccatggcggaggtgggacacccttcccacgggccaggcaaggtggaagcgcctgcacggccgccagcgcaccagtccccttgcggccgcggccgggctcgccccctcggtccgccgcaggcattgccgggctcgccagtcgccggggtcttgggggcctggacagggaggacgccgggacatcgaggccgcgtctctcctcgagcagagtcgcaaagggccgtggcgaccgtctggaggccgagacccagtgtcccgatcccgggccccgcccgcccccagggccgaagcgcgagccgaactgcgggcagcgccactcgggctcctgacccgggcagaccccgcgagtgggggcggggcggggggagggccggcccagcccggggctggcggcggggggggggggggggggggccggcaggcccgagggcgtggcccaggtctgacggacagccgccgtgactacctcacgagactgggccaatggagcctgcccgtgccgcccacgccatcagccaatgagcgtgcggagggcggggcctccccgggccccgccgtgccaccgcc

SEQ ID NO: 48883 - DNA, 571 bp, Mus musculus
  source 1..571: mol_type = other DNA
gggtgggagtgcggcccccgggcgggagggccaaagggcccctccccgacccgcccgcccgccgacctccggccgctgccgcccgcacccggaggctctcgcgctccccgccccgcggccgcctcacccagccagccctgccgcgcccgcgggccgcacgcgaagccgccctggacatcagcgcggcccccagcgcaccctcaggccccgacgcagcagccgcgacaccggccgccgcgggctgttaagcccggctcggtgggaggctcccgacgctgccctcacccgaggctgctctccgcggccctcgacaggaaagacggcggggagaagcctcaccgggttctggctgcagctccgcggaacggaggcggtggcacggcggggcccggggaggccccgccctccgcacgctcattggctgatggcgtgggcggcacgggcaggctccattggcccagtctcgtgaggtagtcacggcggctgtccgtcagacctgggccacgccctcgggcctgccggccccccccccccccccccccgccgccagccccgggctgggccggccctc

SEQ ID NO: 48884 - DNA, 819 bp, Mus musculus
  source 1..819: mol_type = other DNA
tggaggacaggcgctgggcaggccggagagcgcgtgctcggccaggcaccgacggccgaggccagacagcccaggtcccaggggcgcgagcccgctaagggagcccggggctccatcttgcccggcggcagtctggggtcaccactgtcgtgtggccccgccgcaatctcggcgcgcaaactcttggcggccgaggacaaggccagagcgcgatcggactcgttatgggccccaaacgtctcctcccgccgcagccatggcggaggtgggacacccttcccacgggccaggcaaggtggaagcgcctgcacggccgccagcgcaccagtccccttgcggccgcagccgggctcgccccctcggtccgccgcaggcactgccgggctcgccagtcgcccgggtcttgggggcctggacagggaggacaccgggacatcgaggccgcgtttctcctcgagcagagtcgcaaagggccgcggcgaccgtctggaggccgagacccagtgtcccgatcccgggcccacgggaagcctcgacgaagaccgcccgcccccagggccgaagcgcgagccgaactgcgggcagcgccactcgggctcctgacccgggcggaccccgcgagtgggggcggggcggggggagggagggccggcccagcccgcgggggggggggggccggtaggcccgagggcgtggcccaggtctgacggacagccgccgtgactacctcacgagactgggccaatggagcctgcccgtgccgcccacgccatcagccaatgagcgtgcggagggcggggcctctccgggccccgccgt

SEQ ID NO: 48885 - DNA, 301 bp, Mus musculus
  source 1..301: mol_type = other DNA
caattttatttgcccagcttggaggttttaaataccttctgcttggtgacaactcccagatgggacccacctaaggcgttttaaacttcataagagcatatctgtttctctagttggaatctcattatcatgatcaggcagcagaaagagaccctctaagtttctgtgttcccctctgggacattcaggacagggggatgtcccaggaatgttctggacaaaaatgtgtcaatgcctgggaggacttcctggagtgctctgcactgcagttgaggtgctacgggcacaggttcagtccctc

SEQ ID NO: 48886 - DNA, 326 bp, Mus musculus
  source 1..326: mol_type = other DNA
atgcaggctgcccaggtcttcccagcatcctggactccaagagggatgggcttgcctaacctcggaatcgaattaaatcgggctcactgcactacgggagaggagtctcctgtgcgctactggaagctgagcgagtagctgggacttggagggagacacaggtctacttcaggctgaccttgagtgacctaggctccaggagagctcgcgactcggcgggccctgacggctctgggtgcccggagagccccgcccgtggcgctgggggtggcgggctactgggagccgcctcctccgcaactttctcaatcgctccagggtgagag

SEQ ID NO: 48887 - DNA, 572 bp, Mus musculus
  source 1..572: mol_type = other DNA
agaaatgcacattttcccttattcctaaaataaatccatcactcataaagggactttggggaaccaacattcagtgaattattatttactaatgattagctgctgttcggaaatggacaaggccaagattctgtccctctcggtgtcggtgtcttatgactctcagagaaactccgagggtttcaagcgccttggaacaagttaatttaaaaaaattatccgcctggaagcaggctggcggccgctcccgccatagacaggattccggctgggactcgcccgaggaacaagtctgcatccccaggcggcgacacccgggcgcgaccgaggcgccctcccgacgcccacgcgcgcagcgcccaggccgctctggcagtcggttctataggacccggccctcgggtgtctgcggccgggaaccccatccgacacctgcggcggatcggcggagctgagagagcccggacgaggagcgcgcgtggtgcgcactggggtgcaggtggcgcccggcgcgcgaggagggggcaggtgccagcttccccagacgggacccggtgaggggcgcagagcgg

SEQ ID NO: 48888 - DNA, 505 bp, Mus musculus
  source 1..505: mol_type = other DNA
agaacatacctgccagccaattttgtaaaataaccaagttacacatgttacaagtcttgtctgaagtagcacagggcaggccctgtaaaactaggtccttacatggcttcgatgtgacagcagacacagtgacaaacctttgagactcctaagtggtcattaaggaataaagaacctccaaaacaaaccagttgtcttcctaccagtaagggccctccagtgtccagccccagcaaggccccagcgggcaaggatctggctgagcttgcccatcgcggtccacaagggaagaccagcctacacctggagtctctcctaggggacactcgcagtggtccctggcttccagggaaggtcccctgccccttgctccacagaaggggacccgccccgctcctctgtcccggagagagggcggtgcgcaccacagaaggcgcgtcgagtgcccgcgctcctctcccgcagccctcccgtgcggcgtcaggcagaggcggggtgggggcca

SEQ ID NO: 48889 - DNA, 352 bp, Mus musculus
  source 1..352: mol_type = other DNA
agggtagcctactccaaattttcatgattcgggtcatgagaactggtttttataaagctcgttgtgagaagaacatacctgccagccaattttgtaaaataaccaagttacacatgttacaagtcttgtctgaagtagcacagggcaggccctgtaaaactaggtccttacatggcttcgatgtgacagcagacacagtgacaaacctttgagactcctaagtggtcattaaggaataaagaacctccaaaacaaaccagttgtcttcctaccagtaagggccctccagtgtccagccccagcaaggccccagcgggcaaggatctggctgagcttgcccatcgcggtccac

SEQ ID NO: 48890 - DNA, 256 bp, Mus musculus
  source 1..256: mol_type = other DNA
tgtttattgataatttgtggaactgtttaaaaacaaggtggtgggaataaggcggcacaaaacttgttctctggtctcagacccaagtgtaatcgttcacatcagtgaagccaggctgccctggatttccagtgtagagtagaatgtaaactgctaacgtctttaaagcaacattttcttgaaagtgtcggtttaatggtttcctgttagaaacttaaaaataaaaattgctcagctcagaagagcccagtggcct

SEQ ID NO: 48891 - DNA, 428 bp, Mus musculus
  source 1..428: mol_type = other DNA
agaaaaaagaaaaagaaaaagattgactctagtatttatctttctttttttatattgaagtgcagtaacttaaaatatgttcactaattaacgtaacaactacttattgacacacagttgccagatactgtcagttactgtacatccgtgggaggctaaggtggatgtactgaacaataaaggttagtaaacttcagtttttttataacgtgctccggaaagaaatattattttgtctttaagacagctcccattgcagatgtgcgtcaacttacctttactttttaattttcagattaaatttatttagagagaacccaatttatgggacgacgcgtacaattccaaggttcccaagccgcgtagtggctctgggagcagccctgcacttccggtcacgagcttccggcctcgcccacgcggcgcgg

SEQ ID NO: 48892 - DNA, 664 bp, Mus musculus
  source 1..664: mol_type = other DNA
gtactatgtctttattcccgtttttttactaggaaggagacaacgttaaccaaagtgtttcataaacccaaatgtgtttactaggaattgtaaaatgttttaagctgtaaggtttgaagggacttttaaaggtagagccgctacaaagtatttcagttttaaaacattgaaggcaagtgtttttctgcatagcagaactgaaacgcagttaaccactggtttacaacttggttaaaacccaaagctgcaagccgttttagggagtcaaaaaaatattttgcacactttcaaaaagcgttcaaagcgtaaatgctcattcactagctggatgcctggtaagcaatttagctctcttcagattcaatagagtccttcatttgagctgattccccttaatttattcacagaatcattttacatgtctgctcacacaattaattaccatgattgagttctccaacactgttacttaagaggcatggagtcattttatgagtatttaagggaaaacagcctcctcctaacagaacataactgttttttaatctcttgtataattcttcgaactatgaaatcccaaggaagagaattcctctgagccaaagtcggcctctcgactgcatccccgaggccccactggtccgtgccgaggcgtcgaggccac

SEQ ID NO: 48893 - DNA, 675 bp, Mus musculus
  source 1..675: mol_type = other DNA
attattaaaaaaaaatgtgatttgaaagcatcttttggatccaatttgactgaaaaactttttcacttcaataaagactagtttgtctttgatactaattttatgatctgtgagaaacatttaattacaatgcttgttgaaaaaaaaccaaaaaggtagagctttcttgtgtcttcagacactttaatatttaaaaatagcatataattgaatacacgaagataatcattgtggcatacatacttaaaaggaatggaagctttaaaaaattaggtgcaaaatagtttgctttaaaacaggtttttttgagtcttatattgatctatttggtttaatagagtagtcattcgtttagagaaatcgaaatcaaaatgaagtatgggtttctacagacgaaacactactgtatgagtttgcctgtccctgggaaagaaaagattacatgtgatttaagaattgccgaatcaaagggagcattagttttgattaaggaaaactgtgatagattggtaaaatatgtgttcatatactgtgaattcaacactgaaagctctgaaagactaattggtttgaaaggtttaagactgattaaaacctgggttgtagaagactgggcgggactagacgctcattggctcccaccgtctggtctgcaccagcgcaaacgcggaggtc

SEQ ID NO: 48894 - DNA, 320 bp, Mus musculus
  source 1..320: mol_type = other DNA
agagaatgaaacaaagtttctttccagagaatgcctggcagatattctctaagtaatcttattgattcaagacagttggctgtccaggaaaattctctgtagaccaggctggccttgaactcagagatctgtctgggaagtccttcacttcctaaatactgtttattatttaaagaaagattgttggccagcctggctagtccatgcatatacgaggcccctactgggaaagtctccaagggtcagtatggacccggttcggaacccacggccgccactcaccactgacgcatgcgcagtcgtcacagtgcgggggtgac

SEQ ID NO: 48895 - DNA, 483 bp, Mus musculus
  source 1..483: mol_type = other DNA
aaataaatcatttaaaaattaatgcaattctatttctacttcaactagaccaccttttgaacattgaactagctgatgaagttactgtaatagcattgctattataaactcctgaagtccgctgagcccttactgacttcaggaagccgcacccttaggagagcgcttccgggagcgagaggaagctcccgcacaacgggctgcgcggctccggtccaggacctcgcggcccgcacccagcagggaaccacgcatgcgcaggccccagacccgcgcgggatgcccggccgcggctgacagagccaaccgctcggcctcgcccggtgccggctgccgccgccctcctcccagcgccgcgaccgggggtcccgtcaggccgctgggggcgcgacgccgacggctgctgcgacagcccgggaggcgcgagaggcgccggggtcgcggcggcgattggccggccgcggcgcctgctcccagaatgca

SEQ ID NO: 48896 - DNA, 210 bp, Mus musculus
  source 1..210: mol_type = other DNA
ggttaatccagacatagacagaacctggttcagctttaaccagctgcttctattgtgcagctttcctcagcctcctgtagacagcctgatcaccacagctgggagtccactgccacagggcaggggctgcctacattttaaactgtgattcgtgtttatgagaaaataagaaggtatccattggagccgccattggatccgtcctcccag

SEQ ID NO: 48897 - DNA, 512 bp, Mus musculus
  source 1..512: mol_type = other DNA
aaaatgaggctaatctgcaagaggcttaattattagttaaaacagtcctgacaagggttcttctgacaagaggagagggggctcgacttccttcccgctggtacaaatgatcttcactcttgtgaatttcttccggaattgaaacttcaaatgtcacgtttgctaattaaagaggaagtctggttgacttttaagactattagtccccaccatcacttaccacagatcgtaagttggtggggagtgtgcaatactgatgtgttttataaaaccataaggcactttcctaatagcctgcgtccgggtctcagcagccggctgcactttccgtggctggcaccggggccgggaaaccggcgctcccgggctgggggcttccgacgcgagcccagcgcagggcaggtggccgcccagccaggcggcgcaggaagcggcccgtggggcggagcgggcggcgggtagcaaggccgcgggcgccccgcccgggctggtatgcggccgggagtgacgcg

SEQ ID NO: 48898 - DNA, 356 bp, Mus musculus
  source 1..356: mol_type = other DNA
ctctccacatagcctgtcctgacactctgaattttctcttgaattttgcgtgacataaaaagagcctatttaaaggtatcatttgatcatcactacgctgaaaatgcgcatgcgtgtgccccacccaaggcaacacgtacgcgcgcgcgtgcgtgcgtgtgcacccacacatacggaaatacgcccctcgcgagagacgactagctcatgctcgccgcggggtcggaggtcagggcgagcgtctcccgggcgcgggcggctgcggggcagaggtggcagcagcggcgagctggcgggagggcgggcgcggcctgcggacgggtgggcgggcaggccaaatggcgcgcccgaggctg

SEQ ID NO: 48899 - DNA, 279 bp, Mus musculus
  source 1..279: mol_type = other DNA
gatttcatttttaaagcaactgctttaaaatggagctatgagcctggactctgtagaccaggctggcctcaaatgcagaagtcagcctgcctctctctccacatagcctgtcctgacactctgaattttctcttgaattttgcgtgacataaaaagagcctatttaaaggtatcatttgatcatcactacgctgaaaatgcgcatgcgtgtgccccacccaaggcaacacgtacgcgcgcgcgtgcgtgcgtgtgcacccacacatacggaaatacgcc

SEQ ID NO: 48900 - DNA, 536 bp, Mus musculus
  source 1..536: mol_type = other DNA
tggagcctcaaacagtctcttttgtatgagacaactattaatcaatcatgtttgctttaataaatccataatcttgaagcagcttagggaacttggaagtggccgctgccttgatggcttcaaaagcctgggcccgtcgctccgcggcgtggccgcactcctgctggcgacggatcattccttcgcttggaaagacacggtacgcggccgccggtgcttcccgatccactgcctgcccggaatgcggccgcggaggaggacgcggtcgctgagccccggacccgggaagcgagcaaccggcgtgccaagcttgcgcccacatcccgcggccgaatccagagcacgctcggcctctcgccggaagtgagtggccgggagccgactacactgcaggatatgggggtgggggctccccgaaaacccacctcgcgtacaccggcccgggacacgctcccctcggcgctccgcgtcccccgaccgatgcggcggcgcgctgcttccctagagttccgctctcgcgagagacgccttctgcg

SEQ ID NO: 48901 - DNA, 431 bp, Mus musculus
  source 1..431: mol_type = other DNA
gcaactttttaaaaaaatctcaggctgggccggatttccgagttcgaggccagcctggtctacaaagtgaggtccaggacagccagggctacacagagaaaaaaaaatctctagtacaagttagaaatgatgtttaattttattattaaaaaataaaacaagagattcatatacatatataaacatatttgtacttcaaagcccattcggtcttaatacagtccactggatgttgttaacaaacaggagaatttgtcctcgccgtccagcgctctcagcagccgggccgtctcgctgtccagcgtggtggccagaccccgcagcttacagtggaaactctggatggggttcatgctgagggccgccgagccgactgctgacctccagtttgaatcctgcgcaggcgcagaaggcgtctctcgcgagagcgg

SEQ ID NO: 48902 - DNA, 557 bp, Mus musculus
  source 1..557: mol_type = other DNA
aaaaacttttcctcatgagcagtggtccatgcacatccgcacatagaatgtaaataaatgaatgtactgtgttttaaaagaatgtatgaaattattcctaatgattgtacattatgatgtttcacattctaagattgcagtcataatctccagctgtaaatatttgaaaatcccactccaggaaagggctgtttctatattctgctttcatggtgtaaccttaaatgtggactccaaatcaaactgacgttgtatatgtcacaggagtcttatatttaagtatatataatatttttcttgctatgggcgggcctgagcagaagccccgccccaacttcaggccccgcctccttcggccgggtagccccaccccctacggggattgccaggcgcgggacgcaggatgcggggcaggggcggacccggtccaggcgccgggaggggcggagttgcagcgtcgcccttcacagctcgcagcgggatgagaggcgggcccggaggcgggcccgagggcggggtcaggggcggacccgggccaggcgcagggaggggcggag

SEQ ID NO: 48903 - DNA, 419 bp, Mus musculus
  source 1..419: mol_type = other DNA
taaataaatataaagggcatttagctataatgtaagggtgagcatgtacacatattctttccggtcagaaaacaacttataggactctcttctctgacttcttccactgaaccaactgtctcaagtgactcactataatcagacatgtgacatttggggcaaatataatatcgtcaatattttcagcccctgcatcaatgtgccccataggctttcccgagagagctaaagatgctatgtttaagtctatcgactgaaaaaccatgctaaatctaatttgattcctgtccaatatattccacccagaatcccacagtggtgacctgacctgttaggacagttaaccagctaactctttgccttggaaactgtcactggagggtgatgagctctcgcgagagcccaactctgttctcggg

SEQ ID NO: 48904 - DNA, 668 bp, Mus musculus
  source 1..668: mol_type = other DNA
tagaactaggtaacaaataaaaaactgcttttaattttaaaaaccctatctataaaaatcttagagagtacattcaaactttccaaggttttacaagaccgggtcatcttgaagtgacagctcaggtttaggaaaacttgtaacagctgtcattggaattgataaaatctgcaactatcagctgtttaacttttagagttgattgtggctcacaaccaggtgggcagaggcgtgccccagccacgcccacacgcatcccgggcggggcctcccgccgcctcctcccggaaccccccaggccctccaggctcgtgccaggcgcctagggtctcctgtgcctccgcccccctcccaggggtgcctgagggcggggccgggctgagccgtacctgcgccgacaccgttcgggagccctcgcgcgcggctgctttcacgcggccgtgatgccatgccgctcctgcgcctgccagggctaccccggccacagccgctgcgagagggccgcgagtcggcacagctcgtcggccggccgcgagcccgcgccgcagccttccgccccaggccgccagccaagcgccgcagcgccgccatctttgcggaagcgcccgagcgtcgcgccccgcccccgagaacagagttgggctctcgcgagagctcatcaccctcca

SEQ ID NO: 48905 - DNA, 534 bp, Mus musculus
  source 1..534: mol_type = other DNA
cgtgcgcttgcaaaagctgcaggctcattttaaagggcactcagcaccgaaggctgcagactcaggtggggactctgcccactttcgtgcctccacacacgtgcctggcggggcaccttcagctaggtttttccccttatttaaaaaaaagaaaaaataaatccaccagactgttggaaggagttaactcctgagtgaacccacctgacaacacttagactaggtcgtaaaaccaagtcctgttttttcagatgttgaacactggatgaagatagtctagattcttgaggcccagggtttcccccttggctcactactgaggctgggctcaaaagtgaacccagtcaattttccccacggccaccttaaggactgctacggagccgggtttctggagcaagccaaagggttcagggcagccagcttgatgcccgggcagcccgcttgatgcccggggcagctggagcccggtcctcccgcgctccgggccggcaggtgcgggctcagcccccggccccgcgtcgctctcgttcc

SEQ ID NO: 48906 - DNA, 441 bp, Mus musculus
  source 1..441: mol_type = other DNA
tatcacaagaatggtgaaaactcttgagctggggctccagagtccacagtgctctcagcaagagtgtcttctgagagcttcagaggatggtctatgatcacggtctggcctgatagcaataccagtacttcctgatactacctttgtcttagttactatcgagagacaccatgactaaggcaagctagtgaaaaaagcttttaatgggcttactccagagattgagcccatgaccatcatggtgggtagcatttccatctgatccacagatgtgatgcacagagaggtaattctagtcattctttgtgacatgaaaacccttttaaaaggcatgtaacctgactttagggctgctgcccaaagacccaggcacatggacctagcccatgtgttgttcagtgccatttgccatgagtgagctgacctgtgacataactgcca

SEQ ID NO: 48907 - DNA, 360 bp, Mus musculus
  source 1..360: mol_type = other DNA
tcagtctccttgctaaaatatcacaagaatggtcaactcttgagctgggctgcagagtccacagtgctctcagcaagagtgtcttctgagagcttcagaggatggtctatgaatttgtcttagttactagggaagcatgactaagacaagtcactgaagaacgttttttatgggcatggcagcaggcaggcaggcatgatgcttctagacattttttgtccaactacatgacatgaaaatcctttaaaaacggcatgtaacctggggctgctgccccaagacccaggcacatggacctagcccatgtgtctgctcagtgccatttgccatggcgtgagctgacctgtgacataactgcca

SEQ ID NO: 48908 - DNA, 425 bp, Mus musculus
  source 1..425: mol_type = other DNA
acagattttgtataaaatagggctcaatttctatattgcaataatttctaagtaaaatctgtttgttttttctttgagaaaggaaatggtgattctgacagcaatttaaggtatatatatatatatttaaaaatgtaatccacgttactatgtgctgacagtctgcttagtggtaaacagaaaacaaaggggatttgtactttgtctgccttcctcggaccgggcagagacacgtgtgagcgggaggaaggccacgctctgctgccatcctgggacgccttcgcctcggtcctcgcgggagccactacggcgcccctgcgctgcgccagcagcccggtgcagacagagggcgcgcgctgcgcggggcgctccggtgtcacgtgacgcgacccgcccacgtgaccggcggcccgggcgcttgtgct

SEQ ID NO: 48909 - DNA, 397 bp, Mus musculus
  source 1..397: mol_type = other DNA
tatgtagctctagatgtattggaactcactatatagatagagcaggctgatctcagactcagatatccacctcatataggtagccagctttttctgttggatactagcatgcgcatgtttataacaggtaagtctgctagtctgctagtatttaaccatactatttatagtacttatagtatttagcaatactatgctagtatttagcatacagctgtttctagaatgttgtactctgatttcaggaaaaggcctggttctgcaagttacagaagtcttttattaataatttaagaactcttgttaactttagcacttcttgcagcagagatgtcagctttggtggatgtaggaaagtggccaatcggtacctctgcgtcaacttgaaacctcctga

SEQ ID NO: 48910 - DNA, 324 bp, Mus musculus
  source 1..324: mol_type = other DNA
tgcccgggccttcccagggtgtggacacccaggcgctgctggcagttcaagggagctccgggtggtcccacaggttctaggagttctccatgacttcctaaggcagacgatgaaaagagtcagtctatggttctgagtcataaaccatacccccttctgagataaaatatcttttgcaggctccaggccccaggagcaggtaaaacttctatagacccttcagggtctctagggcgtctagccttggctcaaccaaggaccagacttttagagcactttcaaaatgacttctcagagttgaaaatgtgccagcacactgccctc

SEQ ID NO: 48911 - DNA, 236 bp, Mus musculus
  source 1..236: mol_type = other DNA
ttcccagggtgtggacacccaggcgctgctggcagttcaaggggagctccgggtggtcccacaggagcagagagaccttctatgagagattagacagtggctctgtaggcctatggttctgaatcattccccactggtgcccaggagcaggtaaagcttctatagacccttcagggtcctcagggcgctttattacatcacttttagagcacttttaaaatgacttctcagagttg

SEQ ID NO: 48912 - DNA, 358 bp, Mus musculus
  source 1..358: mol_type = other DNA
tgcccgggccttcccagggtgtggacacccaggcgctgctggcagttcaaggggagctccaggtggtcccacagagaccttctatgagagttctccatgactccctaaggcagatcccgatgaaaagagtcagtctatggttctgagtcattcggcctgagatgaaacatcttttgcggaatacctgggaaagctcaaggctgactgatggccataaactggtgcccaggagcaggtaaagcttctatagacccttcagggtctctaggtcttctagcctaccaaggaccacacttttagagcactttcaaaatgacttctcagagtggaaaatgtgccagcacactgccctcaactt

SEQ ID NO: 48913 - DNA, 362 bp, Mus musculus
  source 1..362: mol_type = other DNA
acacttatatgaggttcgtctgcgaatgaactttttagaattctattccctatatgttagtgtacatgaatgtttccctttgtcactgggactgaaagatctacatttctgtgtgctttgtagcccacgggtgctaaataaaaagtccttactggcacctgggtctaagacctattaattttttgtcctttaacgattgttccttaagtgactgctcgttgtggaggaaggcgcaggcctctgtgtgcagcagcagcatggggcaataggcagaaagcctccctgctcctcctaagttattttaggccctgatcacattggcagagtaaacttttcaaatgactattcagagttgaaaatct

SEQ ID NO: 48914 - DNA, 413 bp, Mus musculus
  source 1..413: mol_type = other DNA
agcagttaagagcactgactgctctttaatgacatctgatgccctctggtgtgtctaaagacagctacagtgtacttacataaaataataaataacgcttcagagttctattacattgtctccacagctacagatactctggagtaagatgactcagcagttaagagtgctgactgcttttccccacatggtggctcacaaccatctgatgctgtgtctgaagacagctacaatgtactcatataaataaaataaataaatcctgagctgactagaatgtcacaagttagtactgtaatgttgatcacccagcctgcctagacagtcttgaagctgcctgctcactcacagtggtgtccagagagcaccattggcgcaataactagccaccaattctagcttgataagtacaa

SEQ ID NO: 48915 - DNA, 355 bp, Mus musculus
  source 1..355: mol_type = other DNA
ttttttttttttgcaaacttttttttaaaatcaagtttataatgttaaaaatatgtaaagagaaatttacaaaacagaaagatccggtctgcctgagctacatgtatatggagcatgacaaacactagtttattggccctggcaattgaagttctctatcgacgaggccagtggtcgagacagcacagccagcctcctttaatcatgacaggggtcggcggtggggccagactcgaggagactccgggcgggcgagaagaatcccctgctagagcgctgcgccaccactccagcgaagtgcctcacttggctgccgaggccgaccaatcaggaggccgcgcgctccggccggcgc

SEQ ID NO: 48916 - DNA, 489 bp, Mus musculus
  source 1..489: mol_type = other DNA
ttatttaaatttggttctttgccagtctcaaactttcatctggccaaacatacaggcaacttcatttagatctaagtttcctttttacttggaggaaaaagaaactaaaaaaactaagataccactatctcgttggttctttgataggcttttaacgtgttcgtatgttaaacaacacaacataccaaatctaagactaaacataaattaatcctccactttggttttcatatgatctgtcaatcattcaagttcaactgataaataatttcatttgttcatggccagtgtggagcccccggccacccccgctactgagacagcgggttgaggcggcctggcaccccgcgcgccttgcactgtccgcaccagagtctgcagtcccgaggcggcttcacctcagcgggggagacatcagccccggagctccacacagtttccgcggccccgcggcgccggccggagcgcgcggcctcctgattggtcggc

SEQ ID NO: 48917 - DNA, 500 bp, Mus musculus
  source 1..500: mol_type = other DNA
gaatgttttaaatgttctcggcctttccagtcctcactgagaaagtgtaagagtgcttacatgggaaactttccattgaaatcgttgcataaaacattaagggctctagttgtacttgaaagcataatatactgaattcattgctgttttataaaagtacactgttaaaattgaattaaaaattctaaaggttcctaacagggaggtgcatcctccctgaggagccaacacatgacgaatcagttattattacatcaataagcagcttcctttacaattttaggcaagatgattcaggcagcttaatcatttgacaaaatcccatctaaattaagggagagaagttacatcaaatttttcttttgccaagaattaattttgctttgcaggcattcttgtaatgttacacaatatggtgtgtatctcacacccatgctagagagggagagaacttgtctgagagcaagcagagtggaaatttactgcagctctctgtgagt

SEQ ID NO: 48918 - DNA, 230 bp, Mus musculus
  source 1..230: mol_type = other DNA
ataaacaatagtggttaaagaaaaaccatgaattaatttaaaaatgagatttgtaatgatattatattttaaataaaaataaaactatttttacaatttttgttcaaatatccagtgggacagcctgtagtcacaagtgttgtacggtaagcgcgcacacgtacgctctatttatctgacggctgggttccgatctttctgcaaaaactctgacgtcacattaagcgccg

SEQ ID NO: 48919 - DNA, 436 bp, Mus musculus
  source 1..436: mol_type = other DNA
gaagagttttctctgtgaatattttactcaattacacacgtgataagagcagtaggtcctttaaaaatactcgttactttaatagcatcagcacctgctcagctgcttcaagagtgaaggctgcagctgcaaggagaaaagaaaactaataaaataatatagttaatttagtcagtgaccctattgactttgtgcagtgccatggcaccgggaggccaggcaccacagctcatatctgagtgatgactgagtcctctgtaacatggaaagtaagaattattctttggagagttgtcagagtaactcggaatgttggacgtcgaagatccgcacctggccactgccacacctttggtgaaggaagtcccctggcggagggaaagccctctcggcacgcatgcgcgcaggggagcctccagcccctctttaagtgagg

SEQ ID NO: 48920 - DNA, 489 bp, Mus musculus
  source 1..489: mol_type = other DNA
tgtgtgtgtacacacgtgagcacacagtgtagtatatactaaagcttgctgtcagttttatctcacctggaccagagctggagatcgcagtgggagacaagctctgtccacctggtgcgggactgatttcacagtggaagtactttcagcagtgatgacttcactttcaaggcgtggcctcggctcaggcagactaaagcagccctcctgccattgcccctgggccaacctggcaagcgcgggtaccacaagctacccgtgcagccagctcccctcgctctgggctgccagactcccaggagcactgggggggtccacccggcctcctgaaggtccagggcagcgtgaggtctccttgggcggggcctcacaggtccacggcggggcggggcccaggatggggcctcacaggttcagggcggggctgagtggggcggggcctgccgctgcggcggcggctgtggctacggtctagtctccaggggcagg

SEQ ID NO: 48921 - DNA, 489 bp, Mus musculus
  source 1..489: mol_type = other DNA
ctacctgatccggttgctgccttcttgtagcccgcagaagaacagcctccaggcccgaggctgcgagcaggctgcaagcggggaccagccgcgaaggatgctctggagagactggggccgcctatgcacctagcctgcccctggagactagaccgtagccacagccgccgccgcagcggcaggccccgccccactcagccccgccctgaacctgtgaggccccatcctgggccccgccccgccgtggacctgtgaggccccgcccaaggagacctcacgctgccctggaccttcaggaggccgggtggacccccccagtgctcctgggagtctggcagcccagagcgaggggagctggctgcacgggtagcttgtggtacccgcgcttgccaggttggcccaggggcaatggcaggagggctgctttagtctgcctgagccgaggccacgccttgaaagtgaagtcatcactgctgaaagtacttccac

SEQ ID NO: 48922 - DNA, 538 bp, Mus musculus
  source 1..538: mol_type = other DNA
ctgtagctgtcttcagacacaccagaagaggacatcagatcttacagatggttgtgagccaccatgtggtggaagagcagtcggtgctgagccagctctccagccagatgggaaggtcacagtgtcctgacctcagactcggaggcagaggagcctggcagtgtcacgccgccccgctgaaccctccgtgcaggaagcacaagcgtgcagtaccatggggtgctgaccggaagcgtgtgcgactttcgggtgcagcgacacccaaatgaaactcagacgtccccttggaggaatgtgaggtgacgaccaaggtcttctccaactctgacaggagcgaagccgcactccagggccttcattcaggaagtaaagcacgaaatcccgcgagactctccgggcacttcaggggcttagcgctttaagcgagtaggcggggcgcccaccttacctcattcccagggttccctgcgcggcgggcgcgcttctagtgcgttcggcgcgcgggcggtgtcgcgcatgcgttcgcctgtggctccgc

SEQ ID NO: 48923 - DNA, 448 bp, Mus musculus
  source 1..448: mol_type = other DNA
cagaaaagtttctaataagaatttaacagatgtggctcacaaccatccataatgagatctgatgtcttcttctgatgtgtctgaagacaactgcagtgtacttatttataacaataattaaatctttatatctttcaaattaaaaaaagacattcatgtagcatcttaaattaaagtgcagccttatctataagcctcaaacttaatactgataatcataatagaatttaatagttcattacagctccatgagtttctaaatgtaatttaacctggaatttagagcactggaaaattccttttggtcaggaaaaggaatatctttaaacctagaaaaagcttctcagccatgcatgtggcccagctagcatacgctctctatgggcgacactcagccgcctgcgcagtgccaccggcggcgggggtggctgacgctgccggctgcggg

SEQ ID NO: 48924 - DNA, 322 bp, Mus musculus
  source 1..322: mol_type = other DNA
tcccccctgtcctattgggaaagacgatcagaattccaacctaagttctcagtgtgctcagttgaccaatctgtgacttaagccccatgtcactggggtgggggaccaaaggaaaccctaggggtgggatccaaagcccataattatgaatttcatcacaaaaacctatgtggcacccaggatattatataagcccttggtgtgcgcttcagccgccgcagttgcagtagccacagcgcagcagcgagagccgctcgacagtggcctggcgcgagcctacggctgacgacagcggctgatcccactcggtttccatggagac

SEQ ID NO: 48925 - DNA, 456 bp, Mus musculus
  source 1..456: mol_type = other DNA
tgtggcccaggacagctaacctttatcagtgaccagggagatggcccaggtactgccaaaggggagggtcctgagtgcccagtcgcccctccttagcaacttgctctagtctagtgaagacagcagcttattttaccagctgcctttataaaacccttttttattaactcgttattcataaagtttaaaagacagtgacttcctgtctagaagagagcttatttgggaaatacagaaaagatttaaactgtttttacaacaaagcccatattttacctagtagtggatacaagtattactttcacaaagcatacacatacttgttatgtgtgtgtcttccagtttttacacatatattttttttaaacaaaagtcccttctttagtgactccataaattatagttagttaacactatagtagcatcataactcagatttttggccgggggctggag

SEQ ID NO: 48926 - DNA, 256 bp, Mus musculus
  source 1..256: mol_type = other DNA
gaagcttctaatatttagaataatcatgctggcatattgttgccattcaaattttaaaagaatgcacttgccttatgaattcctcagaaataaccacagcacattttggaagggttgtgtgtgtgtgtcacagttcccctctgtggtctcagttgagccaattgagagttcatagtcctgggaaaacagaaggtcaaagcatcttaaagctgagtttccatggacactcgtcctcttactagggagtaatcctcct

SEQ ID NO: 48927 - DNA, 217 bp, Mus musculus
  source 1..217: mol_type = other DNA
aatttgctctgcagaccaggctagcctcaaagtcacagaggttggaatttatttatttatttacttacttacttactttaactttattttactgtttggtatattagggtgctcagagctgcttcatgaaccaaaggccttttcctcccgactggaagtgccctgcagtattctgccttaaatgtgcagtgactgtaatcattaaaagcttctccct

SEQ ID NO: 48928 - DNA, 365 bp, Mus musculus
  source 1..365: mol_type = other DNA
atgatggtggtgaatctccaagatgcccagcttctactgggtcaggacatgtcacacaacagttctctaaattaggagcagaaggctctgcagaggcttaaaataataataataataataataataataataataataataaacccatgcctgttgcaggaaacacccttttaattcttcggctggcagaaacaattagaccgtatcaatagtttccaaagtcaaaatagatgataattctccaatagtttgggcatgcagacatggaagtgacttcaacaacttttggagaaccattgagtctcctctgagaatcaagaaagcatcaagaaagcatcttgagttctcaattcattcctggcaca

SEQ ID NO: 48929 - DNA, 271 bp, Mus musculus
  source 1..271: mol_type = other DNA
ttgccttagggaagctcttggcctgtattcctgtagcacagcgcagatctattttaatataaaatgggttacatcgaaccccttcggggaagccactaaggctgggcctgtgatcctagccctgggacaaggctggtcctgaacaaggaggaacaggtaccccaggctcagccttgaagggttatagccatagatgtggctaacatcttcctctgtcccagggcgctatgataccgtatttcctcagggactaactagaggcagttccagc

SEQ ID NO: 48930 - DNA, 414 bp, Mus musculus
  source 1..414: mol_type = other DNA
attaggaccccaaattttcactcaatgaaagtgacttttcaccaggaaaagacattttactaattcttaaagacttgtcgtttaaaacgtttgcctgtaacggcagcggcttgatgctgtctactggaacctgcaacgatccaggaccttacaggcccggagcacagaggcccagagcagtcctggtgtgtccctcccagccaagagacacactgcagggcaggctgactggcttctcccggagggatgcggcgcagcagcgctggcactaggcagcccagctggggcaccgcctgcgatccagccgctcagcccaggctggggaagcctgctctccagagctggggctcatgcgcagcaactgatcggcgatcagatacagtctgggcttgcgcccacacacatttttgggaa

SEQ ID NO: 48931 - DNA, 269 bp, Mus musculus
  source 1..269: mol_type = other DNA
tatcccctgggacaggagcctccaatcttctgaagcggcatcagattgcaactgtagaacattttacaacacacagcacaatctcatgtccacaatgacaatgaacaaaggcactgtgtatgctgtctttatggggctgaggaggcccataccaagccccttgttttaagccgtatgccttccataaaattaatctctggaattccacaacactgggtgtctgatatgctatctctttaatttaaaaaaagagagcagtgagctaggta

SEQ ID NO: 48932 - DNA, 496 bp, Mus musculus
  source 1..496: mol_type = other DNA
atagacaaaatcaatattttttcctatttgttgatatcccaatgcattcacttgtataggcttatctaatttaaaaatcaagtattgttatactgagtttcagtatttttctctaattgatgaaactgacccgttccaacagcgaaaggaaagcttgactaacctcctaatgatgaatcctgactatagtaattaatatcattttaaaagggttaactctaaaatggagtttttagtacatgagaatatttcaaataacaatcaggcgtttactattacaccaagtagctgctcttcagcagtcacttctgagtggagggctcgcccaagcatccttgcaatcgaagggcgctcctgggaggggcgtccggcgcagggcggtccctaagaagggggcgggtccgtcctttgccatcggagccgaggcggggcctgaggctcctccaagaacagtagcggcccttagggcgcgtcccgcagatcccagggctgcgca

SEQ ID NO: 48933 - DNA, 553 bp, Mus musculus
  source 1..553: mol_type = other DNA
ttagaatatttcaaataacaatcaggcgtttactattacaccaagtagctgctcttcagcagtcacttctgagtggagggctcgcccaagcatccttgcaatcgaagggcgctcctgggaggggcgtccggcgcagggcggtccctaagaagggggcgggtccgtcctttgccatcggagccgaggcggggcctgaggctcctccaagaacagtagcggcccttagggcgcgtcccgcagatcccagggctgcgcatgcctgcgggcgacgcctacatggccctttgcagccccgagcgcgcggcgcgctagggctcgctcctcctccgcagcggcgccttcctctgcccttctgcgggctgcggcagagcgctgcggcggtacaggcctctgccatgaggatccccgcctcagggccagtggcggacctctcggagcggcagggctgggcgtgagggaggcctggggagcccgccatgggggacaggtgacgagaccccgggcgggagggtggtgccgcccggccgcgcgcgaacccagctgaccgtccgtc

SEQ ID NO: 48934 - DNA, 517 bp, Mus musculus
  source 1..517: mol_type = other DNA
attattatattctgattctcaagagttctaagtgccctataaatataagattagttgaaactgtcctggtttaatttaaggcctgcagctgttcctgtaagagacgatttcaaattaaccgcatcccaaggtttgaatcctcttaattcatgccaccaggcagcatgaaaataactcaaaagattaatatgattcaaaaagttgatacattatgcctgataaaaattaaatgatctaattgtttttttaaacaaagacacgtcagcctcagatggttatgttcacataatttgttaaactgatgttatcatccttggggaaaaaagctgtcattttcatatgtaatgtttatgaatgcaagtttcttctcaaataacaaagtttctttcttaaaatggtgaaggaaagtgtttcaaagacagagcttttgtgactagatactttctgcagtgtggcttgtgtttggcacacccgagagtgccccaattgaagtcactgggtaaatttagattcactt

SEQ ID NO: 48935 - DNA, 302 bp, Mus musculus
  source 1..302: mol_type = other DNA
aaaatggagggctttgagggctcctagtcctaggcagactgcatgatgcttcccaccatgatgataatgggctgaatctctgaaatgtaagccagcttctattaaatgtttacctttataagagttgccttggtgtctcttctatggggaagtctccatccacactgaggtgagactagtgatccttatgcatgcatctgcaagataaataaataagaattacttcatacagaggaaatgaacattaaagagaatgttgtccatcatggttgtcatggttacatgggcaggtgaagcctgaa

SEQ ID NO: 48936 - DNA, 392 bp, Mus musculus
  source 1..392: mol_type = other DNA
gaagagcctctccctatgcggaggaaaaggctgaggtccaggtacacagacatgcacagggcctatggcctccatatgcatgcacatgtacatacatgtgaatatacacccacacaaacatgttcatgcacatgtacacatacaaacagttgttggacagacatctctgtcttttatgaatgcttatcagtcatgcacgcacaagatctgctcctttatgtacttattaattattgattaattcattttttgattctgacaagcttcacagttttgcaaatcaaagctgctgcccgtgctgggtggcctgcgcttcaggattcccagggctctgaacttgtgaagtccctcagacttccatcttgagacacacccccaatatgggaggatgt

SEQ ID NO: 48937 - DNA, 401 bp, Mus musculus
  source 1..401: mol_type = other DNA
attggacagctggtatttgtcagatcctgtaataggtgcccaggatcacacaccagtcacagcctctgctctgtaaagagataatttctacagatgttatctgccacaaataaaagtacaagaagtggctggaagaagttttttgaacttatgccatgccctctattgcaaagttgagattaactccaggttgccaggcaagtgctgtgcagctgaggcatggcccttgggatttaaaagcttataaccttgacagcccagctacgtagctagctgctcaaactgacaagacttggtaagcatctttagacccttttgtctcaatattgacaaaaatgaacctgggtccaggatccggcaatgggccggaaggccggcccctcggaggcccgcccacgaga

SEQ ID NO: 48938 - DNA, 430 bp, Mus musculus
  source 1..430: mol_type = other DNA
gtctgatcggaaagcaagcctgaagacctgagttcgattcccggatctccaaggtagggggaagaaaacctattataatgactttttaaaaagtcgtctgcttgcaagcgccgcacacccaaagaccgggtcctcggagtctgcgtggcaggatgcggagagccggagagttccgacggaaaactcccgggcggagccgccccaggcagctaccagtagcgcgccgacacagcacggagctactggtcagggctggagttccagactgccagccacagggcctaggggaggacgccgcagcacgcctgcgcacgccgccacgccgcccgggcccctgctcggctctctacagcgcctgttgacttgggctggccgctggccccgcccacctcccgacaccgccccgcccctccgggcggtcctcgctcct

SEQ ID NO: 48939 - DNA, 585 bp, Mus musculus
  source 1..585: mol_type = other DNA
ccaaaacctgttattgttccaatgagatactagaacacattttcttttttaatgagaatttactagttactgttttgatctgacagatttttgagaccaacaatgtctctgttctccacacacatcacactcacatgtatttgtggagtgctgctatttgaggagaccctaaagaagccaaaagcgcaaagcacgcgtggccgttctgggagcaaggtgcgcccccgaagctccgctccgcccaccaccccgcccagaggtggggcttcgagcccgcgctcagagagcgccgagccgaaagcgcgcgcacagccctcccggcatgcttctcgtcctctcacggcgtggctcagacccgcgcctggcatgctgggaactgtagtttccgccctccgccccgcttcagcggtggcggtaaaagcccctacgggtgagggcagggtcaccgcgacagccggcaggccagcgccctggccttctccggcgcgcgcctctcctcagcgccgcccccgcgccgcggccacctcgcgctccaggcgtcacggagcgcgcgctcctcccccttcgtcccctcccgctcgactc

SEQ ID NO: 48940 - DNA, 208 bp, Mus musculus
  source 1..208: mol_type = other DNA
tatagccctggctgtcctggaactcactttgtagaccaggctggcccccccaaactctgggattaaggcctgtgccactgtgcccagttgccacatttttggtgctgtaggaaagaacctgtttgttacaagatatttgattactggccaccctggtctacagagtttcacagagaaacccccccccatcttggtggtgaagttagcc

SEQ ID NO: 48941 - DNA, 380 bp, Mus musculus
  source 1..380: mol_type = other DNA
cgtgtcaagtggtatacataaacggttatttccaccttgtagaaaacctgttcgtaacgttctcgtgaggactaagttattggaaccgaggcctccaagcgggagtagacgtgctcgattttcatcctctgtaaccacggtctccgcataggaggtggaaatttttattgattgattgattgattgagatattttaaaaccagttaaaagttttctctgtatagccctggctgtcctggaactcactttgtagaccaggctggcctcgaactcagaaatccgcctgcctctgactcccgagtgcgatcgccgagcccgctgtttttgtttttgttgttcttgaaaaatgcaagtaacaacaacaacacctaggtggtgcg

SEQ ID NO: 48942 - DNA, 287 bp, Mus musculus
  source 1..287: mol_type = other DNA
agtgacctttgtccttgtgaatttttcactaaagtacacttaatgtgcataagtggcacattgttgcaaagtgtcacattaactgtataagccccagttcatacatctgctcattaagttagtcagccttatttttgtcatgaatagaataggctcttgaaagccaaatcttgacctcaaccttcaatttttggttgacatgatctagctattaaattactaagggggttctaaaaccagatagtgttttctataaattttatcatttcttcagtgctggacgatag

SEQ ID NO: 48943 - DNA, 709 bp, Mus musculus
  source 1..709: mol_type = other DNA
gaagttggaacttaacgtagtaaaaattttgtttcagctaagtcaaagtcctgtggtataaaatgatactcctttaaaggactagcctttttaactgcaggatttctgatatatccttttaggaaaccaaatagacctgttattgaactcacaataactattccaatattgagataaatcttgtgttcgtcttctaaatattttgctagtataaatttcttgaaactgagctcttacatgtttgttcttacatgtttcctttaacatgaaagatgtgctgctcttaataaggtaaaaaccaacttttgtagctatttcatgtgttaagcacattcaaaagttgttagtttaataaatgaggttcttaagttggtaaaatgacttgcttttctcgtttcatgactacaataaattacagcactgtattaagttttctgtacgcttttattaaacttactttttatttgaaagcctataaaattatgcacataccagtgttagatttttttcaaacatagattttatgtgttctactttttcctaaaaagccttttctgtaaattactattgaggtgctttttgtgcaggccatactgtgctgcctcaaaatacaaggacctgatcttctgaagagagtacctgtctttttattcatagctcctatgatagcaatgtcagcggtgcaatattggcgttaagattctccagt

SEQ ID NO: 48944 - DNA, 309 bp, Mus musculus
  source 1..309: mol_type = other DNA
aatacctacttcatagaggtgttcaatgcgtaccacattattttcttttggaaaagtaccctagtgacgtccaaaagattctccagttcagaatccaaaggctttcgcacacctcgaggtctggggtggagggagtcggggtgacatctgagcggccacccagggctcgaaggcgcactcggtggcttggagtttaacgaaattcatcactagtgtgtcaccggagtagtgtctccactgccgcaggaggcagggacagctgtggagccggcccgcgttcccggcatgccccggggcggcggggttggc

SEQ ID NO: 48945 - DNA, 659 bp, Mus musculus
  source 1..659: mol_type = other DNA
gcctaggctaggatgcctggggctttaagcagctgggaaagcgagaaggaagctagcgtgaagctagctgcacctgcggatccagagcgtccgccccgcgcttcccgcgcccagcgcttttgcctgggagctgctgcgagccacccccgcacccctcacgcccgttggccgggggagcgaggcctagcaagcggacgcctgcgggagccgccgcacgtagggggcacagggacttgtccaggccgtgggctccaacgcgcgcgctctctgcaagtagggcggtggcgctcccgacgcccgagcgagcgagcgaacggcacgctcggggccactccgcgcgcaaggctcgggtccgggagaaattccccccccccaccccccgtcgagtggtcagagtgcgggtccccaggtcgtgcacaccacccgggccggcgaccccagccaggagcaggggagcgccgcagggcggaggccgctgccacggaaccaggcgggcggcgcacagccccggggagctggttttcccgtggcagcgctcgggcccgggcgggggagcaggaggcccgggggcgggcggctggcgcgctgcgggccgaggggcgggggaggggccaccgctccgccttcttctttcaatgttgacgcaatctataaatagt

SEQ ID NO: 48946 - DNA, 350 bp, Mus musculus
  source 1..350: mol_type = other DNA
ttgcaaaaagtaagcagaaaaagaaagattaaaatcatccattctttccctctacttaaaggagacagccatgtttgatgtaattaaaaataggctcatctgagcagtgccaggcttgggtttcatgacaatcagtacccgtagggaaatttgcaaggccttgaaagctatttcaaggtgtttctgaaaatgctctccccctttgtgaggcatccttcatggaggaagggggcggggtatctggggggaagaaccagagctcagcatctggctggcagctttgattctgcctggcagtgcaagtgcgggtcaccacctgcgggccgggggcggggcgggccacacacgct

SEQ ID NO: 48947 - DNA, 273 bp, Mus musculus
  source 1..273: mol_type = other DNA
aggcatataatggccgactaggccatctgaacaagcttcctgatcggcagctggccttttctctatagccccgaggtgagcgccagccagggcggcatactttgaaggtcagtccccgctgggtgttaatactctaaagatttatcctaaataacaaattcgtatgttgaactccaaattataagcataatttgggttgtatctttaaaaaattaccttaactatcaaattctccaccagcagggcccgcgcagccaggcaggctggtggccc

SEQ ID NO: 48948 - DNA, 262 bp, Mus musculus
  source 1..262: mol_type = other DNA
atctcttgtaactctgatctcttgtaactcagagtggaatcaattattaacccatcctaagggatggctgggtttaacaacgtctcttcgtgttattttaagatagataacaaaagaatacattctctacagtactgctatctctgggcaagcccggggactccagactctttactcaccaggcgggttgcaagataaatactgcacgcccactggcactcacgctcgcgctcgtgcacacgcgcgcatcccgtgcacccgc

SEQ ID NO: 48949 - DNA, 524 bp, Mus musculus
  source 1..524: mol_type = other DNA
caggctgctgattcaatgctacattccccaaccaggcctagagccttggggcccagcaggcaatcaggagctagttcttggatgcacgaatagatggaatgaatgctttctctgggtactttgacagaagttaaatacatttcaatggtgaatttacatcaaaattcaagatttgaagagatttcatatgaaacatgaatatctatgattaaactttaaagtgaattgcgtcaagttaaagggaccccccatgggatctctctttcttaaattaatggatgaggccagctgtcttgctctaacctgattgaacacttgctgaaagttccagaggtacctggcacccagcaaaacccagagttatctcggtgctggtacaaccaggtcacaagcctggcatggctggctctgtccccgaggcataacagctgagatgcctcctggctccctgcagaacgtccaggctccaggaatttggaggcagacggcaattcacattctgctcctactcttttaaaaagggc

SEQ ID NO: 48950 - DNA, 374 bp, Mus musculus
  source 1..374: mol_type = other DNA
ccattttgttaagttaacaaccgtcttaatactttaataacttcactgggaaatttgctacagctgtcccaccgatcggtggcctgcaaacccgggctaggcaaggctgggccccgctgtcgcggaggggaaatgtcggccatgttgatcgtagcgcctccgccgccaggccgagcaggacccggaggggacggcggtgggccagaaactgccacctcgctgacgctcccgggctggggaggggtggctcctctgctggcagggtcccgggcacggagctgcgggccacgcacacgcagggccgtccctacatgggccaggcccagcagagcccgctcccagcgcccgcccgcccgcgcggtgggggaggggtc

SEQ ID NO: 48951 - DNA, 502 bp, Mus musculus
  source 1..502: mol_type = other DNA
acagtcattctatattatattgtgattgtatttattaactgtccgttgtcactggaaaagcaaaaatgttcaattgctatggacaaaaagacttaggttcaagtgtgagtcctttattcataatacaaagagaagattgataccatgatctctaaactccctcaaagaagcttgtatgagagtctctcggtggcagtgtgaccgaagtctgacgtcgaggatggagggccgtttctctacggccgacagcacagcgccctctccggtgtgttattgttaaaacttagcggtgagtcatctgcgcgcatgcaccccgcccccagagtctggagagggtggggctctgggcacgctgcggggcgcatgcgtcctgacagcactgcgggcctcggttacttacgggcggcggggcggaagtggctcctggactgacgcacgcgcattggctgctagtgcccatcctccggaagtgggttggccgccttgcgacagggccccgccc

SEQ ID NO: 48952 - DNA, 450 bp, Mus musculus
  source 1..450: mol_type = other DNA
gcgggtttcccaggatcccttttcacttttaaaacgagggcagtggattaggatttggaaggcccccctttcatttcttaatctagtctagtgccttaacacgatttctctgaccggctagggggattaataccaggtcatccccctccgggccgccccaaggcccggcctgctgcagccgcgtgggcctgcgcttctcaaatcgcgacgcagggccctcacccacaggttgggggcggcaaaaggccggccgccttggcctagggccgctgcccgccctccgcgcgccgacgcagtccccgccccaacccgcggtgcttccgcggcccttcccgaagcccgcctcccggctgcgggcttcgggccgcccgccgccccttgcgcgctggctctagcgtgcacccgctgccccgcctccgcgcgtgcaggggcggagcctacgtagcccct

SEQ ID NO: 48953 - DNA, 526 bp, Mus musculus
  source 1..526: mol_type = other DNA
acagtcattctatattatattgtgattgtatttattaactgtccgttgtcactggaaaagcaaaaatgttcaattgctatggacaaaaagacttaggttcaagtgtgagtcctttattcataatacaaagagaagattgataccatgatctctaaactccctcaaagaagcttgtatgagagtctctcggtggcagtgtgaccgaagtctgacgtcgaggatggagggccgtttctctacggccgacagcacagcgccctctccggtgtgttattgttaaaacttagcggtgagtcatctgcgcgcatgcaccccgcccccagagtctggagagggtggggctctgggcacgctgcggggcgcatgcgtcctgacagcactgcgggcctcggttacttacgggcggcggggcggaagtggctcctggactgacgcacgcgcattggctgctagtgcccatcctccggaagtgggttggccgccttgcgacagggccccgccccgccccgccccctgctccccgccc

SEQ ID NO: 48954 - DNA, 216 bp, Mus musculus
  source 1..216: mol_type = other DNA
aataaacccttcttcttaggtcatggtgtttttattacagtaatacaaaccctaagtgtcatgatgataatacaagagctggcttggtcaccagatcatcaggcctaggggttaagaacttttgagccccagggactgtcatgatcaaaagaatgttacataacttaagtattaatatagggtttctctgagtagccctggctgtcctggagcagg

SEQ ID NO: 48955 - DNA, 329 bp, Mus musculus
  source 1..329: mol_type = other DNA
taaaggcatgcaccattttggataccagaactgtattagatattttataattttcgaagtttcatcttttaaaaaagccaatgccaaatctcaagactttgagcaatatcatctatcttaacttaatttttttgtgatagttataagatatgtccttagatgcacagctctaaatatgagtttcaggttgtgctatagcactattgttgagaaagctatctttttttgaataagtctaatttactcttttgaaatacatcttaattattgaaatttatattatagtaaggttattctctgttggttaagctctgctagccaagaacaag

SEQ ID NO: 48956 - DNA, 481 bp, Mus musculus
  source 1..481: mol_type = other DNA
tgaaactaccgaagtatcgaagattagagcagctttcagacctaaactcacaactggtcaataactgactatgaaatgtcagtcacaattaagacatctgtatcttctgatgacagtaactgtcctgatgaactcacaacatctgtctccccacatctgagaagctatggacaacttcacatggccctggtaggtggaccatgctctaacaagatgtgtaacgtctaatcatacagttcttgccaattatcctaatctgattacaacactgctctcagcaaacaggtgtaattgttatatggcatgtaaaaaatttaatcatgaactgtgttttccaaaaaaggtagtaccactggattaaccatctggttctctattattaggttaatttgtcaccaaatttagaaaccctaaggtttggaaatactcccacaaaagcagttttccttctttgcaggttaagcttcactggtcaggagga

SEQ ID NO: 48957 - DNA, 302 bp, Mus musculus
  source 1..302: mol_type = other DNA
acttgagtttgtgcgcattcctgtacaaaggcacatacacttttttttttaatttaaagttataaagattgttatcaaggatatagacatacttcttagactttacatggaacaatttgtgttcactaggatttttagtatagaactcattcagttattcaaatagcagatcagcatgatgtcacatcaagggaatactttccctctgtaagtggagccttaactggcatgacacaggttgttagctgtatgacggtcatgtccattggaacaagggttcttgctactgaaaggttcaataa

SEQ ID NO: 48958 - DNA, 461 bp, Mus musculus
  source 1..461: mol_type = other DNA
agtgaaaatttcaaatttcaagagtttgacaagatctagtttaactccacacactaacagttatagttgtgtggtcctactatgtgttaccacatcacagtaggcagctactatcactggttaagatttaagcaagctgctaagtcatcaggagtgctgattcttatgtttcttaaacatttcctgaagtagaactgttcatgataggaggtttatcaagcttcctgtgcatacgcccattgcctggcacatgtctaagcacatgccattatcccacacggagctcttattttctaaaaagctttctcaggaagatgcagaggcttgcttttcaaatggggagcattcccatccgatttgaatgcatctgttaaatgggtgcattctgaagatacaacatttatactgaatccttcacaagcagctgatgagatgttgcgctgggctgctcagtgaagcaa

SEQ ID NO: 48959 - DNA, 423 bp, Mus musculus
  source 1..423: mol_type = other DNA
acagtgggggttcagtgaaaggagataacttcacaacgttgccctacacacactattttttaaataaactatacctgagttggagcaaccacatggtagctcacaaccatctacggcatatatgtaaatagaaagcttaaataaataaataaataaataaataaatatcttaaaaaataagtataccagcagaaatgcatatatatgcacatatatacacatatatacatatatatatatcctcatatcttcaaaagactaaataaagtcttcaaagagagtatgccttcaaagcacagtgtaatcaataaaactacactctacgggactacagtgtgtgggccacttgcatcagagtttgtattaatcattcattactgccccaaggagtgtgggcctaatggcactttctcagttcctgca

SEQ ID NO: 48960 - DNA, 323 bp, Mus musculus
  source 1..323: mol_type = other DNA
ggtggtggaagcaaaaactaagggttggccttcctacccttgtggccatgttgagggaactccagagctttcaaaagctcgcacagtccgacagattgcacttccattttctcaaactatgaagattgaaaagggtggaacaactgtgtgtgcgcgcgcgcgtgtgcgtgtgtttacacatgcagatatgtgctgatgcatgcatcagatgtacagttcagagctacattcagtccactcaaactttataggccttgaatcacttagctgttactagacggtctaagggctaagcaaagtatcatgtcattagagtcttatta

SEQ ID NO: 48961 - DNA, 391 bp, Mus musculus
  source 1..391: mol_type = other DNA
tttttgtttggactttttaccctaaaataagcagccagtttctacctgttgtcagcagctgggacagctggccttggacagatggccatggaagcctggctacaagataccatgctgacatgaggccattcctatattacaggatagaatgacctgtcagatcaactaggtcagccagcttctcactggctagcttaccacgcctggcaggagttctgaatttcataacatgcaaactagggatcgaacccagggctgggctttctgggctacaatcccagccctctgagcttcagaatataaggccaggaggctcctccaccttccagggtacctgcagaggtcctcacgtgacgaatcagcccccagcggagggcggagctgcgcgggt

SEQ ID NO: 48962 - DNA, 460 bp, Mus musculus
  source 1..460: mol_type = other DNA
ccaggcaaaacaagaaccaaaaaacaagtttgggtttaggtttgggatttggttggtttcaaacttgatatgtagccaaggagaactcaagatctctcctgcctgagtgccttttaagtgctgagcttaaaacatgtataccaccacacctttaggtcctagttggtctggctggccagcctcccaaatcctgggattccgcatttccctactgggaaatgactgcacagcaatgccttcctcatcatttttaaaattcaggaagtgaagtcacctgcaagtctgtgacttggtcatagtcacttaggtaactgtgatggaatgtgacctagaattcaatctcctggaggtgactgatcctcagtgaaatagaaagaattcttctacaagactggagggctctttccagaaccagtgttttataaaagctgagtgggttgatgctaagttagtatccaca

SEQ ID NO: 48963 - DNA, 388 bp, Mus musculus
  source 1..388: mol_type = other DNA
aatgtaataaaaatacattatataagtgtatgaagacttcataataaaacttatgtatcatttatgctagtaactttttaagaactgggagggagcccttcctcgctccttgcaagtaagtcctggttcaactagaacatcgagaggttgtgcgctgtcccgcttggagtttcccggggctcagcaaagccccggtactaggataaagctctcaagcctttcgcggaactcgctcgctgccagcctacgacacgcaggaacccactccgcgcgtcctagcctggaggcgcgagcggcgcggccggttgaggagggcgggaggtgggcgggacgtccggcgctggccccgcctcctcgccctgcccactccccggcgtctaaacacagg

SEQ ID NO: 48964 - DNA, 378 bp, Mus musculus
  source 1..378: mol_type = other DNA
aggctttgtctcgcctgagccactcaagacctttaccagtccactctttcccaggcaagcctgggagaggaaacgttatttcccagagaacttccagtggtcaccccgggaaggagaccgcaccgaagctcctcatcaggccccacccacctccaagaccagctcggcccgggggaggagcccttgagtccaggaagtagcttccggtcccctccggggaggagccagcggaaccccagctaccgggctacggaccccgcctccccgccctggtctggaaggcgcaggtggatggctgcgactgcttcccgggacccacctggggctgcgtcagttttcacagaaaaattaagcagtccccttcggaagggttaggaa

SEQ ID NO: 48965 - DNA, 442 bp, Mus musculus
  source 1..442: mol_type = other DNA
atctgcagccgcggtaatagggccctgtgattggacctgtctgagggactcagctccactgcgccagggcctacaggcaccaccctagggaaggaacagtccgtataaatataattgcagtctccaccgcactgaccttaagggccagttcaggtcaagggccccgtagatctgaggctagcaaggcatcccgggtgacccagtgccccaccggcgaccatgagcctaccagccccgccccttgaacagggcgctggacgtgggggctgcactgagggcagaacggagcgcccggcactgagtgctttccttccccgagagttccgcgcgcatggcctgcgggcgggcgccgggcggaggtgctgccgggtccgggctcccccgcccccgcccttgccaggcgatcgctacgcgggggcccggggaaccgcgccgggagcag

SEQ ID NO: 48966 - DNA, 359 bp, Mus musculus
  source 1..359: mol_type = other DNA
tggatccatattcagggactgtttcaaggaccccggaagaggttccgagtcaccaactccacaggggccatggggcagtggagatccacatgaaattcctgctcagggaaggaataattccaattctcttcctatgctaagaggccactggttatcacagtaggctgatggggaagccacctctctgagtttggggtacctcactcaactgtgccataggctaggccataggaggagaccctcctcccctctggcctgtaggcagggaggagcattctcccagtaaatgatgatgcagtccttctgagtgaccttgggcagactcggcagaacctccggactcgctgaattaatgaatc

SEQ ID NO: 48967 - DNA, 287 bp, Mus musculus
  source 1..287: mol_type = other DNA
ggtagtaacttctgagatgggccccactgcaaagagcttctgatagctctttcctacaaggaagatagaagaccgatgatctactcgatcaagggtccatgatgtcttctgggccagcaggtcctccggaaaggatataaccatggtctgagttttcactgacaggtaaagtgatcagttgaaagggatttgtgtgtactgagcatcaattctatacagtccagcagacggaaccctctgaaaaagcatcatgaccagcctggctgaaggtcaggtgcccatgaact

SEQ ID NO: 48968 - DNA, 443 bp, Mus musculus
  source 1..443: mol_type = other DNA
tgaaggtgactctcttggaaagacccttctacccttagggttttagggaggtaagtgctagcagctccagatgccaacagctctaggtgctcacggagcaggattaggacagatgcagctgctgcagttcccaagtgcaggtggttgagccctgcaatggtgtggcacgcgagcgcgcgagcgcgcaggtcagtgccagttacttggtggctgctgctgggatcaggaaccccgaactgctgacagtggcaaagccacgttgctttgctttgatcttaatgggaaaaaaaagttttggccttgcacggggagggagaatcgggggtctttaggacccgggtgcactcggaccagcggtgccgggaggccgacctgccgcggcttgaatgggaggcgggcggcggcgccgagaggctggcggcggactagctctacggtcgcca

SEQ ID NO: 48969 - DNA, 331 bp, Mus musculus
  source 1..331: mol_type = other DNA
cctagcttgtgtcttgttgacaaaaaattaacgggtttacctaatagtcacaaggatgttagagccggagataattttggctcccaatttccaggtagtgggaacctggcaaataaaatttttgctcgagcaggccagctacctccagatgggagccttcccaggaaccagaaacgactaagttcctagttcttggcggatttccagctgtggcttgcaagtcccaaattctaaccccagtcaaggggtgtggtagccacaaggtcagctccgtccgagatgtaggtgtgggcttcccacaggcacggctcccgcggcggcgaggcgggtc

SEQ ID NO: 48970 - DNA, 171 bp, Mus musculus
  source 1..171: mol_type = other DNA
ggccggcccattggacttgcaaactttatatgccccagtacctctgtcattgcagtgtccgtgagcagttcagctagactgtaatataccaaggtcttgatttcaggaacatctctgaagacactagagtcctttcgggcgctctcaaagagtctaaagcaaggaaggagt

SEQ ID NO: 48971 - DNA, 521 bp, Mus musculus
  source 1..521: mol_type = other DNA
aggtctttagagagttttaaaatcacgctaaaacaaacgcccatttagttcttgctacaacaggaaagaggcaaccaggctgatttctagctaaattttgcctagaattttcttgagggaaagttggaaactttattacaaaatatgtgagaatcagtaagtttgtggactcttattgacttatgtcattatttttagagcccctcaaaataaggaagtgacaagtaatcacctgcaaggtcccgcccctctgcccgcagccgggagggtgttagggggcgtttctccaaaggcagaggaacccagcgggattctgaaacgccgaggggtggggacggggagccctggcggggagaaccccccggccccccgcccagcagctgaggcacaggagggcggccatcttggccggtagggtagggccaggaggctgcgggcgccgtgcgattggggggctcgcccggaagtgacgccgcccgcccggaagcggagggggttccctggcccactccccccgttcg

SEQ ID NO: 48972 - DNA, 199 bp, Mus musculus
  source 1..199: mol_type = other DNA
aaggcacgtgcctgggtcccacccacggaggtgtgaagcttccagaagttctgcaaggaagcgggcaagaaggacatcacaccgtttgtgacctccctgtgacctcccagggttggacccatccctacgggaggcctgtgacagtgagtgtctgtgaaatccggctaaggcttttatgggggttcactgagccccatgc

SEQ ID NO: 48973 - DNA, 96 bp, Mus musculus
  source 1..96: mol_type = other DNA
aaacgtgacagtcatgcctgattctgtgaccttcctaagggatttaagtctgtcagcatcccacaatgggcagaggtagaactccagagttaaact

SEQ ID NO: 48974 - DNA, 426 bp, Mus musculus
  source 1..426: mol_type = other DNA
ttcggcagttcttgaatgcctactgtgtgtaggcgctgatgtaaccgccaaagcagccgcggcgtgcagactcagactgccggggtcagcggcaggctggggcgagatgacccaagccatgggtgtgatctgttcacaacaccagcgcggagggcagcccaacaacggaacaggggctggacctgactcctgcgccaagcagtggtgacttcgagccgtgggcgcgctcctcctggccctgcagcacctgcaccggagcgggatcggggcaggctcgggaggcggaggggcggacaggggcgggcaccggggcaggctcggcccctccctccccctgccggcaggtcgcagcggggacgccgcggcggggcagccgggaggggccgcgccgccccagagagtcattggcggacccggtggcccgaa

SEQ ID NO: 48975 - DNA, 275 bp, Mus musculus
  source 1..275: mol_type = other DNA
cctttttaaaaatacattccagagccagaaaatgccccacaggcttgcctattggtcaatctgatggacacaaccttagcttggtagttgtcccttgggttcccaggggctaccagggaaggggaatccaggagaaagcctgactcctcgcttcgtgcacagcaattgggggtgtgtgtgtgtgtgtgtgtgtgtttatacaagcacacacgctcgttcatgcacataaacacagccttctttgccagggttccgggaacccagtaagtcccagt

SEQ ID NO: 48976 - DNA, 206 bp, Mus musculus
  source 1..206: mol_type = other DNA
ttcaggtggttctctccgctgagcagagtatgaggtgcaggtcaaacttttgcatgtccccacaggtgtggtcaacagacagccacacatttaggatgggatttccaaccttaataggttgtttccatgatgatcaccagagctgtggccactgctagggctggagttgtgaggccgagggccagaagccatttgtgcaactgcac

SEQ ID NO: 48977 - DNA, 451 bp, Mus musculus
  source 1..451: mol_type = other DNA
tttcccatcacaaagctttttgtaagagtagaaattgaatctgagtttgaaacagtgttgacaatgtgaaacatagcacatgtgacatgttgaggccagactgtgtggaactgtgtgagctcagtctgtgagtctcgtggctctgctcaagaatctgcttttccacccactgggacatgaagagctgtttatgtcagggttcttctgaggaacataactaatagaatgactacatatgtatcaaaaatgggatttggatccacttatatgagagctactttttctacaagaattcctgtctaaatgctcatctagtctggcagtcaatttgccagactcacctcccctcaaaagggaagcctgaaacttagggactcaagaggagccttcatgactttatatgagttctcaacacagccattatgacatcggcagcctggccagcttaggg

SEQ ID NO: 48978 - DNA, 252 bp, Mus musculus
  source 1..252: mol_type = other DNA
tgtgttgcaataatgcacaagcaatgatgtgagtcacccacgtggcccccacaggactgtccttacttttagatcaaagacacttcctttagtctgagaagcagtctcatttagcatgggtccctgcttcgggaccaaacagtctgggctgctcagctctgtctcagagtcgcaactgggttgagaacttctgacctagagcttctgatccaggaagtctacctatgaaatgtcaaataaccatcttgacat

SEQ ID NO: 48979 - DNA, 384 bp, Mus musculus
  source 1..384: mol_type = other DNA
tgtatatgtatatgtatatgtgtatgtatgtgtatatgtgtatatgtgtgtatatgcatgtatgtatgtgtaaatgcgtgtgtgcatgtgtatatgtgtatgtgtatatatgtgtatgcatgtgtgtgaatgcatgtgtatgcatgtgtgtgaatgcatgtgtatgcatgtgtgtgaatgcatgtgtatgcatgtgtattctttttattaaaaaccatgtatttaattattttatgtgtatgatctagagtttgaactccagcctttgcacttgcgaggcatataaaggcacatgaaacttttgagacccaatttcagactaggtattcccaagtcactctgtcaactgtgatgtcaccaggtcaggctctgccatgcacttgt

SEQ ID NO: 48980 - DNA, 351 bp, Mus musculus
  source 1..351: mol_type = other DNA
gaaccaacagcccagcttttggtctctaaaacagcacaccatcacaggggatactgatgccctttgcttgagtgatgtaatatattagacttgacattagatcattcagaaggttttcagcatgctaggaaactctaatacaaatttctcagatacaaatttctctctctctctctctcacacacacacacacacacacacacacacacacagagagagagagagagagtaaaggacaggtggtataagaataccagtactatccctgggaagtttcctttggaactagttcccgggtgattggcagcaacaggcctgttgagatcacaatgggcctgggtgggccaccct

SEQ ID NO: 48981 - DNA, 334 bp, Mus musculus
  source 1..334: mol_type = other DNA
cagattgcctaagagttcccagagctcagagaatatctggttgcatcctcccaggtgggctcaataggggttccacccgtccccagggcctggggctgatctctgctgggagatgagcggggatacctgcctcaacccgtgggtccccaccctttaacgggggtcacctgagatcacctattgttggacaaatatgagactctaagtcatatctctggtgacataagctctctcccacctgtgtcatctgatttatttgacatacctcagtcctggaggtctcaggaggccacctgctgcttagggtggcccacccaggcccattgtgatctca

SEQ ID NO: 48982 - DNA, 373 bp, Mus musculus
  source 1..373: mol_type = other DNA
tgatgacatgaaagactgatgtctaccatcaccaagatcgttattgatttaatgtatcattcattttgatatatcttgtatcaaagtctctattttactcaaaaatgcaagtatcatgttaaaaatggtaacatgttaatacttaaatcttcacattttaaatggtgtagatctagagaggtggctatggctcccctcttagacctaggaaggaacagtgtatgatcctaagtcatggtaggatcatgtacattgattaaaactacctggcaggcatccccaggatctgtattctctcctttttcacctgagccagaggagaagcaaaagaatggccctgatgtgggagagagataggtatctcgaagactgt

SEQ ID NO: 48983 - DNA, 339 bp, Mus musculus
  source 1..339: mol_type = other DNA
gacttggcagagctcagctgtttccctgcttgagcttcagaaagaaaaccggaaaactcacaactttttggttttcaaacttagaaagcttttgaatttagttaccagcattcagggggaaacaatgtatttgatttaattcttttggaatgtatgattgtctaattagagagaatcgtaactttctacaaaataaactttctcatcaatacaaacctgatttcagatcaaaccagagatcttcggagttatgtttaagatttttaatgcaacctggccagggagtctgagtcaaatgtttgagaaagcgatctcttaaagccacagctttgatttctc

SEQ ID NO: 48984 - DNA, 416 bp, Mus musculus
  source 1..416: mol_type = other DNA
cttcaagcctggttttacattataagacaaacaccttaatctgtttaacgttgtgtgtctggcaacattctatgcagtacactaatcctagtccttatattagcttagcttcaaagcttcctaaagattaaggctagagattcagtttaggaatattctctcataatttctgattaacttcattcacataaagcgtttaacaatgtatttgtgcctacattgttctgaagaatgtatttatacatttatacacgtacacacactatatgtttatatttcatcgatgtgacttatcaagatggttccgatagaaatagacaaatttcctagctgtcccgcacccggaaccctggctgcggaggtggagaaacggctcccgcggtggcgcccagccagcatcaatttggcccgcgcgg

SEQ ID NO: 48985 - DNA, 438 bp, Mus musculus
  source 1..438: mol_type = other DNA
tccacgtccgcaggacgggtggctggacgtgtagacgcactcggacgtccatctggccccggcgggcgagggcgggcgggagggcgcgggcaggggaggagcgcgcgcacgcaactagaggcgcgagcacgcgcgcccgctctccttcactttcaccttggtgggggcgacaagagactatggtcctccatcccccccagcactgtcctgcccagacgccagcctagggaggggtgaggaggaggctgcactggcgctcgggtcgccgcaccgccccgcagcctcgcgctcccagcctggctgagctacagcccggcaattcgggctgagagccccccgagtccacccagaggactttggcagggtctggggcgggcgtgtgggtgcggtgaaagcacccacttctgtgggggtgcgaatcgccacctccggccttgg

SEQ ID NO: 48986 - DNA, 244 bp, Mus musculus
  source 1..244: mol_type = other DNA
agccccccgagtccacccagaggactttggcagggtctggggcgggcgtgtgggtgcggtgaaagcacccacttctgtgggggtgcgaatcgccacctccggccttggttagctgaataatccgttaaaggaataataatttttaaaaagcgcactcgacgcgagttcacgcgcagggctggatttccaagctgcactgcaaagggtgcagccttcttctgcacgcgtgctctggttcaccaga

SEQ ID NO: 48987 - DNA, 284 bp, Mus musculus
  source 1..284: mol_type = other DNA
ggggtaattaacacgggggaggcacccctccgtctcctttgcaggaaaatgcggtggtccttagctcagtcagtgcgcacgcacacgcacgcgttcctcaggagaaaggcctctctctccgcggaccttgatttaaatgtccatacaattaaggcacgaccttgggtccacgagggcctccagcacacgccctgggcagatctcagcgctgcagctgcaggcgcccacagtatggtggtggcggcggcggcggcggcggcagaaaattgcccctcagctctggg

SEQ ID NO: 48988 - DNA, 235 bp, Mus musculus
  source 1..235: mol_type = other DNA
ccgcagcagctctgccctgcggcacgcccggccaggctacacccgggccctgcccaggcagcagtagctgggcccctgcttccggggtaattaacacgggggaggcacccctccgtctcctttgcaggaaaatgcggtggtccttagctcagtcagtgcgcacgcacacgcacgcgttcctcaggagaaaggcctctctctccgcggaccttgatttaaatgtccatacaattaa

SEQ ID NO: 48989 - DNA, 180 bp, Mus musculus
  source 1..180: mol_type = other DNA
aatgttctggcttgctagccagataactgaattccatcctgtcttttgacacatgcatgtgtacacgctatagaccaaataaactatctctacttttattatctcaaaaaataataaaaggaagagcggcgcgcgaattttcccgccaggctgccccgggacgcaccggtccagcccccg

SEQ ID NO: 48990 - DNA, 357 bp, Mus musculus
  source 1..357: mol_type = other DNA
ttagcccaagggtgaagaaatgaagacctcctgacagatgacctccctccgtgataaatcatggtggaggcgacagactccaaagatatatagcattcattacctttgaaactcaccagtttcataaaagcccagctcccctcctccctgtgggaaggcgtatgggcgcagtgcctgctggaagctgtagttccctagggcctcagacccaggagcaggtatcaatatggcggttgtcagccagacaaagacagtcaggagactgggagataggggcctcccctcccccctaggctcttcctgcgcgggcctggagccctcctcagcccctcccgcagggcgccccgcggtgaagat

SEQ ID NO: 48991 - DNA, 317 bp, Mus musculus
  source 1..317: mol_type = other DNA
ttcttgtaattcgaactgcagttaggagtaacaggacatttagacctttctgttcagatcggaagatgagaaacatgaccaaaccaaagttttggagcctatctttagcccaagggtgaagaaatgaagacctcctgacagatgacctccctccgtgataaatcatggtggaggcgacagactccaaagatatatagcattcattacctttgaaactcaccagtttcataaaagcccagctcccctcctccctgtgggaaggcgtatgggcgcagtgcctgctggaagctgtagttccctagggcctcagacccagg

SEQ ID NO: 48992 - DNA, 390 bp, Mus musculus
  source 1..390: mol_type = other DNA
cttccgccggtccagaccagagagaagttgggaagccatcgacgcctctccgacatttttttttccttaaagtaatgagagaagtgaggaactgagagttctctgcaccctgctcagccccctccccagcgtcccagtgcaaggctgagggagggaggaggggatcttcaccgcggggcgccctgcgggaggggctgaggagggctccaggcccgcgcaggaagagcctaggggggaggggaggcccctatctcccagtctcctgactgtctttgtctggctgacaaccgccatattgatacctgctcctgggtctgaggccctagggaactacagcttccagcaggcactgcgcccatacgccttcccacagggaggaggggagctggg

SEQ ID NO: 48993 - DNA, 343 bp, Mus musculus
  source 1..343: mol_type = other DNA
cgacatttttttttccttaaagtaatgagagaagtgaggaactgagagttctctgcaccctgctcagccccctccccagcgtcccagtgcaaggctgagggagggaggaggggatcttcaccgcggggcgccctgcgggaggggctgaggagggctccaggcccgcgcaggaagagcctaggggggaggggaggcccctatctcccagtctcctgactgtctttgtctggctgacaaccgccatattgatacctgctcctgggtctgaggccctagggaactacagcttccagcaggcactgcgcccatacgccttcccacagggaggaggggagctgggctt

SEQ ID NO: 48994 - DNA, 442 bp, Mus musculus
  source 1..442: mol_type = other DNA
tctggggtgcagttctccttaaagactttaaactatactacaattgttaattttaatagatgagtttgaactgttttctaaattaactcgtgctacttttaaaatacagagcctggctttaaagtatttaaaagatactccttttagtaacttgcaaaactaaatatttaaaatgctagcacgatcactggcacccagcctgcgcctgggatccaggagggcagagcccaccgcccccctccgcctgtgccttcggacgcgtccggaaagtcacgaatgtctctgcgctttcctcgctcggcagacgcaggttcggccgtttccggcccatcttcggcaagttccgccggcgcgggtcggaaatggccgccggccggcagggggagtggaggatccggccggcagggggagggaggatccggcgcggcctgggaggcgcgca

SEQ ID NO: 48995 - DNA, 316 bp, Mus musculus
  source 1..316: mol_type = other DNA
aatgttttaccaacagaactcatatgttctcaccgtagccatttataaacataagggttaattgaatacaggctcttccattaaaatgctgtgtgactaagtaagaaaataaaattgtgtttagatgacctctaaagaaatctttcacctgcttcgccgcagcgttgcaacagacaccgtgggtttggatgaatgcctccagcgctgggaaccaccaaaccgacgcgcggcgctcaagacgtacgaagccggtcagcgctgcacagccaggagctggagctgaccgtagcgcgcatgcgcggcacgtgcgcgcgca

SEQ ID NO: 48996 - DNA, 266 bp, Mus musculus
  source 1..266: mol_type = other DNA
tggctagtctccaactccttgtagcaaagtgctaggattgcaggattgagggtgctcaatacatttagctaattaaatgtgactggatcttaaaacctaaatacagttattcttatagggcagtagcggagctcccaccagagcaacacaactgagcatgctcggtctgttttggaacacaaacgcagcaagtcttgaagttttcaaggctgctggtttcaggattggatacagcttcctccaagaattttatcaagatgttgcca

SEQ ID NO: 48997 - DNA, 445 bp, Mus musculus
  source 1..445: mol_type = other DNA
tactcattaaatttgattgtaacaaccggtattgtttacacaagggctgaaggctaatagttaactttctcctatttaattccagaccgcctcccgctacccggcctcgggtccctgtcgccctcgccaagctcctgtccctggcgcctcttcctttcccgccctggggcgcgctggaaaaacaacagccacttattgagcgcccactgtgtaccgccaagcagggtgtgtggagcgcgcgcgcgcacgtccggggctggggctgggggcgcgcgagtcgtgcgcgcgcgtggccgggggtgtgtccctgcgtctggctggctcgcgggcggactggctgcgagcggctcggcgcgctcccttcccgggcgggggaatccgggccgggttgtggccgcggccgcgtacgtgagcgcagtcaggccggccaggtgggcgcgaaggc

SEQ ID NO: 48998 - DNA, 315 bp, Mus musculus
  source 1..315: mol_type = other DNA
gaattcctacaaggacgaacaggtgcttgctctcctcagatgatgaaagccttgcattctggaatgtttcaaatcttaggaaaatgaacactctgagcactgggactccagctgcctgggtgccacctgtccgcaggccactccctgccggcatcttcagcagcctgcaacatcctaaggtgcagcggcagcttggaaacctcccagattgggagttggtgcacccattgcccttgccaccccaatggggtgggagctgggcgtgagttccccctccctcctggcctgatcctcactcctcaggcggagaggtta

SEQ ID NO: 48999 - DNA, 292 bp, Mus musculus
  source 1..292: mol_type = other DNA
tcacactgaaggtttaatagattcttgaaataggcacttagacaagcaactaagtgcaagataaatcctgcctatataaggactattattcgtcagggctgcaccttggagcactgacccaggactgtttaaacaacattgttggctatactagcgacaagtgaagttgtcaaaggccaggcttttgcttaaggtcccagcttcttggagaagcgtctaaacccctcccagtctcagagagctgggagctgccacctagacagggcggggctccgcgctccgccttctggct

SEQ ID NO: 49000 - DNA, 257 bp, Mus musculus
  source 1..257: mol_type = other DNA
actctgagcactgggactccagctgcctgggtgccacctgtccgcaggccactccctgccggcatcttcagcagcctgcaacatcctaaggtgcagcggcagcttggaaacctcccagattgggagttggtgcacccattgcccttgccaccccaatggggtgggagctgggcgtgagttccccctccctcctggcctgatcctcactcctcaggcggagaggttagctggccatcctcacagtggctctgaaagcg

SEQ ID NO: 49001 - DNA, 532 bp, Mus musculus
  source 1..532: mol_type = other DNA
agtagacaaatgagtgtgttaatgtatataaacacatgaatacatacgtgtcatgccactgtacttctgtcttcataaagaagatgtcccagactggttgaatttctttaaccgtttgaagaggtctaaacttaattcatttttcttgtagagaacacagtagattatgttatgcagtgggcactcaagtgcagatggtgctctgaaaatatttgttaagtagactgtggtaattccaagaattaacaaaactgggcgagataagagcttgctgccagagcctggccttctgatttagatctcaggaatctatcccatgtgggtagcagacagcaataattttttaagttagcaaaatttcaaaatattctatatttattctcagcctcaaataatgaaaatctacacatttctaattagtgttttaaggacacatatatctgcaataaaactttttgtaatttgccttcaaaacagatatatattttgtttttccgccagcatcaagatttcttcttttaggactaaatca

SEQ ID NO: 49002 - DNA, 307 bp, Mus musculus
  source 1..307: mol_type = other DNA
gtgtgtacatgtgtacaagtagttcccttgctggtctggaactcaccaaacaagctagctcctagtgtatctcctttttaaaaaaaaaaaaaacaaggtaattgtttgtgttgaggtgtccagtcagacttccaaccagagtccacagacacaggaaatgccaaatttgctgaatgaattgagtgggtgtgtcacaaatttctcagaagctgtccaaaaagtattttgagcaaggcctttaacacagtccaaactccctctagaagttgcttttagaacttttttttttttttaaataaagactgga

SEQ ID NO: 49003 - DNA, 447 bp, Mus musculus
  source 1..447: mol_type = other DNA
aaccaagtcaaacctagtgtggaattttgtaaatttatagcaagaggttctgaacttcagaagtttggtatttgttcagtcttgaaggagagctctgggtagtaacagtaacaattcatttgagatcatctcaggcttagatagggtttgatgaacattacctaactctattctgactagtttggtcaagtcaagaatgagtttattttgctcttccgaatggtggctcactatgtaatgagatctgatgtctgtgtctaaagacagctacagtgtacttacgtataataataaataaatcttttaaaaaaattggttcttactgagtgcctcctgaggaaatggttacagggacccttaaccatgcatgaaaaaggcagtttctgcatagcaaataaagtctgcccttagtattttttagcggaatctgacaggacggcgttgtga

SEQ ID NO: 49004 - DNA, 457 bp, Mus musculus
  source 1..457: mol_type = other DNA
tgtctgagacttctagacactaataactccttaaaagcctgtgagtgttttaagaacatttctgcgttttcattttctgtaaatgaggaatgataatacaaacttcataggttgtgtaaggagtacgtgcaggacctgaggtcaattccttgtatccacatttggtgacctatactgtctaaaccaaaaaataaataaaatctttaaaaatatataaagtaaccaaatttagcaaacattcacaccataatttgaataataaaatagtaaaatggaaactgaaaatctcacttttttttctaaaacgcaaaaaacaattaaatatgaaaaataagagcctccagtatcttggggccaaactgcctcagaatttaacttccaattcaggtctgaagcctgaagtttctcaagggcgggagaatctcggagacctcctcgccggagggcggggcgcctg

SEQ ID NO: 49005 - DNA, 407 bp, Mus musculus
  source 1..407: mol_type = other DNA
ggaaccagctctcctctttgctgttgatgttaccaccatctccaatctccatcttcagccaggagaccaggctgggttgtcctccctctggaggtcctcaccttctcccagaacttggggcaggatctggaagttgggaggtgaccaaccgaccaaccgctgaatgtgtggttaacatatgctcacttaacacaaaagtggcccagccacatgtagctggtcagggcccagttctccataagaaattcaacattacttggcagaaggctgatgcccaagaattcttgctcatagccaggcaaaggaacaggactgaaatccagggtcccggtcccccggggtggggaaccctctcgcgcacccagccaggggcacaaagggccctggcagcggcagttgcgaggcca

SEQ ID NO: 49006 - DNA, 488 bp, Mus musculus
  source 1..488: mol_type = other DNA
ccagttatacatgggattactggtattaaaaaaaatatgtttacatgcttatatgaaaattcatagtgaaactcgaaatcatgtagagttagcatatgctaataaaaagatacttttgaaaagccaagcagtgctaatattataaagtggttagagcctgcagggcttttgcaaaggccctgagctggttgccagcacccatgtggagtggctcacaaacaactacatgtagaggataatgaaaagtcaaatcttttttttgttttgtttgtgtagcccaggctgccctggaactcactctgtagaccaggctggcctgttctcatggtaaccaagcatgtggagacccacataaatggggcttagaaagcccatcaatagatgccccagctctgtcagatgtgccctttgaaccccaagcctaaaggtgatatgggttaaagaaagtatagttatttaacaattaatgcctatggaatgtatatgca

SEQ ID NO: 49007 - DNA, 301 bp, Mus musculus
  source 1..301: mol_type = other DNA
aagtagtttttgtttaaaaaattgaattagtatatattaattatacataatgagtttaagaatggcatagtcatatatatatattcccctccttgtgcccacacccaccctgcttgactgggtcccaagtgcttctatgtttctgttactctcccattaaaatgggagcaaagaaagctctcagggattagagccaccaatttaggggccctacatgcgccccctggtgccccccgctggggaaagctcctggtgcattctccggcattctctgggcgtgagtcacgcaggttcgctatgg

SEQ ID NO: 49008 - DNA, 380 bp, Mus musculus
  source 1..380: mol_type = other DNA
catgggtccttggactccagggcaccctcttttggaaggtatgacttatttctgtcaggctcccaccctgctttgttttttttttttttttaaccaaaacagcctccacctactgcttcagtagaataccggccttcccacaatcaccaaacatagtggggggtggggggggccaaagtcagacgcgtaggcagctagcctaggtctgagcctgacagctctggactcccaaggttgggctcagagctccagcagtgggtttcaggggcacagatgctgctgtttaacctacacctcccgagcttccttggagctcgcagacagagggcagggggcgggacccagctgctgtttaggggaggagcctgttcaacaccggt

SEQ ID NO: 49009 - DNA, 346 bp, Mus musculus
  source 1..346: mol_type = other DNA
ggtgccacctacagtgggctgcaccccaatccctcagattagactcccttctgaggtgactctaggctaaggattcggaactatttacaagacatactcttccatctggtaacttccccctgggaataaattcaaataccaaacacatggtgatgtattcaatgtggttagtcagacacctaaaatatgcaaagtactgtttgatactaaaacgtttttgttattaagagagtcaaaaacaaaacaaaacaaacaaaaaagaattaaaagtttatgtacgtgtatgtgctcagatttcaaaccccagcaagtccttcaaacctttcacagtttcaaagctttcagc

SEQ ID NO: 49010 - DNA, 247 bp, Mus musculus
  source 1..247: mol_type = other DNA
gcctcaaaccaatgactcattgcaaacaccgtgacaaaattcacaaagaaccaataaaaaggttttggtttttttttttaagttaactggttctaatcaatttcatcccgggctgatagtcctgagttctataagagagcagtgaggaggcttttccaccagcatagacagtcactatgtgttcccattgggtcacagggcactgacatccacagagcaacccagtgccgaggtaggtcatagctac

SEQ ID NO: 49011 - DNA, 264 bp, Mus musculus
  source 1..264: mol_type = other DNA
tcttaggtgtgaatctcagaaaaggatttgttaattaactcattagacagtgtagaaaaaggaaacagactcgattaatttcttttaatcctcaagagaaaaagtattctgggttagcacaccaagacaggaggctgtcttgcattccagtggaccacatttaagaaaatgtttagaatattccgcctgtttccaaacggtcaaagtctgagaattggggagccttggcagggtccgggctaggcagctgattggcacgaccct

SEQ ID NO: 49012 - DNA, 228 bp, Mus musculus
  source 1..228: mol_type = other DNA
ggctgcaagcatgaagacccttatatctaaaagagtgcacttatagaggctgagtggattcaagtacaccgtttctctgtaacactcgagcgtgcctcaggcctaagggctacaattgttctctgtagagctgcagatgcgtatcagccagagcttgtccaaggtcttcctgtccttgatgataaatacaaattcagaaaaggggtgttccttttttttttttttttt

SEQ ID NO: 49013 - DNA, 319 bp, Mus musculus
  source 1..319: mol_type = other DNA
gtatcgcaacttagtactttagatctgcctcaagtaccactgccttactgatgcagtaaacagaagaaaatcattgtaaggcttctctagtctttccttttgggactgtgttctggtcctccagggtctgggctcagaaacccagtcctaggccatgggggccactgcccaactgcaagaggtccggagcacctgaggaccccaattggggccctaaggcaatgggctctggcccccgggtcagccgggcagctccaggaattgcaggcggcattaagaggttggagcctgcacacacagacagcacaccccacccttt

SEQ ID NO: 49014 - DNA, 264 bp, Mus musculus
  source 1..264: mol_type = other DNA
aaacacactgccttttgtaattgtttatctagtgcattttttaaaaattgtttcatatgatcccaaggaatttgcaaatctgcagtgcagctgggaacattcagactgcctttcttaatgaagtaagcccgaccaaagtcagcggacgacctatgtgagggttttgagaaaccattccaggttcagaccccacctagggagctcaggagttaagccatggacggagggtccacgccctcaaagcccatccgtgattggttggag

SEQ ID NO: 49015 - DNA, 201 bp, Mus musculus
  source 1..201: mol_type = other DNA
ctcccccctgcaacagctgcctgcagcagacgggcaatgtgtgaccagctgatgcatttgcacagagggtcccctacctctgattggcccaggctggccgagtggtcctgggacacctgtgaggttagagctctcaccgggctgccagctggcttccccagccccacaggcagccggtgcgtgtggggcgggggttcatga

SEQ ID NO: 49016 - DNA, 298 bp, Mus musculus
  source 1..298: mol_type = other DNA
agatggtatgtcatctgatgaggccaaaacataacagttactactggtgatattcggacgttgctagcttctgccagtaggaggcagtaggatggagaaggattctgcccctccttcctctacgctacgctacgctacgttacgttacacaacgctacatttcgtctctgctgcacagagagcctccttgtatgaaagcagctgcttttctaaagttctgctgtgacagcatttcataagcctctgtcctttacagaggacggcatgttctaggagaaatgttttctggaaacagaaa

SEQ ID NO: 49017 - DNA, 385 bp, Mus musculus
  source 1..385: mol_type = other DNA
ataaaattggttgtgtacgttttccactcaaacaagtttaaaaaaaaaagtaacaaaagagaagaaactcttctccaaggttatattttcttttgagaactggaaacaagtgcacttattttttaaaactccaaatgaaaggtgggtcatattttaaaagactttattttccttgaactactgcaaccaagtctaaggagctttgggcttgtgtactttttaaacatctgcaaataatgtagggtatctctgtatagtcctggctatcctggaactcactctgtagaccagactggcctgctgggattaaaggcatgccaacttttcaaagtaacctttggggaatttccgtctggagattacggtactcgctaggctacagcct

SEQ ID NO: 49018 - DNA, 536 bp, Mus musculus
  source 1..536: mol_type = other DNA
ggagggcggccagggcgctagaccgggcccttttgccccacaggcgctggccatctcttcttcttggtagccagcagtcacaaaaaaaaaaaaaagggcggggcgtccggtgcccggtagcccaagaccagccggcagtctcctgccgcagcagccgctgcagggcggaggccgcgcttgatgagcagggcgggggaagccgcggtgcagtcgcgcgctcgccgtcagcgaggccatggctctgcgcagtcaccccacgcggggctgcagcggcggcctccgcggattggcgcgcgggcaggcgtgtgcatgccgcccgggctgtaccgaagcccctccgtcgcgggcttttgcagatgaagcatctggggccgccgccagccgcagccgccgctcgcccgcccgggctcacagaaagggcgcgaaaggcgcgctcccagctcgggcgcacgcaccgcgccctgcgcgcactgcagcagttgctgcctgggcgctgcgccccgccccgccgctggcggcgcaggcgcgatcgaggc

SEQ ID NO: 49019 - DNA, 382 bp, Mus musculus
  source 1..382: mol_type = other DNA
ctggctcacaggaggaaggctccagaggagggggcggaagaaacgggagaatctgttttcccagctccccagcgggcagcgctgcagcatctcgtgctgagcaatgccttgcaaattgcgaacaagaaggaaaagttgagtctctttccttcgcctttgaaatacatttcttagatagtctatgtcacaaatgcgtggaatatttttcttcccctgataagacatctctccggggggcgggaaaaaaaaaagacttggtttaaaatatatatatatttatatttgtaggaaaaaggtggagatttcaaaacagatgcaatcctctgtctcttttcctctcctccattccagtcggcctcgatcgcgcctgcgccgccagcgg

SEQ ID NO: 49020 - DNA, 579 bp, Mus musculus
  source 1..579: mol_type = other DNA
cccgtgcctcgccgcaccctgcgcggtgaaggggtgggcagggcgcggtgcgctggctgccacgcggggatgctcggtcctccgcgacaagccagggggcagccccgcgcgatgttctgcagggcttccttgcccgaggcccgccggatctccggctccccactggcacgccggctctgccggtgcgggtcggggcccaagtgggcgacatcgcgctgctgagccaccacttgccccgagccccggcccactgaaagcgagtcgaagtcgatggtcttgttctccgaggacccttccacagggcagaacatgccgcagaatttctgccgcggcttgggactgccggagcccaggtttttaaaaaaggcagggtcttgctgccgccgcggctgcctctccctgcctaccgcaaggaaggatggagagctggcgaaccggcgacccacccctcgccccggcgccgccacgccacctccgagcaaagttggatctgagcgggcggtcgctgcggcagaggatgccagttcccggcaacgcggggcggggcggaggagggggtggggggcgcccggagcctgc

SEQ ID NO: 49021 - DNA, 305 bp, Mus musculus
  source 1..305: mol_type = other DNA
gaccatatttttaaaaaagacaattacaatagataacaaccagggtttgggtaaatctgtagtgtgcgccacgcccacattgattttttttttaaaccgtgattacatgttacctttgcaattaaaatgttataaattccaacaagaggcgtgggaggggttccattcaggccccgcgcgcttccgggcgactgactcgcaggaattcccgcacgtcccgagcagctcgcgaatgccccgcccagcccggcctggtcacgcccttgtcatcacatggtccgggagggccctgacgtcacgaaggg

SEQ ID NO: 49022 - DNA, 326 bp, Mus musculus
  source 1..326: mol_type = other DNA
gcagagtcttctatagatagcccaggctagcctcaaaccagctgtccttgaactctagaacctcttaaatgaatacaagcgctgttgagattataggggtttctctgtgtagccccggctaccctggaactcactctgtagaccaggctggccttctattcttaactgctcgcagtagccaagggcagtccagttgtgtctctgggtgcctccggggctcacccacagggtcactggacaggccaggccttggccacttgggcaccgcgggctctagctctgtacagggaccttctcaaggatcctactcaagtgacgtcaccggc

SEQ ID NO: 49023 - DNA, 423 bp, Mus musculus
  source 1..423: mol_type = other DNA
ggcctttgcggaggctctgctctgctcagcaggcaccatgcttcctgaggtgaaagatattctctgccatcatttccttccatctttaatctttaatattgtgacaaaggaaatctcccatttcactgggcaagtcatgatttaaaccaggtgatggcaagaatgatttcattcattaccttctccgcaaacaacttcatcttaaaaagatctatttcactctggcaagttctaataacaattataaggatactttatatcaatatgtatggcactgcctagaatgtattctccacatattatttaagcctttctgctaccctgcagggccactttccttttgtatctgatatgtttggggaaacaagacaccatgttcccaccattgctggactcctgttctgtgttccaatgagtggaaga

SEQ ID NO: 49024 - DNA, 155 bp, Mus musculus
  source 1..155: mol_type = other DNA
atgctctgccctggagcctctgggggccggcgggccgggctaggccggagcccgttgctgccccgcagtccccgagctttaagcctgaaattaaagacctggagttagggtgtgaagtgacgtgctcaggtccccttcaatggagactcaagcag

SEQ ID NO: 49025 - DNA, 332 bp, Mus musculus
  source 1..332: mol_type = other DNA
cagatgtaattactaaattacaatcactgctagttatctcacgatagaatttatcagctatgatggctagcccagctgagtcagtaagccccgttgtgatggaggcagggatccagcatcgggcaagcacacccatgcgtttcctcatagactggctggtttgtagaaaagttttccagaagagcagagggtggggggggcttcctccctcccacctcagcttcagctggcatattgcctctgggtttcaagccagacacaggcaattggagtcttctgatgagctgagtcccacgtgactctcaactccaaagcagcgagttgcaggttag

SEQ ID NO: 49026 - DNA, 236 bp, Mus musculus
  source 1..236: mol_type = other DNA
aagaacagcgtgacccgccgcatcgcgccgcccgcgccgggtcctgagggagccgccaccctcgctcccggcccgccacccgccgcgctccgcgcccgcgccccggggttggcccccagacggaggtctccctgcgccgagggtgaggcccggagggagcggtacccacgtcacacgtggtccacggctcgtgggtatccctccgcgggggcgtggccgcggtttgaatttgctgg

SEQ ID NO: 49027 - DNA, 283 bp, Mus musculus
  source 1..283: mol_type = other DNA
ccccgggcagagcattactcagggggacctcggccagctgctcaggtgacagtggcgcctcggagccccgccggcagagcagccccgggctgtcggaggctgcgggggtccccgggtcgcgcccccgctaccgcttaccttgccgttgctcgggctgccgttcaagaacagcgtgacccgccgcatcgcgccgcccgcgccgggtcctgagggagccgccaccctcgctcccggcccgccacccgccgcgctccgcgcccgcgccccggggttggcccccaga

SEQ ID NO: 49028 - DNA, 356 bp, Mus musculus
  source 1..356: mol_type = other DNA
tgcacggtggcggggcaaggggcccggggcaccttgagaccaggtccacattctgaggatgtcactcgactgtccccgggcagagcattactcagggggacctcggccagctgctcaggtgacagtggcgcctcggagccccgccggcagagcagccccgggctgtcggaggctgcgggggtccccgggtcgcgcccccgctaccgcttaccttgccgttgctcgggctgccgttcaagaacagcgtgacccgccgcatcgcgccgcccgcgccgggtcctgagggagccgccaccctcgctcccggcccgccacccgccgcgctccgcgcccgcgccccggggttggcccccaga

SEQ ID NO: 49029 - DNA, 246 bp, Mus musculus
  source 1..246: mol_type = other DNA
ggccggatagcagggtcgcggaggctcccagaggccggggaagggagccgggctggcctcctgccggccgctgcacacccacgtccggccgaagcggtcaagcttcacttgcccgccagcaaattcaaaccgcggccacgcccccgcggagggatacccacgagccgtggaccacgtgtgacgtgggtaccgctccctccgggcctcaccctcggcgcagggagacctccgtctgggggccaaccc

SEQ ID NO: 49030 - DNA, 394 bp, Mus musculus
  source 1..394: mol_type = other DNA
gatgccctcttctggtgtgtctgaagacagcggcagtgtactcatcttgtattaaaaaaataattaagccaggcagatttctgagttcgaggccagactggtctacaaagtgggttccaaataaataaatacatacatacatacatacatacatacatacatacatacatacaaaaaaagttatgtctgtgtgtgtgtgtctgtgccatagcacaaacttgagaaaatcaattctcttattccaccctgtgggaccctgggataggatccaaatgctaagctctaggtcatttaatcccttcttcagctgtgaaagttttagctaagattttaatgaccaggctttttgtgagggtttaaaactaactatcaactgtgctcaccagcggggaag

SEQ ID NO: 49031 - DNA, 564 bp, Mus musculus
  source 1..564: mol_type = other DNA
agtcatcagagttcactcatctctaatcaagcattactgtctattgttcttgtcaggttccaaaccggcaattctaagtgtgaggtgtccttactactaagtagctttttcatggaggtctctccaagatggaagcgcgtctccccgccggcagagggcgccaagccttttggtcctccccacaaggatgccttctgggcagggggtcagttggaaaggggaaccttttggagcgaacttcttcctctgaagccggaccttgaagctcggcttccggctctctcggggctgcagcagacgctcccggaggcgaaggcgggagctcacggctcattcattcaacaaatatttactgagcgtccggaggcgaccggtgactctcaccagctcctcctccgcgctcggcggcgcagcagcccgggagcgctgggcaatcgcagagccgacgctgggaggaccgggcgggcggctccgggctgcggctccagccgggcgaggcggagccggcgggggaggcgggcggccccggggcgcagagggcgcggccagcgggaggagcccggg

SEQ ID NO: 49032 - DNA, 282 bp, Mus musculus
  source 1..282: mol_type = other DNA
ccatagttctcccgcggccgagcgcgccctttctcacaaagaaaggggaaattctatgaaaggtgtcagacaaattaactgctgtaaaggttttaaacatgcaaaacttttcctgcagtaatgccgcaagaacattgtgctgcttgcttcaatgttaaaagtcgaacctttttatttggaacatttaagagtccccaggctggagccgcagctcgctagccttctgtccttggctgcagcaacgcgctgcccccactggcctgcgcacggcgatcgatcacg

SEQ ID NO: 49033 - DNA, 217 bp, Mus musculus
  source 1..217: mol_type = other DNA
tcctctggactctggtaggctgcgaacccagcagaatcccatgggcacgcctgggcgcccttggtgggtgctggaacccggcgacacccaagtgtggggtccagtgtggtgcgggcccacgtggagcggccgctgaaccgcagtccccgcctcctcggccgccgcctccacggggcggggccctggcccgggaccagctgctccgctataaaggggc

SEQ ID NO: 49034 - DNA, 396 bp, Mus musculus
  source 1..396: mol_type = other DNA
tcacataagagagtctgcgaagcaaatataattagaattatattatatttgagatattaagcactcaagtaacaaatttgcttcgccttataagacaatgagaatgtgtaaagagatgtatccatgaccccctggacatctctctatctgtattagtttacaaacagtgttttattacaaagctttcaatatatcttatattttaattaattcacaacttgtaacatgtacacattttttagacatttaaccgaagtatatgtcgtagacttcagggatcgttttccctaaaacattcgaagttttaatccaactctaatcatattagacacagagtagaatctgtgccaggttagcctcaagccttgcacaagttgtgaaactgtctcagagtgt

SEQ ID NO: 49035 - DNA, 447 bp, Mus musculus
  source 1..447: mol_type = other DNA
tctctatgcttctttccaaggaatgaaaatacaagcacattatttggctgaagcaaagttcattgtatacttaacattgcatttacatagtatggtactttgcatgcatatgccttcatgtttgtataacctcttaatgaactttaaaagaaactttgtagttgatattgccagaatctcctttcatattttaaaaaaacagagagatttatattattcaagtttgtaagaatttgcttcttactgctcttcctgagagagtatgtgcatcgtacacagacataaaagaaaaagatgagctgtattttgtgtccatttcatagaatatgggaaccacaatgacattatacatgtgtatgtgtatgtcctgagttcacattccaatcgggatggaacctgcagctcatcccttaaactgaaagtaaaatttgagactttatgtttctt

SEQ ID NO: 49036 - DNA, 602 bp, Mus musculus
  source 1..602: mol_type = other DNA
tatccaagccttcagttaggatacaaacagcgtagctcagttggcaaaatgcttgccaggcatgcatcaaactctatatttttatctgcagcactgcataaaaattgagtgaagttgcacagcatgttgctagcctagaatttgtaaaattctgtctttagaaatatcttaattcaggataacctaagctggaaataagaatttcacatatattagatttaattagaaatcaccctataaaacaaatgtatatatgtagaatagtattactcacaacttttattggtttagctgaaaatgacaaatttatatgtttaaatatatatacacatatcacatgtatacataataatgcatgtgtgtatactatatagcacacacatattccaaaaattgtattccatattattatatatatgatatactgcctggcatatatcaagatatatcaaggcagttgcagttcattgaaaacttgctattttaagtttgaatcagccaagaggcagccaggacttccgcctgccatgccattgcggcagttgtgcaacacacttgctgaagcgtacacaatgaagcagggagtttctttctgtctccct

SEQ ID NO: 49037 - DNA, 291 bp, Mus musculus
  source 1..291: mol_type = other DNA
aggtcatagattctgccatggcatagtgtgattaaattcaaatctgaaaaaattaaagatgaatttcacaagtaccttgaagggcttttcaagtgattttccttttgtgatcaaagtgtgaaaatagctttttggcagcaggtactttcaatttgctggaaaatatttctaagaagtcaaaaatgaaggatctgattggtccctgatcctgagctcttgggcccccagtttgcaaatgcaagaagcagcagcagcagcaacagcagcagcagcagccgcctgcccctcaag

SEQ ID NO: 49038 - DNA, 362 bp, Mus musculus
  source 1..362: mol_type = other DNA
tttaagactgggtaaaattccccacttacacacgcttgtacaggctttaaggcagggaagagatgaaatgaacttatctctactcttctggggcaagagcttaccttgttctgtattgtcaccagttgagaaccacgggcttgtcatatcttggggaggggttaactgggcaggtagcaggttctagcaggctcccctcagaccggacccctcgggagctctctgtacactgttgagaaatctcagtagggcgattatcacccggtcctggtgccccagtcaagggaaggcgcggtccaggacctcctggctgtggtccagaacttgccagctccgcccctcggctacgagatgctgtcgag

SEQ ID NO: 49039 - DNA, 246 bp, Mus musculus
  source 1..246: mol_type = other DNA
actaggctcccacctcagtctggtgggaatactcagaaggttatagaagtaggcccatgcatttttggaccaagatccactaaggacacacacacacacacacacgcgcgcgcgcgcgcgcatgtccagataaatcaacatgctccaggatggttcatccaggaagagggggaggggagctctcataacctggctccatccccaaagagcgcttactcaggtgcaccgaaaagggactgcttgtgc

SEQ ID NO: 49040 - DNA, 383 bp, Mus musculus
  source 1..383: mol_type = other DNA
tagttagttagttagttagttagttagttagtttaagaccgggcctcattatgtagacctggctgtccaagaaatccctatatagaccaacccacacacagcttgagtgtcgagtgtttatttcttaagaatactctttctggtcaactcagtaaacgagacactccagctgggagtccagcgtgggaccataatgagcatgatcctaggtaggtggaagcgacctgcctgctcagttctgatagggaagggctctggagcctaatccgcccaggactcgccccttgagggtcacctggagcccgcggcagccaatcggggagcagccgtgtccccgcggccaatgggcaggcggcgcggcgctcagcatggctataagtgcg

SEQ ID NO: 49041 - DNA, 312 bp, Mus musculus
  source 1..312: mol_type = other DNA
tttaaaagaaaaagcttttgagcactcttgctgtgacatcagctaaattggtctatccaggacagggtggacttggatcttcagagaacaactggccagccttcggaatgctaaagctggttcagggacctgactgtcccttgcagatggtcaccaccctctaggtagtacagcagcgacgtcacacagagaggtgggtgccctctgcccggcgcaccaatagcgcggccacggccggcctcggctccaccccagcccgccatggcgtcagccgccgcaacccgggggaggaggttcccactttaagaagtg

SEQ ID NO: 49042 - DNA, 239 bp, Mus musculus
  source 1..239: mol_type = other DNA
cagacctctgcgttttgatttttaaaagaaaaagcttttgagcactcttgctgtgacatcagctaaattggtctatccaggacagggtggacttggatcttcagagaacaactggccagccttcggaatgctaaagctggttcagggacctgactgtcccttgcagatggtcaccaccctctaggtagtacagcagcgacgtcacacagagaggtgggtgccctctgcccggcgcacca

SEQ ID NO: 49043 - DNA, 260 bp, Mus musculus
  source 1..260: mol_type = other DNA
cagacctctgcgttttgatttttaaaagaaaaagcttttgagcactcttgctgtgacatcagctaaattggtctatccaggacagggtggacttggatcttcagagaacaactggccagccttcggaatgctaaagctggttcagggacctgactgtcccttgcagatggtcaccaccctctaggtagtacagcagcgacgtcacacagagaggtgggtgccctctgcccggcgcaccaatagcgcggccacggccggcc

SEQ ID NO: 49044 - DNA, 482 bp, Mus musculus
  source 1..482: mol_type = other DNA
taataataaattttaaaacagatggtaaatcaacattaagataagcaaaaaataaattagctactcacataaaataagcatagttttgcaactatgttaaattataaagcctgcatcctaatgccaactgagtgtctaatttaggtcttgaattctaaagcagcataagccatgcagcccggggagcaacagttcttctccctcagcctcgccatggggtcaggtgtcgggggacaagcacctgtcacccgggtcacggggctgcagcggggcgcccggaggtgcccggggagacggctggacaggaccgtgacctcccgctaccctcgcccctcgggacccgggcctcacctgctgggcgggccgcggctccgggggggcgggcggccactagcgccccgcatcccggccaccagctttccggaggttcggctcctttccgggagccacgcggcgcgcgcccgccaacgtcacgtcacagc

SEQ ID NO: 49045 - DNA, 496 bp, Mus musculus
  source 1..496: mol_type = other DNA
ggaaaacctaataaatgggactttataaagctctaaacataaaaatattttcaggtgtctgttagtacacagctctgcaacttcaaaatcattaaatggtgtttggcttgggaaagacaaaacactcactgccttcccatttataaaagcatgttcagtccctgtaacttagagtggaagaagagaaccttctccagaaaattatccttgacatgcccagatgcgcagcacatgccaaaagaatgaatgaatgaatgaatgaatgaatgaatgatagtgtcctggactaagccacaaggcctagaccttggtaggctgtattgttttctagaatcctccggagcatgaagaattgcagcttggggacaaccaggctagccagaagtggccaagagccacgtggcgctcgttcactcagcacgtaggccctcccagcgcgcgcgctctcgcctcctacgtgcgcgcgccggcgcgagctgtgacgtgacgttggcgg

SEQ ID NO: 49046 - DNA, 488 bp, Mus musculus
  source 1..488: mol_type = other DNA
actcgaaaggtgttgagtcttagtcatagcatatctataagcattggtttggcaagcacactagatctaggttttacctagtggcccactttggcccaacttgggtctctgtgtgacaagagacctttgcaggtctctcactgatctggatacagtgtttagaaacgtttgtatatatatgcaccatctgttcaatttattaacagcccagtcaatttttcagccccataaaaaaagatttatttacttgtttgtatgtgcgggacctgaaaccagggtaccaggtcaaaaaattagaaatatataatgtcatcactatttagaactcaattggttctagaagataaaagtactatctgactttggaaagttttgacttgtgtaactctagacaagtcatcaagaagggaagctatgcgtttgggttagagcagctctggccctgccccagctctttcccggcctcacgatggcgctaattggggacg

SEQ ID NO: 49047 - DNA, 354 bp, Mus musculus
  source 1..354: mol_type = other DNA
tttttatttttaaaaaagaaaaaacttcattgctcaaaggatgtcatttacaagatttagcatttaagtaaagttgtcaaattaaaactatatgagtttcttgaaagaatttcctttgtaaacagaattcctgcagagctttaaaccagcttaatttatttttagcttattatcagttgtgataaagtttaaactccagtcagatttcaagaactgaaaggcgaacggtttggattttttgttcagtgatgacttcaactttttgtgttcaggtaaagaggatccacttggaccggcgcggtcgccagagcagccagccgggctaaacaggaggccgccttcagggcgagctgg

SEQ ID NO: 49048 - DNA, 306 bp, Mus musculus
  source 1..306: mol_type = other DNA
cctaggtgagcactgagacatgcagagaccacttccaatgtccagtggacttagtttttttttctccttcctgggctgtggtaaaaaatatacctggacaggagccttaggcctctccccccaaagtggggcactggccaattagtcctatatatgtttatgtgtgagtgggtatgtacacatgcatggaggtgcgctctcctgaagctggagttccagggtaactgaactcgggtcttcttcaatagcagtacccacctcaaattcctaaatgttgggagaacccatggggctgtggtctcctag

SEQ ID NO: 49049 - DNA, 455 bp, Mus musculus
  source 1..455: mol_type = other DNA
tcggggcagtctctctagacttgtagtgagtgcggtgcaaatttcaaattaaaaaacagctcgtcctagacactgaacaaattttgtaagactcaaggtttaagtacctctcagtccataaactgtcattgcaagacaatcgctgtctgccctctccttcgaggaagcagaaaggtactggcagccaaggcagccggagcttcccctaaaaatgggtccagtgtcacggagctttgggaccactgcagcttagcctcagcctggctaaccttaagcccgcacccgggaggtgcaataggtagcccctctagtacgcctcgccaaactctatggttgtggcgcacgcgcaaaagccttcccgtcgcacaaaggccacggagagaaggtccggcgcctgcgttctgcctctctcgggcgagaacgcccgccgcgccacgcctgcgccctgaagactt

SEQ ID NO: 49050 - DNA, 485 bp, Mus musculus
  source 1..485: mol_type = other DNA
cggacataccaggaaaggctacttgtacgacctgtaccagagttctcttgtcaagatgtctagatcatctggagaaccctggacgcggagtctgggctgtcaaggggcaggtctgatgtcagccctggggagccgccccccgcctggccctctcggcctcggtcctcaccgcagcaggtcctgcagcaccgtagccagccccagcgggacactgcccttgcgctggaaggcctcctgcaagtcccgcagtcgcaggcgcaccaccccttggcggcggctgtggctcagcaccaacggagcccagaagaggcggagtcatcctcctcccactcgggcggcaggaggcccgccgggtctcccccggtcggggcctgggcctcccgctccggggaccacatcggaaccccagccccgccaaggaaccgaacacaagcctggcccgggtccccttccgccaagtcttcagggcgcaggcgtggcgcggc

SEQ ID NO: 49051 - DNA, 558 bp, Mus musculus
  source 1..558: mol_type = other DNA
tcatctggagaaccctggacgcggagtctgggctgtcaaggggcaggtctgatgtcagccctggggagccgccccccgcctggccctctcggcctcggtcctcaccgcagcaggtcctgcagcaccgtagccagccccagcgggacactgcccttgcgctggaaggcctcctgcaagtcccgcagtcgcaggcgcaccaccccttggcggcggctgtggctcagcaccaacggagcccagaagaggcggagtcatcctcctcccactcgggcggcaggaggcccgccgggtctcccccggtcggggcctgggcctcccgctccggggaccacatcggaaccccagccccgccaaggaaccgaacacaagcctggcccgggtccccttccgccaagtcttcagggcgcaggcgtggcgcggcgggcgttctcgcccgagagaggcagaacgcaggcgccggaccttctctccgtggcctttgtgcgacgggaaggcttttgcgcgtgcgccacaaccatagagtttggcgaggcgtactagaggggctacctattgcac

SEQ ID NO: 49052 - DNA, 345 bp, Mus musculus
  source 1..345: mol_type = other DNA
ccaggctgctttaaaaaaaactgtccacagccttgaccggggaccgcagttccttccgatgaacagaatggatggcattagactcaacccattcccacccaagtgctggggatgacagcagaggacttaggtagggattctctggctaatatttccttggcattctttgcaaagttatggagattctactgaatctcccgtggccctcgggtttcttcctagcctcctggggaaaactatcctgagagtcctgcatcagctgctggccattcgggaggcgttcccgggatcgggggcgtgtctcgggcgtggcctgtgggcagtccttgtcacagcaaccgttcc

SEQ ID NO: 49053 - DNA, 419 bp, Mus musculus
  source 1..419: mol_type = other DNA
aaacccagggttttatgtgcgctaagcaaacactctactaatgagatgcatttttagacagctttagctgataggcaaaaggcatgtgcacttgaatctctagagcgactcaagatcttactaagttgctggaactaaatttgagattgcagtgtctctgctcaaatccattaggttcctttattttcatggaaggaattttttagaaggaattaaatttgtaaatccaggtgtggatattcaagtacagcaggaaatcctggtccaggaagacccatagttttgtcctccatggaaacagggagtgagtcctttgttcaaataaggaagttttcctataggaaaaagaagagtcctgaggttcccactctcagccttagaatcgggaggaaaagcacttccttggaacttctctagaa

SEQ ID NO: 49054 - DNA, 395 bp, Mus musculus
  source 1..395: mol_type = other DNA
tagaggcaccagtacacctgcatgtatatgtacgtgtatatatgtgtgtatatattatataatgtgtatatgtgagatatatatgtatatacatatatatatgtgtgtgtataaatgtggagagagagattgatttgtgaaattaccaaaatgcactgatgtgggtagatgaggtcattagccctggctgtcctgaaattcactctgtagaccaggctggactctaactcagagaccagcctgcctctgttctcagatactgcctggtagcataactcacttatcatattagtatataataaaagtggtgtgattctttaaaaaaataaaagttgttcagaggtaggatcgagctcctgatttccccacccctgcccggtgcgcgcgcaagcccg

SEQ ID NO: 49055 - DNA, 346 bp, Mus musculus
  source 1..346: mol_type = other DNA
agtcacacgtgtctgtcatgcttctgagtgtgagacttaaaggccaaacctccgttactagagggtgggagcacaacgccccccactacctcagtggggctactttgagctctgacgagatgctgagctcagcacactgccaggtacagccaggtgtgtccccaggtagcatttagagcagctctagcagcccctattacatagggtcgtagggtcgctccgtccaaccatctcgacgttctggtggtggagtcagctctgaagcccaaggtttgggccctcaacttacttgtcactcggagcaggagcagaccaatggctggagcccagattgctggcacccttc

SEQ ID NO: 49056 - DNA, 290 bp, Mus musculus
  source 1..290: mol_type = other DNA
tctctgcttgagtttctggcttctaaagcaggaacttgggcagagaaaatgcaagctgttaacagcctgtccagcaacttgttagggaagcccagatgggccatgttgtcaacattagcctcgaatccagaattcggggattgcagatacctgtctgtcatcacaccgggctttaatagcttcacagactttcttgaagagtctccgagttagaaaccccatatcagacatgggttctacgccgcctccctcccgcctcttccgggcataagggggcgtgtcggagactc

SEQ ID NO: 49057 - DNA, 212 bp, Mus musculus
  source 1..212: mol_type = other DNA
cacctctcccattaataaaaacctacatgtttagttacaggctgtgcactgcgcatcgcgcgctttgcattaaagaacggagagcggtgcgggcgctgcacgttggctgcggcccgcttcctgagctacgtcactagctgtgatagcagcggcggcggcagcagcagcagaggaggtggcggcggcagcggcggcggcggctgtggcagatc

SEQ ID NO: 49058 - DNA, 540 bp, Mus musculus
  source 1..540: mol_type = other DNA
cggctcaaaggtctgagaatctcagggcgttttcagtcgtgatcagcctgggacaccgtggctgggcctgggtgaaaggcaaagccagttgcctgggggacaagacagtcggactgctggcctggacagcctccccctctccccagggacagccgaggggctgggtggtgcccaggctggcattgcagcttcctgcctgggttggctcctggctccagatctagaggctcaggaaatcctaggagggcctggtccacaaggacactcccttgtgggtgtggccaaactggcagcatcatgaacttgccctgctggccagtctggcctcctttctcaggctgctcactagggtgcagcaggcccctagaggagtcagcagccagcctctcctgtatactctatacagagtgtagaaagtattttgtgctcttcgtaggggtgcggggtgcgttcactcctacactagtctgaagaccctagaaggggactcagagtcttcaaggcctcccagggtggggggagggacttagtcacttcctc

SEQ ID NO: 49059 - DNA, 497 bp, Mus musculus
  source 1..497: mol_type = other DNA
caatttgcattgttggtggctctctgacaaaggaactagggcatttgaggccagctgagatttcccataccatctggtcacctggtagttggccatcagctgctaaacttctgctcagcctccaggctgtggttcacctcctgccctaagacaggcctgggctaggtaaggggttcttaaggagctctggacacaggttttcccagggcgcagaaccctttccccttcctgacaggctgagggacctgccctcaagtagctgtgaggccggatgcagccctagtctgcctggctgttgtgcagtgcagctccgcattagtaaggttccaagctgcagcagcaggaacacaggcaactcgagcagtgtgtgtgggagcggtgacctctcgcagccagccggctaaagccctcgagtggcagtctccagactgtccacctgcgtgccgcgccccgccccgccccgccccccgcagggagtgtcctggaaccacgcccat

SEQ ID NO: 49060 - DNA, 291 bp, Mus musculus
  source 1..291: mol_type = other DNA
gaacaacattgccttgggtacctttgtagtgagtcacggctctgcccaccttacctacctcataagcttgttaggaggatgaagtaacattaaacattctcaatgtgtgctgtgactactgttaatagttgtgaaaatagccacatttctggcaagatttagtcagaagactatccccttccagtcattttgagacctggaaccaatggttcgagcttactttttcggcttccgaaggcattatcggatctgggaaggcgcacttccgttccacagttgcttccgaccagt

SEQ ID NO: 49061 - DNA, 471 bp, Mus musculus
  source 1..471: mol_type = other DNA
acagctgggtccacaggtgtgctctacgctgtgccgaggcaggaggcagctgcgtgggctctcaactccccagggcaagagttgccaggtctgggggaccctctgcgttgccctgagtcatggagtctggcataggagtctccctgctcagggcaggccactgcgctggcagtacaaagccaggggcatcttgtatctgctccaacatcggagccaggagtaggtccatcaagccagcggttgtctgacagaggtctggggaccgcgacatcgcaccgtggggatttgtcatttgaaccgaccccctgtgcttagggacagtccggaggatgtggacaccttccagctcccccacaaggcgcgggccaggtggcggcgccccggctcggcagcgcagaggaggcggcttcccgggccaggggcggcggcaggggcggccccgggatcacatgggcggaggcaggtctggga

SEQ ID NO: 49062 - DNA, 257 bp, Mus musculus
  source 1..257: mol_type = other DNA
gcggggaccgaggcccccaaagagctgtggaaactgcttttcctggctttgaaaacactggcttgatcttcagggcttggaaccgcccacagtgggctgggccctgagtggacagtgtgaaccccaggcagtgcctgccctacccgagggctgagacaaggggcccctcttggaggcccctaggcaacctggctggctgggaagtgcagagactctgagccacaccgatgcgcgtcgtaggtacagctgggtccaca

SEQ ID NO: 49063 - DNA, 386 bp, Mus musculus
  source 1..386: mol_type = other DNA
gtaaaagtatgacaaatttaggtataagtagtcatatttgcatatacctgcagaagattacttatatttaatacaaagtaaatactgtattagtagctacatatatacactgtactgtcttgtttagggaataatgacaagaaatagtctgtgcacatgtgcagtgcagatgatttatattctgtttgaaaagctttgagaagagagacaaggagagccaaatagtctccctgtagctgttaggctgggtgcagtcacccacctgagcccagaaagtctggcatggccaggacaacccatttggctctcccaggcctaaaggctgccagaggcaggcatttcaagccctcccaagggctgccttcttcttcaggccctgactcagc

SEQ ID NO: 49064 - DNA, 269 bp, Mus musculus
  source 1..269: mol_type = other DNA
gccagtcggttctgcctcacccgggggtcagcagaaggcttcaccttttggactgggccaaatcaggcttccaagaaaggacaccagatatcccaggtggtgtccaggctgaggtgcagcccaccagctggctggcctgccgctcggacttcctccaggggaaagaggcagactgatgacccaggaagcctgggcacaccggctgtgtgctacccctccctgcccggctgagggcttgaggccaaactgccttcggcatcagcagttgc

SEQ ID NO: 49065 - DNA, 280 bp, Mus musculus
  source 1..280: mol_type = other DNA
gaaaccgtcgcagtgaatcctaggctaggagtactccagcctggcattccctcccccaaactttgcacgtgtgtgtgagcatcctcacgtttgccagtacacgagtgtttgcaaacgcccgctggaaactctgagtggcccccgccagccctcccgcgtgggggccggggaaggcatctgggaaacccagcgggctcccgggggaccctcggtggcccctcccggcaccgcctcctggacagcccggccccttgggcaaggggccacagtgttcccgtgg

SEQ ID NO: 49066 - DNA, 598 bp, Mus musculus
  source 1..598: mol_type = other DNA
ttgctggccttccagtctagcaggcatgtcagcttcaagtttaatgggaccctgtctattaaatttaaggtaggagcctagaggatggcctcgacctctggcctccatatgtgctcgtatgggccagctcaccagcacacacaagtgcggtgtcactgtgtgtcactattccacagtggaatcggttagaagtcaattccctttctcaaggaagcctgggctagcgtcccagaagacagtgagtgactgctgtctcatgtatagaaagggagacaccgcttctcagaaacggggttctcccaggagctagatacaagctgtatgcaacaaacatgaagagagcgttcatgagataggggctctctctgatgagagggacacagactcagtggcagccaccaagaatcaggacacctgcctggtcccaaggtcgcagctgcttccgaggtcccagcgtctgccccacgcgaggcggacggcggtcagcagtgaatccggagctgagacccgagatccgcgcgtgcgcagagcgcggctgcggccctcgaggccgccgggaagttgtgagcgcggaggcgcgcacgcggggccccagccg

SEQ ID NO: 49067 - DNA, 319 bp, Mus musculus
  source 1..319: mol_type = other DNA
ctattggaaaagacctcaccttggggcctttgtgagaaattagccaacacacttggattgtagtgagtccttagaaccagttctagctagccctcctgaaaaaaaacttgccttggccaagtttgtcgtagtagcctaggccagtccaagtttgcttctttctctccattaggtctggaagaaaaacagagtagctggcaaaatcacatttctgaggcttaggtctagtgcttagagatagacctgaggctgtggattacttctgaccctgagcctagtggtcagcggggggcgggactccagccgctctttaatgggc

SEQ ID NO: 49068 - DNA, 441 bp, Mus musculus
  source 1..441: mol_type = other DNA
ttagatgccatctctctattgaacaaatctagagatacggttccagtgccactcctaatatccagctgaatagaacaatttctaagaaatttcggaagagaaaggcttgacctcgctccttaggaatctgattaacaactctgaaaaaaaatgaatatgatcttttatttggatcgttacaagttattttaattcttttggttggctggggtaggcaaaaaaaaaaaaaaaaaaaatattttagaattggagaaaacagaaaagtctcttagattcatcaaaagagaggggcactctccctcaggagcgacagcagggcctccgtgagtcaaggatggaattcaggccagggtaacgacgctgttagctggcggtcccacgtggcaggcccgggggagcggggcggggcagcaggcgggggcgggcccagcggtgacgccg

SEQ ID NO: 49069 - DNA, 316 bp, Mus musculus
  source 1..316: mol_type = other DNA
ggaaatcctttctaaactgtttacagtaaaatgacagacagggtttctctgtgtagccctggctgccctggaactcactttgtagaccaggctggtctctaactcagaaatctgcctgcctttggccaatgagctgagcccttgggctagggatccggaaatcaggacctcgggcacgaggctacagggggcttcaggaccctgacgtgttttttaaaaaggtcgagcggggcgctctcagccagggcccgcccacccttttggggatctgccccacgcccctcccccacgggcacgaggtggcctgggcggggtc

SEQ ID NO: 49070 - DNA, 390 bp, Mus musculus
  source 1..390: mol_type = other DNA
tttgtctccgacaaagaatacactattgtgtggcacaatattacagtacatcaaaaatattttaatgctagctatggaattccagcagaaacttccctagaattacataaccggggtcgctgtagtgtaacattaaatgactcacattacaataaaaaaatttttcagctgggattggtggtgtacatctgtaatccctgcctttgtcaacgcagggaggctgcagccagccacggcctgagggctctaagctccctaggcgaccccactgctcccagaggctgcgcagtgtggactccacatcagcaggtaggcgaccttggagcccctccacctccgacccctgccaggggccgagacacgccccttttcccgactccgggaagaacc

SEQ ID NO: 49071 - DNA, 387 bp, Mus musculus
  source 1..387: mol_type = other DNA
ttgtcaacgcagggaggctgcagccagccacggcctgagggctctaagctccctaggcgaccccactgctcccagaggctgcgcagtgtggactccacatcagcaggtaggcgaccttggagcccctccacctccgacccctgccaggggccgagacacgccccttttcccgactccgggaagaaccgggtaagatggcagcgcccggtccttgccacgcagacttccgccttgcccggagacccgcggcccgtgtactcggcgcagagcctccacgccgctccgggaagcctcgccacgtgggacggggaggagctgagctgcagcgagagcgacgcacgggcggggggcgggaggccacgtgggtgcggttccgcccagggtcct

SEQ ID NO: 49072 - DNA, 406 bp, Mus musculus
  source 1..406: mol_type = other DNA
taatgatctcattccacgataacaataaacttgtattatccgatcaagagatgaaattgttcctatctccatcagattacaaaaactgtcctttttatggggggggggggaggggactccaaccgccctcagttctagtagacaagcctccggctgaatctcagggtgggatgagaacactcaaagctctgtgtatcctaagattctccttggacactccagagtctctaaagctgctggaggagaaagctgagcaccttaaagtttgggggctggtggcagaagctacagctgctgcctccaaggacatctgtatagctcccaggggacctttccccctcccacaagcctgggcgagcagggaccaagcttgcttgttatcacctgacgctgagcagccactgat

SEQ ID NO: 49073 - DNA, 458 bp, Mus musculus
  source 1..458: mol_type = other DNA
ctactgttcatcacttactagattattagttttcaatactgacatccacagagttatgaacactcgaaattgcaagtaaagcaattttgtctggctttcaagggatgggggtttctatacaaagcgctcgggcgaccgggcgtaagcgggggtgcgggccgccggccgatcagcccccggcccccagagagaaggggtcgcggccctccaggattgctgggctcgcccgccgcggacatggttcctagaagaaagtagaggaccctgggcggaaccgcacccacgtggcctcccgccccccgcccgtgcgtcgctctcgctgcagctcagctcctccccgtcccacgtggcgaggcttcccggagcggcgtggaggctctgcgccgagtacacgggccgcgggtctccgggcaaggcggaagtctgcgtggcaaggaccgggcgctgccatcttaccc

SEQ ID NO: 49074 - DNA, 410 bp, Mus musculus
  source 1..410: mol_type = other DNA
ggggggggggggaggggactccaaccgccctcagttctagtagacaagcctccggctgaatctcagggtgggatgagaacactcaaagctctgtgtatcctaagattctccttggacactccagagtctctaaagctgctggaggagaaagctgagcaccttaaagtttgggggctggtggcagaagctacagctgctgcctccaaggacatctgtatagctcccaggggacctttccccctcccacaagcctgggcgagcagggaccaagcttgcttgttatcacctgacgctgagcagccactgatcagcaaggagcagtagctatagctgcagagccagacaggcgctgcctgtggggcatgagagaggagcgagcgagccccgctgcctgtgaccccaggcgtcag

SEQ ID NO: 49075 - DNA, 341 bp, Mus musculus
  source 1..341: mol_type = other DNA
agaactttatagtcctaggagaaacgtaagcttccaccagaggtaaactgatcattatatgaccacatttatgtgtgtttcacttaaagacaccttatttaatataaagttagttcattaatactgaactcacagctagcagcatcagcccaagcaaatatattgaatgttcggcaagcatttaccactgaggtgcaatggctttaaactcagtgtgaacataggctggcctaatgagcactttgcttaggaaccattttaaataaccaaaatttttaaaaaatttttttacaaagtggttctcagtagatttgcgaatccagaatctacaaataatgggt

SEQ ID NO: 49076 - DNA, 397 bp, Mus musculus
  source 1..397: mol_type = other DNA
gaaagtgaatggaatttggtgaaatcacattgggttcctttagaagttattataaaaaggcttcccaagcatgctcatgatcctaagcgtgatcctcagcaccaggaggcaaaatttcccatcagtagggacagggaaccatgctaatggaccccaggtgctgtctcagtccctgagtggaactcgtgttcttggctgccaccgggtgagtttgcttacctcacccaggtttgctcttgttggggccaagaggattcatgtgcctaggccaagggcccttgggggctcttgcagctgccttatcggggcctgggctctgaaaagccgacttggctggcagacaggaggcccagtccttcacccctgtcctctctgtctctgatgatatatataagac

SEQ ID NO: 49077 - DNA, 502 bp, Mus musculus
  source 1..502: mol_type = other DNA
gaagctgctcctgcccagctgattggaaaacaaagagtggcgcttcttttctttcactagcagaagccgtcctaggacgggacctgggtgccatacacgggtgttaggcgccctccagcggtgtgttctaagacagacagactctggagtctctgggagagaacgatcgatcgctgatccagtgtacagcgtgtcccgtgcccggaggcactccgcctggtacaggacagcggcctgtagggggcccctcgcggagcggtgcctccgggcatccctggcccgcgccccctccccggcccctgccccagtcccaggcagcggattcccctccggggcgggcggtgctactctcgtcctccccgcccggctggcgtgcttcccggcccggccgagcacggtcccggccccgaggggggctgagctgggcgaaaacccgccctccagcgagctcatttccctaaaaggcccagggcaagaggtggcctcggggggagagcgcctc

SEQ ID NO: 49078 - DNA, 483 bp, Mus musculus
  source 1..483: mol_type = other DNA
tttgcctttttaaacaaaaatagctgtaggaagaaatgttgctgttataattctttttttatttactggaaaattccagagtactttggagctttggactcagagcaaacttgaagttgagcttctgggcctagggctacactttccttatctgtagatggaaattaatgtcccttccctccaaagggcagtttccttattgatgaaacaaagacctgagctgagtgtgaaacggtccacactcaggcacaaaagcacgctgtgttcctcagctgattgcatagacacaattcttatacaaatgcattctctgcacacggagatcagacacagagcctggtggcctggtagggcacgctgcggacgggtgcaaccactccatcctttggctgctctcccgcgggcgccgggcctgggcctccccgctccgcccccacgcgcgcccccgccgcctgcgccgcagtccgcgtccaccagccccgg

SEQ ID NO: 49079 - DNA, 317 bp, Mus musculus
  source 1..317: mol_type = other DNA
agtaatgatatatctaagtttgtcaaatgttatagatagaaaacagcaagtgttgattttagaattttctgggatatctctattcctgtctcagacggggtgaacccggatcatcactcagtctctaagaagaagggtgattctccaatcccactcttccgaaggtaagatcagattcattctctatcccattttacagagatggagaaatgataaaaagcactctcgagaacagtgtattgatgatacacctgtaaacacctagctagcacacctccgaagtgcgccgagcatcgccgcttgcgcctgcgcctgga

SEQ ID NO: 49080 - DNA, 249 bp, Mus musculus
  source 1..249: mol_type = other DNA
ttggtctctgtgcttaagtgaaagccctcaacttcagagtggagggacaccaatccattccttccacagcagtggggggtggtggaaccacccccgcagaagagcagggatgcttcctcgggtggagggggagccactcccatgggctcctctccaggctgggcctcccagcaggcaaccccaagtggagcttgcaacagatatcaggtcggtcttgggccccgacactagcacgggcctgctggcgtg

SEQ ID NO: 49081 - DNA, 529 bp, Mus musculus
  source 1..529: mol_type = other DNA
tggaaccacccccgcagaagagcagggatgcttcctcgggtggagggggagccactcccatgggctcctctccaggctgggcctcccagcaggcaaccccaagtggagcttgcaacagatatcaggtcggtcttgggccccgacactagcacgggcctgctggcgtgccgccctagcaccccggggggcaccccgcctcatcctggcctggtccggcccctcccgctccagttcccgggcttggcacctatagtgggggtgctgcccgcctgccaggctccgggccgggcccacgggagggtggggcggctgggaagctggcacactgccccaggggagcctctctcggcaggcgcccgggtgccgcgggggggaggggggaacaaagggctcattctccccgtgcgcagccggtggcatcgccggggcgttggcggaagcccccggggctcagaagggggcaggcccaggcggggccgccgaatcacgggctcctgtttcccgcagggtgctggaggaggaaaccggc

SEQ ID NO: 49082 - DNA, 353 bp, Mus musculus
  source 1..353: mol_type = other DNA
ggtgaggagcccagacttggcctgctttgttcccctgtcctgagtggaggcaccctgttcctcatgaccaggccctggacgctgggtaggagggcaccacccctgccctcgtttcagaagccgcattgggcacaggatcggatgcaggctacagtgctgacttcaatcgttatgtgcctgagccataccacattcagagcacggacgagtgacgccatcgaccctggtcacagtggtgttcatcaccctaggagggggcagagggaggatcccggcgccccgccctcccgataaccgctgcgagctggccaatccgggcaggccgcagtgacgcgcagcctatcagcgaccag

SEQ ID NO: 49083 - DNA, 410 bp, Mus musculus
  source 1..410: mol_type = other DNA
ttaggatatcctggatatttaagatagatgtaagtaatttaatcatttataatttatgtaaatacctatatacatttacataatttttatataatttatgtattatttatccatctatctatttaaccaagagcctcattccaacagcaaaccttagaggacatcttttccaataacgacctttttttttttttttataaaagtactgaacaacagggtgaaattaatattagccataacctattccaatattattccttgacacagcttgtcagggccaggtcattttaaacactccagagttactcaaaggaatcttaggtcatcagctcccagggctgcccagccctgggcttagagcgcccccgagccctccggcaggggcggggtttcagagccgggtcccgcct

SEQ ID NO: 49084 - DNA, 348 bp, Mus musculus
  source 1..348: mol_type = other DNA
aaggtgctcagctgggtttgacccgatcaaactccctttaaagagtccatatggccccccaagcttctgtggccagaatttcaaggggtgggatgcaagcagcctccctcccgccaggccaggtgccctctggagtggcaggggtccattgagggggccaaagccgctggtttccagcccactctggagcccctcctagctgaggttagcctggttagggtagcctggctctctgcctgcgagcagctagtgtactgatggagagccccgggggtcctaagggattcctgctgggcaggcacacctgtgcgtctcctcccagaagactggttgccaggctgtgagaga

SEQ ID NO: 49085 - DNA, 439 bp, Mus musculus
  source 1..439: mol_type = other DNA
tagctgctgctatcatcagctgaccggctgtgggcagtggttaccagggcaacggcaaggctgcctaggtaggcaagtctgcagcagccaacattggaggcctgagagaaggcatgtctctttggaatatggatgccatctgatagaaagcttccttttgcaaaaacagctttcctgggaaaaggatcaagtttacagaaaatccaatctgaatctgatgtagaggtggggggatcccccacagaatagctcccctcagttatcagtaacagccgctaacttgaactctgcaaaacgcagcgcagccgattctgcttcgtcatgatgccagctgaaatggatcagctgcagcagcagcagctgagatgtggggcccgccactatcagttgttggtggggaggggcccggggcccgcccgcccagagaccgctcctcgtc

SEQ ID NO: 49086 - DNA, 295 bp, Mus musculus
  source 1..295: mol_type = other DNA
tcaaccggcacccagggttagtgattatctggacttccagagggaaccctgttctccacagtctcctggcccagtaactccctgggcctcttggctcctgggccaactgggctctagaagagactagaagaggctctcttggactcaatgggctgcctggaataaggcagtcctcttgccatctaggggcattataggctctgcaggccccctcccttcctgaggaagaagcaataggagttgcgttttctcctccccctcccatcgctgctgagctgggcctgggctgccagga

SEQ ID NO: 49087 - DNA, 432 bp, Mus musculus
  source 1..432: mol_type = other DNA
cactcggcagggccggccacgccaggcctcccggagccgccagaaccagcgagaggccctgccttttgggctccgcccccactgccaggctgggtagagatccccactgggaagagacagtacttgtgtatcccagggtgggcaccattctatgggggctgctcagcagaatagccaaactcttggccagaccgtagggacttacggttttgttttcaaaaacagacagaagaaacaaaattttttcctgcaaccgggtccgctgaagaaaggtgggcagtcgtgcagcaccgagaagtgctagggggaaggaggcacacaggtgctgcagcctgccagtcccgctgtgcgaggggacaaggcgaggcggggggggggggggggggatggcggcccctccctccgcgggctccgagacgcgtctctgctacc

SEQ ID NO: 49088 - DNA, 305 bp, Mus musculus
  source 1..305: mol_type = other DNA
aggagagaactgcctgtcatattacagtccacttaagctggtctacatgagaccctgtctagagcctagattctgggactgcctatcagcaaactgcagtcagtatagctgacttgggtagccagctacatgagactagtggtcatatgtccataggggctgagaacctagggctgggtgtcaaccccccaaataaggacatcttagggatttccttcatttcatttggtcctccagacccctccttcctagtggcaaggggtgacagcagtgctccctggagggaggctcctccttttaaggct

SEQ ID NO: 49089 - DNA, 432 bp, Mus musculus
  source 1..432: mol_type = other DNA
tgctatcaaaatcccgctgatttaatctaggagccttgagaatcggcattatctaacacagaaacccgacgcatctgaccccttcgtgggtggattaaaaggcagcatgttaacatttttgatcatcggtatctggcggctatatccatggatgtttataaccctggtgaggtctttggccctggggcagggacgtcgcccgggtgcacagtgcggggtggagccatgcagcgtgctccgctcccacgcggcgctggcccgcgcgcgagttcgagcgcggccccttcggcgtctccgggccgctgacgttgcccgcgcccctacgccgtcccagccacgctgcgcattctccaacccagagcggccggccggggcctgcgcggcagagcggcgctacgccacgagcgtagcgcgccgagtccccagcgcgca

SEQ ID NO: 49090 - DNA, 339 bp, Mus musculus
  source 1..339: mol_type = other DNA
aatctttttctagagagaatgttcttatttctagattcaccacagacttgtgtattgtatgttgttattcaccacagacttgtgtattgtatgtgtttttggcaggcaggaaatactttcatatgcgtgttgtgtgtgtgtgcgtgcacacacacacacacacacacacatgttttatctatctgtaattttatgcatatgagtagccaccatgtggttgctgggatttgatggaggagcagtcagtgctcttccagcttctgcagaagtgtgaaatttggctttttttggaaattgcatgttactcactggaaatgcaggaaggaagcttgctaagtg

SEQ ID NO: 49091 - DNA, 402 bp, Mus musculus
  source 1..402: mol_type = other DNA
tttcaatttaattcagtaactcgtaaataatgactctatcagatgatgtagatgttacaaaatagtgtgagaccctacttaatggacactatctattgacacaattattttctaaatgggaataggatcatatatggaacctggcatgggccagacatgatgcaccatggaacctgtgtggagcttggcatgggccagacatgatgtaccatgcaaagctctttctgcattaagcttcaaggataagtaagcccttgtagcaaacaagagtttaaaccttaggactttacatgccctatgtgataagaaggcatacgtatgtttgtcagaattcaaacatataaggcctagttccctaattggttcttagatttttcaataaaaaaggccaggatcctgtcc

SEQ ID NO: 49092 - DNA, 358 bp, Mus musculus
  source 1..358: mol_type = other DNA
ccctagacaatcttctctctggtccaggggaggagagacgaataccttgcagagtggtgctctccgaaacctcatggctctgggggtccagtgcaggggcaggagcacttggaacgcaagccttcacctagccaggatgagacattgcgtcggttttccggccaaggcagcaggctggtcccaagggcgggcagttgagccgagggagccagcggtggagctcacccctaggccagtgttcctgggcgccagcgccactccggtgtagctgctgcagagtgtagctgctccgccgcgctcccgcgcgctgcgccgccagccgccagggagccggggcgctgagccccgagcagaggcg

SEQ ID NO: 49093 - DNA, 319 bp, Mus musculus
  source 1..319: mol_type = other DNA
gaataccttgcagagtggtgctctccgaaacctcatggctctgggggtccagtgcaggggcaggagcacttggaacgcaagccttcacctagccaggatgagacattgcgtcggttttccggccaaggcagcaggctggtcccaagggcgggcagttgagccgagggagccagcggtggagctcacccctaggccagtgttcctgggcgccagcgccactccggtgtagctgctgcagagtgtagctgctccgccgcgctcccgcgcgctgcgccgccagccgccagggagccggggcgctgagccccgagcagaggcg

SEQ ID NO: 49094 - DNA, 513 bp, Mus musculus
  source 1..513: mol_type = other DNA
ctgtctgagtatcttatttgatattcaatgatccactaagaatttcattatccagttctgttttgtttttttcttttttaagaacgtaagaaattcgtacatcttcgagagatttctgtcaaatgattaaaaagtcagacgtggaacctggtttcatcagtcaccagtaagcagtccgggccggccctcaggcgctactgcagtccgagtccagaacctttaagctgtgcgtttctgaaagacgaggtctgagcccacttcggggcgcttccccgtccggggcttgcctctaaaagcacctgccggcccggcccccacagttcccgggctctgggagagcggcaccggagctcgcatgccacacacacttgcgggcccgggaagcctcggcttgcggggcggcgggcgagcgggttcgggtgcgcgcgctcgagctcgtgtgtgcgcgcgcgggggctccgggtccaggcggccgggggcgccgtcggcggggctcgcgcagccgcactgggc

SEQ ID NO: 49095 - DNA, 175 bp, Mus musculus
  source 1..175: mol_type = other DNA
ttagtctgttgctatagtaaaatatcaggatttattgggatttaaatttcagaccacggtggtgccacatcccctcctgtgaggctgcacccctgaacccgtgggagagatttgtcactcagtcctctaaacagtcacaaactggaattctctgacttctgattcataaaacagt

SEQ ID NO: 49096 - DNA, 491 bp, Mus musculus
  source 1..491: mol_type = other DNA
acttacttataagactaactttcttacattgtaacatatttataccactgaaacaatccctgcattgatcatggtatttgttgttggatcctatttgatgacattttatttaggattaaaacaatatgtcatctttgtttttatcaatgagatattaaacagtaaaatgctctattttaaaggcaaagattttgggcccataaattattacgtgagactgttgtttagcctaagctgaactttcagccaagaggggatcaagcccgcctcttccaaaaatatctgacccactttttaaagtcatttggaaagatttgagtcatctctaatctaaactgatgtgtgtgtatatatatatatatataaacacatacatatatatgtgtatatatttattatatatagcacaatgttttaatgtatgtatataattgggctaatacagagcccctgtttcaaagccataactcagtagccactatgtagcatag

SEQ ID NO: 49097 - DNA, 305 bp, Mus musculus
  source 1..305: mol_type = other DNA
taaactgatgtgtgtgtatatatatatatatataaacacatacatatatatgtgtatatatttattatatatagcacaatgttttaatgtatgtatataattgggctaatacagagcccctgtttcaaagccataactcagtagccactatgtagcataggtcggacagctctgtccccagagaggccagggtcgccgatcccggccgaggagggaggcggggcgcagcgcgcagccccctcccttctctctgaactcgagctcagcccgccaggccgggccgcttcagggggaggcgccaagtc

SEQ ID NO: 49098 - DNA, 563 bp, Mus musculus
  source 1..563: mol_type = other DNA
tcagcttcaaatttagagatgaaagtagagacaaacagtagaactgagattctctgctgtaagttatttcaattaactcagaagggagcacactttcccactatgcttatattaagttgtgggcaaaagactgacactgtactaaaagtaaaagttttggagtactattctcactactgagtttattaaaattgaactagctctagaaaattagtttcaaagaaaaatgttagaacattatttatcaaaaactgccaattaagttaaatgctggagaagcaggactgcctgcctcagtcaaaggctttatataaactcttaaggttctgccttcaggcatttcaatttataaacatatatacacccatctgcattttatttctttaaagaaggcaataagagcaatagaagagaaagaatctaccttatgtttctttctttctcttacttattactaactaaagcaaatcaaaccactttggagaagttgtcagaaaactcagctgggcagccagtgaccatttgcaagcctcctaggtaatttgtcatattacaaatctggg

SEQ ID NO: 49099 - DNA, 599 bp, Mus musculus
  source 1..599: mol_type = other DNA
gctaccattgctgcgatgtgacgcgggcaaattggcccaacccgcaaaagtggaatgccgaccttcccagtttgaccggctgtctcggcgcatgaacacggccctttcgtctcaaacgcgtttgtaagcgatttttcaaagtcgggtccgcctggcaaactggttttcaaaagctacctatagtctccctggaccgcccacccgggccgagcccacctcccactggcccggcatttgccggccgcgcgggccgggcgaggggcgcgccctgtccagcgttctcccagaggccgcggctcctcgcagcgggccggccccgcctcggctggcgccgcccacggggacgacgcgggcggagacaggcccgggcaggcgcggcttccccgcggcttcccgcccgcgccctcgcccttgcccgccgccgccgccaccgccgccccggttccccactgacgcccgcggcccgcgagcctcgcggacgtgacgccgcgggcggaagtgacgttttcccgcggttggcccgggcgctcggttgccgggcgcgtcggagtcgggtgaggacggggcgtgcccggcgtgcgcgcgcgcccgcccgcctc

SEQ ID NO: 49100 - DNA, 560 bp, Mus musculus
  source 1..560: mol_type = other DNA
cagctgttccaagatagtttacaccagaacaatttattcacagcacttcaattagtgagttgtagctaccattgctgagccgatgtgacgcgggcaaattggcccaacccgcaaaagtggaatgccgaccttcccagtttgaccggctgtctcggcgcatgaacacggccctttcgtctcaaacgcgtttgtaagcgatttttcaaagtcgggtccgcctggcaaactggttttcaaaagctacctatagtctccctggaccgcccacccgggccgagcccacctcccactggcccggcatttgccggccgcgcgggccgggcgaggggcgcgccctgtccagcgttctcccagaggccgcggctcctcgcagcgggccggccccgcctcggctggcgccgcccacggggacgacgcgggcggagacaggcccgggcaggcgcggcttccccgcggcttcccgcccgcgccctcgcccttgcccgccgccgccgccaccgccgccccggttccccactgacgcccgcggcccgcgagcctcgcggacgtgacgccgcggg

SEQ ID NO: 49101 - DNA, 419 bp, Mus musculus
  source 1..419: mol_type = other DNA
cagcagaatccttctggccaacagacactcctgtagaagcaaaaacctcttcaaaaaaggagaattttttattttgaagaaaaataagaacttgtcctaagttcacaaatcacagattggcctaaggcaaatatggttaccagttagaattttaggaatacaaataggtctgtatgctctactaagtcgcttactaataaatgattaaacggagcttttgggtttgtttgtttgtttttctcacacaaaaattccatggcctttggcaatcaaatttgcagaagttaacttatcctggcctggccagattcccgctgagtcctgggtgggggtagggagggtctggcgtgaagccaggccccgccccgctcaaggccccgcccctccgggcccccgccctgcgcccgcgccccagctgc

SEQ ID NO: 49102 - DNA, 457 bp, Mus musculus
  source 1..457: mol_type = other DNA
tgattctactcattcaaaatgcatcagtgtggttttcttttacattttacaagttgaagagttgttgggattaaaggcatgcctcacaactgccttgcttaacagcaatttagtggcagtgaactacatggttaagatactgaattccctttaaccccaggactcgagatgcaggcagatctcttgagttcgagaccagcctggtctataggccaattatatgtattttgctaccaaacaacggaatggggagggaagaaaagattttacttcctgctctaagacagacaaaatagaagttaataattatgtaatttccccagtttaaaaaaaaaatcttttgttagaagccttcgaactgcatctctcatcctgggtccggttggagcatgtcagattggaacctagaactgtagtgcacctccaggcacataggcggcgctctagccggacctct

SEQ ID NO: 49103 - DNA, 353 bp, Mus musculus
  source 1..353: mol_type = other DNA
taaagttagcatacaactcataggctttcttacaactcaattagttactgtgccttcacacaaacatattattgtgtctaaatacatacatataaaaatttaaagatagcatatttaaatttgagagaatgggaattcagctgagtgccatttagtatctattgtatcctaaaggctcaacgcatattcacttgtgaggccactagggctcttctgaaggccaaagtttgctttgtgcctgccaaacccggctcctccggcagcgacggggttaacgcgaggccccgcccccgaggattgtccttgtctcgggccgggagcgccccgagagcaactgcgtctctgcgcctgcg

SEQ ID NO: 49104 - DNA, 273 bp, Mus musculus
  source 1..273: mol_type = other DNA
tggacatttagctcactgccatggattattataagaaagtaatccattttcttatccttgggagagagcttcttttgcatgtgaagaacaaaacccttcattttctaacatgaagtttttcattatttcttgcatacacatagcaatagtgtgtgtgcttaaatgcatttaagtaactaaaaattgttctgatagtttatcagttatggcttggatagaagtgctggatgctcccagatcccaggacatttttaaggaaaggttcctaattaa

SEQ ID NO: 49105 - DNA, 296 bp, Mus musculus
  source 1..296: mol_type = other DNA
agaacaaaacccttcattttctaacatgaagtttttcattatttcttgcatacacatagcaatagtgtgtgtgcttaaatgcatttaagtaactaaaaattgttctgatagtttatcagttatggcttggatagaagtgctggatgctcccagatcccaggacatttttaaggaaaggttcctaattaagctcgcctcagcaagcagccaggctaaccggcatgcggtttttgaatcagcagaaacagaaatcaaattactatcatcttatgctgctagaagctcaaagagagggg

SEQ ID NO: 49106 - DNA, 360 bp, Mus musculus
  source 1..360: mol_type = other DNA
gactagccacataacttgcaagtcacagagcaggcactgggtccttctgacagtttgttgcaaatgcacaggctgcgtgattattaaaccaattagcctaaatactggttttaaaaactgcttgtaatatttaattttctgaacaaagtacacttgctggttaaattgtgtgaaatttctgctcaggtttccaatgggagcctcattctcttgttgccttctgggagcatctgaagcaagcagaggtccgggaactcgctaggagagtgcgcgccctgggggcggtcgggcccaaagggaggagcctctacgtgggacccgccccggaggccggggcgggacatatgctcggggcggaag

SEQ ID NO: 49107 - DNA, 161 bp, Mus musculus
  source 1..161: mol_type = other DNA
cattactgtagtatgtatgataaagttgtatcatgttcttccatggggtgcaaggcctggctcaggccctaggcttaggtttaagatatgacctttgtaatttgggtattttatcataaaaattaccctaacagttttcataaacggcttaaaaaaaacgg

SEQ ID NO: 49108 - DNA, 236 bp, Mus musculus
  source 1..236: mol_type = other DNA
tgacaccctcttatggagtatctgaggatagctacagtgtacttatatataataaataaataaatcttaaaaaaaaagaaagaatagctgagttgtaagccacatatcccttagcagatgatttgtttcctagcttttgttggcatcaaagtttcaaggtctaacccaactagttaagagatgttaaacaaataatccaaaatatcattgtatttgctccacgacctggacaagtc

SEQ ID NO: 49109 - DNA, 292 bp, Mus musculus
  source 1..292: mol_type = other DNA
ccaccgtgacagtgagacctgggtgtccttttaaagagctttggaaaacccagtctccagacaccggtgtaatagtggccactgttttaagagtaagaatagtaataacgattgtccgtggagccgggcatcctgcgctgcccgcagcagaattcggggcagatgggcggggctcaatgccccgcccctagtcgggctagcatgctgctaaaggagctgcgtggtgatggggtctccccaccaactaacttgtggcgggcgggcacgcgctaccagccgacaaaagcgctgg

SEQ ID NO: 49110 - DNA, 290 bp, Mus musculus
  source 1..290: mol_type = other DNA
ttattttcccattggttcaaaatatatgcttgctcttaggagaaaaaggaagacttggttagtaaacgaatctagaagtctctgatttcccaccgtgacagtgagacctgggtgtccttttaaagagctttggaaaacccagtctccagacaccggtgtaatagtggccactgttttaagagtaagaatagtaataacgattgtccgtggagccgggcatcctgcgctgcccgcagcagaattcggggcagatgggcggggctcaatgccccgcccctagtcgggctagc

SEQ ID NO: 49111 - DNA, 329 bp, Mus musculus
  source 1..329: mol_type = other DNA
ttcactacctcccaaatattatcagtatagacttagtaaccatacacaaacggttttcttgtatgacttaatttgtccataattatgcaactccaaaataagacatccagggcggggaatcccagaaagtgcctggcacagtgcagctccgcggaatgcccggcaggcagggaaccctggtgcggtgcagtccagcgcttttgtcggctggtagcgcgtgcccgcccgccacaagttagttggtggggagaccccatcaccacgcagctcctttagcagcatgctagcccgactaggggcggggcattgagccccgcccatctgccccg

SEQ ID NO: 49112 - DNA, 386 bp, Mus musculus
  source 1..386: mol_type = other DNA
gggaccatgctcagcttggcagcagccggcatcctgagcctgggggcctagctgtagcatgcagccccaaggctaaatccagcctgttggaaggactgaccgcttcctgaaggattcactactcttctttacaggaaatgtttaaataattgaactctctaattgggttaaagagatctataagtaaaggaatgagtaaataatatagtaacctttctctatggagatgaagaatttgtttggacaaaagagttcagccaggaagctgaccttcgctccctatcctagatttcactgtgacctaaaaaaaatgttgagtaaaatgtccttataaagacaaaatctattcacacagccctgcttgacaaggctgctctgtagatctg

SEQ ID NO: 49113 - DNA, 477 bp, Mus musculus
  source 1..477: mol_type = other DNA
taaagtatccttgccataaatgggaaatattttaaaatatataagtttattacaatggtcaaaataaaattatagttagacagaatggaacctccatccccaatgtagcaaggagcctttgatagcaggttgctcagcaaacgtttctgagaaaacatttaagatgtgtttcagattttcatatttgaatttttagaaggtcacagacaagcattaatttaaagataatcatgatggcatttgtaaagttacttatgtaaaagttaaaggttttaattgtatgtttctatatggtaaattactccaaaatatagcaatattaccagccttctcagccagctgccaggtgaatcccttagctgggagttcaggaggaggtgggaatttccagtccctccatcaccttctgattgtcacatgtttagataagcacttactaagccttaagtcaacagcttaccacgtggctgtctttga

SEQ ID NO: 49114 - DNA, 347 bp, Mus musculus
  source 1..347: mol_type = other DNA
cctgtactggggcatataaagtttgcaagtccaatgggggcctatgtgtttgctgggccccggcatagtctcacaagagatcctttcaatagaggcacttccaaaatcagaaatttactaaaagcatgaacctttttgagtttgtttagttcaattgcatgactttcatgacgtcatgccacaatgccaggattaaaattgtctaaattaaacacaatggttgagctcatcatcatgatttgttgttttggttttcagatatcagaactgagctgcgggagccagagggagcccactgttacactttaaccagctcttaggcaattagttacctgggactttctccc

SEQ ID NO: 49115 - DNA, 380 bp, Mus musculus
  source 1..380: mol_type = other DNA
ttgatttcagcaacacttaactgttgcattagctaggttttgttgaagaataaaaagcacacacttaagagtgaaaatggccccctgtgtattttaacatttttatttttattagcaccaggtttatgctggacccccatcagaggccagaagaccgctgttactgaaggtctgaaagagctgcaaccgcttttaacggctggagccaatctacggagatcattggatccagcttcaggcccaggcgggggacgggtctgcagcttcgaaacgcaccaggctggtggttatcagtcaactgagaatctccgtcctctgacttccgcactgccctcgcgtcggacgcgagggggcgtggtctcggaggagtcgggcaaact

SEQ ID NO: 49116 - DNA, 363 bp, Mus musculus
  source 1..363: mol_type = other DNA
gctgctgctgttgctgctgctgctgctgctggcacaacaatctactggttaattagcaatttgctgcccacaaatatgcaaatgagtgtatgctttaataaaagagagttcagtgattactgtattttgaaatatatatactatatgcatgtgattctttttttcttaaagaacagtgagtttagatctgcggctgccaaattcttatcttgaatcagtatcttgtagtatttgattttctccaggcagctgagtagagccacaagctgacgaccccatctgcctgttggagcacaaagtaagaaaggctctcatgttaaattaagtcaattaataaatggagacacattaagcaatcaattt

SEQ ID NO: 49117 - DNA, 396 bp, Mus musculus
  source 1..396: mol_type = other DNA
taaagccaggaagagccctctctgtttcagagacttaatggagattattataaggtatataattaatttgagccactgaggctccgaggctgggtggagaaggagaaatctatttttttttctttttcacagcaagtcaatgtgattctacctcaggtagggacagtcacagaaggaaacttgaggtaggctgggttagatgatcaatccacccccccttcagcaaggtttgatgatactgtaagaaaaactctaactttatcaaaggagaccctggatatctgtggagatctagagttgagcttgaactagaattgaaatcttgaagagctgacacggatggacattcagttgttcttttagagaccagtgagtggttaagcttgcatgcaacag

SEQ ID NO: 49118 - DNA, 442 bp, Mus musculus
  source 1..442: mol_type = other DNA
aatgcaatgtctacatgtgatataaattgtgtaattaattgtatttttctatcagaacaaggcttctaaaacccttagatttcctgacaggctctcctttggagcacatatcagctaattttcagcaaatgtctacctccggtggaagtaggaattaaatgatcaaaggccaatgatttcgttaaatttgcccacataataggcttaataaagttgtgatcctaactaaaagcattttcctaccctgattcacagctgatctgagatcaagtataggtggccttgacttgagattggtcctacagggctgaacccctaacttctgggacctgcacagtaatgccatgtagctagtgtcagagtggctaccagcctggcagtgaactgttggggccattgtgtgtcacactgactctggctagccacgtgggcacagccagca

SEQ ID NO: 49119 - DNA, 447 bp, Mus musculus
  source 1..447: mol_type = other DNA
attcttggtaaggaagaaggttttttttatattcgtatatactcaatttatatacttacaaagtatatttattcaattatttaggtttgatctaatataatttgtttaggtgttcaaatgtgtatcatgatttaaatggcagaataatttttgcaaatttgtgtttccacaaactagttttctaacagggaagttgtaagtttgaaaactgttgctatgtcaacatggaaagcgatctttgaattaattctcctaatccgttggatgacttacaacttgttaaaaagacattatcataaagttattgatgttgaagaagcttccaaccggaactgtttggcctccgtcgaaagccacgtctgttttggcctcggtcccgcccccacgccggggaagcgtttccggggtcagggcgctcgggcccgccccgccgcggctgcggcgctg

SEQ ID NO: 49120 - DNA, 274 bp, Mus musculus
  source 1..274: mol_type = other DNA
cacaggccagcccttggcactgcccttgagtcctgggtctcctcattgcctcggagaggggcagccaggccaccaggaggcactattagccaggaacacacagtcctagtgactgcttaggcgtcacagaaacctgcagttgcttgtcagattggaattacaaacttaatgcaaacacaattgcttattaagaatacttctgtacaagtaccagcgcaggccacacgggatgccctgggaggcactcttggctgggaactggaagctaagggtc

SEQ ID NO: 49121 - DNA, 382 bp, Mus musculus
  source 1..382: mol_type = other DNA
ccgttttcaatgcaaagaggaggggcggaaccttgaacaagccgcatcttgctctatgcaccttgctccgtaggtaacaagccattgttctaaataccgcaactatgccaaagttaaaaggggatataaatattatcatatttatatgggatatgattgaaaatgtactcagtctcttgtatatgaagcacatttcaaattataaagctctatgttaaaaacagtgattctgggagacacggagaagcccctctgaagaacttcccggcttcccaggcagtggggagcagcgagcagcccgcagctcggttcccagcagtgagagcctgagaaccccagtctgtccgggcgagaagcgggcggagccgttcccggcttgggc

SEQ ID NO: 49122 - DNA, 761 bp, Mus musculus
  source 1..761: mol_type = other DNA
tcttatagacaatatgtccccgttcagaggatggcgctgagttcgcggacccgtctcctccgcctggaggcggcagcgaggattgcacgagttccagcggcctccccgcggcgcccagcccagcccggcccggctcggccgacccggcaggcaggcggccagcctccccgcgcgcggcgccccgctcaccttccgtccgcgatctcccggatcttgtagatgtcggagaacagctccgtgagcgagcgaaggcccgccatttcccgcgccgggctcggcgcacgcggcggctcccggcccaagctctgcgctcgtgtccccggcctccccggtgcccacccgcacccaggcccgcgggcgccgggacttacggctgatgaggtccggctggggacggcggcgctagcctgacagcgcggaagcgagcgcggtgcagccggagcggcgcgcggggggaggggggagcgggcggaaaaggccgacgcgggcgctccccaacctcggctacgtcaccgtccgcggctcccccggaactgtcgtcagcggtgacgtgaacgcagggcggtgcgggggcgtggctacgcccggccggccccgggagggcatccggggactctgctgggacacaatgcggagtgcccctgggtgcgcggggcaacgggggcggtgcgcccggggcaggacttgcggccgaccgatggccggacgcttgagtcgccgcccgggcgtggccagggtgtgactgcgccccgcctcccgcc

SEQ ID NO: 49123 - DNA, 469 bp, Mus musculus
  source 1..469: mol_type = other DNA
ccttctgtccgagggcaggcagggctggctatgtgcgagaaaattgcaacagaaactgtgatttcatcctgccatacatgtttcctgcatcgccaggaataaaggccagcgaagagctgtccggccagaaggaccggaggtcggagacccgggacaccagcccggcgccatccccgtagtccccgcaggctcagcggcgcgcccgggcgggaggcggggcgcagtcacaccctggccacgcccgggcggcgactcaagcgtccggccatcggtcggccgcaagtcctgccccgggcgcaccgcccccgttgccccgcgcacccaggggcactccgcattgtgtcccagcagagtccccggatgccctcccggggccggccgggcgtagccacgcccccgcaccgccctgcgttcacgtcaccgctgacgacagttccgggggagccgcggacggtgacgtagccgaggt

SEQ ID NO: 49124 - DNA, 483 bp, Mus musculus
  source 1..483: mol_type = other DNA
taatgaaatgatttttctaccatctgatttaactgaacaattggtcctcctgtatcacctatgatatcgtattgtataatgtgactatactaaaactatactattacaaagctttgctagaaaccctgtgtgctgggaattttcagctcagagacctaaaggtcatggctgcaatcgcaaagaggacacacaagctcattctactgagagtcttcatacactcagtttgtgtaactcttctgatacggattaaaaaaaataaaactcttggatattttctaacctgcccaatttttattcttgtttttagccagaagagtcttaataagtataatgtaaaaacagatttgtatgtgcatagtgcttttaagagaagtaagtagttagtcagctctgcttcatgctagttctagttagcactgcctcaggcatccagaagttcatttccacaagacttcgggagatccatttgcatgtggacac

SEQ ID NO: 49125 - DNA, 235 bp, Mus musculus
  source 1..235: mol_type = other DNA
gccgtttcacaatctcagggctcataatgtgatccaatatcctgcactgtttaagttggataatcagatctgtttcttacatggaccaactcaactcacttgtactctagtgcccacttgtgccaatgttaattgggccaagaaagtgactttttttacccccgttgggtataaatacacacagcttttgtctgtctaaacctgccgggagtcacgcccatctaggaatgcgcag

SEQ ID NO: 49126 - DNA, 300 bp, Mus musculus
  source 1..300: mol_type = other DNA
aaccgagctttggtcctctgcaataagtccccagttttatagttgggttaaattaataaaatttttggaggcttgcaaattccaggcctgctggccgctgatggggcagcacgtgaggctgtcccttccggctctgctccgagcccgccactggggacgacagaggaggtggtggcggcggcaccagtacacccagttgtcccgcggcggcgcagcttcgctcggagtcccgggcgcgggagtcagatccggggccgaaggccacacggcgggtgccggttagcccatcgcgggcttatc

SEQ ID NO: 49127 - DNA, 294 bp, Mus musculus
  source 1..294: mol_type = other DNA
atatccacaaattagttgaacagaatgtgttaagcaagagtcttgtaaatctgaagatatcttttcttatacagttgatggaagttagcacagtcctattcgtaataatagcaaattgggactgtacccagggcggaccgcgcccactccacggtggtcgccagtccttcccgggagtgcagacgcccgctgctgcttacccgggctcgggtccctgaagcctggcggcagtgccggcccgcacgcagtttagctaaacccaggctggtttgctggataagcccgcgatgggct

SEQ ID NO: 49128 - DNA, 494 bp, Mus musculus
  source 1..494: mol_type = other DNA
tagcagtctcgaccctgcccgtcgaagggcgagggaccgcgcccgattctatcggggcatccccggaaggggccacgcgccgacccgttccgcaggccggggcgggggagccaccgccccagggcgcgcacacccgagacctagcgctccgcacccgcctcgccgccggggtccgcgtgggagacagcagcggacacgcctaacctgcgcgcacgcgcgcggcgtggttccccccccccccgacccggattcgctcgctcgcgcgcccgagtgccccaccccccaccgccctccggcgtcggcgactccgccggccttcggtaatttccgtgggagacggagccgagagctcggcgcggaccgaagacaggccacctcccctggtcagacccggctttatgtctgcagcgccggcgcgcacgcgcagacgccatgcgctggtccctcctctcttgatgccgcgagagaccaggggatgaacggcgtcggctgca

SEQ ID NO: 49129 - DNA, 755 bp, Mus musculus
  source 1..755: mol_type = other DNA
gcgctggtccctcctctcttgatgccgcgagagaccaggggatgaacggcgtcggctgcagccgctgcaccagccccgtctggccgccaccgccgcgaaaaggagccaccgccgcccgcggccccctccctccccctcccggtcgcgggagcagctcggtgccgaaccagccggcgggccgagaagaggacgcgagctcgcccctccgctcccgcgcacgtcccgccgcccgccggagcagcccgggcgccggcgcccttcctctccgaggacgtgtggcgagccgagcgcctgccccgagggaggtgctcgggctccatggctgccagtgatggagcggtccctgggctcccgctgctgctgccgccaccgccgccgccgccgcgccccggccgcgctccgcgaggatccggcgtctctgcgcgcccgcccgcgcctcgttgctgggctcaccgtaccgggcgccccgccaccgccccgctcgcagccgcgccgcccgggccccagccgcggccagcctttcctcccggagcagccgtcgcgagcccagggggtggggccgcgggccgtggggggaggcccgagcggggccggccgcgccggcaggggaggttggagcgacgctgagctcagggctcgccggcggccgcggcgccgggggtggcgagggccggggcgaccgctcgctccgcgctgcctcggtgcaggacgagcggaggggcttttgcagcggccgtcgccgcgggagttggcca

SEQ ID NO: 49130 - DNA, 489 bp, Mus musculus
  source 1..489: mol_type = other DNA
cgggcggggaccccccaggtgagattctcatgcactggtctggtgttccacgggagcccccgagttcccaggcctcacagccgggagcctcgaagcaggaggtgcttcagaggttgatctacctgacaacctcaggcccaggaccgtccagctccagagctgatgcccgttgataaaaatctgctctttggcgtacggcagtgtcaggccttccctgccacgactgcctttcctctcacattcttgggcaccagggaggggatctgtatgttgcccctcaagatggcccggagtcctctgatcacagaaggccaaatgggattcctggcctctgctgacttgccagacagagcagatactgtctcatcaatgccggggtaaggagagctccagctggatcctgtttattagctttttagcctggcttcacaccagcaaatcaccggaaattggaatctgagggtcagggtttataaaagctgcctgctt

SEQ ID NO: 49131 - DNA, 546 bp, Mus musculus
  source 1..546: mol_type = other DNA
atattaaggaattgcatgctttgacggagcattgcgtcttggcggaattgctagggactaaaatagattgatttttttttctagcaataaatggaagaagacataattactgatgcagttagggtaatgagattttaaggcttacaactcgtttatttgcctaccaaagaaaaatacaatattggtttttttgtacataactgataagctttatgtggagaaaaaaatgtaatattcctatgaatttcattagcatgaaaaaggaattcctgcagcaggattattatccttgcctgggactgggcatgcccagtagctcggcagcttgcgggcagggcgccgcgacgtaagcgtgcgggcaccgggagctttcgggaaccctgacgcgagcgagccttggaggaggtggcgcccaaccccctccctctcctcccctccccgctccgccggcgccgcgggcaccgggagggactgcagcccgggagcgcggggcgggcctatggcgcggccaatcggcgcggcgcctccccgcctatatgtggcgct

SEQ ID NO: 49132 - DNA, 330 bp, Mus musculus
  source 1..330: mol_type = other DNA
catgacatttgcaccttcctggagattagttccaggaacccctgctctagtagatagcaggtcttacaatgattcattacatcttctcacatgtgctaaagggtctctagaccctatcaagcttcacacagtgcaaatactatggtttatgggatcatgaccccccgagttaaatgcacagttttctgtactataaatccaatcagagtttcatcatgaagcataccatgacttcctaaatcccaggtaatcctgtgaattcaaggatcccactgtttcaaagtacattccaaactgggaagactggcggtcacaatcactgcctgtgga

SEQ ID NO: 49133 - DNA, 429 bp, Mus musculus
  source 1..429: mol_type = other DNA
agctcaaggagagctaaatctcggggtcagcatctggatattcaaatattgatttttgtcgcactcagcagggaccagaaagaggcttcttggctcttacaaaacccaacttgccaagtggggtttcctcagacacctaaagggcaggttcttttggggtgtttcccaacagtactacccaaacctggccaggctcagctctgagactcagcgctcgatgcctagggtctagccttcagcttgtcaggaaacagtcagaggtcaccaggctgggtgcggctgcgtccccaccccccacgcgcagcgttcgatctcaggacccggacaccccgggccacggtgcccttgggcttggcgcgcggcgctgtgtcagcgcccgcctctcgcttcccgcctcctgcctcggtggccgcgcagggtaggtagctg

SEQ ID NO: 49134 - DNA, 159 bp, Mus musculus
  source 1..159: mol_type = other DNA
cgaaaagtaaaccaactccctactttgctgtggtgacatttcatctgaggtcacagatttttgaaagagcataaagtatgacagtattgtacaatgagtcttgttatgtcttgagaagatgagaatgttcaaattctagattcctaagtatagaactgg

SEQ ID NO: 49135 - DNA, 407 bp, Mus musculus
  source 1..407: mol_type = other DNA
tataagattagatcacatctcatgaaatactgaggtctcactcgaggcagagcttctctgtctaacagccccaagctagcccacaggctgggcttcaggcgacctcggaggagcctggactgcacggtgtgcgtccgtccgtcccgtcgccgcgccgacctcccctccgcccgggactcaccgcagggctgcttcccgcgctctcctcggcggccgcgagctggggcgtgagctgcaggctcggcgctcgaacccccaaagtcaccggccggccggtccgcccgcctcaccgcgtccccgggcctcccggcggcctcgggctcccgcgggcgtgcgcccgggtttgggtgttcccgccacggccgcgaggtggcgccctggagacgcaaggccgagccccttgcggg

SEQ ID NO: 49136 - DNA, 571 bp, Mus musculus
  source 1..571: mol_type = other DNA
aggcatgcatgtctgatcagatctcgagcattcaatgtgtgccctctgaaagtgatcacacggcttggccgctagtcaagttgagatgggtgcacacttaacaagacttctagacccctagagtcttctcaaccaaggaaaatgaaggccctctccttcctccatttgaagagtgggtatttttccatttacaacagtacttgattttcaaattgttgtttttaaataaataacattaaacccttgggggacaaaggagccttaatttttatcttattgctactgtaagaatgaatgcattccgtcgacaagctggccacactgctgggtcagcagatccttctggagtcgccacggcccgcggggagaggggacgcttcttcccttcccttccgggcgcctcacgggacgcgctcgcccgcggctctccgggcccccgcgcctcagcgcccgggcctcaggcggcctccacggtgactgcgggcgctgacccggaactgctgagcggcgcgggaatcccccgcaaggggctcggccttgcgtctccagggcgccacctcgcggccgtggc

SEQ ID NO: 49137 - DNA, 397 bp, Mus musculus
  source 1..397: mol_type = other DNA
tcctgaaggaattcttgggtgaataaagtctgcttatttaaagtaagcatggatgtgcccaggctcaaccttagacagcgccgggttgagcagtgcatctcagcatcctggagtccactgctgcctggcgccttcaaggtcgccatggcaaccatggggtaccgtggcacgagcgagtcgcctcagctcctcccccgagggaatagcgcgatcctcggccgtgggcaccacttgtgcagcatcagtggcagagcgctcctccggctccagatcggccgggatccggagctcgagcgcgccacgggccagacaggcctcctgggcgcgcgcgcgcacactcactcacactctcaggcgcgcgtgcgcacgcccgcgcgccccgagccgcggagtctcc

SEQ ID NO: 49138 - DNA, 129 bp, Mus musculus
  source 1..129: mol_type = other DNA
acaaatgtaactttctttatatgaagactcgctgacagtgtaagccgactgtctcagacgtgtcatagatctgacatcttaaatgacctagggaaggagctacctcgcggacccagagggtccaggaat

SEQ ID NO: 49139 - DNA, 510 bp, Mus musculus
  source 1..510: mol_type = other DNA
agtatatggtactagttcaggccctaagcatgagaataataatatatggataaattaataggttcttacaactttgtagaccaggctggcctcgaactcagaaatctgcctgcctctgcctcctgggtgctgggattaaaggcgtgcgccatcacgccaggttcttacaacttttaatgtaaaaaaacaaaccttcttgtaggctggcctaatatctgttcgagaaagcttgacctaaacattaataatgaagttaagtctttatgtattcaaattagtcaaaatcatttgctgtagcgcaagttagtggattcttcccagtgatttcactaacatgtgaaatcacattcataaggtcaagcaaggaagccctccctggccttgtttcttaagaaggccttcaggcttggttgttatggcacaaacaaacaaacaaggcctgtaagggtctgaccccgggctttgacagggtcagtccgcactaatttgtccccgcggacgccccgtaga

SEQ ID NO: 49140 - DNA, 217 bp, Mus musculus
  source 1..217: mol_type = other DNA
tgctctaagcaggcggccagttgccaagcacaagacctatggaaatagtcttgtacggtttttgaatgcttagtcaatcacttagagaaacggaactattctttttctgtatggggactcaaggtaatatgtccccgggtgtcccaagctcatcataatgatccacctgcagctgggtgaaccagctccttcagccttgctagaggcaggctcagcc

SEQ ID NO: 49141 - DNA, 237 bp, Mus musculus
  source 1..237: mol_type = other DNA
atacagtgtgcatgtgaaggtcagaaggaaactcaggagcagcatcttttgccacatatgtagcttctaaccaacatgggtatagatattgcattaaactatgaagtaattctatatgctttcacagttaacaccattttgagcaagagaatgagtgtttctgactccatatttggaagaacttttctgcaatgtcttcatataatgcagatatgtgatggatatagttttatcaac

SEQ ID NO: 49142 - DNA, 307 bp, Mus musculus
  source 1..307: mol_type = other DNA
agtttgatcagcctggttccttgtaaaaatatttgtgcgcgcgcgcgtgtgcgtgcttgcgcacatgccggagattcaggtcctcaaagcataaggctttcttaagcagtgaggcttaactctgacattagctctgctaacagctgggaagcctgtgggagggagttctagaatttccccaagtcttcccaatagcaacctcacgattcttgatggtggtctcctctaagatttccacagcctccacctcagagggccctgatggggagggaggagaggcaccctcctggaggctgattggctctgg

SEQ ID NO: 49143 - DNA, 473 bp, Mus musculus
  source 1..473: mol_type = other DNA
ccaccatcagatgatgataatctgcgagttaacaccgaagagaacgaagatatgactgtactctttcttgtctctctcccctaaagaggataaaacaaataaggagcatctacttcaaaatgtccttctcatcccaatttcaatggcccgtggggttgggaagtgcactgccctttggtttccgggaaccgggcagacccattctgaaggatgggctgtgtctggggctgccactggctgtgggaaaccagccccaatgggatgccagcatcctgggctcgggcgcttgccagaggaaagggttaagccgttcccaaggcaaaagctcccacgggccgagggccgcctggccaatggagagggcgcctccgcgtcacgtgacgggcgacccgcagctttgccctccagagcacgtgggaagatattttcccccacggggtcgttctcgcgagaggtgcgacggctctcgcgag

SEQ ID NO: 49144 - DNA, 487 bp, Mus musculus
  source 1..487: mol_type = other DNA
tgcatatttgacaactgaatgcacaaatgaataatatttataaacttacttattttttttgggatatctctgtaaatatcgaatcttcatgaatttttatattacatacagttactcagattgtttttaaaccagcctcacagatgtgattcattacagtggtctcagctttgattacataaatattagaatcctaatagtaagccagcctaattatcttagatctattttgattaaaatattttatggtactttaaaatggttccgtgttaacatacactagtttaggctacagcaggtcaatcttccttttctcctgaaaaaagaagaactttttatcgtcctaagtgcactttagtcagaggtgaagggtagcctgccacacagccttcagatccatggttgtgagctgatgacattgcactcaccaccgcccacaatggtttctgtctcagcagccacaacctctgtagccaccgagctctgc

SEQ ID NO: 49145 - DNA, 367 bp, Mus musculus
  source 1..367: mol_type = other DNA
gaggttgctcatcccaggggctgcgcttaagtagctggccggggaagcgtctggggcccaggctccagcctgtgggtccgccaaagggaatcgctctttctgaaccaaaagctcagagcggagctgaacctcccggaaaatgctctgctctttgctgagggtccttgagacccagttcatctcctgcaccccagggcataggaggtagcaggaggaggagcatctgagccctccagaccctaggaggagtaagggggactgggtcagcagccccagaccaggctgggcaggggcggcgcgtgatcccgggtcccgggtccagggtgctgcgtggcggggaccacggaagatggcgccagctaggcgc

SEQ ID NO: 49146 - DNA, 424 bp, Mus musculus
  source 1..424: mol_type = other DNA
gagaatctatccatgtaataattatgctatttctccaaactagtttaaattattcaaggccattctctgagagccaggaacttcattaaaacgcagcctaattacattagactctaaagacataaattatgtttatataattatagtgtaacatttcctcttgcagtttagaagatgatcaaaggaaggctaaactgaagctttcaatgcctgtggtggtgaagttccagaatctcttgaatattttctccattctgaaaaaagatccgccccagctccgggcgtccctggggcgaccacgcctggggcggcgcgccgggctccggtagccgatcctaccggctggcgctcggcctgccctccgccccgggccgggcccatcccgcagagcccggcgagccgggggaaggagtttccggcggac

SEQ ID NO: 49147 - DNA, 563 bp, Mus musculus
  source 1..563: mol_type = other DNA
aagttaagtgggtaaaaattttctcccttttcatctcccacaaaagatcagtttcagtagtattgtactttgtgtaatatttagataaagcttcagtagaagtgtaacattttaaagtaaatcttgattagacatacattttcttagattaataacttgtgacaactccacttaagcagaggcttggtattagtgttctaaagtttgtccttagaaattgtatacacacacatatatttacacatatatataaaatatacatatataaataaatgcatatataaaataaatatacacacacatatatattctttgtttaacttttaaataatttacttagacccttgtaacttgtataagctgttcaattttctttcccattctgagaaaataaaaatccagccatcttaattttcatatacaaatctttatttactaaaaatattttcaggtttacaccccaacatcttactagtttcttaataccatggcaacctaataacagtgagagttttctcccagggggattactcactgggggaccagtgaatttgtgaggctca

SEQ ID NO: 49148 - DNA, 199 bp, Mus musculus
  source 1..199: mol_type = other DNA
ggattggctggggagtcccagggatttgccagccttcatgcgtgcacagtaaactctttacagacaggattgtactcctccttagggctgggactataggcgcaggcccataccttggctcctttatttttgcagcaaacaaggaggcttcctggactccggccccccccgcccctgccggtggctataagacggagta

SEQ ID NO: 49149 - DNA, 445 bp, Mus musculus
  source 1..445: mol_type = other DNA
agtactattactacaggcacgtgcagaaattaggattcagaatttatatgtttatatacatatgtttacacacaccttttaataagaagtcatccctgaaacattctaggattgtatcctgtttttcccagtagatctgtaaaaattctgcaattattactgaaaatgatcactactttcatatgcaatgaaaagataaggcttctttttttgttggtcctggaactcactctgtagaccaggctggcctcgaactcagaactagtgctggtttaaggcttctttttaagagtccttttaaaaacagcaagaaaagaacagttttaccctcccgggtgagaagagtctagtctttctcttggccgcgagactgcgcatgcgcaccccgcgggggggcggggcgagccctggtcgccatcttggcgcgcgcgggcttccctcccgg

SEQ ID NO: 49150 - DNA, 524 bp, Mus musculus
  source 1..524: mol_type = other DNA
atagggtcttgtgtctctaaacacacacgtaaacaacactatctttaaaaattctaattcatagatatagttatctatttttatgatttttttttaaatacaaatttatagctctcagttttatttatttattatatgtaagtacactgtagtcttcagacaccacgaagagtttttttcagtcaatgttttaaacaatactggctaaaagtgtaacaattaacaattcagaatctcctaaaattgtttttgtttgttccctggctgtcctggaactcactttgtagaccaggctggcgcccccacgccccgctaaaattgttaatgattggggggagggaggttccatttaaaaaacaaacccccaagaatgatagagctccttagaaactactgcttcaagggttggtaacacgtaaagaaattcttgagatttcgcctatcacatactgtagaatttgatgtgtaaattagggttcgcttctaggtttataagtatctgaaaaccctaaatttacaactcc

SEQ ID NO: 49151 - DNA, 402 bp, Mus musculus
  source 1..402: mol_type = other DNA
ttcaaattagtagatgtgtttctataagagtaagtaagaaacagtaatgcttgattttgcattttaaaaatagtctgtaactttaatatttctaataaaataaagaatgttgcagtaaaaaaatacgtgctgtatgtctgtcttatgtgttatttttcaaattaaggtggaatcaggtttacaggaaatcacctgggcctcagttttcaaattcaataaagttttcaaaatgcaaacaaataatagagtggatacttttacttgaaagccattatattttattttattttagtgaaggaactctctatgcagaccaagtttccctggtgctgggatataaagtatcaaattccggatactatccactttctacctcacaaagcggcttcggcctcttcatat

SEQ ID NO: 49152 - DNA, 535 bp, Mus musculus
  source 1..535: mol_type = other DNA
actgagcttgcatgcaagggagttgtgacaaaattgaaattgtgacaaaaatgctggagtctatagaattccctatttttaaaaatacgtagttttcggagcttcaggtgcttaaaacctgcagatttttttcaaaactcctctataaacattattaatattaatgcaccagtaatcatttatcatttgtaacaaatctcaaataaaacatctctgaagaaactttaagatgtttttctgtagactcatattaaatcaatgtttcttcattttcaataaaatactggaaaaaaagaaaaccctaaaactctctagctttttatattccaggaattgcacgtctaattattgtttttgtaaaacaaaactatgaaatgtttccaaagcaatgcattttaatcatcaatattctcaaatactactattgatgttttacaagagaaaaaacgcggtttctagtagaactacaactcccaaaatgcaaagcagctgcagtctttcagtttccgccctgaggcgggaaaagcagtttgta

SEQ ID NO: 49153 - DNA, 624 bp, Mus musculus
  source 1..624: mol_type = other DNA
ggcccaagttaatcatcacctcccctcctctcgcagcgggcccgagagcggccgccgcgctcctccggcctccgagagactgttcccataccgggagtcgaacccgggccgcctgggtgaaaagcactgctgtgacccacctgactagcgtcagcgccgctaccacttgctgcaactcgcgccgccgaagccgcccccgcggccgctgccccacgcgcgggcacgagcccggcggagcgcgcgggcgtggcgggggggaggagcggggccggtgcgcgcccctggaaagttctgagccgaagccgggcgccccgtgcgctcccggaacgggcggctgcgcctttctttctcagccgtcaggtcccgggctgctccccggtcacagagcgggcgggcaagccggcaaagccgagggcggcgccggctgtgggaacggcggcgtgcggccggggctggggggaggcgatcgagcctctcggctgcgagccaggaccgcgggatggagcctgggtcggacgctcggggcccgcggctccggtcccgtcgcgccacctctcaggcgccgcgagtaccgccccgtgggggaggggaagaggcggtgacaaccgcgcgcgcgggttgggc

SEQ ID NO: 49154 - DNA, 684 bp, Mus musculus
  source 1..684: mol_type = other DNA
atttggccttaaaatcaaagtcagattgatgacaaacaaaagaaacctttttaggttttgaagaataaagtataacatcacgtgaatattttaataaaaatttcataccagtaatcacagaatttctttggttgtgacttcccaactctaagcttatccaaaaattgaaaggaatttttacagttgttaaaaaatgggatataaggctgttttcggacttctgtcttagcaaagcagttgtgctctccggtgaagtaaatcctgcaccgagatgaacccctggacgtctgaggccgcagcgccaccccggccccgggcccgggccccggcgggcgggcgggggcggcacccgagtccccggctcctgcctagagggcggccgcgtctccgagagaaccggccccgcaggtcgggcggccccgggcgagcggaggggcgggaggaggccactcgcgggcgcctggcggcgcaagcccgacccgacccgtgacggcggcagctccgcgggcagcccgcgatcccgctcaggtggctcaagccaggacctctcggtctcggcgtcccccccgggtacggcgtttccacgggtggactacggcggccgcgacggcccaacccgcgcgcgcggttgtcaccgcctcttcccctcccccacggggcggtactcgcggcgcctgagaggtg

SEQ ID NO: 49155 - DNA, 329 bp, Mus musculus
  source 1..329: mol_type = other DNA
aaaatctttctgttattattattattattattattattattattattattttggtttttagagactgtcctggaacactctgcagaccaggctggcttctaactcagaaatcatcaacctttcaattctacttaaaattgttttgttaagttggactgtctaacatgaattttcaaaagttcttttagccacgttaatacatagtgaattttatctgtttaaagaaccttacatagccatatatcccttcatataagggttaatgaattctattttatactgttaattttcaaagatggcaattagcatgagttagtggcaatttaaac

SEQ ID NO: 49156 - DNA, 421 bp, Mus musculus
  source 1..421: mol_type = other DNA
acacaaaaacagacttggtaaaacgagttactgagcgttatcacaggaaacttcctggttacttagaagcagcaataagaccattctataggtcactttcatccacttgtgaaacaggcttttcttggtttggaaagccctccatgccggtaacgtgacttccggcgagccaggccgtccgggttccgggctctgctgccggaaaagacctggctgccacgagtgacgtcacgcacaacttggccgccggcggtagccatgatgaaacaaagcttacaagccatgccggatcccccacgggcgtacggcggggcgcgggactcacggccacgccctcggggcgggggcttggctgcgtcacgggtaggggcggggccggagagcgtttcctcctctttcccagcccatgctgcgcgaccgc

SEQ ID NO: 49157 - DNA, 274 bp, Mus musculus
  source 1..274: mol_type = other DNA
acggaagaagacattttcttcaaaggtgggtacgtgccttcaggagcattggccaatacctgtgctcccagcactccagagatggcgggagctcagctacatatggagttctgggtcatcctgagctacttaatggagctatttactacatatatgtaaatgatacgtaaccaccttttaaatcagtgtttgggaaacacattttctggcactgttgcagcaaggggagtccagagccccttggagacagccagtgtcacactgcaaagtgagt

SEQ ID NO: 49158 - DNA, 320 bp, Mus musculus
  source 1..320: mol_type = other DNA
ctcattatattcaagttagcccaactctactgtggggcctccaatgggatcgcctgccacgccattctagggcttcataagcctttgatacagtctgatctttgaaacctttccaaatcaagtatccttgcctgctagcacctagggcttaaggacaaaacacaattgcgtacacaaatgtgaataaaatcagttttgcctctttgaagcctttaaaatgcacaactcattgcaagcaaggtgctattttaaaacaaaggaaagattccctcattttccttgagcggcgctgtggctaagcgaccattggctggcccacg

SEQ ID NO: 49159 - DNA, 329 bp, Mus musculus
  source 1..329: mol_type = other DNA
caactttcactagtgtgaaaagtgatacaaggaggtcagagaaatccttctgttttctagaccagagctgacctgggcagcaggttctcattggacttgcaaactttatatgccccagggagaaggacaaaggttactatttttttccccctaggtactttgattctgtctccttcaaggaagtatcaagttagaaatcagacttgaagaaatttatgtaagtgggcaggccacagagtggggcttggtgcaaggtgtggacaggactcaggttgcggatgtcccgaccctcctagggtgggtctggccatggggaaatccccactggg

SEQ ID NO: 49160 - DNA, 357 bp, Mus musculus
  source 1..357: mol_type = other DNA
aaaacatgtcttaagagaggcttgttccctccttcgagacactgcctgtttgctcccgagctagctagcacagacagatctctcgctctctctcgggcgcgcgcacgcatgcgcgcgcacgcacccactccgcatctttctagaggaagacggctaccacggctcagccctgggcgccgccgccgagacttagcgcgggctctgcgggccttgatgctctccggtcggactcaagctagtcaatgactctaaagagctggggctgctggccccgcccccgcctgccgtttctccgcctcccattgggcgtgggccgagaaggcagggtctggctccccacgccgattggctggcaga

SEQ ID NO: 49161 - DNA, 429 bp, Mus musculus
  source 1..429: mol_type = other DNA
tgtgaaacacattaaactgtgaattgtttggactctaggttagaattccaatgatagagtctgtcctaatagaatgaactctattctctctgagacgacagcagtatttttatataaacggtaatcaaaaaatgcatctcttctaagatggcaagtagtagaagtatttttcctagaccctgagatctccagagactactcaaagggcttatcagttgctttcgtattcagtgctgctgaaacagtactgagatttttcaagaacctactctgaaagtccaagggaagccttgttagagactctctttaccatctggcaagcagcctgcatagccagagggcgagatggacaggccgaagggccaatcaggcccaggctttggcatccccggaaaaggcggggcccttgcgtcacaggttccgcggcgc

SEQ ID NO: 49162 - DNA, 788 bp, Mus musculus
  source 1..788: mol_type = other DNA
aatataagttatttttttattattagatgttttctttatttacactgcaaattttatcgactataagttcttaaatagcctgtaagtctgcagaatcactgggaaattgggctggctcctgattgcccaatcacgataggagcgttccggcgcagctcggtggcgtcgctgcgcgtgcccagtcggggacacgccgtgcaccccggtcctcccgcgtgcggcaaagggcacggcgtagggcggtgctagcccggttaggtgccggtgccaaggtcgctgggccacgctgggtagggtgacaagaaaaaaaagtcttgtccctgttgccgggttagggtgtcgcgctcacccaactgcctgcggggacccagagtggggtgcgagccgcagtctctgagcctcggccgaccgcaaggccgggcgaatggagcgggccctggtgacaacagccagctcgggtgcagaatgggctgggctgcaccgccccaaacgtggccgtggtagcatcatccccgatgcgccgccgcccgggccgcgggggtccgtgtcccgccccgtgaggcagcctagtccctgggatgcgcggctcccgcatgtgtgtgcaacttagaaagtgaccaagcagcccggtccccggcagcaggagcggcgccaaccagcctagcctagcgccgtcccccgcggcgccgtgtccgatccccggcccaggccgcgtttggcggctcgccgctcccagcccgggccggcccctgcggccgctcacaaaacgcggcgagcggaacccgcac

SEQ ID NO: 49163 - DNA, 567 bp, Mus musculus
  source 1..567: mol_type = other DNA
aaaggagctttgcagcttggctaacagctgcttgggattccttcaagccatgagctgacagcaggctcagatgaagccttcgttccagagagctaggcgcctaagctccgatcagatcccaggaaaggagacttcttgctcagcaaactgtccgtggctgcgcccagggaccccagctacaacgtaccttttccccaggcactttcagtgaccctgcacgcagtaatcactgaggggtggctgcccctttccactttgcagacagaaatgcatagaccctcaccacccggtggcgagaatctaggttcccgggtttcgctccggtgcaaccgcaccgccctggctccgccgccgcaagctgggtaagagctccagagctcccgagccaccccgggtgctggcccctgccgggcatgctcagtgcgcgtcctgaaaacgctctcccgggctggggagggggaggctgaagacagtcagcgccttgttccgcgccccctctgcagcctcccgcactgcaagatgctggccaatcaggacccggaggtggggcctcggtcgtcacgccct

SEQ ID NO: 49164 - DNA, 640 bp, Mus musculus
  source 1..640: mol_type = other DNA
gtgaaatgaatacatttttcattctctgtttaaatatatatgtgcatatgaaggacataaattcatgtttccatatgcctttcaatctagttgccaaagattatgcttcacatccacatgtgtgtgagaccatttgtaattcatgattcattttactatcactttctaaatatatatgtacacatttattcatatgaactagaatgaatctacactatataaagataatgtactgttttacatgataatgaatagcctgctaagtaatcttgtaaacttaatagtttcactagaattaaaatgtcaacatgtctatttaattgacatacaaatttccattcttcatataattcaacaattgtcttaattttttaaacaatttttcaactattcgtgaattttactatttgataatttcataacacaaatcctaaaaataaaatacttgactaatgatgacaaatatcactttacaatcaaatttaataatttataaataagttggaggtatatatttatatatttaatttaacaatattgaggacatcaaaatataagctttcttattttcctaagacacatgtacatgtgtcactaaagttaccccaaagtgacatcactgtagatgacctaaagtatt

SEQ ID NO: 49165 - DNA, 238 bp, Mus musculus
  source 1..238: mol_type = other DNA
tgaaaactcttctttatctttatataaacatttttgatatagaaaaaaaactacatgtgaattttcctataataataataataataataataataataataataataataataataataataataattgcccaagccccgcgcgcgcgtgtgtggcagcggcaccgccgctcttctccttcaaagccaagcgcgagagaagtagatgaccagctttctctccctctctggcagatccc

SEQ ID NO: 49166 - DNA, 295 bp, Mus musculus
  source 1..295: mol_type = other DNA
agggacatattcctttaaatgatcgtgaagaaaaagataagatattttaaagtatttttaaagaaaggagccatagccttcatccttctgaaagaaaatctcagcttcccttggcaggcaggcactatgtatgagaagttacctttcaaataggcactgtaggacgatggcatcatcacccttcggcatctctgctttttgctgtgtctcatacagaagaacgaaggatatggcttattaaataattcaagccattaacctgctttacttttattgctatacagtaatgtagaga

SEQ ID NO: 49167 - DNA, 278 bp, Mus musculus
  source 1..278: mol_type = other DNA
gacagctgatctctttagaaatttctagataaagaagtcatcccttgaaaactcttctttatctttatataaacatttttgatatagaaaaaaaactacatgtgaattttcctataataataataataataataataataataataataataataataataataataataattgcccaagccccgcgcgcgcgtgtgtggcagcggcaccgccgctcttctccttcaaagccaagcgcgagagaagtagatgaccagctttctctccctctctggcag

SEQ ID NO: 49168 - DNA, 321 bp, Mus musculus
  source 1..321: mol_type = other DNA
aatcggcacgctgcattcagaaaagaatttacttttgtatcacacctaggcgagctcacaggtacgtctggcctcgaagcaggagtccaggcctggggccacccctccgtgctctccggccaaccagggcgcggggcggggagaggtcaccggccaatcgcgtcccaccgccgtccgcgaaccagccaatggcgtcgaggcggccgggtggtaacgcggtccggcgtcggcgctcggcgctcggcgcgagggggcgtggcccgggcggcgggggcgtggcctgggcggtgcgagcgccgccgcgcggtgtgtgggcggggc

SEQ ID NO: 49169 - DNA, 787 bp, Mus musculus
  source 1..787: mol_type = other DNA
tgggtgcgctctacctatcaggcagcgggcgcggacacacccacaaccgcggtcacccgtgtcgcccgatccccggtcaccgcgtggacaaaaaggtccacgacccctttcgccccgggtccccaggccacgagcacgcgccagacacgagcaggcgccagacacttggcgggtcgcgtggccccaggatgggctcgcaggcagcggtcgcgaggcctggaacgccccgcgcgcgccaaactccgccgcagcggaagaccggagctctggggccgccagcttcgaggtcgcggcgggtccccttccccgtcccctcgcaggataccgccgaggccgacgcggggaccgtggggccctctacgacgcctccatccgggggctcggcgccgggaagcgcaggcccggtcagacgagaacgacgcgcactcaccgtccatggtctccctcaccgcgttcaggttggccgaggccgccgcgcccgggccgctaccgctcgccatggagaggagaggcccccgccccggtgggagaaggcctgacccggaactggagcgcccgccgccgctcggccccgcccacacaccgcgcggcggcgctcgcaccgcccaggccacgcccccgccgcccgggccacgccccctcgcgccgagcgccgagcgccgacgccggaccgcgttaccacccggccgcctcgacgccattggctggttcgcggacggcggtgggacgcgattggccggtgacctctccccgccccgcgccctggttggccggagagcacggaggg

SEQ ID NO: 49170 - DNA, 241 bp, Mus musculus
  source 1..241: mol_type = other DNA
acttaaagggagcatttcagaaagtttaaaagtttgcaataccagagctattaataagtaaattatgctggcccacacaattttttgttcgtaggcctgggggtcgcaatctggaggccacagaagcccaggtccccggcttccaggcacttatgaaaaaaaatatatatatataaataaataaagtgacatctcagcctggatggcaggatgcgagcgagggtagccacggtacttgcct

SEQ ID NO: 49171 - DNA, 476 bp, Mus musculus
  source 1..476: mol_type = other DNA
ttcaaacatgtcaaagcaagacttacatgccaggtttagttttacagttaaggcatcaatttaaagcatttttaaataacttgtacaaactcgaatattctgaatagcacattttagccttcacaaggctttttgtaactcccttgtttaaatacgacacgatttagtaaaatagttatagaactagctatttcagtttctctaagaggaatccgcctctttcctttttaaagggaaaggattgggaccggcttctccctcttggtacattttagcatctcgaaagggaaaaggattcctggaagctacctctcaatgtcggggctaccggaccgttaggatcggtcaccgaagaacctggggtgcgcaggtacccaagctcactccttcccggaagccagtcggaagcggtgcaggctgggagctgtagtccagaggaaagccccgcccaccgcgaccgtcggggaacgaacgcg

SEQ ID NO: 49172 - DNA, 444 bp, Mus musculus
  source 1..444: mol_type = other DNA
tcgtaggaaaaggtgacactgtgatgtaatgtctatttaaatacccggttgaatgctcgggctagaatcaacatggtttaaatattaaaaacttcataattcatccccacattcggcgaaggagagtacttgaaaaaaaatgcttgacatttacagattttattcaggccacagaaaggagggctgttttacgttcctctaaagtacattttgtatacttaaaaaaaaaaatacactcacaacacctaagacgttttcgccctctggcagagaacagttcggagagatctccctcgagctgcgccgcagccctgcgcgcgaagctcctggcccgcgaggggtgcggtcggcccgtcggaggcgggacctcgtgggggctaccctctggccctggggccttgccattggccacaacgctgcccggtgagctggccctgcctcccc

SEQ ID NO: 49173 - DNA, 680 bp, Mus musculus
  source 1..680: mol_type = other DNA
gtttgcaataccagagctattaataagtaaattatgctggcccacacaattttttgttcgtaggcctgggggtcgcaatctggaggccacagaagcccaggtccccggcttccaggcacttatgaaaaaaaatatatatatataaataaataaagtgacatctcagcctggatggcaggatgcgagcgagggtagccacggtacttgcctccacgccccctcgtcaccacgcggccccgcgtccacgcacctggtgcagcagcacattggtgtccggcagaaggtagtgcggccacgggcagaggctgctcgcctggtcccggggctgcagctccagggccgggcccgcgtgcgccccgccgcaggccgagcaagccggcgcgccgcagccgatgcatcccgcaggtagtgctcgcgcacgatcttcaccacgccgcccgcgcgggtcttcttcaagaacgtctttcgcctcgcggcgtgggatcccggccgtcagctaagaaaccgaggcgcggccacgcgcattcccgcttttgcccgctggctggtgaggtcactctcgcgagaaaacacgaaggcgcgttcgttccccgacggtcgcggtgggcggggctttcctctggactacagctcccagcctgcaccgcttccgactggcttccgggaaggagtgagcttgg

SEQ ID NO: 49174 - DNA, 364 bp, Mus musculus
  source 1..364: mol_type = other DNA
acatgatagaaaaaattttaaaatgtcctacaatggtgtgttcattgcacaagctgctgactatctcatgtgcagcataaagtacagcctgtgtttaatggcaagaggcttactggccagtcagccaagcctactcagtgcctattgtcaaggctctggccttcacatacacatatgtgcatatacaagtgcacccagttagataaatattgtacagctacatttaacactgtgacagataccatcatagtatgtagagctagccatctggctacacttgtgtcctttatattaatctattgtgatgctcggtttgcaatattctttattctagatttagaatcgccctgaaacgagtttctgg

SEQ ID NO: 49175 - DNA, 623 bp, Mus musculus
  source 1..623: mol_type = other DNA
aaagtaagtctaaagtttcctcctgctgggcacatgcctgtaatcccagcactcggaggcagaggcaggtggatctgagttcgaagccagcctggtctacatagtgagttccagaaataaaacaaaaacccctaaagtttcctcctttattttggtttttataacgaaggtatcaccgaggatggtggtacattcctataatcccaggtcttggaaaactgtatccatttaaaatgctagaatggaaaaggaattatattttactgttttgttttaaaattacaataatcaaattatccctaatttttttgaaatatgtattctcatatgtaaaagggaagaattaagaagtttaacttctgtgtattttaagattcatatcaagcaatgttgaaatttaaagtgaatattggaatgtattttatcatagaattgtgatcaaatcctgatgagtccttgagattaataatattcaggctttagaccactgcgaatggcccctctccagggggcagtagagtctccaggaggagagaggccagcctgctccgggaagtgccctcgccaagctgggtacgactgccccccgaggcgagatgggaggcgacctcagcttcttggca

SEQ ID NO: 49176 - DNA, 653 bp, Mus musculus
  source 1..653: mol_type = other DNA
catccatccatccatccatctatccatccatccatctatccatccatctatccatctatccatccatccatctatccatccatccatccatccatccatccatccatccatctatccatctatccatccatccatccatccatccatccatccatctatccatccatccatccatctatccatccatccatccatctatccatccatccatctatccatccatctatccatctatccatccatccatccatccatccatctatccatccatccatctatccatccatctatccatccatccatctatccatccatccatccatccatctatccatccatccatctatccatccatccatctatccatctatccatccatccatccatccatccatccatctatccatccatccatccatccatccatccatccatccatccatccatccatccatctatccatctatccatccatccatccatccactatggatgtctgccatcattgaaatgctttgagagatagcatcatcctgttaatagactttggtgcattgctcagcgtggaaaggcccaacactgctgtggtcatgtgttagctcctgtggacataggaaagaagaagcgggggaattcagtccgaatttactcaa

SEQ ID NO: 49177 - DNA, 282 bp, Mus musculus
  source 1..282: mol_type = other DNA
ggcccagggcctcaagcatgctagacaagtgctctaccatttctcaaatagcccttaaacaaaatcattacatttgtcatcctgaaatttagtgggatggcgaatggatttcaaaatgctgtttaaagtcagagtcaacccctctggcttggctgccttaaggctagcaaaccggcctgcgagcacgcggcccggtggcgcatgcgtacgagctcgttgaatgaactaggacacagcttatcagccctcggggctggtgccggccggagcgcgcgggggcgg

SEQ ID NO: 49178 - DNA, 528 bp, Mus musculus
  source 1..528: mol_type = other DNA
gtactccattgtgtaaatgtaccacattctggatatatgaccaggagaggtattgcgggaacttccggtagtactatgatgatttccagagtggttgtacaagcttgcaatcccaccaacaatggaggaagacaagcgctcatttatttaagaaaaaatcgttaagcacatttgtacagtagttattatttgcaacttgtatgaaaatattttcaaggttttttttttttctcctaaataaaatattggcaggagaataaaaatcagtgtggatattctctgcagaatgcatctggtgtcaacagaatgaaatttggagtaatagcagagattttaaaaaggctccaccctccttaagtcaggagccgcacactaggggtgtggccacaagccgattggtgtcactgcaggcacagtgactttgcgcttggggggagccgacatcctggatgtcacgagtcctccaccaggttcataaaactgatgtttaactgagacaaaactcgaattacatagaaatctattctc

SEQ ID NO: 49179 - DNA, 463 bp, Mus musculus
  source 1..463: mol_type = other DNA
ttaaaagaagggctgatcttatcttctggcggttcaccgtacccccacggacccacctgcgatcgggggaggagcccagactaggggaccagccgccagtgcccaggccggtaccctcacctgcggccggaagccggggcagtagcggggaccgcgcagcatctgggaccggtcagcgagctccgtggagccggagggtagtggcgtggaggcctggtggctccgcgtccccgcgggggaagtttcttggcccggaaagcaggccgcaggcagaaggggcgccgcctcccgagagagcccgggacggcgggaaggatgccggctggggcgcatctccccgcccagataattctgaccagagaggtggctgcaaggaccctggcgtgggaccggcccgtagggggtgggccggggcggggctactgtcgagggcggtgacagcgcttgcgacttttgaagttcc

SEQ ID NO: 49180 - DNA, 346 bp, Mus musculus
  source 1..346: mol_type = other DNA
tctgttaacagaagttctgcaactttgtagaactttagtgagcaccactattactaatgattagtcggggttcatctccacagaaacattgtaaatgagaaggagctataccactagagtttattattattgaagttattattattattattattagtagtagtattttggtaaagcacgctaatcagtgggctctgacactcatcttgtatgcactcactatgtggatattttgagtagtttctagtgaaaatgactctacccagtaaagactaaaagccttctttttattatgctggaacagacatgaaatttttattttataattttgtcttctgattggagc

SEQ ID NO: 49181 - DNA, 268 bp, Mus musculus
  source 1..268: mol_type = other DNA
tgcctggcaggtgacaaaggcaaacaggtcacgttaacctggcctacaggagccgccttctgcagcagggaggaagtctgcaaccctctaattagagaatatattattatctgttaaacctgcttttaagtagagttttaaccacaattcctggttgcataagatataattcattaggacttcagatgtcatcggattttatcaggtgatatacctcagcagatttccagtgggaaggcaagtccctcccaacttcttgacaaagttc

SEQ ID NO: 49182 - DNA, 204 bp, Mus musculus
  source 1..204: mol_type = other DNA
agtgaggaacttccagggaggcccataccacagataaaatacttttttcttttggttgcaatgcagcgccaataagcaccaggcttctccttggtcggatagcatggtctccaaacccagattccaggtgtggtattccacagccgttctgtaatttgtaatcatagaaacagaacgttcctcctcttattagagctgacatca

SEQ ID NO: 49183 - DNA, 419 bp, Mus musculus
  source 1..419: mol_type = other DNA
ggctcgcaagatccagtcttggaagctggggactgctgtacctcccatcagtttcaagcctggcccctgcagcgaggccgacctgcagaagtgggaggcctttccttattggggaaaaaaaaaaagccgcatccatttttcagctctgcatgctgtgtgccgttttgaagcatcctgttttaaaaaaaaattatttggctttgagaaacttttacaattccacatttactcagcttaggatgccattagaacattctgatgtgacattggacaaaaatatattctaattgattgagctaaatattttctgaaaactatgtgattgcagatttcagtttgtagcatttttatttataaagttcagtgcaaattccattgaaatgcatgcaaattagagccacgtgaatttgaccaggctt

SEQ ID NO: 49184 - DNA, 224 bp, Mus musculus
  source 1..224: mol_type = other DNA
cacacacacacacacgtgtgcacacatatgtacacgtactttctcaaagatagttgtagtagtcgtctccatctacaataaaataacctagtccaataagaaccagtcagggtttttgttttaggctgctctgagcagtaaagagagtgtgcactcttctcacctatggcccctagctgggacggccacccttgtaattataacttagtttttctatcagatta

SEQ ID NO: 49185 - DNA, 571 bp, Mus musculus
  source 1..571: mol_type = other DNA
cagcggaattttagtaaaataatgaaatactagtaaaatcattaaatactaataatacgaataaaagaaaatattagattggaattttctggtgactgcagtactgtgttgtggtttcctaaccaaaaaaataatcagattcgaggctatacgctagtcacatagtcacgtgagggaccggtgcctttccacttccagagacccggggatggatctccaacagcagcgctctgcactgttagaagcgggtaggtctagagggcgctagccgctctggagtccccgggtgccggctgcggtcagccgagaaggggatcgctttagtgatcagcctcctggagaagcgcctggaggctctgacccactgcggatgggcggacgggcggtgacagtccggtcgtcccccggagcgcgcgggtcagggtggagcctgcagccccgagccgcgtcagcgtttagcatgcaaatgcattccagccctccccgccccgggagcgagctcagcggctccgcagccgcccaccgcctcctgcgcgccgcgccgcccaagcgggcggctctacttaagcgg

SEQ ID NO: 49186 - DNA, 431 bp, Mus musculus
  source 1..431: mol_type = other DNA
ttccctgagaaactttgtctcctaaaatttacagacttaatttttttttttttccttttggaaaatacatcagcaaggacgcaaaacttttgataaagggtttctggcaagcaaaaaggatcccgtgttcgctttgtagttctcctatgtgcatacacatagtgggtttgctaggaactcagtgcagaacagcctgattcggattaaacctagctctattggtcgtcagcactgtcattgctgatctttgcaacattctcagagaggccaggagagggcaatcatttcctggtgttggagactggcctgggccatgtcaagaagcacacatccaccaggctggagtgagttttgcagtaccagtctcacccttccgggacagcgcacgcgcgctggaacagaggcgccccgccccggccgggacaggggag

SEQ ID NO: 49187 - DNA, 447 bp, Mus musculus
  source 1..447: mol_type = other DNA
tgtcaggcttggcacagataagattgtcttaatcactcctgtaaactttggtaatttacttttggcagagaaagataagtcactatgtgactagctatttgagaaaaataactgcaagaggatttatctctgatagaaatactcactacaagattgaattctttttaaaataggagtctcaaagttatttttaagagactcaaatgccaaaggctactgtgccctggccagccctcggcccagttcacctccacgttggcagcgctgacttgggtacaggccacagcagagctgtcagtcctgaggctctcacctggagggaaccacgttggtccaggctcttcctcgtgctgctcgtaaaacccggagcagcggattggcccctggacatccacagctcggaggcggagggagccgcggcggtgcggagcggcgcgcatgctcagt

SEQ ID NO: 49188 - DNA, 542 bp, Mus musculus
  source 1..542: mol_type = other DNA
tataaaattaatagtaaattaaaaacaagtacataaaagcattttaaagttcagcatgttttcaatctcagcattgagcaggctgaggttggtggatctcagagttccaagccagcctgatctacaaagctaaccttaagattttctggggacttttcttattttaggaaaaactcagtatctccaaaaaagtcaaatatttgatagcatttaaaagactccacaaaacgctccaccacccgggagcgaggagtgggggttgtctttgaaaagaaatctcagagttctgtttcataagtaaatgtgattttgaaaaagttatgactcattaaaaaatagtgatcgcaacgtcctggccgcgccctcctcgcggaggtgggtcgggtgcgtcccgccctaaactttccggttttaaccctgggaaaggccaccagggacagcccgggaggctggagccgcctcggtgcgcgcgcccggccagccccttcggccgcgcgcccgccccctcgggcggggacgcgcaggggcaagcgcgcggccgc

SEQ ID NO: 49189 - DNA, 308 bp, Mus musculus
  source 1..308: mol_type = other DNA
tgaaggttcacttcagagccttgtccttctgtgttctttcttcacagcagcagaaggagcttcgatgcaggaatctatgccaccatcagctggaaaagaagcttcaactattcttaccacattaaacgttaattaaaattctattgaatcattggtgagacaacctgcagctctctaccatgtgggttgaccatctttaaaatgtttttttaaatattgtgaaataatttaagggttaagattcttactcacataaaaggaacatttcaaataaccacgagttatttgaagaacttccccacactcag

SEQ ID NO: 49190 - DNA, 256 bp, Mus musculus
  source 1..256: mol_type = other DNA
cctgctgaaggtgggactcattcttcagattctctgagtaaagttcctctccattaaggactggtcatggataataataatagcttaggtgatttatagtaatttataatgtatagaatgttatcttagttttcacaataacccttgcaggtgcataatatctgtacaaagattgctagtagacaacgcaaattgcaacatgcagaagctgtttgttctgaaataaaacatggcacacgtaatgtgagatttatgt

SEQ ID NO: 49191 - DNA, 421 bp, Mus musculus
  source 1..421: mol_type = other DNA
ctgaacaaaacgatcggttcatctgcgtaaaagcatttttgttgaaaaaataaaaagcatggtttcaaaagcagggaatgttatacctttcctctttttagtgtaaatgatttaacagatggtgcacaattttgcttgctcaaaaagccagcgtttagaacacagtggagcatgcaggagatgctcaaagatcttttgtctaatataaaagagcatgaaacccaactctcctttcatggtgaaaagatagactgaagtgaacgcctgactctacagacccaaagcatctgttgttgctttttgcatcatgttccccaagagggctagccattggccgcccctggctgtatgcccagggagggtccccgccgcaggtcccgcccccagcgccccgccccgtcccggggcctcggctaaaacc

SEQ ID NO: 49192 - DNA, 364 bp, Mus musculus
  source 1..364: mol_type = other DNA
tttcgggtgtgtgtattcaaagtcagaacctatcatatgttagtttcttcgttgagtaagaaataaacagctttatgtgagacacaactctggactgcccctcccagcggtcagctggggctgatcaagctgctgaggatccgctgcccagctggacgcctgctgagagccgcaagctccctagggcagttgacaacctgggaaggaggttccctgctcgtggcgctgctcctggtgcttccaatccgcgggggttttttaattagtaaaacttacacacgacagcgatttaaaccgagattgggttgtaaacagcacagaagttggtatgcccttggccgctaggtgccccaagcttagctaa

SEQ ID NO: 49193 - DNA, 350 bp, Mus musculus
  source 1..350: mol_type = other DNA
tgctcatgcccaggccatagttcccttaaagttcacctttggaaacatttgataggcgttgcccatctaagatgcaaatcctagttgtaggatgacctcctctgcaggcacagcaggatcttgctgatagcagaataatgtcaggtccctttaggcaacagtagaagagagatctacagggccttttggtcctttgggtgggcagtccctctgccgaagaagaaatttcgggtgtgtgtattcaaagtcagaacctatcatatgttagtttcttcgttgagtaagaaataaacagctttatgtgagacacaactctggactgcccctcccagcggtcagctggggctgat
